United States Patent Application Publication US 2004/0029129 A1 - sequence listing, part 3

SEQ ID NO: 9264 - DNA, 438 bp, Bacillus anthracis
atgaaacttcatgaattaaaacctgcagaaggttctcgtaaagtacgtaaccgtgtcggtcgtggtatcggttctggtaacggtaaaactgctggtaaaggtcataaaggacaaaacgcacgttctggcggcggtgttcgtcttggcttcgaaggtggtcaaactccattattccgtcgtttaccaaaacgcggcttcacaaacattaaccgtaaagagtttgctattgtaaacttatcaacgttaaatcgttttgaagatggtacagaagtaacacctgaattattgctggaaactggcgttatcagcaaattaaacgacggtgttaaaattcttgcaagcggcgcagtagagaaaaaactaactgttaaagcgcacaagttctcttcaagtgctaaagaagcaattgaagcagctggcggatcagttgaggtgatc

SEQ ID NO: 9265 - DNA, 435 bp, Bacillus anthracis
atgcgtacgacttttatggcaaaagctaacgaagttgagcgtaaatggtatgtggttgatgctgaaggtcaaactttaggtcgccttgctagtgaagtagcatccattttacgtggtaaaaacaaacctacatttacaccacacgttgacacgggtgatcatgtaattattattaacgctgagaaaattcatttaacaggtaataaattaaacgataaaatttactaccgtcacactaaccacccaggtggacttaaacaaagaacagctcttgaaatgcgtacaaactaccctgtacaaatgttagagcttgcaattaaaggcatgcttccaaaaggacgcttaggccgtcaagtttctaagaaactaaacgtgtatgctggagcagagcatccacaccaagcacaaaaaccagaagtttacgaacttcgcgga

SEQ ID NO: 9266 - DNA, 1389 bp, Bacillus anthracis
atgagtgatgtaatggctgatcgtacccctccccctaatataaaaaccgagcaaggagcccctaggtgctatattgattgatccggatgccttaacttcaccatcgggaacatttggaccctggatctttttatccaaacaaaacatccaaaaaatttttgaagttatgcttggattatcggataagggggaaccaatcgacttagtaatgatgacgtcagcgatggctgatcagggattactagaagaagttggtggggtttcttacttagcagaattagcagaagttgttccgactgctgctaacgtagaatattatgcacgaatcatagctgaaaaagcactgttacgtcgtttaattcgaacggcaactcatatcgtgtctgatggatatgagagagaagatgatgtggatggccttttaaatgaggctgagaaaaaaatattagaagtatctcatcagacgaatgcgaaagcatttcaaaatattaaagacgttcttgtagatgcttatgataaaatcgaacttttgcataatcaaaaaggtgaagttaccgggataccaactgggtttactgaattagataagatgacggcagggttccagcgaaatgatttaatcatcgtggcggcacgtccatcggtagggaaaacggcatttccattaaatatcgcacaaaacgtagcgacgaaaacagatgaaaatgtagcgatttttagttctaaagaaggggtgctgaatcaacctttttatgcggtatgcatgtggccgaaaggaaattatggaagcgcaaaaactttgtacgggatccataaacttctgaagattgggcgaaattaacgaatggcaaatgggtagcttttttaatgcgggattctatattgatgatacgcccgggattaaagtaaatgagattcgagcaaaatgtcgtagataaaaaccaagaacagggtcttggtatgatcttgattgactacttgcagcttattcaaggaagtgggaaatcaggagagaaccgtcagcaggaagtatctgagatttctcgtacactaaaagggattgcgcgtgaattacaagtgcctgttattgccttgtcacagttatctcgtggtgtagaatctcgtcaagataaacgtccgatgatgtctgatattcgtgaatcgggaagtatcgagcaggatgctgatattgtagcctttctatatcgtgaggattactatgaccgagaaacggaaaataaaaatacgattgaaattattattgcaaagcagcgtaatggtccagtaggctcagtagagcttgcattcgttaaggagttcaataagtaaattaacttagaacgtcgcttcgaagatgggcatgcaccgccggcataaagatagtataaa

SEQ ID NO: 9267 - DNA, 954 bp, Bacillus anthracis
atgaaaaaagtattatttttaggagacccaggaattgatgactctttagcaattatgtatggattgttgcatcctgatattgatattgttggtgtagtaactggatatggaaatgtaacgcaagaaaaaggcgacaagtaatgcggcatattttattgcaactggcaagacggggagatataacctattattaatgtggcgaaaatccctttatctgtgagatattacaacgtattatccagaaaattcatgggggcggaaggcttatgaaccaattcgaccgccgaaaaatctttctccaaatataaggcctttttgtgagttttttgacattcttgaaaaatataaaggagaattaattatagttgatgctgggaggtcaacgacacttgcaacagcatttattttagaaaaaccattgatgaagtatgtgaaagaatatttatatatggggcggtgctttttttatggctggaaatggtacaccagtcgcagaagcgaattttcatggtgaccctattgcatcacaattagtcatgcaaaatgcacaagaatgtgacgttggtgccgctgaatgttacatctgaagttataatcacgccagagatggtaaagtacattacgaaatattctaaaacgagttttaataaattaattgaaccgatttttacgtattattataaagcttatagaaagttaaatccgaaaataacaggaagtccagtacatgacgttgttacaatgatggtcgcggcgaatccttcaatactggattatgtgtatcgtcgtgtagatgtagatacagtggggattgcaaaaggagaaagtattgcagatttccgtcctcaacctgatgcaaaagccttaaaaaattgggtacgaattggttggtcattacattataaaaaattccttgaggattttgtgaaaatcatgacgtagacataatggtcc

SEQ ID NO: 9268 - DNA, 973 bp, Bacillus anthracis
atgatagataatttttggcgtgatttaccacgaccattttttgtacttgcacccatggaagatgtgacagacgttgtgtttcgtcacgtagtaagtgaggctgggcgtccggacgtattcttcacagagttcacaaattcggatagctactgttcatcagaaggtatgaaaaggctttcgtggacttttaatttttccagaaggcgaccagccaatggtggcacatattgggggagataaccctgaataattccgtcaaaatgagtattggtatggcagaactagattttaaaggcatcgatattaatatgggttgcccagtaccgaacgttgcatcaagaggaaaaggtagtggccttattctacgtccagatgtgcgggcagaacttattcaagctgcaaaagcaggcggactacctgtcagcgtaaaaacaagacttggctttaaagagttaagcgaatgggaagattggttaacgcacatcttcaaacaagatattgcgaacctttctattcatttacgcacaagagaagaaatgagccaagtagatgcacactgggagctaattccggagattaaaaaattacgtgaccgtattgcaccaaatacgctcctaacgataaatggagacatccctgaccgtaaaactgggctggaacttgctgaaaaatacggcattgatggcgtaatgatcggacgaggcatctttaaaaatccatttgcgtttgaaaaagagccaagagagcatagcagtaaagagcatctagatcttttaagactacaacttgatcttcaaggatcaatatgcagaagtattaccacgatccataacgggattacatcgcttcttcaaaatttatgtaaaaggcttcccctggggctgctgaactaagaaatcaattgatgagcacgaagtcaacggatgaagtacgtgcattgcttaataagtttgaggagaagtgttaatgtggt

SEQ ID NO: 9269 - DNA, 1140 bp, Bacillus anthracis
atgaaagatattttatggctcatacaaaaaacgttatctgtacttttgaaaaataaaaaaagtttacttattattagtttgccgataataggaacattaatctccttctcaatgtatgggaatgtagggcaagggacgttaaatatcggggttataaataaagaaaatcaacctatagcaaatgatacggtgaaatttctagaagggttaaatcatgtaaaggtaagtaaaattaaagagtctgaagtagaagataaactcacttccaaaaaacttgatggtgttattacattagattctggtttttctgaaagtgttcgagaagggaaacctgatcatattgagatttcatcaattaaaggggatcaagtaacagtattcataaaatcatatttatataactatattgataatattgtagcgattagtaaagtggcagggacggatcaaagtacgtttaatagtatgtacgctggttatcaaaagaatttatttaaagtaaagtctgagacacttacagatacttcgaaaaataaagatatgacaaaccaaacgatgggttatcttattatgtttatgttattttcagcagcgaacttatcaggatatattttaaaagaaaaagaaaatagaacgtattttaggctcttaacaacgccgatagatgggaagaaattcatattatctaatgtcggggtcaatatgatgatactaacaatacaaattttaattacaatcctattcctaacgaatgtttttcatacgaatatcaatatgcctttcatagtgatgattggcgtactaatgctatttgctttaatagcgattggaatatcattagttcttgttgctttttcgaaaaactcagcatcggcaaatacgatgcaaaatctggtcattgtaccaacatgtttacttgccggatgttattttccatatgacattatgccaaaagcggtacaaaaagtagctgatttccttccgcagcgttggttactagacacgatagcaaaactacagcaaggaattccattttcagagttgtatgtaaacattttaatcttattcgcctttgcggtagcattcttcttaattgcaatttataagtttggaagaaataatgatgcgagaaactttgtt

SEQ ID NO: 9270 - DNA, 138 bp, Bacillus anthracis
ttgacttccgtgaaagggattatcaatagtacgatggactggaaaacaggtggacgtttcttaacgcttggcgttacgcttatcatgtttatcatcgtattcgaacttccttggtttaccattcatgtattcaacagt

SEQ ID NO: 9271 - DNA, 1287 bp, Bacillus anthracis
atgtcttcagtagtagttgtaggaacacaatggggcgacgaaggaaaaggtaaaattactgattttctttctgagcatgcggaagtagttgcaagatatcaaggtggaaataacgcaggacatacaatcgtttttggtggagttaaatataaattacacttaattccatctggtattttctataaagagaaaatttgtgtaatcggaaacggtttagtagtagatccgaaagcattacttgaagagttaaaatacttacacgatcgtggtgtaagtactgataatttacgcgtaagtaaccgtgcgcacgttattttaccttatcacttaaaacaggacgagttagaagaagcaagtaaaggtgataacaaaatcggtacaacgaaaaaaggtatcggtcctgcatatatggacaaagctgctcgtatcggtattcgtatggctgatcttttagaccgtgaagcatttaaagagaagcttgagcaaaatttagcacaaaaaaatcgtttatttgaaaaaatgtacgatacagaaggtttcagtgtagacgaaatcttcgaagagtacttcgagtacggacagcaaatcgcacaatatgtatgtgatacgtctgttgtgttaaatgatgcattagataacaatcaccgtgtattatttgaaggtgcacaaggtgttatgcttgatatcgaccacggtacgtacccgttcgttacatcttctaacccaattgctggtggtgtaacagttggaactggagttggtcctgcgaaagttactcgcgttgtaggtgtatgtaaagcatatacaagccgcgttggtgatggtccattccctactgagcttcatgacgaaattggtcatcaaattcgtgaagttggtcgtgagtatggaacgacaactggtcgtccacgccgcgtaggttggttcgatagcgttgttgtaagacatgcacgtcgtgttagtggtttaacagatttatcattaaactctatcgacgttctaactggtattccaacacttaaaatttgtgttgcttacaaatgcgatgggaaagttatcgatgaagttccagcaaacttaaacattttagcgaaatgtgagcctgtatacgaagagcttccaggttggacagaagatattactggtgtaagatcattagatgagcttcctgaaaatgcacgaaaatacgtagaacgtgtttctgagttaacaggaattcaattatctatgttctcagttggaccagatcgtaaccaaacaaatatcgttcgtaacgtatacgaagct

SEQ ID NO: 9272 - DNA, 943 bp, Bacillus anthracis
tctcttcctgatggaaaacaggagcaagtgttgaaaatatgaaagaaaagagcgcgtattacaaacggtttaaatggatttacttttttattactgattcaacctattatatatatatctacccccctatactatgtatttgccccctataaaccccatgggagataccgaatgtagtaaaaacaaccaaaaagtgtaaccggaaccaaatgtatatatgaaagaaagagacatggagcaaacattgttaccgcttagtttacaattgcattttgatttgtataaaagggtaggaaagaaagatattcgaataggagaagagaaaacatattctttattaagtaaagtggcgaaagtaagccgtgaatatacaacagatgaaaaaattccagaagtcccatatgtagataacgaagtactgtcccatcctaaaaaaatatatacgtcttataatagtagcgaagaagcgcaggtataaaaggttcttccgcaagaatctgtcgtagaagcatttgtatcttttagagaattattaagtgtacaagaggtaacgaatatgtttcctactattgatatcgtctggtatgccgtgaatacaggtttagaggagaagcaaaagaatgatgaggggatgtatgttgctccgattggttttccagcagatatgatttcaagtctaagtggtccttttgtaagtgattcacctcatgaggaacaatttattggtgtgttaaagtcattacaaaatcatgaagatttagcggtgaagctatctagagcgaaaacattagagttgtcaaagcgtatttctttccttgaaaaaaatggggtaaaaacatacggggcagttgtaactggacctaaaggggaagttgaaaaattgatgagccatgaaaaagttagaaacttgaaagtaggtgaagcgagattatggaattggcat

SEQ ID NO: 9273 - DNA, 1557 bp, Bacillus anthracis
atgacgagacaaagctttttaaaaggcgcatttattttaatgatcgccggctttattaccaaaattctgggatttattaaccgtattgtaatggcacgtattttaggagaagaaggcgttggcctttatatgatggccgtccctacatttattctagcaattacattaacacaaatcggtcttcctgtcgcaatcgcaaaatttgtagcagaagcggaagctgtgaacgataaacaaaaagttaaaaaaatattaacagtatcattagctgttacatccgttattagtatcgttttaacaattggaattatgctcctcacacctattttagcaaaaacattattaactgatgaacgaacgtattatccattaatggctattttacctgtcgttcctgttattgctgtttcttctgttttacgtggttattttcaggggaaacaaaatatgaaacctagcgcttatgcccaagttattgaacaaattgtccgtattacaattatcgctatatgtattcaattatttttaccttacggcgtagaatatgctgcagctggcgctatgttatcagccgttctcggtgaagtggcatcattattatttttacttactttattccagcgcgaaaaacatttatctatacgctctggatttttcactactgtaaaggagagcaaaggaacattttattctcttatggatattgcacttccaactacaggaagtcgtttaatcggttccgtttcctatttttttgaacctatcgtcgttatgcaaagcttagcgattgccggcgttgctgcctccgtcgcaacccagcaatacggtatattaaacgggtatgcattcccgctcctttcactgccagcctttattacatacgctctctctacagcactcgttccatctattagcgaggcaatggcaaagaggcagcataaattagtagaacaccgcttacaacaagctcttcgaatctcattgattactggtggatggtcagtcgttatattatatgtatttgcttctcctgttttaactcttatgtatggatcggatagtgcaacagcattcatccagcttcttgcaccttgctttttatttcactattttcaaagtccacttacctctgttttacaagctttaaacttagcacgtgcggccatgatgaatacatttattggtgcaatcgtgaaattaatcgttatttttgtactagcttcaaggccagagtttcaaatgatgggggttgcccttgcaattgcagcaaatatcgtaacagtaacatttcttcattacgctactgttttaaagaaaattacatttaccatttacgcaaaagactatatttttggcggacttgccatcggtatcgcaggctctttcggtttttaccttcataagtatataattttctctcattcacttggcatacaaacattatgggaaatcactttaacaacactcgtttatattgtgctcctcttcagtttcaaactcattcgaaaagaagagttaagtcgtctccctatcattcgaaaactttcatttttgaag

SEQ ID NO: 9274 - DNA, 904 bp, Bacillus anthracis
atgggtaaaattcatccgaagacacgtattggttatgtggaatttaaagtgaaagtatttagagcgtcaaattgctttttatgagaatgtagtagggttagaagtaatgaaacaagaggggaatataagggcatttagttgaaaaaggtggaaaagaacacgttactagttcctgagaaattagaggaacggggtactgcaagaaccgcgtacgactggtatatatcatgtagcctttttagttccgactcgtgagacgtttgcttctgcactatttgatgtgattcgtaataagaatgtaattgatagtccggttgagcaagagggacgttatacatattcaaatgaaattttaccaatttcaaggtttaatagcgcaagcgatcatacgtatagcgaagcgttttatttacaagacttagagggaaatggtattgaaatttatgcggatcgtccgcgtgatcaatggggagatgggccaggaggaagtaccccgcttgatttaaaagaactagcaacgcttgttgattatgagtttgatggattgcctgctaatactgtcgttggacatgtacatttacgaatagctaacgtagaagagtcacatgacttttatgtagatacagtaggctttgaagtgcagcaacgtgaagatgactgcttattcatttctgcaggaggatatcatcaccatataggcgcaaatacgtggaacggagtaaataatccgcatccaccagcacatgcaactggacttaaggtatatacgattgtattaccgcataaagaagcattagatgaagtaaaagaaagattaatagaaaaacagcatgaaatacacgaaattacaaatggatttactgtagtcgatccgagtggtattacagtacagtttgaaatagaa

SEQ ID NO: 9275 - DNA, 498 bp, Bacillus anthracis
atgagcaaagtaatcgaaactaaacaacaagttgtaactgaaatcgcggacaaacttcgcgctagtaaatctacaatcgttgttgactaccgtggtttaacagtttctgaagcaacagaattacgtaagcaattacgtgaagctggcgttgagttcaaagtttacaaaaactctctaactcgtcgtgctgcagaatctgctgaaatggctgagttaaatgaattcttaacaggaccaaacgcaatcgcgttcagtaacgaggatgtagttgctcctgcgaaagtattaaacgacttcgctaaagatcatgaagctttagaaattaaagcgggcgtaatcgaaggtaaacttgtaacacttgatgaggttaaagctatcgctactcttccatcacgtgaaagcttactttctatgcttcttagcgttcttcaagctccaatccgtaaccttgcacttgctactaaagcagttgcagaccacaaggaagagcaaggcgct

SEQ ID NO: 9276 - DNA, 405 bp, Bacillus anthracis
tttaaaaagaaaacaacttcaaatgttatcgttcgtaattctggcgggcttgcagtcgtacttgatgaaggtgtgttaaacgtatcacttttattccaagaaacagaaaaaggtattgatattgatcttggatacgatacgatgtggcatttaattcaggagatgctaaaagattatgacgttacgattgaggcaaaggaaattgttggttcttactgccctggcagctacgatttaagtattcgcgatcaaaaatttgctggcatttcacagcgacgtattcgcggtggtgtcgcagttcaaatttacctttgcgctacaggaagtggttctgagcgtgccgcactcgttcgtgatttttataatctagcaatccaaggagaagaaacatgtatttgtccacga

SEQ ID NO: 9277 - DNA, 686 bp, Bacillus anthracis
atgaaattttgcgatagattattagaaactgtacaaccagtttggggagatgagtcataatcatcccttttgtagtaggttatgggggaatggtaccgtagaaaaagataagtttcagtattatattattcaagattatttatatctgctagatttatgcaagctatatgctatttggcgttgtaaaggcaacgaatccacaagtaatggggaaatttgctgaacaaattgatggaatattaaatggagaaatgacaatccataaacagtatgcaaaaagacttggaatttctatagaggagatagagtctgcaaagccatctgctaaaaatttagcttatacaaattacatgatgtctgtatctcaaaatggcacacttgcagaattaatagcagcacttcttccgtgtatgtggaactactggggaaattggaaagcgtttaaatgatatttcctggagcaagggatcatggattttttggggaggggatttcaggaaatagttcctgacaagtaccgcaacctctggaatttgggtaaaccgatttttttaaaggaaattggcagttggaaagtctgaaaaagagctagaccgattagaggagattttcctatattccagtcgatttgaatatttattctgggatatgtcctatcgtaaggagaatgtggggatttgaggagc

SEQ ID NO: 9278 - DNA, 877 bp, Bacillus anthracis
ttgcgtttggtaacggcgaaaaaagaagaaaaggtatttgtaggtattgtggatgaagaggaagaaaaggtattgcacttaagagaagctgcaaaggcaaaagggagaaaaggttacaatccccattacaatgttagagtgtattgaaagaggaaccgaatgttttgaaaaaattattgggatatggaaaattggggcgaaggaaaaatggaagggacgggcgtactttccgtttaaggaaagaaaaaatattagttccaattccaaggccaagaaaaaaatattttgtggggtggaaaaaaactatcgggagcatgcgatagaaaatgggcggagtagagtcaattccagaaaaatataatgtatctttacgaaagcgccaacgacagttattggaatggatgaaaaaattaatagtcatccccacgcaacaaatgaattagactatgaaggagaattagctatcgttattggtaagcgagggaaacaaataaaaaaagaaaaagcgcttgagcatgtttttggttatcccattataaatgatataactgctcgcgacattcaaaggaagcataaacaatttttcctttggaaaaagtttcgatacattttgtccgatgggaccgtatttaattcataaatcgatgattagtacgccaaatgcgttacacattgaaacgatagtaaatggggaagtaaggcaaacttcaaatacaaataaaatgattttttcaatagaagaaatcatttcaacgataagtaaaggaatgacattagaacctggggatattatccgcaacgggaaccccggctggtgtccgaaaaaggtttcacgccaccgaagtttttacatgcggggggaatgaatggtccttac

SEQ ID NO: 9279 - DNA, 1232 bp, Bacillus anthracis
ataaaaccgaaatttataaaagaaattaaaagtggatatcctaattattttaaaagatgcgattcaaaatttaaatgatggtcaggaagaaggaaacatcattaaagtggtagatgagaagaaccactttgtcggaaaaaggttattattggaaaacaaaataaaagatacggtttggattttatacgagaaaagagagtgaacaaaattaatccatctttcttttgaaaagtaaaataaaatctgccttacataaacgaaagcaattttacaaatcaagtgatacgacagcattccgcgccctaaacggtgaaggtgatggtcttggtggcttaatcatcgattattatgacggttattatgtagtgagctggtatagcgaagggatttatactttcagagatgagattatagctgctctccaaaaagtagcaaactttaaaggtatttatgagaaagaagcgttttgatacgaaagggaaatacatgggaaggcgatgatttcgtaacaggaaaaacgcgtggagttcccgccttatcgaaaaagagaaagggggggaacttcccctggttattttaaatgaccggaccaatgggttggtggccttttttaaaccaacggaaaccggcggaaaaacaaattccgggaataaatatgcgaaaggggaaaacgcggttaaatattgttctcttataacaggggcttttttctggatttgacacgcttggggggggcggattaaaacaacaagggtccaaacttggcaaatccgaaggtttaaggaaaaacaattgagcagtttagtgtaaatgaaattgattatgaagcacaagatattatcgtagaagatgtattcctttactttaaatatgcagcgaagaaaaagatgaagtttgatatggttgtattagaccctccaagctttgcacgctcgaaaaaatatacatttagtgcagcaaaagattataaaaatttattaaaagaaacaattgccattacagaaaataacggtattatcgttgcttctacaaattgtagtgcattcgatatgaaaaagtttaaaggctttattgatacagcatttaaagaaatgaatggtaaatataaagtattagaagaacattctttaccagaagatttccgtacaatcgatcaatttaaagaaggagactatttaaaagtagttttcatcgagaaaattaaagggttaataaaggaaaagggagcttgg

SEQ ID NO: 9280 - DNA, 210 bp, Bacillus anthracis
ttgctttacaaaaggaaggtattaaactacagcatactcttatggaagaagaggaaattaccagttttagctcgtgaagtaaaccagcataaggactccctcctgaaatttaaaaaagctggtcgtgaagaccttgttaataaactgcaaagtgaaattcaggatttagagcgcatattgcccgaagcaattaacagaagaagagctagt

SEQ ID NO: 9281 - DNA, 582 bp, Bacillus anthracis
atgtacttaataaatcagaacggttggattgaagtgatttgcggtagtatgttttctggtaaatcagaagagcttatccgccgtgttcgtcgtacgcaatttgcgaaacaacatgcaattgtatttaaaccatgtattgataatcgctatagtgaagaagacgttgtatcacataacggattaaaggtaaaagcagttcctgtttcagcttcaaaagatatatttaaacatatcactgaagaaatggatgtaattgcaattgatgaagtgcaattctttgatggggacattgtggaagtggtgcaagtattggcaaatcgtggctatcgtgtcattgtagctggtttagaccaagatttccgtggtctaccatttggacaagttcctcagctgatggcgattgctgaacatgtaacaaaactacaagctgtatgttctgcatgtggatctccggcaagtcgtacacaacgattaattgatggagaaccagcggcatttgatgatccaattattttagttggtgcttcagagtcgtatgaaccacgctgtcgtcattgtcatgcagttcctacaaaacaaaga

SEQ ID NO: 9282 - DNA, 786 bp, Bacillus anthracis
gtggaaagaagggctattatctgctcttctttctttatgtataaatggattttgggtagtggaatcagaaggacaaacgattatcactgcaaccttcgcggtgacgtcgttacgataacgaatcaggataaagaagttgtagcaacgtatgaatatgatgcatggggtaatgtagtaaagagtgatacgaaaggtatcgcagtagataatccatttggatatgcgggatacatgtatgataaagagattggtatgtattatttgattgcccgttactataatccagaacatggtgtgttcttatcagtggatcctgatccgggtgatgaagatgatccggttacaatgaatgggtatacgtatggtgataataatccagtgatgatgattaatccagatggtcatttagcgtggtttattccagtcgctgtacacgaggcgagaatcgctgctccgcatgtaggtcgttttgttggtaaacaattggctaaacgtgctataacgcaaccattaaagtacaagaatacgaaagcagtagcaggtaaaattattggatatacaaaacatgggttcaaccaagcgattagtcgtaataacggattaggggtgtcaccaaaggccatcttacatacagttaagtcaggtaagatggttatacaaaaagatcgtggaactattaaatatactagtaaacaagctgtagttgttttaaataagaggggaaaaatcgtaacgacttttgctagaggaacgaaatatacacggaaaggaaaaaataagcgtgag

SEQ ID NO: 9283 - DNA, 2691 bp, Bacillus anthracis
tggaatggtggttttcaaatcgtatctgaaactgaattatcacaattatttgaaaaacaagctcatataaaaccaaatgctattgctgtcgtctttgaagatgaaaagttaacttatgaaaaattgaaaaaaaaattcgaaaaaaattagctcgttttgttaataggcgaaaggaattgggtcctgatcaacttgttgctttagcaatgccgagatctttaaatatggttgtgagcttactagctgttctgaaagctggtgccggatatttgccattagatccagattacccgtcagatcgtatttcattatggctccatgatgcgaaaccgtcatgtgttttaacaaattcagatgtggaaatttgatgtgatgagggaattgaaaattttaattgatgatatagaggtaatagaagaaggtgtgaaaatatagtgaagacaatatagatgaaatggagcgtatgaagccgttaactccttcgcatatcgcttacgttatttatacttcaggctcaacaggcagaccgaaaggcgttatgatacctcatcaaaacgtagtaagacttttaggagcaactgatcattggttccaatttgacgcagacgatgtgtgacggatgtttcattcatatgctttgattttctcggtttgggaaactttggggacctttattatatggagggcgtttagtcgtagtaccacatactgtaagtcgctcgccgaaagaatttttacagcttcttgttaaagaaaaagtaacggttttaaaccaaactccatcagcgttctatcaattgatgcaagcagaccgtgaaaatgaagagattggccaaaaattatctttacgatatgttgtttttggaggagaagcacttgagctaagtcgattagaagattggtatagtcgacatcctcataatgcaccgaagcttattaatatgtacggtattactgagacgacagtacatgttagttatattgaattagatgaaactatcgtctctttgcgagcgaatagtttaattgggtgcagtataccggaccttaaagtatacgtattagataactatttacaaccagtgccacctgtactcagttggagaaatgtatgttgcaggtgccagggcttgctcgtggatatttaggaagagcaggcttaactgctgaacgatttatcgcagatccatttggcaagccaggtacaagaatgtatcgcacaggagacttagctcgttggcgtcatgatgggacgttagattatatagggcgtgcagatcaccaaataaaaattcgcggtattccgaatttaatgaggggaacaaaaacgcgttcataagcaacccccaaaaagtggagcaagtagccgttatggtcgggaaagaccaaccggggggataaacggttagtttcttatatcgtcgcatcaaataatgaaatgattgatacgaatgaaatgcgccaatttgcgtggtggtagtttaccagattacatggttccatacgcgtttgtagtagtaaatgagttgcctttaactccaaacaggtaaattagatagaaaggcattgccagctccagaatttatcgcatcagcttctagtcgtggaccaagaacaccgcaagaagaaatgttatgtgacttgtttacagaagttttaagtgtgccgcaaattggaattgatgatggattctttgatttaggtggccattcacttcttgcagtgcagcttatgagccgcatgaaagaagcgcttggggtggaactaaatatcggaactttatttgcagcacctactggtgctggattagctgaaagacttgaaatggggaatggtcaaagtgcacttgatgtattgcttccatacggatcaggtggagaccaattacaattattttgtgtacacccagcagggtggataaagttggtgctatgcaggacttatggaatcttttaggaacagattatccaatctacgggtgtgcaagcacgtggtatcgctaaaaatgaagaacttccaaaaagtttagaggagatggcggcggattatttaaaacaggaagtaagaagtacagcctcacggaacatatcgtttactcgggtggtcgctcggaagaaaatgtgtccatgcaatggcagcgcaactaccaaatgaagggggaagaagtggaattactcgttatggtagaattctattcgtggtcacttcctaccgaatacggaagcgcctacggaagaagaagcgttaatcgcattattggctctaggtggatatgatccagataacatggatggtaaaccacttacgatggaaagtgcggttgaaatactttcgtaagatggaagtgcattaacaagtcttgaagaaaagacgatttttgaatttgaaagaaacatatgtaaactcagtaggattgttagggaaatatataccgaaagtttataacggagatattttattctttagaactactggtataccagactgggttgatcctatctctcccaaaacgtggggtaaaatatttaaacggggcaattgtgccaatacgatattgattgtagacataaagatttatgtcaaccagggccacttacagaaattggacaagtattagcgaaatatttgcagaataagaaaggggtaagtacagtatgacgaatccatttttgaaatgataattacacatat

SEQ ID NO: 9284 - DNA, 837 bp, Bacillus anthracis
atgaaaaacttacaaagtacaacaaaattgcataacggtgtagaaatgccttggttcggtttaggcgtatttaaagtagaagaaggaccagaacttgtagaagcaattaaatcagcaattaagacaggataccgtagcatcgatactgctgcgatttatggaaatgaagcagctgtaggtgaaggaattcgcgctggtattgaagcgactggaatttcaagagaagaattatttatcacttcaaaagtatggaacgcagatcaaggatacaaagaaacaattgctgcatatgaagagagtttaaaaaaattacaactagattatttagatttatatcttgttcactggcctgtagaagggaaatataaagatacgtggagagcgttagaaacgctttataaagaaaagcgtgtacgtgcaattggcgtaagtaacttccaaattcatcacctgcaagatgtaatacaagatgcagaaattaagccaatgatcaatcaagtagaataccatcctcgtttaacgcaaaaagagttacaagctttctgtaaagaacaaggtattcaaatggaagcatggtcaccacttatgcaaggtcaattattagataatgaaacattacaagcaattgctgagaaacacggtaaaacaacagcgcaagttattttacgttgggatcttcaaaatggagtaattacaattccgaaatcaacgaaagaacaccgcattattgcaaatgctgatgtatttaactttgaattaacgaaagaagatatggagaaaatcgatgcgttaaatgaaaatcaccgcgttggtccagatcctgataactttgatttc

SEQ ID NO: 9285 - DNA, 774 bp, Bacillus anthracis
ttaaagggccattggggtgaaaagttcgcaaatactttaattgatttgaaaatttcagttggtacagataatggctggcaaccaaataaattcataacacgcgctgaagctgcacaactaactgcaaaaacagatatgcttcaatatagtcatagtaatcctttagaaaataaaaccataattattgatcccggacatggtggcgaagatcctggaaaagacacaaagggattacctgaaagtaagattgtactagacacttctttacgtctacaaaaattgcttgaaaaacatacaccatttacagttttactaactcgtaaatctgatactagaccaggacatgatcaaaaaagctctttacaggaacgtgtgaaatttgctaaacaaaatcagggggatatctttataagtgttcatgcaaatgcttttaatggtaatgcaaaagggacggaaacatactactataaatcttctaaatctgaaaaaacaaatcctcatgtggaagagagtcgtgttttagctgaaaaaattcaaactcgattagtagacgctcttcaaacacgtgatagaggcgttaaacatggagatcttcatgttataagagaaaatgacatgccagctgtgttaacggaacttgcttttatagataatggtatcgattacagtaagttatctacagaaaacggaaggcagattgctgcagaagccatttatgaggggattttagattattatgaatggaaaggaaataatgtatctgaatataggctg

SEQ ID NO: 9286 - DNA, 1665 bp, Bacillus anthracis
atgaaatttctaaagaatgatcaagcagccgtttttgctttaggtggccttggtgaaatcggtaaaaatacatatgctgttcaatttcaagatgaaattattataattgacgctggaattaaatttccagaagacgaactcctcggaatcgattatgtaataccagattacacttattttgtgcgaaacgaagataaaattaaaggattattcattacacatggtcacgaagatcatatcggtggaattccttacttattacgtcaagtgaacattccaatttatggcggaaaattagcaattgcactaatcaaaaacaaattagaagagcacggattacttcgtaaagcaaaactttatgaaattcaagaagatgatgttattaaatttaaaaagacatctgtttccttcttccgtacaactcacagtatcccagattcatacggagttgttgtgaaaacacctcaaggacaagtggttcatactggagatttcaaatttgatttcacaccagttggtgaaccagcggacttaacaaaaatggctgaaatcggaaaagacggtgtactttgtctcttatctgacagtacaaacagtgaagttccaaactttacaatgtctgagcgccgtgttggtgatagtattcaagatattttccgcaaagtagaaggtcgtattatcttcgcaacctttgcatcaaatatccatcgtttgcaacaagttgttgaagcggctgttgaaaataatcgtaaagtggctgtatttggccgaagtatggaagcagcgattgaaatcggacaaaacctcggttatattcgctgtccgaaagatacattcatagatgcatctcaattaaatcgcctaccagctaataaagttgttattttatgtacaggtagtcaaggggagccaatggcagcactttcacgtattgctaatggtactcatcgtcaaattcaaatcattcctggcgacacggttgttttctcttcttcaccaatccctggtaatacaattagtgtaagccgtacaattaatatgttgtaccgtgcgggtgctgatgtaatccacggaaaactgtcaaacattcatacgagtggacacggtggacaagaagaacaaaaactaatgcttcgtctaattaaaccgaagtatttcatgccaattcatggtgaatatcgtatgcaacgtatgcatatgaagttagcaaatgattgtggtattccagaagaaaattgtttcattatggataatggtgatgttcttgccttacgttcagatgaagcaagtgtagctggtaaaataccatctggatctgtctatattgacggaaatggtattggagatatcggtaatatcgtattacgcgatcgtcgtatcctttctgaagaaggacttgttattgtagttgtaagcattgatatgaaagaatttaaagttgcagcagggcctgatattatctcacgtggtttcgtttatatgcgcgaaagtagtgatttaattaatgatgctcaaacattaattacaactcatttagaaaaagtaatggaacgtaaaacaacacaatggtctgaaattaaaaatgaaattacagacacattagcaccattcctatatgagaaaacgaaacgtcgcccaatgattttaccaatcattatggaaata

SEQ ID NO: 9287 - DNA, 2334 bp, Bacillus anthracis
atgggaaatcaacatgcaatggatttgtttgaggaagaaaaaaagtttataaaagcgcaagttcttcataccattttccacaacgaagaaaacctctattccgttgtcagtatgaaagtcattgaaacgaatgaaacgtacgacgaaaaaaaagtgatgataaacggtcattttccccgcatgcatgaagatgaagtgtttacgttgacaggacattttaaagaccatccgaagtatgggaaacaatatttagttgaaacgtttaagaaagaattgccgcaaacaaaagcaggtatggcgcaatatttagcgagtgatctatttaaagggataggaaaacgcacagctgaaaaaattgtggcccatctaggggaacatgctatttctaaaatcatggatgatcctgaggctttaaacggtgttgttaacaaacaaaaagcgcaagaaatatatgagacaattgttgaacatcaaggattagagaaagtaatgagttttttaaatggttacggttttggaacgaagctttctattaagatttatcagcaatataaagagatgacattagaagtaattcgtaataacccatatcagcttattgaagaagtggatgggattggatttggaagagcggatgatatcggacgtgcgttagggatatcgggtaatcatgatgatcgtgtacgtgcgggatgtttttatacgttagagaatgtgtcattacaacttggtcacgtttatatgagaaaagatcaacttgtaagagaaacgatgtcacttttaaataatcaagaaggaagagtgacagaggaagacattataagctgtattgaaatgatgcaaagtgaagggaaagtcatcatcgaagaagagcgagtatatttggcatcgttattctattctgaaaaaggtgttgtgaagtctattcgcaggctcatgaatcaggaagaaacaccttcatttcctgaagcagaagtgttaaagacgttaggtgaaattgaagaacaattgaacgtacagtatgcgccgcttcagcaagaagcaattcaaacggcacttcataaaccgatgatgttattgacaggtggaccaggaacaggaaaaacaacagttattaaaggaattgttgaaatgtatgcgtcacttcacgggctatcgttaaatccgaatgaatatagtgatgataatccatttccgatactattaacagctccaacaggaagagcagcgaagcgaatgagtgaatcaacagggcttccagcttgcacaattcaccgtttacttggatggacgccagaagggtctttccagcgtaatgaaacagatccggtacaagggaaattactcattattgatgaattttcaatggttgatatttggcttgcaaatcagctgtttaagtcattgccgactaacattcaagttatcgttgtaggcgatgaagatcaattaccatctgtaggacctgggcaagtattgaaagatttattaaatgcaggtgcagttccaacagtaaagcttactgaaatttatcgtcaagcggaaggttcatcagtgattcaacttgcccatgcgataaaaaatggaacgctcccaccagatttagcgcaaaatcaaaaagatcgttcatttatcggctgcacaggagctcaaattgttgaagttgttaagaaggtttgcgaaaacgctaagacaaaagggtttagcgcaagagatgtacaagtattggccccgatgtatcgtggaccggctggtattaatgtactaaatgaagcgttgcaagaagtgtttaatccgaaaagagaaaagagtaaagaaattgcttacggtgatgttgtataccgaagaggcgataaagttttgcaactcgttaatcagccagagagccaagtatttaatggtgatatcggcgaaattgtttcggtgttttatgcgaaagaaaacgttgagcaacaagatatgattatcgtttcatttgatggaattgaggtaacatatacaaaaccagatttaaatcaaattacacatgcttattgctgttccattcataaatcgcaaggtagtgagtttcccattgtgattatgccgatagtgaaaagttataatcgtatgttacgtcgtaatttaatttatactggtattacaagaagtaagaagttccttattatttgcggggaggaagctgcttttcagtctggtgtaaatcgccttgatgatgcaatgcgtcaaacgactttagctagccgcttgcaagaatcacaaggagaagtacagatggtaacggttaatggcgaagagatggacgtggaaaacatttcaccgtatgatttcatg

SEQ ID NO: 9288 - DNA, 282 bp, Bacillus anthracis
atgccaaaccctaaaactggaacagttactttcgatgtaactaaagctgttaacgaaatcaaagctggtaaagttgaataccgcgttgataaagctggtaacatccacgttccaatcggtaaagtatctttcgaagatgctaaattagtagaaaacttcagaacaattgctgacactttacaaaaagttaagccagctgctgcaaaaggtacttacatgaagaacgtaacagttgcttctacaatgggacctggcgtacgtgtagacgtttctacattagcg

SEQ ID NO: 9289 - DNA, 969 bp, Bacillus anthracis
gtgaaacttattcatttaactcatccacatgaacaaaataaattagaattaccacctactgtaatggcattaggattttttgatggcattcatttaggacatcaatgtgtgattcgaactgcgaaacaaatagcggatgaaaagggatataaaagtgcagtgatgacattttatccgcatccatctgttgttttaggtaaaaaagaagcgcatgccgagtatattacaccaatgtgtgataaagaaaaaatagtcgagagtttaggaatcgatatattatatgttgttaaatttgatgaatcatttgcaggcttattgccgcagcaatttgtagatgattatattattggtttaaatgtaaagcatgtagtagcagggtttgattattcatatggacgtttaggaaaaggaaagatggagactttaccatttcatgcaagaggggagtttacacagactgtgattgaaaaagttgaatttcaagaagagaaagtaagttctacagcattacgaaagttaattcgaaatggcgaaatggagcaaattccatctattttaggtagagcatatacggtaggaggaacggttgtacacggtgataaacgtggacgtcaaattggtttcccaacagctaatgtaggtttaagtgatgagtatctattaccacctgtaggtgtttatgcagtgagattacaagttcacggtgaatggtacgacggtgtatgtaatattggatataaaccaacttttaaagaagatgagcgtcaactatctattgaagtgcatttatttgaatttaacaacgacatatatgatcaaaatgttacggtagagtggcatatgcgtataagagaagagaagaaattcaatggcattgatgagttagttgaacaaatcgcaaaagataagaaaacagcacaagaatattttgcgaacgaaaagaatatacttgctttttcaaatgaaaag

SEQ ID NO: 9290 - DNA, 392 bp, Bacillus anthracis
attacgaatctaaaagaagaaaagcaaaacgcagaatatgcaggatgtttatttcacttaaataacaaaaccattcgttttagaaaatcaaaaattactcctaataaaattggtcaatttgtttctttttgggagaaagatgacggaatatgcaaaatcaagccagttaatcttatgacgctgctcctgacttattaattattacttgtatagatgataacaaactaggacaatttattttccctaaagatattcttcttaaagaaaaaatcttgagaacacaaaatcaaaaaggcaagatggctatgaggatttatccgatctgggatacccctgttagcaaccaagctaaaaagagccaaatgtggcagcttcagtattttgttgattta

SEQ ID NO: 9291 - DNA, 1167 bp, Bacillus anthracis
atgaaaagtcctaattttcaattaagtttacaaacttctaatctaattatcggttttatggtgtgggttattttatcatcattaatgccctatattaaagtggatatcccattaactgcgggacaaatttctatggtaacagcagtacccgttattttagggtctgttcttcgtattccaattggttattggacaaatcgtttcggagcaagaaaattattctttattagttttattctattattatttcctgttttttatattagtgttgccaattctatgatggatttaattattggtggattatttgtaggaatcggtggtgctgtattctctgtaggagtaacttctttaccaaaatactttccaaaagagagtcacggttttgtaaatggtatttacggtgtcggtaacgctggaacagcaattacttcatttttagcgcctgttatcgcaacttcagttggctggagaacgacagtacagtgttatttagttttacttgcagcgtttgcacttatgaactttttattaggtgatcgtaaagagaaaaaagtgaatacaccactaatggaacaaataaaaggtgtatataaaaatgagaaactttggtttttatgtatcttttactttttaactttcggatcatttgttgcatttaccgtatacttaccaaactttttagtatctcatttcggattagagaaagtagatgcaggtatgcggacagccggattcatcgtactcgcaacaattatgcgtccgattggtggttggctcggtgataaatttaacccatttaaaatattaatcttcgtatttatcggtttaacactttcaggtattattttatcatttatgccaagcatgaacgtatatacattcggttgcctattagtcgcattttgtgcaggtatcggtaatggtacaattttcaaactcgttccgatgtatttctcagaacaagctggtattgtaaatggactcgtttcagctttaggcggacttggaggattcttcccgccactaattttaacattactgttccaactaacaggtcattatgcaattggatttatggcgttatcagaagtcgcacttgcttgtttaatcattacagtatggatgtatagtcaagaaaagctgttagtgatgttaaagaatcat

SEQ ID NO: 9292 - DNA, 1042 bp, Bacillus anthracis
tacaaaaaaacgtttatctgtactttttgaaaaataaaaaaaagttacttcatcattagttggcggataataggaacattaatctctttctcaatgtatggcaatgtagggcaagggacgttaaatattcggggttataaaaaaagaaaattcacccttatagcaaatgattgcgtggaaatttttgggagggtttaatcctggaaggggtaagaaaaataaaaggttctgaagtaggaagataacctcactcccaaaaaacctggatggtgttactacagtagaatctgggtttttctgaaaggtgttggagaagggaaaacctgatcatatggagatttcatcaattaagggggatcaagtaacagtattcataaaatcatatttatataactatattgataatatggtagcgattagtaaagtggcagggacggatcaaagtacgtttaatagtatgtacgctggttatcaaaagaatttatttaaagtaaagtctgagacacttacagatacttcgaaaaataaagatatgacaaaccaaacgatgggttatcttattatgtttatgttattttcagcagcgaacttatcaggatatattttaaaagaaaaagaaaatagaacgtattttaggctcttaacaacgccgatagatgggaagaaattcatattatctaatggtcggggtcattctgtcctgatactaacaatacaaattttaattacaatcctatttcctaacgaatgtttttcatacgaatatcaatatggcttttctaaaggatgatttggcgaactaaaggctatttggcctttaataacgaatggaataatcattaagtccttggttgctttttcgaaaaactcagcatcggcaaatacgatgcaaaatctggtcattgtaccaacatgtttacttgccggatgttattttccatatgacattatgccaaaagcggtacaaaaagtagctgatttccttccgcagcgttggttactagacacgatagcaaaactacagccagggaattcccttttc

SEQ ID NO: 9293 - DNA, 432 bp, Bacillus anthracis
atgctagatattcaacaaattaaagaaataattcctcatcgctatccatttctactagtggataaagttttagaagtagaagaaggaaaacgtgctattgggataaagaatgttacagctaatgaagaattttttaatggacattttccagattatcctgtaatgccaggtgttttaattgtagaggctttagcacaggttggtgctgttgctatgttgaaaaaagaggagaatcgtggtcgcttagcattcttcgcaggcattgataattgccgttttaaaagacaagtccgtccaggtgaccaactacgtttagaagttgaaatgacgcgtgtacgtggagcgattggaaaaggaaaagcaattgctactgtagatggtgaaattgcttgtgagacagaaataacgttcgctcttggagataaaaaagaa

SEQ ID NO: 9294 - DNA, 2076 bp, Bacillus anthracis
atgtcagattacctcgtaatcgtggagtcgccttctaaggcgaagaccattgagaaatatttagggaaaaaatacaaagttgtcgcgtctatgggacacgttcgcgatttacctaaaagccaaatggggatagaagtaaagaacaacttcaccccgaagtatattaccattcgtggtaaaggtcccgtcttaaaagacttaaaatcagcggcaaaaaaagcaaagaaagtctatctcgcggccgatccagaccgcgaaggagaagctattgcttggcatttagccaatacgttaaatgtggacgttgaatcagattgccgagttgtgtttaatgagattacaaaagatgcaataaaagaatcattcaaacatcctcgtgcgattaacatggatttagtagatgcacaacaagcaagacgtatactagatcgtcttgttggttacaatattagtcctttattatggaagaaagtaaaaaaaggattaagtgcagggcgcgtacaatcggtagcagttcgtttaattatcgaacgtgaaagagaaattcaaagtttcgagcctgaagaattctggacaattaaaacagaatttgtgaaagggaaagacacatttgaagcaagtttttacggtgtagatggtgaaaaagttcaattaacgaatgaaacacaagtgaatgaaataattgaacagctgaaagataatgcgttctcagttgaaaatgtaacgcgaaaagagcgaaaacgtaatcctgcattaccatttacaacatcttccttgcaacaagaggcagcgcgtaagttaaacatgcgagcaaagaaaacgatgatgcttgcgcagcaattgtatgaagggatcgatcttggaaaacaaggaactgtaggtcttattacgtatatgagaactgattcaacacgtatctcagaaacagctcaaacagaggcacgtacttatattactgaggcgtatggtacggaatacataggagcagaaaagaagaaagaaacgaagaagtcgaacgcacaagatgcgcatgaggcaattcgtcctacttcggtaatgagaaagccagaggaattaaagagtttcttaagtcgtgatcaacttcgattgtataaattgatttgggagcgatttgttgcaagtcaaatggcgtctgctataatggatactgtgacagcgagactcattaataacaatgttcagttccgtgcaagtggatcggttgtaaagttcccaggatttatgaaagtgtatgtagagtcgaaagatgacggggctgaagaaaaggataagatgttgccacctttagaagtaggggaaaccgtattttcgaaggatttagaaccgaagcagcactttacacaacctccgccgcgctatactgaggctcgtctagtaagaacgcttgaagagcttggaattggaagaccgtcgacttacgtaccgacacttgaaacgattcaaaaacgtggatatgtcggtttggataataaacgcttcgttccaactgaacttggtgaaatagtaattgaacttattttagagtttttcccagaaattattaacattgaatttactgctaacatggagcaaagcctcgatgaagtagaagaaggaaatgcaaattgggtaaaaattgttgatgatttctacgtagggtttgaaccgcgtttagaaaaagcggaaaaagaaatgcgtgaagtagaaattaaagatgaaccagctggggaagactgtgaattatgtaatcacccaatggtctttaaaatgggtaaatacgggaaatttatggcttgctcgaatttcccagattgtcgtaatacaaaaccgattgtgaaagaaatcggtgttacttgtccgaaatgcgataaaggtcaaattattgaacgtcgtagtaataaaaagaaacgccttttctatggatgcggtacgtatccagagtgtgactttgtatcttgggataagccgattggccgtaaatgtccgaagtgtgaaggtatgctagtagagaagaagttgaaaaaaggcgtacaagtacaatgtatttcgtgtgattatgaagaagaacaacaaatg

SEQ ID NO: 9295 - DNA, 507 bp, Bacillus anthracis
gtgaagagaattgttacagcaacagttcgaaatcaaagtggtgtgttaaaccgaattacaggtgttatgacacgaagacattttaatattgaaagtatttcagtaggtcatacggaatcatcggacatatcgcggatgacgattgttgtacacgttgaaaatgaacagcaagtagagcagttaattaaacaacttcataagcaaattgatgttttgaaagtatcagatattacagaagaagcgatgattgcaagagaactcgcacttattaaagtagcaacatcagtagcaagagcagaattatacagtttaattgaaccgtttcgagccgctgtaatagatgttgggaaggattccatagttgtgcaagtaacaggtacgcaggaaaaagtagaagcattaattgaattacttcgtccatacggtttgaaagaaattgcaagaacaggggtaacagcctttacgcgtagcatgaaaaagcaagataagcaagtaatgttaattcaa

SEQ ID NO: 9296 - DNA, 2086 bp, Bacillus anthracis
aaaacgatggatcgtgatatcgtgaaacatgcgatgaaacaatccgttgcgaaattgaatccgaaagttatgataaagaatccgattatgttcgttgtagaaattgggtttgtcattacgttcattttatcgtttcttcccagtcattctagtagtataccaggaatggtttaatataactgtttctctcattctatttattaccatttttattggggaacttggcagaaagctttagcaagaggttcgtgtaaagccgcaagccgatttcttataaagcagtcgaagaagagatgtgtttgcaaatgtgtaaaaagaaaaagggagaaatggttcaagtttcagcaactgaccttagaaaagatgacgttgttattgtaaagcaaggtgagatgattccaagtgatggtgaagtcattaaaggattagcgtctgttgatgaatctgcgattacaggggaatcagcacctgtaataaaagaagcgggcggtgatttttgttccgtaacaggcggtacgatgggtgtaagtgatgagattacgattgtcattacgagtaatcctggtaaatcccttattgataaaatgactttgttagcagaaggaggtgctcgtcaaaaaaacaccgaatgagattgcttttaatacagtattaacgagcttaactcttatttttcttaatcgttgttgtgacgctgccgaatttttacaaattatttaggattttcaattgatacagctgtacttgtcgcgttgttaagtttgtttaattccgacgacaattgggtggggaaattccggcaatgggtaatggccgggatggaccgcgttcacaaagtttaatgtgttagcgatgtcgggtaaagcagtggaagctgcgggtgatattaatacaattattttagataaaacgggtacgattactttcgggaaaccgaatggctcatacatttattacctgtaagaaatgaaacgattgagcaagtttggaaagtgggcccgctaatagtttctgtttttagatgaaacacccagaaggttcgatctgtaaattgagtatgtgcaaggcgaaatctttatcatataatagaggaacttgcggaaacagggcgagtcattccatttaaagcagaaacgagaatgagtggtgttgattttacaggacggaatgaaagtgagaaaaggtgctgtaggtagcgtgattgaatgggttaggtcacaaggtggaacaattccgaaagatgtaaatcaaaaagcagatttcatttcaaaagagggcggaacaccacttgtagttgcagtagataatcgtatttacggtttaatctatttaaaagatacagtaaaacctggtatgcgtgaacgttttgaacagttgcgtcaaatggggattaaaacggttatgtgtacaggggataaccctttaacagcagcgaccattgcaaaagaagctggagtagatgaatttgttgctgagtgtaaaccagaagataaaattgcggttattaaagcagagcaagataaggggaaacttgtatcgatgacaggtgatggtacaaatgatgcacccgccattaccgcaagctgacgttggattaacaatgaatattggtaccgacagctgcgaaagaagcagcgaatatgattgatttagattcgaacccgacaaaaattattgaggttgtaggaatcggtaagcaattattaatgacacgcggtgcgttaacgacgtttagtattgcgaatgatatcgcaaaatatttcgctatcattccagcgatgtttacacttgcgattcccgcaatggaagcattgtacattttatgaaactaacatcaccgctgtcagcgattttatcagcattactatttaatgcagttattattccgttactcattccgttagcgatgaagggtatagcatataaaccgatgagttcaaatgcactacttggccgaaacctacttatttatgggcttggcggagtgattgtaccgttcattggaattaaagtaattgatatcattgtcggattgttcatataaggaagaggggaaaaagatggcgaagaaacaaagtatactgtc

SEQ ID NO: 9297 - DNA, 546 bp, Bacillus anthracis
atgtcaacaaatgtagttactgtagaaagtgtagaaaaaacgtatgggaaaagaaatgagaatcagtcaaaagcattaaggggcgtatcattaaatattaaggaaggggaattcgtcgggattatgggtccttctgggtctggaaaaactactttacttaatgtgattagtacattggatcaagcgacaggtggtagtgtgacaatagctggtacaaatattacttctatgaagggcaatgcgttatctgattttcgttctcaaaaattaggtttcatttttcaagattttaacttacttgaaaacttatcaatttatgaaaatatcgctttaccactttctttgcaaggcgtaccttcaagtgagattactggaaaggtgaatgaggttgcgaagaagttagggattactgaaattttaacgaaatatccaactgctgtttctggtggacaaaagcaaagaacagcggcagcacgagctttagtacataatccagcaatcgtattagctgatgaaccgacaggagcgcttgatagtaaaaatgca

SEQ ID NO: 9298 - DNA, 2136 bp, Bacillus anthracis
aaagaacaaaaagggaagaagccgaagacatatatatctattcgaataaatatcatggtcccttgtatatttttactattctcagctattattatgcagctatgaaaagtacaaatcgttgagggagaggcttataagaatctagtggaaaacagtccaaatgcgacaactagcataccagtttcgcgtggacaaattttatatccagaaaggaaaaccggcggttataataaatctcttcgcacaattacacatacacaagtgaaaagggattacgagtgacgatattttaaaaacagcaaaagacttggcgaaagtacttgaaatgcctgaacaagatattaataaattaactgatatcgataaaaagatttttggatgcagttgaatacgaaacgtgcggatacaaagattactaaaaaagatatagaaaagtttaaagaaaagggaatagagggaaaagagttagataaaaaaatagaagatttaagacgaagtcgcgttacagaagtagaattgggtgaattaacagaacaagatttaaaggtgttagctattaaaagtaaaatgagttcaggttatcaactaacaccacaaattatttaaaaagaatgtacagatgaggagtatgcacgggataagtgaaattcttgcgatttttccaggagtagatgcaacggttgattgggaacgtaattatgtaaatggtaatttgtttcgttccgtattaggtaatattacgagtagtgaagaaggtctgccgaaagaaaacttagattcttatttggtacgcggatataaccgtaatgaccgtgtcggaaaaagttatattgaacaacgatatgaagatgtattacatggcacaaaagaagaagtgaaaaacattactgataaatcaggaaacattataaatacagaagtaatcgctaaaggaaaaagtggtaaaagtttaacattaacgattggattcgcaattacaaaagaaagtggaagaaagtatagagaaaaacttgagagcttttaagagtatagagccgctactcgatcgcagcttttgtcgtcatgacgaatccaaataacggacagattttatctatggcaggcaaaaagattgtagaaaaagaaggagtactagagattgaggatttggcattaggttaaatctacaacttcgtatgagctaggctctgctgtaaaaggtgctactttattaactggatatgagacaggagcaaatacatccagggaaatcaattttatgatgcaccgatgaaatttaaaggtacacaagctaagaaatcgtggaatgtatctggatttggtaatattaatgatttacgagctttacaagtatcttcgaatgtatacatgttccagacagctttaaaaattgcgggagttaattacgtaccaaattgctcattggactattaaacaaggagcatttgagacgatgcgctattatttcgagcaatttggtttaggagtcccaacaggtatcgatttacgcgaatgaaataattggacaagactagaaaagtagatagtcaacctggatttttactagacttttccatcggtcagtatgatacgtatacgccgttgcaattagctcaatatatttcaacgattgcgaatggtggttatagaatgcaacctcaaattgtacaagaaatacgagaacaatccatttaaaaaaagttggtgaaagttaatcgcctcctaaaggccgtaggaataaatccggattgaatgaagacagaaattattgattcaataaaaaaaaggtttatatggggattccccaaaggggaaggaaactggcgtaaagcatttcaaaaatgctccatataaaccagcaggaaagacagggacagcccaaactgtgtatgggtggagatgatcccattggtagaaatgcaaaaggagaacgtatggaaatgttacacttaacgttagttggatatggctcatatgataatccagaaagtagcgttttctgtagtagtcccatggcttcataatgataaaagtggaattaattctataatcggaaaggaagttttagatgtatactttgatttgaaaaagcagcgtatgcatgatgaagctgctagtacagatacttcgaatcaa

SEQ ID NO: 9299 - DNA, 783 bp, Bacillus anthracis
atggctggttctacattaacggttaaagacttacacgtatcaattgatggcaaagaaattttaaaaggtgtaaaccttgaagtaaaaggtggagaaatccacgcaattatgggacctaacggaacaggtaaatcaactttatcttctgcaattatgggtcacccgaagtatgaagtaacagaaggtagcatcatcatcgacggtgaagatgtattagaaatggaagtagacgagcgcgcgcaagcaggtctattcctagcaatgcaatatccaagtgaaattagcggagtaacaaacgctgacttcttacgttctgcaattaacgcacgtcgtgaagaaggcgatgaaatttctcttatgaaatttatccgtaaattagataaaaacatggaattcttagaaatggatccagaaatggcacaacgttacttaaacgaaggtttctctggtggagagaaaaaacgtaacgaaattcttcaattaatgatgatcgagccaaaaatcgcaatcttagacgaaatcgactcaggtcttgatatcgatgcgttaaaagttgtatctaaaggtattaacgaaatgcgtggcgaagaattcggttgcctaatgattacgcattaccaacgtttattaaactacatcactccagacttcgttcacgttatgatgaacggtcgtatcgttaaatctggtggccctgagcttgcacaacgtctagaagctgaaggttacgactggattaaaaaagaattaggtattgaagacgaaacaacagagcaagaagcg

SEQ ID NO: 9300 - DNA, 926 bp, Bacillus anthracis
ggaagatatgtgccgaaaaaagttgtcacaaatccaggatttagaaaaaataatggatcctcccgaggaatggattcgtacgagaacaggtattgcggaaagacgcattgccgatgatacaatagatacttcatatatggccgtagaggcttctaaaaaagcacttgaagatgcagggattagcggagaggatatcgatcttattttagtagcagttagtaacgccagatcgtgcttttccagcagtagcttgtgttatcaaagaagcaattgtccgcaaaacatgcagctgcaatggatttaagtgcagcgtgtgctggttttatgtacggaatgattacagcgcagcaatttattcaaacgggaacttataaaaatgtactagtagttggtagtgataagctatctaaaattgtagactggaacgatcgaaatacagcagtactatttggagacggagccggtgcgatcgtaatgggagctgtttcagaaggtaaaggcgttctatctttcgaattaggagcggacggaagtggcggtaagcatctttatcaagacgagtatgttatgatgaatggcagagaagtctttaaatttgctgttcgtcaacttggggattcttgtcttcgcgttttagataaagctggtcttacgaaagaagatgtggatttcttagtacccgcatcaagccgaccattcgtattatggaatctgcaagagagagattaaatttaccacaagaaaaaatgagtatgacaattgagaagttcggtaatacatcagcttcttccattccgattgcaatggtagaggaattgcaaaatggacgtattcaagatggtgatttaattatacttgttggttttggcggcggattaacatggggagcagtcgctcttcgttggggtaaataaggactgagagaa

SEQ ID NO: 9301 - DNA, 231 bp, Bacillus anthracis
atgctcaataaaacaaatacatggacaccgtctttatttcgagattataaaaatgcagaacatgatgcgtgtggaatcgtttccgttatggagaaacgaaaaattcctacaaaagaaaacattgacctctgcatacaatcgctcgtcaaaatgaatcatagagctggcttcattaatggcgaaggtgatggaatcggcattcacattgatgtaccaaaagctctttggaaa

SEQ ID NO: 9302 - DNA, 601 bp, Bacillus anthracis
atgagaaagatttgtgtgtttgcaggttccaacttaggggagagaccagagttcaaagagcaggcgatagcgttaggaaaaatgtttgttgagaacgagtacgagcttgtatacggtggttcttgcgtcgggattaatgggagaagtagcaaatgaaagttcttcgtttaggtggtcgtgtaacaagtgttatgcccgcgcgatctattccgaggagagatcgttcatacagggttaacagaatttattggaggtagaaccgatgcatgaccgtaaagcgaaaatgccagagcttgcggatgctttcatggcactgccagggcggatatggaacgtttgaagagctattgaaagcagtatgttggtcacaaattggtatacataatagcccagtcggtttatggaacataaaagatttctacggaccaattctgaaaaatggttgaacgtgcagcagaagaaggattcatgaatccatcgaataaagagttaatcgttgccgctgaaacggcagatgcactcattcataagatacaaaattacgagcgtcctggttttaggaacgaagtggaagcaactatcataatacaatttacacaac

SEQ ID NO: 9303 - DNA, 1179 bp, Bacillus anthracis
tttattatgggtggctgtttttattttatggtaggaatcatacatgttttgtataggtagttaaattccttcattaatacaatattatggaagaacccctgatcaattaggtgttttaatattttttcaatttacaggttttttatttggtgttctaagttcacctatattagtaagaaagtatcattattttaaaacaataacattaggtgttttagtaatgtccatcgttctaggaggttttatatatataaaagaatgggcatatttatctgttatttgctttgtattaggctatggagcagggttgttagaaactacggtggggttcctttattatttcagcagaaaagaatagtgctgctaaattttagcattcttgaagtatgggtttgggggtgggggcgctaagggtttccgttacctagttaattatatttataaaattttacgaatgggtattttatttccttatggggatattactattctttaatttttacactggtttgttttggtacgttgtttggacgtacgaaatttctaaatttttctcctcaaaataatgaaaaggggagggagcatccctttcctcattcactctgaaatttaaaagtgaaaagaattacagttatattatttatttcactttttgcattcttatatgcaggcatagaaactaatcttgcaaattttttatctacaataatgattcttaccaataatgaattaatcagttcagtaagtatatcttgtttttggctagcaatagttataggaagaatacttgtaggtaagctagcccataaatttaattattggacatacattacatctagttgctttacattagtgattcttttatctctatttccctttgttcgaggtacaggtatgtatttgtttatcatctttattattggtttagtcatagcgggggtttttccaataacattaattttagcttcccgtattatggaaaataatattgatcaagtgactagtttatttattgcatcggctagtttagggggggcactagtatctttcctaattagctggagtctatcattaaatactatcactgttacttttgggatattttcactttttgcattgagtctaggttgtattattttaaaaatgaggaaaatttcaacttacagtaatgaaagtgcc

SEQ ID NO: 9304 - DNA, 1480 bp, Bacillus anthracis
atggtagtaggagatttcccaattgaaattagatccagtcgttgttggtgcaggtcctggtgggatacgttgcggcaattcgtgcagcacaattaggtcaaaaggtagcaattattgaaaaagctacctttggtggcgtatgcttaaacgttggatgtattccttcaaaagcgttaatcaatgcaggtcatcgttatgagaatgcaatgcattctgatgacatgggtatcactgcagagaacgtaaaagttgactttacaaaagtccaaagaagggaaaacccggggtagttaaggaaataaaccgggcggtgtgaaaggtcttccttaaaggaaccaaaggtgaaattcattcgcgggtgaagcttacttcgtagaggatatcacattacgcgttatgactgaagaggcagctcaacttataccgttaaaaaatgctgttcttgcaactggttctacaccaatcgaaattccaggattcaaatactctaaacgtgttatcaactctacaggcgctttaagcttacctgaaattccctaaaaaaactttttgtaatcggccggcgggtaccatcggtagtggaattaggtcctgcatatgttgacttcggttccagaagttactgtagtagaagctggcgacgaaatcttagctggtttcgaaaaagctatgagctctgttgttaaacgtgctctacagaaaaaagggaacgtaaatatccataccaaaactatggcctaaagggcgtgaaaaaacagaaacctggcgtaaaagttagctttgaagttaaaggtgaaatccaaactgtagaagcagattacgtattagtaactgtaggtcgtcgtccaaacactcaagaaatcggtcttgagcaagttggagttaaaatgactgaccgcggcatcatcgaaatcgatgagcaatgtcgtacaaacgtacccaaccatctatgccattcggtgatatcgtttcctggacaaccattagctcacaaaagcttcttacgaaaggaaaggtagctgtagaaagcattagtgggcatgcatcagctatcgattacatcggaaatccctgcagtatgcttcactgatccagaattagcatctggtgggtacactaagaaacaagctgaaggaggctgaaatgccggtaactgtatatagtttcccattcggtgctaacggtggtgcatatccataaaccagcactgccggtttcttacaacttgtaacacgtaaagaaagatgttcttcttgtaggtgctcaagttgcaggtgcaggcgcttttgatattatttctgagattggtttagctatcgaagctggaatgacagcagaagatatcgctcaaacaatccacgctcacccaacattaggtgaaatcacaatggaagcagctgaagttgctcttggaatgccaattcacattgtaaaataatttaagtaatgaaaatagcccctctctttaaaagagaggggg

SEQ ID NO: 9305 - DNA, 408 bp, Bacillus anthracis
atgatatacgaatccgattatcttgttcaggaaagcaaagatgaagggttttatttcctaataaaactaataagtgaatatgaaaataaaataaacacatttaataaaacaggagaatgtctatatggtatttttcaaggggaaaagttaattggaataggtgggctaaatgcggatccgtatacagaaaataataagattggccgattaaggagattttatattgcgaaggactatcgtcgtataggactagggaagttgttattaaacaaactattatctcatgcagaaaagtattttaaagtggtggttttacatacagatacgaaacaaggtgatgtattttatactgcaaatggatttgtgaagagagaagtatataaaagatctagtcactataaagtatta

SEQ ID NO: 9306 - DNA, 888 bp, Bacillus anthracis
gtgacaattgcttttgatacttttttaaaagaaagtaaaacttttgtagaagagaagcttgtaagctatgcaaatgaattacaatgtccaaatgtacttcgtgaagcgatggcatattctttggaagcgggtggaaagcgtctccgcccgttacttttatttgcaacattacaagcgtttgataaagaaagaaatcttggagtaggtgcagcttgtgctcttgaaatgatacatacatactcgttagttcatgatgatttaccttgtatggatgatgatgatttaagaagaggaaagcccacaaatcataaagtatttggtgaagcgatggcagttttagcaggtgatggtttattaacgtatgcttttcaagttattatggcatatggacaaaaggaaatctctgctgagaaaaaagtaagacttgtacttgagcttgcaaaagcggcagggccagagggaatggttggcggacaagtggcagatatggaagcggaagggaaacagcttacgatcgatgagctagagtatattcataagcataagactgggaaactacttgaattcgctgtacttgcaggatcgatactttctgatgccacagaagaacaagaagaaaaattacttgagtttgcaaaatatatcggcttagctttccaaattcgagatgatattttagatgtggaaggaaccgaagaagagattggaaaaccgattggtagtgatgtttccaacgaaaagagcacatatacaacgttgtttactgtagatagagcaaaggatattttagatgaaactattgcaaaagcaaaagatgctattggttccttgcaattacaagatgaatatttactatctatttgcgatttgattgcaaaacgtaataac

SEQ ID NO: 9307 - DNA, 2666 bp, Bacillus anthracis
ttaatatgttattcaatctattttatgtttttttatctgttccccactcatttttcaaattcggatgtacgcttcgcttcacttattgttgaagccattacatttgtatcactcatttattctatatattctaaaaaagttagttcaaatccattttggatatgtatcacgatagcaattggtagttttttattaggaaaaatagtatatacatatcaagatagcttcttcaaaattccaatacatcgttttactatttctgatgtgttttatatgctttttctactcttctgtcttattgctttctgctataaaatcctaaaagaatgcgataaatgggaaaaagcattctttatttgtgatatatgcatagtacttacttccatattcacattagagtggtatttatttaatcaaccaaatttaaatatattctctctttcactaggagatgtttttctttcatttctatatccaattgcagatttattattccttctactaggtgttagtctctttttccgtccaacaatttttaattctaaacggaaaatttatatctttatttttgtattaataagttctgcaacttttaactatatttatttttacttaaataaccatttatcaactgaaacgataacattattacgtcttttatatagaatacctatattacttattgcaatagctggatctatttcagaagatcgtaatagtcataaaaattatttcattgtaaaccctataataggaaaaaaggctttagttgtatttccctatcttgctgttgcaatactaattgggtttacattaaaagaacaaacatcatcttcaactctcattacgggaaattgtattacttttattttcgtactcattcgtcattctattgtacgtatgcaaaacaattccctaactaaacgtttacaggcatttaatgctcaactagaagaaaaggttactttacggacttcagatttagttcataaatctgaggctctatctcaaaagcaacaaaaattcaaatcattatatgaatatcatcctgaccctatttttacaattgatttaaatggcgtattcttaaatgtaaataaagctggaagcatactacttggtgcaccaacggatgagttacttggtgaaacttgtttttcgattattttagatgaagacaaatataaactagcatctgcattagaaaaagtgaaacaacaagaatcggcatccttacaacttagttctcaatatataaagatggatttacttattctttatacgttaccatcgtccctattatgatagacgggcaaatttcaggaagctatattatgatgaaagatattactgcactaaaaaaacagcaagaagaaataaaatatttagcattccatgatactgtaacgaaaattgggaaccgtgcctttttccataagaaattaaaaaaaattataaaaaatgctaaaacgacagaaagcgagtttgcattattatatttggacttagatcgctttaaagcaattaacgatacacttggacattcggcaggagactacatattagaagaagtagcgaagcgattccaatcatgtcttccatcacatactcatctatcaagaatcggtggcgatgaatttacaatcttaattgaaaactatactgacgaagattccttattcgagttatgcaaccagttatttgaatgcatggaaaaatcgtttgtcatatatgaacatacattaactttatcactaagtatcggcatcgctatttatccacattctggaatcgataccgctacacttctgaaaaacgctaatgttgcaatgtatgatgcgaaagcaaaagaacttaattctgtctctatttatgatgatgtaattgcaaaaaaaattgaaagacgattacgattagaaaaagatttaccaaatgcaattcaaaatgaagaattgttccttttatatcaacctcaagttgatagcaaatctaacaaaattatcggtgctgaagctttaattaggtggaatcatcctgaattaggtgttatttctccatacgagtttattccgattgcagaagaaacgctacaaatcattccaataggaaagtggacactacaacaagcttgtgagcaaatgaaacgttggcacacaagcggatattcacatttgaaaataggtgtgaatttatctgctaaagaatttgaacaagaagattttgtaaagtctatttctgctacattaacaaatacaggtttaccagcaagttctcttgatcttgaattaacagaacgaattgcaatgatggatgagcgagaaacattaataaaactgcgtacactaaagagtttaggcgttcacatttcaattgacgactttggtactggttattcttcgctagcctatttacctttatatccaatcgatacgttaaaaatcccgagagaatttattacaatgtctgaaacatgtgacgatggaatggaaattattaaaacgatcatcacattagcaaatacattaggaatgtcagttatcgctgaaggtgtagaaacgaaagaacacgtgagtttccttcaaaaaaataattgtaaatttattcaaggctactactacagcaagcctattcatgctgattcattttctactcttctcaaaaaaggt

SEQ ID NO: 9308 - DNA, 1023 bp, Bacillus anthracis
atgaacgttttaaagattgggattattggtgctggacgaattgggaaactacatgttgataatttgcagcttatgccacaagtaaaaattaaagcggtttcagatgtagtaattggtcatctagaaaagtgggctcaagataaaggaatttccactctgactacaaactatcaggatttattagcagatccagaaattgatgctgtctttatttgttcaccaacaaatacacatgcgcaaattattaaagaagcggctcttgcgaaaaaacatattttctgtgaaaagcctgttagtttctcagtagaagaaacattagaagcattagaagtggtgaaagaacagggggtatctcttcaagtaggttttaatcgtcgttttgatccgaacttcaggaaagtttatgattttattcaacaaggagaagtgggacagccgcatattttaaaaattacgtcacgcgatccacaaccgccaagtatagaatatgttcgctcttcaggcggattgtttatggacatgatgattcatgattttgatatggctcgttatgtgatgaatagtgaagtcgttgaagtatttgcatatggaacaacattaattgatccatccattcaggaagtacatgatgttgatactgcaattgtcacattaaaatttgcgaatggagctttaggtgtaattgataatagccgccaagctgtttatggatatgaccagcgtgtggaagtgtttggtgaaaaaggcgcggttgctgcggataattgctgcccgacaacagttcaagtgtcaaaaacagaaggtattgtaaaagataagccgctttatttcttcttagagcgttacacgcaggcttacattgaggaagtaacacaatttacaaagtcaattatagaaggacaagctgttatttgcagtggtaatgatgggttacaagcggagcgaattgcgaaagctgcgaaggaatccttactaacaggaaaacccgtacaaattgaacataaacagcctgcattaaatcaa

SEQ ID NO: 9309 - DNA, 734 bp, Bacillus anthracis
ttgagaattgctgtaattggagcaatggaagaagaagtacgtattttacgtgacaaattagaacaagcagaaacagaaacggttgcggggttgtgattttacgaaaagggcatttacccggacctggaataatcttggttaaagtctggtattggtaaagtaaatgcagcgatgtcaacgacaattttattagaaagatataagcctgaaaaagtaatcaatactggttcagctggtggattccatcattctctaaatgttggagatgtcgttatttcaacagaaagttcgtcaccatgacgtagaaggaacagcattttactatgaataatggccaagtacccaggaatcccccctgggattcaaggtgagagaaaccattagtgccattagttgagaaatgtatgcaggccgaaaaaaaattattcaaagttgaaaaagggtatgttggcaaccgggggattcatttatgaggaatcggaatcgggtggcacccattcgtgataaattcgaaaaatctttatgcagtagaaatggaagcagcagctgttgcacaagtatgccaccaatatgaagttccgtttgttatcattcgcgcactttctgatattgctggtaaagaatcaaaatgttccatttgatccaatttttagaatcaaagcagctctttcattcttaaaaacctttttggtaaaagtattagaagagttaaagtaatgtaaccaaaaggcaac

SEQ ID NO: 9310 - DNA, 2271 bp, Bacillus anthracis
ttggcgtttgttcgcgcagaaaaagagagtgcagaaaaacgaaagcaagattatgaaatattagcagcgcttgaaccgctcgttattgaaaaacgtgcgcatgagaaagtgttagaagacgagagcgggcaatttccggtaaacggaatggcgcgttatgaagcgattaaggcgaaaatggagccgctccaattacaagttgattcgctctataaaaaaatagagacagtgcaatcggaaatggaatcgattcaaatagatgaagaatttttacaaaaagaaagttatgtagaagaacttcgtatgcagcatatgtcttacgaaaatgcacgccaagaaatgcgtgatgtgacagggacgattacgaatataaaagaagaactggcagaactagaacagcaaatcggtgctacttttgaaaaagaaacagttctttcatttgatatgagtttggcaacgaaagagttaattacgcaagcagtgcaaaaagcgcgtgaattagaaacgcaaaaagcacagcttgatgatcgctttaaagtagcgcaagagcaattagaagaacaagaagaaaatataagacagattcagaagcaaatgttagcggatgaagagcgaaatacgttagttgagaaagaaaaatcgttccaagatgcggcgtttatcggtatgggtgctgagagaatgaagcgcaaatatgaggaaaaagcaggagcagcgatgcaaaagaaaaaacagtggcaaagagtttgtcttctgttacttcttattaacacaggcgttttattcacaagtttatttatagataaccgcctactcttatttattagtgtcattgtttttgtagggattgttcttgctcttgttttatataaagatccgtcaagcgggttacaagaagagcttcttactcttcagcaaagtgctggcgggagacaaagtgaagaagcgatgactgtacgctaccagttagaaaaagacgaagagattcgtaagttatttgagcgtgagtcttataaattgcagcaaatggagcgagcgtatgataaagtcgtttcatcgtatgaggaatgggaaagagaaacgttccgcatgagcgaacaagtaaatgtatataagaagcgctatacgttccctgaattttatacatatgcacacatattgccggcgtttgagcgtatggaaaaaatgcagcaattatatcgtgaattagagaaacaaggcacgcgaaaatcttcattatatgaaatgatttcgcaatttgaacataaactagaaactgttatcggtagtgcggagtatagtaagctgcacgaggcacaaagtcgtatgcaaaatgagaaagaaaaacgccaaacttgtaagcagttaaaagagaagctagcagaatggcaagaagaatatgcgcttatgcaagagcaattgaaacaactgttagtagaacgagatagtttatggcatatcgcacattctacagatgaagagatgtttttagaagcaggtaaactggcggaaaaacgtgaagatgctgagaagcaagtagggcgtttattaccgcaaattgatctgttagaacagcgtttaacgagtttatcattagctgaacattatgaagctgacggttatgatgaaaaattaaagcaagaaatgacagtcatgcaaaactgtcttacaaaggaaaaagaactgacagagcgtattgcgaaacatcgtatggaaattgcgaatttagaagaaggaagtacgtacggtgatttactacacgaatgggaaatgaaaaaagcgcaagtgcgtgaacaagtgaagaagtgggctgcgtatgcggctgcaaagacagtgttaacgaaaacgaagcaatattatcataaagtacatcttcctcgtattttacaaaaatcagaagagtatttcgtctatttaacaggcggacgatatagtaaaatcttttcaccgtcagaggcagagccgtttattgtggaacgtaatgatggtatgcgcttttatagtcatgaactaagccaagcgacggcggagcagttgtatttatcgctgagatttgcattagcgaaaacatttgagcatgattatccatttattattgatgatagtttcgtgcactttgatgcggtaaggacgaatcgtacgattgaacttataaaggaaattgcaaaggatagacaagtcatattctttacatgtcatgcgcatttactcgcttattttacagaaaaacagattataaaattaacgcatatgcgtaaagaaaacgagttg

SEQ ID NO: 9311 - DNA, 1833 bp, Bacillus anthracis
atgagtaaaattatcggtattgacttaggtacaacaaactcttgtgtagctgttatggaaggtggagaaccaaaggttatcccaaatccagaaggaaaccgtacaacaccttctgttgtagctttcaaaaatgaagagcgtcaagttggggaagttgcaaagcgtcaagcaattacaaacccaaatacaatcatgtctgttaaacgtcatatgggtacagactacaaagtagaagttgaaggtaaagattatacacctcaagaaatttctgcaatcattttacaaaacttaaaagcttctgctgaagcatacttaggtgaaacagtaacgaaagctgttattacagtacctgcatacttcaacgatgcagaacgtcaagcaacaaaagatgctggtcgtatcgctggtttagaagttgagcgtatcattaacgaaccaacagcagcagcgcttgcttacggtctagaaaaacaagatgaagagcaaaaaatcttagtatatgacttaggtggcggtacatttgacgtatctatccttgagttagcagatggaacattcgaagttatttcaactgctggtgacaaccgtcttggtggagatgactttgaccaagttattattgaccatttagtggctgagttcaaaaaagaaaataacattgatttaagccaagataaaatggcgcttcaacgtttgaaagatgcagctgaaaaagcgaaaaaagatctttctggcgtaacacaaacacaaatttcattaccattcattagtgctggagctgctggtccattacatttagaattaacattaacaagagcgaaattcgaagagctttcagcaggtcttgttgaaagaacgttagagccaactcgccgtgcattaaaagacgctggttttgctccaagtgaattagataaagttatccttgttggtggatctactcgtatcccagctgtacaagaagctattaaacgtgaaactggtaaagaaccatataaaggtgtaaaccctgatgaagttgtagcgttaggtgctgcagttcaaggtggcgtacttactggtgatgtagaaggcgtactattattagacgtaactccactttctttaggtattgaaactatgggtggcgtgttcacgaaattaatcgagcgtaacactacaattccaacaagtaagtcacaagtattctcaacagctgctgataaccaaccagcagtagacattcacgtattacaaggtgagcgtccaatgtcagctgacaacaaaacattaggtcgtttccaattaacagaccttccaccagcaccacgtggtattccacaaatcgaagtaacattcgatattgatgcgaacggtatcgttaacgtacgtgcgaaagatttaggaacaagcaaagagcaagctattacaatccaatcttcttcaggtctttctgatgaagaagtagaacgtatggtacaagaagcagaggcaaatgctgacgctgaccaaaaacgtaaggaagaagttgaacttcgtaacgaagctgaccaacttgtattccagacagataaagttgtaaaagatttagaaggtaaagtggatgctgctgaagttgcaaaagcaacagaagcgaaagaagcattacaagctgcgattgagaagaacgagcttgaggaaatccgtgcgaaaaaagatgctttacaagaaattgtacaacaattaactgttaaattatacgagcaagctcaagcagctgcagggcaagcagaaggtgcagaaggagcacaagatgctggcgcgaagaaagacaatgtagtagacgctgagtttgaagaagtaaaagaagacaag

SEQ ID NO: 9312 - DNA, 951 bp, Bacillus anthracis
atgtcgactcaatatctaaattctaatttgaaagtattctctttaaactctaataaggaacttgctgagcaaattgcaaagcacattggagtaggactaggaaaatgttctgttgatcgttttagtgatggagaagttcaaattaacattgaagaaagtatccgtggttgcgatgtattcattattcaatctacaagcttcccagtaaacgaacatatcatggaattacttattatgatcgatgcattaaagcgtgcatctgcaaaaacaattaatattgttattccttactatggttatgcgcgtcaagaccgtaaagcgcgttctcgtgaaccaattacatcgaaacttgtagcaaacttgcttgaaacagcaggtgcaacccgtgtaatcactctagatttacatgctccacaaattcaagggttctttgatatcccaattgaccacctaatgggtgtaccgattctttcagattactttgaaacaaaaggtcttaaagatatcgtaatcgtgtcacctgaccacggtggagtaactcgtgctagaaaaatggcagatcgcctaaaagcaccaatcgctattattgataagcgtcgtcctcgtccgaacgtatctgaggtaatgaacattatcggtaatattgaaggtaaaacagcaattttaattgatgacatcattgatacagctggtacaattacattagcagcaaacgctcttgttgagaacggtgcttctgaagtatatgcttgctgtacacacccagtattatctggtccagcaattgagcgtatccaaaactcaaatattaaagagttagttgtaacgaactctatcgtattaccagaagagaagaaaattgacaaagtacatgaactttcagttgctccactaatcggagaagcaatcattcgtgtatacgaagaagaatctgtaagtgtattattcaat

SEQ ID NO: 9313 - DNA, 510 bp, Bacillus anthracis
atggaaaagaaattcatgcgagaatctaaagcaattaaaacaacacgtgtttttccgaatgatttaaataatcatcaaacacttttcggaggaaaattattagcagaaattgatagtattgcttcaattgcagctgcaaggcatagtcgtaaacattgcgtaacagcatctatcgattctgttgattttttaactcccattcaccaagcagattctgtttgttacgaagcattcgtatgttatacaggaaaatcttcaatggaagtgttcgtaaaagtaattgcagagaatttattagcaggagaacgtagaatagctgcaacatgtttcattacattcgttgcattaaaagatggaaaaccttcttctgttccacaagtactacctgaaacggaagaggaacattggctacacaaaactggcgctgagcgtgcagaaagtagaaaaaaagggcgtgtaaaaagcaaagaaatggctgaagttctaactttaagtaaaccttggagtatg

SEQ ID NO: 9314 - DNA, 1107 bp, Bacillus anthracis
atgaattataaagttaagtttgagcacgttacaaaaaagtataagctgtacaacaagccttttgataagcttaaggatttattttttaggagcaaagatggagaatatcattatgctttgaataatatttcttttgaagttccagagggtgaaattgttggaattgtaggtttaaatggttctgggaagagtacattgtcgaatttaattgctggtgttacgatgcctaataaaggaacagtggatattaaaggttcagctgcattgatagcaatttgatccagggcttaatggtcaattaacagggattgaaaatatcgaattaaaaggtttaatgatgggaattacaaaagagaagattaagggaattattcctgaaatcattgactttgctgatattggaaagtttatgtattcacctgttaaaacttatttcagtgggatgaaatctagactaggatttgcgatatcagttcatattaatcctgatattttagtgatagatgaggcactttctggtgggtgatcaacgtttacgaaaaagtgcctagataagatgaatgaatttaaagagccagggaaaaaacatcttctttattagtcattcactttctcgaaacaaaaagtttctgtacaaaagcgttatggcttcattatggtcaagtaaaagaatacggggatataaaagagattgtcgatcattatgatgaatttctgaagaaatataatcaaatgagtgttgaggaaagaaaagacttagaaaaagaacaaatatctcaatttcaacatggcttactacaagaggatcaaaccggtagggagagaaaacgtaaaaaaggaaaaaaaacaagccgaaagtttaaaaagaagagggttctgattacaggagtttgtatagctctattaacaggtataatttcaacaggctattattataaaaatttactaccattcaacagtgaaaataaatatgccgaaaaagttgcttcaaaagagaatgtgactgaatctaagcaaatggtaaagaaggaaaaaggagcagcaaagtatatttataattgtagtggatccggtattcgggaagagccagatgcaagcagtaaccga

SEQ ID NO: 9315 - DNA, 1323 bp, Bacillus anthracis
atgaaatcatctttaaagttttctgagatgtttgcaataagtttaatgttatttgcactatttttcggtgcaggtaatatgattttcccaccagcgttaggacaaggcgctggaacagatgtatggattgcgttatttggttttatcgtaacaggcgttggactacctttattaggagtaattgttatagctttaaagggagatattaatgagctagcaggacgtgtacatcctatattcgcacttgtttttatcactgcaatttatttatgtttaggcgtatttgtaagtgtgccacgtacaggaactgttgcttatgaaatgagtgtcgcaccgtttttaccaagtgagatagctggtcaatcgtattcacttgttatctttacattcattttctttgctgtcactttctatttagctttaaacccatcgaaattagtgggtcgtattggtaaagtgctaactccaatattattagctgttattgcaattattgtaggtaaagcacttattacaccaatcggagaatttggtgcaccgacagaagcgtatagtgcccctctttttaaaggatttattgatggatatttaactttagatggacttgcagcactggtattcggaaatgttgtaattcatgcgttaaaagaaaaaggcattacaaataaaaacagcattgcaaaagtaacaatctttgcaggatttattgcagcgcttggtctactacttgtgtatttagcacttgcttatcttggagcttctagtgtgtcacttggaatgggcgcaaacggaggaattattttaacaaatgtcgtgaatcatttatttggtagctacggaactttattactagggatcgcaattacagcagcatgtttaacaacttctgtaggtattgttgcagcttgtggtgattacttctcttctttattaccaaagctttcttatcaaaaagttgttttcattttctgtgtattagcatttatggtagcaaaccttgggttaactcagttaaatgcattagcattaccaatcttaatcgcaatttatccaattggaatcgtacttatcgtattatcacttgttgaaaactacgttcgtcttccattagcgatgtatgtgggcgggattgtaggagcatttgcaataagtttctttgatgggttacacaatgcaaaccttcaaattgcagcgctagcacctattttagataagattccattatatagtgtaggaattggttggttagttccaggcataatcggtataggatttggttatatagtttctaagtttcaaaagcaagaagttgctgtagaaaaa

SEQ ID NO: 9316 - DNA, 1458 bp, Bacillus anthracis
ttggaagctttcgtaaattggttaaataatattgtttggagtccagcacttgtttatttatgtttaggagtaggtttatatttttctattcgaacgaggtttttacaagtaaggcatgtaggagaaatggtgaagctgacatttcaaggagaaaaatcagaggctggtgtttcttcattccaagcgttagcactttcgttatcagggcgcgttgggacagggaatatcgctggggtagctacagcggttgccttcggtggaccaggggctgtattttggatgtgggcagtagcctttttaggagcaggatcagcttatgtagaatcaacactcgcgcaaatatataagacgaaacatcaaggacagtttcgcggtggacctgcttattacattgaaaaaggtttaggggttaaatggtatgctttagtattcgttgcagcgacaattcttgcaacggggcttttactaccaggtgtgcaggcaaatagtattgccgtaagtttagaaacagcctttggaattaacactactctatcaggggctttattagttgttgtattagctcttatcatcttcggtggagtaaagcgaattgttaacgtggcacaagttgttgtaccgtttatggcagttgggtatattttagtagcttgcgttattgttgctatgaatattgaaaaactgccagaagcatttatgttaattataagaagtgcttttgcattagaagcagcatttggtggtattatcggtttagcaatttcttggggagtaaaacgtggtatttattctaatgaagcagggcaaggaactggaccacatgcagcagcagcagcggaagtatcacatccagctaagcaaggcttagtgcaagcattttccgtttacattgatacattatttgtttgttcagcaacagcatttatgatgattattacaggcatgtataacgtatttgatgcaagcggaaaaaactttatcgtaaataaattaaatggtgcacagccaggaccaggatatacacaggcagcagtagaatctgttttccctggatttggaaacggtttcgttgcaatctcgttactattctttgcatttacaacaattatggcgtattactacattgcagaaacgaatatcgcgtacttaaaccgtgataaagaccgcccttggttgtctatggtactaaaatttgtctttttaggtgctgtattctacggctgtataaaaacagcagcaacggcttgggctttaggtgatatcggtgtagaaattatggcatgggtaaatatcattgcgattttattgttacaaaaacctgcattagttgcattaaaggattatgaaaagcagaagaaagaaggaaaagatccagtattcgatccagggccattaggcattaaaaatgctgatttctgggagcatgaatacggaaaaggtaagaaagaagaagtatct

SEQ ID NO: 9317 - DNA, 1360 bp, Bacillus anthracis
tttcaaaataaaaatattcttgtattaggcatgcaaaaaagtggttatgcagcagctacattgctacaaagtttagggggcaaatgttatgtaaaatgacggaagcccgttagcagaaaatgtacttcgctgcagatttccaggcaaaatgaaatggtcgtggtatgcgcgtggtcatcctttagcattcattagagaggaatactttctcttgtagtaaaaaatccaggaatcccgtattctaatccaatattagttgctgcgaaagaaaagcaaattcccattgttacagaagttgaattagcatatcgtatgtcagaagcaccatttggttgggattaccgggatctaaacggtaaaacgaccaacgaccatgcttacatttgaaatgctaaaaagaggacagaaacatcccggtaattggcggggaacattgggacttgtacccgtgtgaaagtgccccggatgcaaaagaaaatgaagttgtagttacagaacttttctcgttccaattgatgggagtagaattgttccaacctaaaattgctgcgtttttaaatttatttgaggcccacttagattatcatgggacgaagaaagaatatggtttagcaaaagcaaatatttttaaaaaccaaacagaaaatgattatagtgtaataaatgcagatgatgcagatgtgatggctttatctgcttatagtaaaggtcaaaaaagtactattctcaacaacgaaagaaattgaagatggtgcgtgtataaaagataatgctctttattttaaagctgaaaaagttgttgaagtagacgatatcgttttacctggacaacataatttagaaaatattttagcagcgatgagtatcgcaaaattattgggtgtttctaacgaagcgattacggcggtgttaaaacgttttacaggtgtaaaaccatcgtttagaatatgtaacaactataaacaccccgtaagttttataatgactcaaaagcagcgaatatgttagcgacagagaaagctttatctgcgtttacacaaccgactgtgttattagcaggtggacttgatcgtgggaatgagttcgatgatttaatcccgtatctcaaaaatgttaaagcgattgtaacattgggacaaaccgctccaaaattagtaagagccgcaagaaaaagcggttactagatacaattgaaagtgtcgatactttagatgaagcggtagtgaaagcttatgctcattctacagatggcgatgtaattcttctttctccagcatgtgcaagctgggatcaatttaaaacatttgaagaaagaggagacatttttatacaagctgtgcataaacattatataaagtaa

SEQ ID NO: 9318 - DNA, 957 bp, Bacillus anthracis
atggcactgcttaaagtagaagatttaaaagtacactttccaattaaaggtgggtgttttcggtcgtacattagattacgttcgtgctgttgatggcgtaagcttcgaactacaacctggcgaaacgtacggaatcgcttggggaatctgggaagcggtaaatcaacaactggaaaagcaattatgcacttaacgaaagcgacgggcggtagtattcattttaataatagagatttaacaaagttaagtcgctcagaactaagagaacaacgaaaagatattcaaatgatttttccaagatcctttattcatcctttaaccccaagaaacgtgttatggaaattatccccgaacccctttggaatttttgagaaactcttcctcgagaaaaaacgtaaagctgtttcagaattatcttgataaagatcggcttaaatcccgagtctatttataaatatccacatgaattttccggtgggcaaagacagcggattggtattgcacgcgcccttacactaaaaccgaagcttattatcgcagatgaacctgtatctgcacttgacgtgtcagtacaagcgcaagttttaaacttcttacaagatttacaatccgaactcggactaacatacttatttattagtcatgatttaggtgtaattcgccatatgtgtgaccgtataggtggtatgtatcgcggacgcattgtggaagaaagcactagtgctgaaatttattacaatccacagcacatctatacgaagcgcctaatatcagctattccctgatattccgtcagaaaaacgcgaacaacagcgtaaattgcgtcgtgaagtaagcgctgagtacgaaaaatcatacgaaaattatttcaatgaaaatggacgtgcttacgatttaaaaccaatctcgccaactcaccgggtggcattaccataagggagtgataaaacatgtgga

SEQ ID NO: 9319 - DNA, 255 bp, Bacillus anthracis
atgaaagcaatgccgcaattattgaaagtactggctcatcctgttcgcttatgtatggtaaaaggattaattgaacgtggtccaagcaacgtttctacaatgtacactggcttaaacatgccacaatctacaatttcacagcatttagcaaaattaaaaagtgctaaaatcgtttcaagcgaaagaaaaggtttggaaatttattacaaagtagaaaacgagacaattattcaactcgttcgcgtattattgggt

SEQ ID NO: 9320 - DNA, 1249 bp, Bacillus anthracis
catttaaaacgtcaagatgaaaaggtatttgctgcaattgaggcagaactaggaagacagcgttcgaagattgagttaattgcttcggaaaacttcgtaagtgaagcggtaatggaggcgcaaggttctgttttaacgaataagtatgctgaaggatatcctgggaaacgttactatggtggttgtgaacacgtagacgtagtagaagatatcgcacgtgatcgcgtaaaagaaattttcggcgcagagcacgtaaatgttcaaccgcattctggtgcacaagcgaacatggcagtatacttcacgattttagagcaaggcgatacagtacttggtatgaatttatctcatggtggtcacttaacacacggaagccctgttaacttcagtggagtacaatataatttcgtagaatatggcgtggatgctgaatctcactgtattaattacgatgatgtattagcaaaagcgaaagaacataaaccaaaattaatcgttgcaggtgcaagtgcataccctcgttcatctcaatttcgaacgattccgtgagattgcagatgaagtgggcgcatacttaatggttgatatggcacatatcgctggtttagtagctgctggtttacatccaaaccccagtaccacatgcacatttcgttacaacgacaacacataaaacgttacgtgggccacgcggggggaatgattttatgttgaagaacaatttgcaaaacaaattgataaatcaatcttccctggtattcaaggtggtccacttatgcacgtaatcgctgcaaaagctgttgcgtttggtgaggcacttcaagatgatttcaaaacatatgcacaaaatatcattaacaatgcgaaccgcttagctgaaggtcttcaaaaagaaggacttacacttgtttctggtggaacagacaatcacttaatcttaattgatgttcgtaacttagaaatcacaggtaaagtagcagagcacgtattagacgaagttggtattactgtgaacaaaaatacaattccatttgaaacagcaagcccatttgtaacaagtggtgtacgtatcggtacagcagctgtaacatctcgcggtttcggtttagaagacatggatgaaattgcttcacttattgcttacacattaaaaaatcatgaaaatgaagctgcattagaagaagcacgtaagcgtgtagaagcgttaacgagcaaattcccaatgtacacagatctataatagattgaa

SEQ ID NO: 9321 - DNA, 954 bp, Bacillus anthracis
atgaagcgagcaagaattatttatagtcatgcttctgggcgtgagttatataagaagagttttccagaagtattgcataaattagatcaagctggatatgaggcatcttgtcatgcgacaacgggtcctggcatcgcaactgtggcggcgaggcaagctgcggatagtaaatttgagtgttgttatcgctgccggtggtggacggcacgttaaatgaggtggtgaaacggttttagtagggcatgaacatcgtccagaaagtcggaaatatttcgcggtggaacgaactatgactttgcacgtgcaatccgtgtacctcgttctaattgaagaggcagcaaatattatttgtgaaaggaaaaacttgtgccattaaaaacttggtaaaagcaaccgatacatatttttattaacatcgctgggtggcgggcccccttcacgaatttaacttttggaagtacccgagtaagcctaagaactgtattaggacaacttgcttattatttaaaaggtatttgaaatgctaccatcactacacccaaacatatgttgaaattgagtatgatggaaaattactacaagaagaaattacgatgtttttaattacgaatactcgttcagtgggcgggctttgaaaaaggtagcaccctatgcatccatttacgattggcttatttgatttattagctgctgaaaaaaggttcgattgctgacttaattaaagcagcaacacaagcgcagcgtggtgaacatattatcaatccaaaagtactgtacacaccagctaacccgaattaaagtgcattcaccagacaaactaatgatttaatttagatggtgaatacggtgggagatgcaccgatggaattcgaaaatatatatcattgtctggaactatttgttcctgaacatcaagaggatgccctgtaaaggcatcctttttattatatagag

SEQ ID NO: 9322 - DNA, 1320 bp, Bacillus anthracis
atgccccaccaaacttttacacagtatgatttaaacccatttttaatagatgcagttcgtgaataccgctttacagagccgacaggaattcaacagaaaattttcccagtcgtaaaaaaagttgtaagtgtaattggacatccccaaacaggttctgggaaaacacatgcatacttacttcctacattgaacagaattaacccaggtcgtgaagaagtacaacttgttattacagcgcctactcgtgagttagcacaacaaatttacgaagaaatcgtgaaattaacaaagttctgtgcggaagatcaaatgattacagcacgttgtttaattggtggaactgataaacaacgatcaattgaaaagttgaaaaaacaacctcatattgtagttggaacaccaggacgtattaaagacttagtggaagaacaagcattatttgttcataaagcaaatacgattattgtcgatgaagcagacttaatgcttgatatgggattcattcatgatgtagacaaaattgcagcacgcatgccctaaaaactttgcaatgctagttttctctgcaacaattcctcaaaaactaaaaccgtttctgaagaaatatatggagaatccagagcatattcatatcaatccaaaacaagttgcggctggaaatattgagcattatttagttccgtctaaacatcgtaacaaaatcgatttagtgaataaaatgttgctacaatttaaacccgtatttagcagttgtttttcccgaatacaaagaaaatgggcgggatccaggttgctgacggattaatgggaaccccggcttaaagtggaacgaattcccggaagattttcacccccttgatctctaaaaaatgatgaaaccaaatcggtgaccttaaatttccaaatttgggttgcaactgattttacggccccgggtttccaattttgaaggaattagtcatgttattaactatgagcttccatcagatttagatttcttcgttcaccgcgttggaagaacagcacgtgcagggcattcaggtattgcagtgacgatttatgatccaacaaacgaagaagcgctagatagtttagaaaaaccacgtcatattgaggtccaacatggaaatttaccaagaaaagaatgggccgatttaagtgaaacgccctcctcctaagaaccggaaaaaacccaatgaagaacttgacggtatggccaccaaaggtatttaaaaggccaaaaaagtaaaacccaactattaacgccaacttgccactggacctgaccaagtggagaaaaaatattgccataaaaaaaga

SEQ ID NO: 9323 - DNA, 354 bp, Bacillus anthracis
atgatacaaacgaaagataaaataaaagttatgcgtgcagaagatcttcctattcaaatcggtaaagaggtccaaatgaaaggtatgtctatcgccctattccgcctttcaaatggtgatattcgagctgtagaaaatcgttgtcctcataaaaacggaccattagccgaaggaattgtatctggtgaattcgtcttttgtccgctacatgattggaagatttcattacttacaggtgaagttcaaaaacctgatgacggttgtattcaaacgtacgaagtagaagtcattaatggtgacatttatatatatatatgtaatttacaaaaggaagcctcccccctggcttccttt

SEQ ID NO: 9324 - DNA, 780 bp, Bacillus anthracis
atgttaaaatcataccgagctgtgctcgttagtttatcattattacttgtttttgttttatctggttgcagtaatgcaaccccaattgatgcacatagtacgggaatttgggatcattactttgtatatccaatctcgtttatgattcaatttgttgctcatcatataccgggagctagctttgggattgctatcattattatgacgctcgttattcgttcagcaatgattccattagctgtttcgcaatatcgtagccaagcgaaaatgaaaaaaatgcaacctgaattgcagaagctaaagcagaaatacggtgatgtaagcaaagatctagaaaaacaaaaacagtatcaaaaagaaatgtcagaactaatgaaatcaggcggttggaatccacttgctggttgctggccactattaatacaaatgccgattttctctgctttgtattatgcgattagccgaacagaagagattcgcacatctacatttttatgggtgaacttaggacatgcagatccttatcatatattaccgattattgcagcgttaacgacatttattcagatgaaagttttccaatcgaatagtacgtctggagaacaagtacaaatgctaaagatgcagcaaattatgatgcccgcaatgattctatttatgggatttgcggcgccatccggacttgtgttgtactggataacaggtaacttatttacaatgatgcaaacaatcgtattaagaaaaataatggaacgtgaagagttacaattacaaaaagct

SEQ ID NO: 9325 - DNA, 3592 bp, Bacillus anthracis
tttgtgattggtagagcgggaagtggaaaaagtcctctttgagaagcactgaagtgcaagaagaatttaaaaacagccccccaagggggggaaaccaattttattttcttggccccagaacagaatggcattcccagacgcagcaggcgttaatttgccatgaggattttagaggtttcattcgggccccaaagtttttagtttttcacgattagcctggaaagtattccaagaagttggcggagcgagtcgtcttcacattgatgaagcgggggttacatatgttacttcgtaaaattgtaaagtctcgtaaagatggattatccgtgttccaaaaagcagcggagcaaaaacgggttcttttgacatcttggcagtatgattgcggaatttaaacgatataacgtaacgccatcaaacgtatatgaaatgtggcaacaattagatgcgcatagtagcagtgccgaacaaaagctactggcgaataaagtgtatgatttacaactattatatgatgattttgagcgtgccttaatcggaaagtatttagattcagaagactatctgcaattgctagtcgaaaagcttcctcaatctgaatatgtaaaggggagctgaagtttatatagatggatttcactcattttcaccggcaagagttagaaattgtagaacagcttatgatttgcggagcgagagttacgatcacgttaacgatagatgaaaaaacgttagcgcagccagtaaatgaattagatttattttatgaaacgacattaacgtatgaaaaaataaaacaagtagcgcgtgaagagaaaatagaaattgaaaaaacgattccacttatggaacagccgcgttttcattctccggcatttaacgcatttaaaaatgcattacgaagcgcgtccaaatgaaaagtttcacggtgaagcaagtgtaacgattcatacagcagctaatttacgagcggaagtagaaggcgttgctcgtgaaattcgtagacttgtggctgaagaaaactatcgttaccgagatattgcggttcttcttcgtaacggggaaagttattacgatgtaatgcggacactatttacagattataatatcccgcacttcatcgatgaaaaacgcccgatgtcacatcatccgttagtagaatgcattcgttctgcactcgagattattagcgggaattggcgttatgatgcagtctttcgctgcgtgaaaacagagcttttatatccactagacgtaagaaaagaaacgatgcgcgaagagatggatgagtttgaaaactattgcttagcatacggtgtacaagggaagagatggacttctgaggatccgtggatgtatcgtcgctatcgttctcttgacgatacgaacgggatgatcacagacagtgaacgtgaaatggaagagaaaataaatcgatttgcgtgacgttgtaagaacgccagttattcgtatgcaaaaaagactgaagcgcgcgggaacagttatgcaaatgtgcgaagctgtttacttatttttagaagagctggacgttccaaaaaaattagaagcattacgtattcgtgcagaagagaatggggatttcttatttgcgacagatcatgaacaagtatggggaagaagttatgagtcttcttgatacgttcgttgagatgcttggcgaagagaaaatgtcactttctatgttcacagacgttatgtcgacaggtcttgaggcgcttcaattcgcaaacattccgccgtcattagaccaagtgttgattgctaatattggatcgtcaaagattatcaaatgtgaaagcaccatttgttattggcgtggatgaaagggtgctttccagcagcaccgatgggagaaaggattgctttctgatgaagaaagagatgttttgagcgctgcaggtattgaactcgcaccaacgaccagacaaactttattagaagaacagttcgttatgtacaaaatgggtaacgagagcaactgagaaattatatatttcatgcccgcttgcaaatgtaggaggggaaaactttacttgcgtcctagccttaattagaaaataaaagaatgttccccctgatgtgaaagatacatttattacgaatgacgtaaatgatttatcacgtttggaacaaatttcatactgtagcaacgccggaagtaacactgtcatatgttatgcagcaactgcaaacgtggaagcgatatggatttgtaagggaatttagacttttggtgggatgtatataattttctacgtaaccttcggatgaaatggaaagccaaaaaagtaggccgtgttattattcaagttttatttcttaccgaaaatcgtgccgcaaaaagcttaagtacagctgtaagtatagatttatacgggagacaaaataaaaggaagcgtttctcgtatggaactatttaatcgttgtgcgtacgctcatttcgcacagcacggtttatcgttaagagagcgtgatatttttaaacttgatgcgccagatatcggggagcttttccatgcagcgctgaagagaattgcagacaggcttattacgtgaaaatcgtactggggcagatttatcaataaaagagtgtgagcatctttctgctgtagtaatagaagaaatcgcaccgttattacaaagacaaattttattaatgttcaaaccggtcctctctatttaaaacaaaaacttccaccaaatcatttccggtacgtcaatcattcttcgtgaccatgcgaagtctagcggtttcgtaccagttgatttagaagttccattcggtatgggcggtacaggatcacttcgccgatgggaattctcgttacctaatggtgtaaagatggaagtagttggccgtattgaccgcgttgataaggcagaagatgaaaacggaacattcctccgtattattgactataaatcgagctcaaaggcgttagacttaacagaagtgtattacgggttggcacttcaaatgttaacgtatttagatgttgttacttcaaatgcacagacgtggatgaaaaaaggcggtacagcatcaccagctggtgtattatatttccacattcataacccaattgttgaggtgaaaggtgacgcatctgaagcagaaattgaaaagggaaatttttaagaaatttcaaaatgaaaggtcttctaacaggaagatgctgacgttgttcgtttaatggataacaaactttccaccaggagtttcagatattatttctgttggtctaaaaaaggacggtagttttagtgcgcgttcaagtattgccagtgaacaagagtttaccgtcctgcaaaaatacgtacaccatacgttttgaaaatatcgggaaaagacattaacagaggtggttattggatatttgctccatacaaaaaaggggaataaagcagcgtggacgttctgtaacttccaatcagtttgtcagttcgatgaatcacttgaagataaccagttccgtacgctaaaagatatgaaagatagcgaagcgatggagaaaattagagaggaggttggcggagaatgatggaaaattggcctaaaaaaccagaaggt

SEQ ID NO: 9326 - DNA, 933 bp, Bacillus anthracis
atggctaagaaggggaatgtattacaacaacttgggtctttaattggactagcgctaattattgtagtaattacggctttaaatccagcgtttattgaaattccaaatttatttaatatactgcgtcaagtatcgattaatgcgcttattgcattcggaatgacctttgtaattttaacagggggtattgacttatcggtaggttctattttagcattatcaagtgcacttgttgctggaatgatggcaagtggcatggacccgttccttgcgatggcagttggattattagctggtcttgtaatgggaattgtaaacggtatcatcatagcgaagggaaaagtagctccgtttattgcgactttagcaacaatgactatttttcgcgggttgacgcttgtttatatggacggacgtccgatcactggtcttggtgatcatttaatgttccaaatgtttggccgcggttattttctcggtattccagtaccagctgttacaatgatgatcgctttcgcagtactgtacttcattttgaagaaaacgacatttggtcgccgtacatttgcaattggtggaaatgaagaagcagcagcattatcaggtattaatgttacgaaaattaaagtaatgatttacggtctttccggaattttggcagcgtttgcaggtattgtcttaacatcacgactagattctgcacagccgactgcaggtacttcttacgaattagatgcaattgcagcagttgtattaggtggaacaagtctttctgggggaagaggatggattgttggtacattcatcggtgtacttattatcggtgtactaaataacggtttaaatttattaggtgtatcttctttcttccaacaagttgtaaaaggacttgtaatcttactagctgtattaattgatcgtcgaaaagaagcg

SEQ ID NO: 9327 - DNA, 483 bp, Bacillus anthracis
gtgtgctggaaagtgatattcctttttgagatagaaaaaatgcaaaagcaatatccacatataacattttcagttgtaccaccttttagtacgcatccgcatatggttgaacttgtagtgaaaagaatacgtgaagctatgccaatgcaaaatagtagtattttactcgtaggaagaggtagtagtgacccccagccgatacatgagttacagcaaattggagtagctgtcgaacaaaaactcggtatgcgtgtatgttgttcctttttaacgaaaggaacgccctcttttactgctgagctcaagactataacatcgactgcatctcatgtatatgtcatgccgtaccttctctttactggattattgcttcaaaaaattaagttgcatacaaaaaaatacgatcacgttacaacttgtaactgtcttcagctagcatccatatatgagattaacattactacgaacgaatggatacaaact

SEQ ID NO: 9328 - DNA, 975 bp, Bacillus anthracis
atggctcaaatgacaatgattcaagcaatcactgatgctttacgcgttgaaatgaaaaatgaccctaacgtacttgtgtttggtgaagacgttggtgtaaacggcggtgtattccgtgctactgaaggtttacaagctgaattcggtgaagaccgtgtaatggatactccacttgcagagtctggtattggtggacttgcagttggacttgcacttgaaggattccgtccagttccagaaatccaattcttcggtttcgtttatgaagtaatggattcaatttctggtcaattagctcgtatgcgttaccgttctggtggacgttggactgctccagtaacagttcgttctccattcggtggtggtgttcatactcctgaactacatgctgatagcttagaaggtttagtggctcaacaacctggtctaaaagttgttattccatctactccatacgatgcaaaaggtcttttaatctctgcgattcgtgacaacgatccagttatctacttagagcatatgaaattgtaccgttcattccgtcaagatgtaccagaaggcgaatacacaattgatttaggcaaagctgatatcaaacgtgaaggtacagatgtatctgttatcgcttacggtgctatggttcacgctgcattaaaagctgctgaagaacttgaaaaagaaggtatctctttagaggttgttgacttacgtacagttcaaccattagatatcgaaacaatcatcgcttctgttgaaaaaacaggccgcgtagttgtagttcaagaagctcaaaaacaagctggtattgcagctaacgttgtagcggaaattaacgaccgtgcaatcttaaacttagaagctccagttgtacgtgttgcagctgctgatacagtattcccattctctcaagctgagagcgtatggttaccgaaccacaaagatattgttgaagctgttaacaaagtaatgaacttc

SEQ ID NO: 9329 - DNA, 1475 bp, Bacillus anthracis
atgtataacactgagatggatgaaacgttaaaaattataaatagagaattaaagaagacgacgagctccgaagcaaattattgtagtaggggctggcatggctggattagtttcggcatctttattaaaagctgcgggacatgaagtgaagatttttgaagcaaataaccgggtaggtggccgcatagagacagttagaatggaagataccggtttatatttggatgtagggggcatgagaaattccgtattcgcatacattaacgatggcatatataagaaaatttgggctacaggtgagcccttttattaataggaatgagactgatatcatttacgtaaatgggcggaaaacgacattaaaacaatatgaaaaagatccaagtatattaaagtatcctgtagaaatgaatgaagtggggaaaacgtctgaggagctattattgttagcggtacagcctattataaattttataaaaaagaacccagagaaaaattgggatgttgtagtaaaggattttgggagatactctacaggacaatttttaaagtatcatccgtatcaatataatacatatttttcgccagtaacgattgagatgatcggtgttctattagatttagaaggttttttagaacgttcatttgttgagacattacgttttttatatattatgcaagaggagagcggattttgtgaaatagtaggtgggaatgatagattaccaaagtcctttttaccacaattagaagaaaatattatatataatcaaaaattaatgaagctaccatcacgtgataacggtgtgacagctttctatcgaaacgaagaaacgtttgaatatagtagtattacaggggacttagttattggtaccattcccgttttcgacaatgcgttttgtggaaagtgagcccctttgatctatatctcatgaaaagtggaaagctattcgcgaattgcattatatgcccagcaacaaaaataggaattcaatttaaaagtcgattttgggaagaacaaggacaattaggtggcagaattataacggatttgccaattcgttacgcttattatccaagctatggaattggagagaagggaccggctatgatgctaggaagctatacatggtcttatgatgcgttgttatgggatggattgtcaaagggtgaccgtatttattatacattacaaaacttagcaacgatattaggtggtcaagtatatgatgaattcttgtctggtatatcaaaaagctggacattggatccatatgcacttggagggttttgcgttattccaggcaggtcagaattcagagttccaaccagcgattgtcaaccaggagggaagaatattcttcgctggagaccatacgacgttatatcatggatggattcaaggggcaatgaaatctgggtttcgtgtagcggaagaggtgaatgaataaaatatgtaaatttcagaatta

SEQ ID NO: 9330 - DNA, 1451 bp, Bacillus anthracis
agtgaaagattggcaagcttgcccggagtagatacgacagtagactgggaacgtgaatacccaaatgataaaatacttcgttctattcttggtagcgtttctactgaaaatgaaggattgccaagggaacaattagattattatttagtgcgtgattataaccgaaatgaccgcattggtaagagttacatcgaaaagcaatatgaagacgcattacatggaacgaaagaacagtctagaagcattacagataaagcaggaaatattatccggacagaaaaagtaaccgaaggaaaaagtggaaataatttaatgttaacagtggatatggagttacagaaaaaagtagagggaagtcttgaaaagaatttacgagcatttcattctgcagagccgatgatggatcgtgcattcgttgtaatgatgaatccgaaaaacggtcaaattttatcgatggcaggaaagaaaattgtaaataaagatggcgggatgcaaatagaagactatgctttagggacgatgacaagttcttatgagttagggtcaactgtgaaaggggctacattattagccggctatcaaactgacacaattaagccgtatacgcatttctttgatgcacccatgtattttaaaggaagctctaagccgaagaaatcgtggaaagactttggtgatattgatgatttaagagctttacaagtttcatcaaacgtatatatgtttaatacagcattaaaaatggcaggtataaattatgtgccaaacaatccattagacattaaacaagaaacatttaataaaatgcgctactattttagacaatttggtttaggtgtaccgactggtattgacttgccgaatgaatcgattggtcaaatgggtagaacggataacatacctggttttttacttgattatgcgattggacagtacgatacatatacgccgcttcaacttgctcaatatatttcaaccattgcaaacggtggttaccgaatgaaaccgcaaattgtgcaagaagtgagagagcaaccacatagaccagaggatgttggaaaagttattcgatctattgaaccagttattttaaatcgagtggatatgaacacttcatacattaatcatgtaaaagaaggatttagaagagtttttcaagagaatgacggaacaggtactgcaacgtttaaaggattaccgtataaaccagctggaaaaacagggacagctgaaactgtgtatggcggagaaagtgaaattggaagagatgaaaacaataatcgaaaaaatgttataatttaactcttgccggttatgcgccgtatgatgctgatccggaagtagctttttcagttgttgtaccatgggtgaatgatgacaaatcaggaattaattccgcgattggtaaagagattttggatgcgtattttgaattgaaagcgaaaagagca

SEQ ID NO: 9331 - DNA, 969 bp, Bacillus anthracis
atggaaatagctgtagaacgtgtttttacgaaagagattgtaaaaagagcagcgagtttgtttcatgtaacagtggacgaaaagccgcttggagattttgagaattatatttttaaggcgaagggcgatcgtggtgaagattacgtattgcgtttaacccattcttctcatcgctctaaacaaggggtagaggctgaactagattttttacgatatgttgcggagaatggggcaaaggtagcaggacctctttattcaacgtctcgaaatctcgtagaagaaatcgtagcagaggatgggactttcttttttgcttctttatttacatatgcaaaaggtgagcaagtaaaaggtgaagaatcaccctattggggagatgcttactttgaagcatggggaaaagcgattggtcaactgcatcgtctaacaatgaactatcctaaaacgaatcatcgtgatacatgggaagaagatgagagtgggattgttaatgaattagaagatgatcaagtgaaaaagattgctactgtattaatggatgagataaaggctcttccagttgaaagagaaacgttcggccttatgcacggtgacattcatccaggtaattttcattatgatggaaaagagctaacgatctttgattttgatgatgcggcctataattactttatacacgatttagcgatggttctctactactctgttctatttacaccgtggacagcggaagagaagacagactttgctcgtaaacagctacaagtgttacggaaaggctatgagtatgagcacagactggcggatagttggtatgaatcattaccactatttttacgtttgcgtgacataggtctatacggcacactccaaaagaagtttaaggggaaagatatgccagataacttccaaaaattatctgaagagttatatgaaagaattataagcgaagaaccaattgtgaatata

SEQ ID NO: 9332 - DNA, 1012 bp, Bacillus anthracis
atcaaattaagtgtattagaccaatcccctatttcagatggtagtacagcaacccaagctttttcacatacagttacgcttgcgcaagaagttgaaaaactcggatatacacgctttgtgggtatcagagcatcacaattctgtaagccttgctgggttcagtccagaaatacttatttctcatattgcagcaaaaacggagcgtatgagagttggttcgggtgggtgtatgttacctcactatagcccgtataaagttgctgaagatttcccgtgtttaagaagcgctttatccaaatcctatttgaccttggtgtccgcagaagcacctggcggtatgccaattgcaactcgcgcacttcaagaaggaaaaatggtctcacttgatcaatatccagaacaaattgcagatgttgcaatgtatttacatgatcaagtaccagaaaaccatcattatgcgaatttaaaagctactcctgtgattccaacatctcccgacatgtggttgcttggctctagtggagagagtgcaaagatcgctgcacagcaaggtgcttcttttgcattcgcacagttcataaacggatacggtggacccgaggtaatggaggcgaatcaaaaacaattccaaccttcctatttaggagataaaccaaaatcaatcgtcgctatttttgttattgcgggagaaacaaatgaagaggcggaaaaaattgcttcaagtttagatttatcaatcttattactagaacaaggaaagcgtacaactggtactccttctatcgaaactgctcaaaattattcatatagcacgtatgatttattccgtataaaagaaaatcgtcaacgtatgatagtaggcgacccgtcttctgtaaaagaaaaaatcataaacttaagcaaagcgtacaatactgaagaatttatgattgtcacaattactcatcgatttgaagataaattaaattcttatcgcttattggcaaatgcttttaatttataattttaaaaa

SEQ ID NO: 9333 - DNA, 1262 bp, Bacillus anthracis
ctgatgctttggagaagtgtagtagggaaagttatggatgaccatattacttctcgtttcgttcgtgcttggatttgttgcgattttactttcgcagttttttagaacatattatgttgatatgagtgaagctaggcttcaaaaagttgcaacaagtgtttcagagttaattgaagaaggtgccgatgtaaaaacgattgagaacatcgcgtacaaattttctgatccactttcaaggattattattgtagaagagggtaaggaaatctcttcttcaccgaaacaagaagggttagttactctaacaatagatgatttaaaagaagataaagaattagctgctgtttttacggacaaaaaagaaattaaaaataaagttagaaaagcgtctaatagtaggaagaattaaaaccccggaaatgattatatgattgtcggaaaacccggtccagtcaaaaaatgaaagtgcagtgtttgtatatgaatctttacaagtgccgatacaaggtatggaaagaacgactgattttatattcttatcagcagggattgcgattatattaacaactttctttgcattcttcttatctactcgaattacagcaccacttcgtaaaaatgcgtgaggttgcttttgaggtgtcgcgtgggaagtttgatgcgaaagctcctatggtatctcaggacgagattggtgagcttgcaacggccttaaatcaaatgggaaaacagttgaagtttaatatgaatgctctgcagcaagagaaagaacagttagctagtattttaagtagtatggcagatggggttattacattaaatcaagaaggtgaagtcgttgtaatcaatccgccggctgaacatttcttacaagtttggcaagaagaaaaagagatagagctcagtaagaaactgccttctgaacttgttgaagagaaaccatctcgttgtagaaagcgaacaacaacaagtggttggaattaatttacaaaaaggtaactatgtggttcttatgacgccgctttacaatcaaacgaaaattcgcggggctgtagctgtattgcgtgatatgacggaagaacgccgtcttgagaagatgcgtcaagactttattgcgaacgtatcacatgaacttcgtacaccgatggtcatgcttcaagggtatagtgaagcaattttagatgatattgtgcaaacgaaagaagaaattaataaatgttcaaatcatttatgatgaatgagtgaagtttaggtaaacttta

SEQ ID NO: 9334 - DNA, 1291 bp, Bacillus anthracis
atgcttgatattaaatttttacgtacaaattttgaagaagtaaaagcaaagttacagcatagaggcgaagatttaactgattttggtcgctttgaagaattggatacgagaagaagagaactacttgttcaaacagaggaactaaaaagtaaacgtaacgaagtatctcaacaaatctctgtattgaagcgcgaaaagaaagatgcagaagctctaattctagaaatgcgtgaagttggagaaaaagtaaaagatcttgataatgaacttcgtacagttgaagaagatttagaaagattgatgtgatctattccaaatatccgtcacgaatctgctccagttggtgaagcagaggatgataatgtagtagctcgtacttggggagaagtgaaagaatttgcttttgaaccaaaaagacattgggatcttgctacagatttaggaatcttagattttggagcgtggctggaaaagtaacaggaagccgcttcgtattctacaaaggtgctgggcgccaagattagagcgtgctttaattagctttatgcttgatcttcatactgatgagcatggatatgaagaagtattacctccgtacatggtaaaccgtgcaagcatgacagggacaggacaacttccgaagtttgaagaagatgcattccgtattgaaagtgaagactacttcttaattccaacagctgaagtacctgtaacaaatatgcaccgtgatgaaatcttaaataaagagcaattacctataagatatgctgcatttagctcttgtttccggtctgaagcaggttcagctggccgtgatacacgtggtttaattcgtcagcatcagttcaataaagtagagcttgtaaagttcgtaaaaccagaagattcttacgaagagttagaaaaactaacaaatgatgcagaacgcgtgttacaattattagagttgccatatcgcgttatgagcatgtgcacaggcgatttaggatttacagcagcgaagaaatacgatatcgaagtatggattccaagctatggcacatatcgtgaaatctcttcttgtagtaatttcgaggctttccaagcgagacgtgcaaatatccgtttccgtcgtgagccaaacggcaaaacaggaacatgttcatacatttaaatggatctggtcttgcaattggacgtacggtagcagctattttaaaagactaccaaaaagaagatggtacaatttataattccagaaattcttcccccctaatatggggaggaaaaaacgggtaataaagtaaatttt

SEQ ID NO: 9335 - DNA, 1332 bp, Bacillus anthracis
atgagacaaaatgttcgtgaattagctcttgatggtttaattcaagtagaaaaaagtggtgcatacagtaacttacttttaaataatctaattgaaaaaagtacaattgatagaaaagatattggtttattaactgaaattgtatatggaacaatccaacgtcgtgacacattagattattatttacagccttttttaaaaaagaaagttgaagcatgggtaagagtattacttcgcttatctttatatcaaatgatttatttagaccgagtgcccgaaagagcggctattcatgaagcggttgagattgcaaagcgtcgcggacataaaggcattgctggtatggtaaacggtgtattacgttcgattcaaagagaaggtgtaccttctgtagatgaaatcaaagatccagtagaacgtttggcaattgcaacaagtcatccagtttggcttgttcaagagtggactgctgaatatggtttagaaactgctgagaaaatgtgtgaagtgaacatgttaccgcctgtaccaacagcgcgtgtaaatgttgataaaataacagtagaagaagcaattacattattggctagtgaaggtatagaagcgaagcgtggcgatttatcagatgatgcaattcaaattgaaaaaggaaatgtagcgcacacagatgcgtttaaaaaaggttttctttctattcaagatgaaagttctatgctggtagcacgcgctctagaaccagatgagggagatgtaattcttgatagttgtgctgctccaggcggaaaaacaacgcatattgcagagcgattaaaaggaactggtcaagtcatgtcccttgatttacatgcacacaaagtacgcttaattaaacaacaagcagagcgacttggtctagaaaatgtcgaaactaaggcattagatgctagaaaagtgcaagaacactttgcaaatgaaacatttgataaaatattagtagatgccccatgttctggatttggtgtaattagacgtaagcctgatattaagttaggtaaagataaaggcgatagtgaaagattatcgatgatccaatttgcaatactagaaaaaatcgcaccgttattaaaacaaggtggtcgccttgtttatagtacgtgcacaattgagaaaatagaaaatgaacaagtaatagaacgatttttacaagagcatccggagtttgagtgggatactacgataaaagagcgtatgccagaaaagctaagtccgtatatggatgaaggtcaagtacaaattttaccgcattattttgcaacagatggcttttatattgcttgtttaaggaagaaggtg

SEQ ID NO: 9336 - DNA, 360 bp, Bacillus anthracis
atgctttcagcacttatcccttccgcacatagctacccagctatgcccttggcagaacaactggtacaccagcggtgcgtccatcccggtcctctcgtactaaggacagctcctctcaaatttcctacgcccacgacggatagggaccgaactgtctcacgacgttctgaacccagctcgcgtaccgctttaatgggcgaacagcccaacccttgggaccgactacagccccaggatgcgatgagccgacatcgaggtgccaaacctccccgtcgatgtggactcttgggggagataagcctgttatccccggggtagcttttatccgttgagcgatggcccttccatgcgggaccaccg

SEQ ID NO: 9337 - DNA, 2666 bp, Bacillus anthracis
tatctatagtgattcattatgtggcaatgccttttctatatgaatactcatttccctttcaaatattaattggaatgagtactttattcattgatattatcgcttgtagttatatactttatttttcaaacatgaaagaagggttacctcgtttattttggacgatattatgcgttggaactctctcttatttcattggagatatcgtcgttgcctatcaacgtttaattttaaaggactactatacattcgttgatccgtccgactttttttatttactttttttaattagctttgcattcgcctttctatatgaaatcatttataaccgagatttattagaaaagctttttatgatatgtgatatttgcattattgttacagcacaattcactttaagttactatttacttattgaacgaaccattcacgtttttacaacatcctatatcgacatatttgttcaacttacctatccaatggcagacttactcttccttctcataggaatcaatcttttattcagaccattatccttattaccgaaaaaagttggagcgcttctcggcagtgctttacttttatatgcgactacagatgcaatttatgcttttatcaaatactttacaccagagtattctatgtttacagttactcctctttatcaagtaactttagtactagtagcaatcgcctgtattatccatacaaaagaacctgaaaaacaagaacaaatactattaacacctaaacttggtgagtcaatcagattgtcattaccttatatttctgtcgtaatgctgattgtttttatattagttgaatacgtttttgcacctattgtagtaatcgggcttatcataaccttctccttcgtccttatacgccatagtttagttcgtaaacaaaataaattattattactagcccaaatgcaattcaactcagaactcgaaaaacaaattgaactgcgtacagaagatttagtagaacaaaaaaatgagctctatcataaccaacaaatgtttaagtctttatacgagcatcatccagatccaatcttcacattagatttgtatggtaattttctcaaagtgaataatgccggtacgactttactcggctatcaaacaaacgaattattaaatcaaccttactactcactcatatacgaagaagatttagaagaaattattaacacctttcatcgcgtaaaaaaagggcattctatttctttagaaatacgggcttatcataaaaatagagatatttactacttgcatgttacggctgttcctatctttttaaaagatcatatttcgggagtttatttaatgattaaagatattacggaaagcaagcaacaacaagagcaaattaattttctagcatatcgtgataccttaacagagcttgcaaaccgacgtgcatttcaccaatatgtagaacaagcaattgctcgatccaaaatatcaaaaagaccttttgctgttatgtttctagatttagaccgttttaaaattattaatgataccctcggtcatagggtaggagacctcctattaatcgcagtagcgaaaagactcgaaagaatggccacaccaaatatgaagctcgcccgtctagctggggatgagttcacaatccttattgagaactataataaaagaccagatgtaaaaagaatggctgatacgattgtagaagctatgaatgaaccatttgaaattgaaaatcaacatttacaaatctcaccgagcatcgggattgccatatatcctgaagcaggtgaagacccattgtcgattctacaacatgctgatatggccatgtatgaagcaaaaaataggggcaaaaacggtagctctctatacacgaaagaactgtacaaaaaaatggaacgaaaagctcgaattgaaaaagatttgccacttgctttagtgaataaagaattctatctcgtatatcaaccacaaattgatattacaacgaaaaagatcattggtgctgaagcattactacgttggaagcatccactattaggcgatattccaccgtgtgagtttattccaattgtagaagaaactccacaggtcattccacttggacattgggtattacaggaatcttgtcggcagttaacaatttggcattccttcggttacaaagatttaaacataagtgttaacttatcagcaaaagaattccagcaagatcatttaatcgagaacatttcacaaatactaacagatgttaaagtcgatccaaagtatgtaacacttgaattaacagaacgaattgcgatgatcgatgaaaaagaaacattatcaagactaaaacaattaaaggaatatggtattcaaacgtccattgatgacttcggcaccggctattcttctctcgcttatttatctattttccctatcgatacattaaaagtaccgagagaatttacacaactagctgatcatcgaccagaagagagagccatcgtttccactatcctttcccttgcaaatactttaaacctttctgtcgttgctgaaggaattgaaacagaaaaacaacttaagtttctacaaaggaacaactgtaaatatatgcaaggttactatttcagtaaaccacttactagccagcaatttataaaatttctacaaaaaaca

SEQ ID NO: 9338 - DNA, 1350 bp, Bacillus anthracis
atgaaaaacgtaaagttttttctaatgagttggttatgcatacatgtgtgcttgctcttcccgctacaaagtaaggcggaagagcaaaatgtgccagaacaaaatataaatgaagtgaatgtgcaagaagagaataaggaagttcaagaacagctagaacaagtggaaatgaagcaagataaagaggaacaacaagaagcaaaaaatgaacaagaaaccgaaaagaagatagagacggatcaaggggttattacagtaaataagccggaattaaaagttggcgaagaagtgctggttactatagagccgaaagagaaaaatgttcaaagtataaaaggtattttgcgcttgccaaaaaacggcgatcagtatgaacaagaaagaatgctatcgtttaagtatgaagaggaaacgaagcgatggattgctaactacaaggtcgagacttttgatttgcaaggtgattggaatcttcagctcgttcaaagttacaaagaaaatgagaaagaagagcttgtagaaaatgaagtgaaagtcccgctcattcatataaataatgaaatgccaacgctagataaagagttaccgaagttacataaagttacgattgatgagatgaagggaaacgtaattgaacgaaaacaaggtgattctatacgtgtacgagtgaaggcaacagacgtagaatcagccgtgaaagaagttcatgttacattaaaaggaaaagaaaataaagagattacatttttattagattacaataagcgcgatatggattggcaaaaagtatttgaaataacggatgcgttgccaagtgggacatacgaactacttgtagaggtagtagatgcggctggaaataaactgattgaagcaagtgagtatgtcgtttctgttttggagcaaaaaacagaagaggataaaaagatagaagaaccagagaatgaagataaattagaaaataaattagaagataagaaagtaactgagaagcaggaagactcgaaagtagaaatctcgcttccagaagaaaaaacgccagttgttcaaattccaaaaaaagaagagaaagtaaacgatcttataaaagaaccattgaaagagaaagaaaaaattacttatgttataaaagagcctctcacagacaacaaggaagtaaataaaacgaaggctcaaaaagataaagataataacaatcaagtcatttcgaaaaagaaagagaaaaaagaagaaccagaagagaagaaagaagcaaaaagtgaacagggaatacaagcttctaatgtatttgctatcatgtcaggtttattcgtactatttttagttttaaagagtaataaagaatggggc

SEQ ID NO: 9339 - DNA, 1542 bp, Bacillus anthracis
gtgcgaacgaaaaaacgacttcttcgtctttatggaattggaggagaaagcgtcatggataagttaatggagaatcattggtttttaaaaggaatctcattactattggcgtgtatgctttttatgtcagcgactttaactgaaaaaaatacgacatcggggatattaccttttgcaaatgatgcgaaagaaacactaactaattatgctattaacgttaagtatgatgaagagaaatatattgtaagtggtattccggcagagggcgttaaggtgaagttagagggtccaaaagcagcagttgctacagcaaaggcgaaaaaacaatttgatataccagttgatttgagagatagcgaaaaaggaacttatgaagtttctttgaaaacgaacggacttccagatgatgtgaaaggaacagttcagccatcaacaattaaagttactcttcatgaaaaggcgagaaaatatgttcatgtagatctgaaattatcaaatgaggatcagatgccagcaggggctattctcgaaaaatcaagccttaaaccggatactgttgaggtagttgggacgaaagaagaaattgaaagtatttcatctgccaaagcgtatgttgatttaaaaggtgttaataaaactgttacaaaaacgcccgaagttacattatacaataaagaaggaaaacgtttaaatgtaagaacgagtccatctaaaattagtgtaacgttgaatgtggcgacgcaagctacggccaataatactgaaaaaactgttcctatagcatatacgaaaaaggggagtttaccggaaggattggccgttacaaatattagcgttgagccgagagaagtaacgatagcaggtccaaaagatatattagataatatacaatcgatagagggggtcgaagtagatcttagtcaattgacagagtctacaacattcgatacctctgttttattaccaaagggtgtaacaagtgcgaaaccaaatcaagtgaaggtttcagtaggcgtacagaaaacaaaacaaacgaaaacaagaacgattgatggtatatcaattcaaaaaaatggactttcgaaagacgttacggcccagttactttcgccgcaagatgggaagataagcgttgatatttcaggagaaacaagtatagtagataaaataatagctaatcaaataacagcagtgattaatctacaaaatgtgtctcctgggacgaaggatgttgccattcaagtgagtggccctagtaatatttcaatagagccaaaacaaaaaagtgctaaagtcacaattgtgaagaaagaaaatcccgataaagaagtacagggtaatggtgaacaaccaaattcaaataataatcaagataatcaagataatcaaactgaaaaaccaaaaaatcctgaaccagaacctaatcctgatcctgatccggaaaaggagaaggaaccggaacaaaataaagataaagaaactagccaagagccaacagtagataatcaaaaagagccagaaaaaggagcgaatcataatggg

SEQ ID NO: 9340 - DNA, 1014 bp, Bacillus anthracis
gtgaagaagattttaaacacagataagaagagagctattactgtaactacaatatttggttgtattggtatcgctgtcattttaattagtttaaatacaggaacattgagtatagcgccacttaaagtaattcaaacactttttggttatggtgattttgagagcgcaaccgtgctatatgattatcgtatgccaagaattataatcaccatgttagctggcattggccttgggatttccggtgcgattttgcaaggattatcacgtaatgcacttgcagaccctggtattttaggattacattccggtgcgtctttcggtcttatcgtatttgttactttctttcattctattaatgagaatgcatccattttaataccgttatttacatttggcggaggagtattagctgcatttcttattattttacttgcgagtgatcggtcaaaaggtttacttcccattagacttattctcgttggtattgcagtttcagctggctttagtgcaatttcattatttttctctctcaagttaaatgatgagacgtatacattcgcttctagatggctagttggtaacgtgtggggaagggactggattcatgtccttgcattattaccttggattttcatactaaccccttatgcatggctaaaatctaaaacgttaaatgccttgtcactaggtgatagtgtagcagcaggactaggtgtttctgttcaaaaagaacggttactacttttagctacagcggttggattatcttgcgggagtgtagcgatggcaggagggattggttttatcggtttagttgctccgcatatcgcaaggaagttagtaggtactacatatcaacacttccttcctttagctggcattatcggaatgattattttagtgctagcagatacgataggtcgttctatatttgagccaaactctattccagctggtgtagtagtggcagctttaggagcaccgtattttctttatttacttacaaaaacaaaa

SEQ ID NO: 9341 - DNA, 135 bp, Bacillus anthracis
atgtcaaaaacagtcgttcgtaaaaacgagtctttggaggatgcacttcgccgttttaaaagatcggtttctaaaactggtacacttgctgaagcaagaaagcgcgagttttatgaaaaaccaagtgtaaaaggt

SEQ ID NO: 9342 - DNA, 1209 bp, Bacillus anthracis
gtgggcaaggtgaaagaaatttcgaagcgaaagctacttggtatagcggggcttggatggttatttgatgcaatggatgttggaatgctttcatttgtaatggtggcattgcaaatagattggggattaagtacgcaagaaatgggctggataggcagcattaattcaattggtatggcagttggagcgctcgtttttggaatactatcagataaaatagggcggaaatcagtctttattattacattattattattttctatcgagtttcggtttaacggctttaacgacaacactttctatgttccttgttttaagatttttaatcggtatggggctagggggagagcttccagttgcctctacattatgtatctagagagtgtatgaagcacatgaacgcggcaaaatagttgtgttattagaaagtttttgggcaggtggatggttaattgcggctcttatctcgtattttgttataccgaaatatggttgggaagttgcgatgatattaagtgcgattccggcgctatatgctttatatttaagatggaatttaccggattctccgagattccaaaaggttgaaaaaaggccatctgttatcgaaaatataaagtcagtttggtctggagaataccgtaaggcaacaattatgttatggattttatggttttctgttgtcttttcctattatggaatgttcctttggttacctagtgtaatggtattaaaaggatttagtttaataaaaagtttccaatacgtacttattatgacgttagctcaattgccgggttatttcacagctgcttggtttattgaacgtcttggtcgtaagtttgttttagttacgtatttaatgggtacagcatgcagtgcttacttatttggagtagcagagtcattaacagtattaatcgtagcaagcatggtactatcctttctttttattaggtgcttggggtgcattatatgcctacacacctgaacaatatccaacagttattcgtggtacaggtgcagggatggcagcagcatttggtcgtattggtggtattcttggaccgctattagtaggatatttagttgcttcacagggctcactatcactaatatttcacgattttctgtggatccattttaataggcgtatttgctgtaattatacttgggcaagaaacgaaacaacgagaattagtataagat

SEQ ID NO: 9343 - DNA, 396 bp, Bacillus anthracis
atggtgatgacagatccaattgcagacatgcttactcgcatccgtaatgcgaacatggtacgtcatgagaaattagaggttcctgcttctaaaatcaaaaaagagatcgctgaacttttaaaacgtgaaggtttcattcgtgatgtagaatacatcgaggataacaaacaaggtatccttcgtattttcctgaaatatggtgcaaacaatgaacgtgtaatcactggattaaaacgtatcagtaaacctggcttacgcgtttacgctaaagctgacgaagtaccacgtgtacttaacggattaggtatcgctattgtttctacatctaagggagtaatgacagacaaagacgctcgtcaattacaaactggtggagaagtagtagcatacgtttgg

SEQ ID NO: 9344 - DNA, 1299 bp, Bacillus anthracis
atgaacagcaatgaaatatatgttagtcttgacatcggtacatccaatgttaaagtcatcattggtgaaatggttaatgacagcttaaacattattggtgttggaaatgtgaaatcaaatggtttaaagaagggatcgatagttgatatagacgagactgttcgatcaattaaaaaagcaattgaacaagctgagcgtatggtgggaatccacattgagcaagttgtagtaggtgtcaatgcaaaccaggtacagctacttccttgtcacggagtagtcgctgtttcaaatgaagatcgtgaaatcgggaatgaagatgtcttacgcgttctagatgcagcacaagttgtgtcaattgctccagaacgtgagtttattgatgtggtacctcgacagttcattgtagacggtcttgacgagattaacgatccacgcgggatgatcggtgtaagattagaaatggaaggtacacttattacaggctcgagaactttactacataacctacttcgttgtgtagaaaaagcaggtcttgaaattgttgatatttgtcttcaacctttagcggctgcaacagttgctatatcttcggatgaaaaaaatagaggagtagcccttgttgatatgggcggaggatctacaactttatctatttttaaagatggagagttacaagcgacgagcgtattaccattaggtggagaccatataacgaaggatattgcaattgggttgaaaacttcaacagaaaatgcagatcaaattaagttgaaatatggacatgctttttatgatacagcatctgaagaagagatgtttacggttcctattatgggaagcgaccaaacagaacaatattctcagttggaattatcggatataatagaggctcgtgtagaggaaattttaatgtttgttcaagatgaagtgcgtaagttaggagtaaagcaagtagcttctggttatgtactaactggtggaattgcttctatgccaggtgtccttgatcttgcatatgatattttacatgaaaatgttcgtatagcgactcctgattatattggcgtgcgtgagccacaatatacaagtggagtaggattaattaaacattcttatcaaaaagctaaattacgtgggaaaaatgtgcaggaaaagcaagagcattttgaaccagtaccagctccagcgccggtacaacagcaacctgcgaaacaaaaaactcgtaatcaaaacaataataatcaaaatgatgaccgtatgatgtcaaaagtaaaacgtgtattccgttatttatgggat

SEQ ID NO: 9345 - DNA, 313 bp, Bacillus anthracis
ttttttggggggggcccgaaaaggaaaatttggccacaatttctttcaggcgtcctggtattcttaaaaagtcctgttgggaaagaagcagttctttaggaattggattcctgcaggattggtgctgcatattttcatttagggaagagatgccgaaacatttgtacagtgggagcaaacattcgaaccagttactgaaaatcacgaactatataaagagttctatgaaacatggaaaactgtgtataacagtcagctcgctttagctgataacgggctcacctcacacatgtggattgcgcctggtgcactg

SEQ ID NO: 9346 - DNA, 3609 bp, Bacillus anthracis
ttgatagatgtaaataactttgaatatatgaagattggacttgcttcacctgacaagattcgttcttggtcatacggtgaagttaagaaaccagaaacaattaactatcgtacgttaaagcctgaaaaagatggcttgttctgtgagcgtattttcggaccacaaaaggactgggaatgtcattgcggaaaatacaaacgtgtacgttataaaggtgtagtttgtgatcgatgtggcgttgaagtaacgcgtgcgaaagtacgtcgtgaacgtatgggtcatatcgaattagctgctcctgtatctcatatttggtatttcaaaggtatcccgagccgcatgggacttgtcttagacatgtcccctcgcgcgcttgaagaagtaatttatttcgcttcttatgttgtaacagaaagtggagatacaccacttgataagaagcaattactttctgaaaaagaataccgtgcatatcgtgatcgatatggtagcacattccaagctgctatgggtgcagaagcgattaaaaagctattacaagacatcgatttagataaagaagtagacttcttaaaagaagaattaaaaacagcacaaggacaacgccgtactcgtgctattaaacgtctagaagtattagaagcattccgtaactctggaaatgagccatcttggatgatcttagatgttctaccagtaatcccaccagaactacgaccaatggtacagttagatggtggacgttttgctacttctgacttaaacgacttataccgtcgtgtaattaaccgtaacaaccgtttaaaacgtctattggacttaggtgcaccaagcattatcgttcaaaacgaaaaacgtatgttacaagaagctgtagacgcattaatcgataatggtcgtcgtggccgtccagttactggaccgggtaaccgtccattaaaatctctatctcacatgcttaaaggtaaacaaggacgtttccgtcaaaacttattaggtaagcgtgttgactactctggtcgttctgtaatcgttgtaggaccgaacttaaagatgtatcaatgtggattaccgaaagagatggcgcttgaactgttcaaacctttcgtaatgaaagagttagttgaaaaaggattagcacacaacattaagagtgcgaaacgtaaaatcgagcgtgtacaacctgaagtttgggacgttttagaatctgtgattaaagaacatccagtacttctaaaccgcgcaccaacacttcaccgtcttggtattcaggcgtttgaacctacattagtagaaggtcgcgcaatccgtcttcacccacttgtatgtactgcatacaacgcggactttgacggtgaccaaatggccgttcacgtacctttatcatcagaagcgcaagcagaagctcgtcttcttatgttagcggcacaaaacatcttgaacccgaaagacggtaaaccagttgttactccatctcaggatatggtattaggtaactactacttaacacttgagcgtgaaggtgcaatcggtgaaggtatggtcttcaaagatgcgaacgaagcattacttgcatatcaaaatggatatgtacatcttcatacgcgtgttgcagtagctgcaagtgcagtaaacaacgtaacatttactgaagagcaaaagaatatgcttctattaacaacagttggtaaattaatatttaacgaaatcttaccagagtcgttcccttatattaatgaaccaacaaattcaaaccttgaaaaagaaacaccagcgaaatatttcgttgaaaaaggtgcgaacattaaagagattattgctagtcgcgaagaagtggcaccattcagcaagaaaatccttggtaacatcattgcggaagtgtttaaacgtttcaaaattacagaaacgtctcgcatgcttgaccgtatgaaaaacttaggattcaagtactctacaaaagctggtattacagttggggtatctgacattcttgtattaggtgaaaaagatgaaattctccacgaagcacaagcaaaagtagataatgtaattaaacaattccgtcgcggtttaatcacggaagaagaacgttacgatcgcgttatctctatttggagtaatgcaaaagatgttatccaaggaaaactgatgaagtccttgaataaacgcaacccaatcttcatgatgagtgattccggtgcccgtggtaacgcatcgaactttactcagcttgctggtatgcgtggtctgatggccaatccatctggtcgtatcatcgaacttccaatcaaatcaagtttccgtgaaggtttaacagtacttgagtacttcatctctacgcatggtgcgcgtaaaggtcttgccgatacagcactgaaaactgccgattctggttacttaacacgtcgtcttgttgacgttgcacaagatgtaatcgttcgtgaagatgattgtggaacagatcgcggtttattaattggtgcgattaaagagggtaatgaagttattgagtcattatatgatcgtcttgttggacgttttgcaagaaaaactgtaaaacatcctgaaacaggtgaagtattagttgctgaaaatcaattaattactgaagatatcgctcatattgttgaaaactcgggtgttgaaactgtaaacattcgttcagcgtttacgtgtaacactcgccatggtgtatgtaagaagtgttacggtcgtaacttagcaactggaacagacgtagaagtaggggaagcggtaggtattatcgcagctcaatctatcggtgagccaggtacacagttaacgatgcgtacgttccatacaggtggggttgccggagatgatatcactcaaggtttacctcgtatccaagagatcttcgaagctcgtaatccgaaaggtcaggctgttatcagtgaaatcgacggtgttatcgcagcgatcaacgatgttaaagatcgccaagaagtagttgtacagggtgaagttgaagctcgtacgtatgctattccttatggtgctcgtctgaaagtaattccaggacagaaaattagccacggtaaagagttaacagaaggttctattgatccgaaagaattactaaaagtaacagacattacggcagttcaagaatacttattacgtgaagttcaaaaagtataccgtatgcaaggggtagaaattggtgacaaacacgtagaagtaatggtacgccaaatgttacgtaaagtacgtgtgagtgatgcaggtgaaacagatgtattaccaggaacattactagatatccatcagtttactgatgcgaatgcgaaggtgttactgcaaggtaaacaaccagcaacagctagacctgttctacttggtattacaaaagcttcacttgaaacagattcattcttatctgcagcatcgttccaagaaacaactcgtgtcttaactgatgcagcgattaagggtaaacgcgatgagcttctaggattgaaagaaaatgttattatcggtaaacttgttcctgctggaacaggtatgaatcgttatcgcaaagtggatcttgttaaaactacacaagatgacatgaatgtagaaaacgatgaagtttatgtggaacag

SEQ ID NO: 9347 - DNA, 810 bp, Bacillus anthracis
atgaaaaaagtattattaagcattgtaagcggagcggtactattattaggcgcatgtagcgctggttcggataaagaagtaaaagcgttagatgagaaaaagattactgtcggtgtaacaggcgggccgcatgaacaaatttttgaaaaggtaaaagaagtggcagcgaaagacggtctcgaaattgatgtaaaagtatttaatgattatgtagcaccgaacgtatccctcgatgaaaaaagccttgatgtaaatagctatcaaacaaaatcatatttagacgtgtttaaagctgaacgtaatatgaaattaaccgaagtattttcaacagtaacattccctatgggcgtatattcaaaaagcttaaaggatgtaaaagacttaaaagatggtgatgcaattgctgtaccaaatgatccaacgaatgaacttcgagctttaaaactatttgaaaaagcaggagttttaaaagtggatccaaaagcgacagaaaaagcgactgcgaaagatgtaattgaaaatccaaaaaatttaaagatcgttgaattagaggcatctcaattaccaacacaactaagtgaagtaaaagcagctgcaattaatacaaactttgcattaggtgcaaaattaagccctgcgaaagattctatcttccgtgaaggaaaagattcaccatatgtaaactgggtcgttgttcgtactgaaaataaagatgatgcggttgtaaataaattaaagaaagcttatcaatctaaagaagtaaaagaatttattgagaaaaaatttgatggttctgttttaccgtcttgg

SEQ ID NO: 9348 - DNA, 2418 bp, Bacillus anthracis
atgttcgtatcatatcgttggttacaagagtatgtagatattaaagatgtaacagcacaagaactagcagacaaaatcacgaagagtggtattgaagtagaaggtgttgaagtattaaataaaggtgtaaaaggtgttgtagttggtcacgtattagaatgtgaaaaacacccagaagctgataaattaagcaaatgcttaatcgatatcggtgaagaagagccagttcagattatttgtggtgctgctaacattgcaaaaggtttaaaagtaccagttgcaaaagttggtgctgtacttcctggcaacttcaaaattaaaaaagcaaaactacgtggtgaagcttctcacggtatggtttgtgctcttcaagagcttggtattgatggaaagttagtttcaaaagaatacgcagatggtatcttcatcttcccaagtgacgctgaagttggtgcggatgcacttgaaattttaaacttacatgatgaagtacttgagcttggtttaacaccaaaccgtgcagattgcttaaatatgttaggtgttgcatatgaagtagctgctatttacggccgcgaagtaaaacttccagctatcgacttacaagaaacagcagaaaaaacttctgattacatttctgtaagtgtagaagcgaaagaagaaaacccattatacattgcaaaaatggtgaagaacgtaaaaattggtccatcaccaatgtggatgcaaactcgcctaatggcagctggcattcgtccgattagcaacgtagttgatattacaaactacattttaatggaatacggtcaaccgttacatgcatttgattacgataaattaggttcaaaagaaatcgttgttcgtcttgcaaaagaaggcgaaaaaattgaaacgttagatgatcaagaacgtacgttacaaagccaccaccttgttattacaaacggcacaaaagcgttagctgttgctggtgtaatgggcggagcggattcagaagttacaaatgagacagtaaacgttctaattgagtctgcatactttgcaggtcaaactgtgcgccgtacatcaaaagacttaggtcttcgcagtgaatcaagtgcacgtttcgaaaaaggaatcgacccaacgcgtactttcgaagcaattcaacatgcagctgcgttaatggcgaaatacgctggcggtgaagcacttgaaggtgtcgtagaagctgacaacttacaagtacaagagcgtacagtatcggttactgctgagaaagtaaaccgtgtattaggtacaaatatttctgcaagtgaaatgggtacaatgttcacaaacttaaagttcccatttacagaagtagaaggaacattccacgtgaatgtaccagcacgccgtcctgacattacaatttcagaagacttagtagaagaagtgggccgtctatacggttatgaccacattccagttacattaccttctggaacgatgactcgtggtaaattaacagcagcacaaacgaaacgtcgtaaagtacgtcgcttcttagaaggtgctggcttatatgaagcgatcacatattcattaacaagcgctgataaagcgaaacaatatatggttgagccaaatgaaaaagcgcctgtaaaccttgcacttccaatgagtgaagaacgtagccaacttcgtttaagcttagtaccgcaactactagaagcagtttcatacaatgtcgctcgtaaaaacgacagcgttgctttatacgaagtaggttctatcttcttaccgacagaagcaggagaacttccgaaagaagaacaacatcttgcaggtgttatgacaggtcttgctcttcaccatgcatggcaaggtgagaaaaaagtagtagacttcttcgttgtgaaaggtgtactagaaggactatttgacgtgcttggtgtttcaaaccaaatcacatatgcaccagcaaaacgtgaaggtatgcacccaggtcgtacagctgatatcgtattagatggcgaagtaattggtttcatcggtcaattgcacccagaagcagaaaaacaattagatgtgaaaaatacattcgtattcgaactatctcttgtaaaagtattcggtacagacgcagaagaaacttactactcagcaattccacgtttcccatctatgacacgtgatatggctgttgtcgtaacgaaagaaacaaaagctggcgaaatgaagcaagttattgctgaagctggtggagaactgctgaaagacgtaacgctgtttgacttatacgaaggtgaaaaaatggaagaaggcaagaaatcacttgcattctctatgaactacttcgatccagagcgtacgttaacagacgaagaagtaacagaagcacataaccgcgtattaacagcggtagaagagaaatttggtgcggagttacgtaag

SEQ ID NO: 9349 - DNA, 1235 bp, Bacillus anthracis
gtcatcgcagaagtaaagcgagcatcaccatcaaaaggagatattaatttacacgttgatgtacgaaaacaagtgaagacatatgaagaatgcggcgctggtgcagtttctgttttaacagacggtcaattttttaaagggtcattttatgatttacaaacggcaagagaagaaagtagcattccgcttttatgtaaagatttcataatcgataagattcaaattgatagagcgtatgaagctggtgcagatattattttactaatcgtagcggcgttaacgaaagagaaattaaaagagttgtatagctacgtactagaaaaaggattagaagcgattgttgaagttcatgatgaacaggaattagaaattgcaattcaattaaatccgcacgttatcggtattaacaaccgtaatttaaaaacattcgaagtcgatttaagtcaaacagaaaagcttggaaaacgattaaatgaggagaaattactttggattagtgagagcgggattcattcaaaagaagacataatccgcgttaaacgagctggggcaaaaggtgtattagttggagaagcgcttatgacatcgtcttctattcataccttttttgaagattgtaaggtgaacatatgaaagtgaaaatttgcggtatcactgatatggaaacagcaaaacgtgcttgcgaatacggagctgatgcacttggatttgtttttgcagaaagtaagcggaaaattactccagggctagcgaaagaaatcattcaggaacttccagccaacgtgttaaaaatcggtgttttcgtaaatgaatcagtagaagtaatccagaaaattacagggaattgcggattaacacatgtacaactacatgggggtgaagacaatcatcaaatcagaagattgaatattccgtctataaagtcgctcggagtaacttcagagagtgatatgaaaaacgctcaagggtatgaaacggactatatattatttgatagcccgaaggaaaagtttcatggaggaaatggaaagacatttccttgggagttacttgcgcatatgccaaaagaattacgagagaaaacgatattagctggtggattaaacactcttaatatagaagaagcaattcgaactgttcggccatatatggttgatgtgagcagcggagtagagacagaaggaaagaaagatgtagagaaaataaaacaatttattataaaagcgaaggagtgt

SEQ ID NO: 9350 - DNA, 412 bp, Bacillus anthracis
ctacaaattacagcgaacgataaaggaattacgtctgttatatttgttgatgagagacaagaagaacatacaaatgaaatgatagatcaatgtataaatgagctcgatgaatattttaaggggaatagaaaagagttcacagtcccgttgtctcctgagggaacagcatttcaaaaaaatgtatgggatgcgctctatacgattccttatggcgtaagtgcttcatatttagatattgcagagaaagtcggaaatacgaaagctgtacgagcaataggaggagcaaatagttcccatcccgttttcaaaattggttccggtttcatggttaataagaaaagaagcgggaatacttgtggggtatgcgggccggtttatggaagaaaagggtggttttttaaaccgggaaggg

SEQ ID NO: 9351 - DNA, 1737 bp, Bacillus anthracis
atgaaaattatggactattacattagactaagactacatgcacaagatcaacaacatatacgaaatagcttacaagaattagcggatgttttatattgcagtacgaaaaacgtaaagattttattaaagaaaatgagcgaggagcaattaattagctggactccaggacgaggacgcggaaataaaacggaaattctattttcacataatttcgtagaagcgattgaatcctatacagatgaactgttagcgcaagaaaaattaaaggacgtttttcttcttttaaaagaacctctcccccctgcacttcaaaaaaagatagaaaataaactacatcatcattttggatacgaaccttcaaatgatatgtacgacatattaaagattcctatatcgagaaagatattcccattagatccggcttttgtcgctgtaactacagaaagccatcttacgagtcaaatttttgatacgttagtcgtttataacgatgttacggaaaaaatggaaccacacattgcgcatacgtgggaattaagtgaagactggcttacgtggacgttctatttacgaaaggatattcattttcataacgaaacaattttaacttctaaagatgtgcaattttcatttgaaaggctaaaagaagttcattcccctttcgaatggttaacagaagaaattgttcaaattgaaacaccatcgccactgcaaataaggttccatttagcaaaacccaaccttttttccttacactatgtaagttccatacaactagcaattttaccgcgtgatgtgagtatcgaaaatcatcattatataggtacgggacctttcaaacttgctcattactctgaagataatatcgtactcgaagcattcactcattattttaaagagcgcgcattattagaccgtattgaattttggggtattccggatcatgtacaaatcgatgctgattatgaactaccaaatgaagaggaaaatgaaaggcatgatatacaaatagaagaaataggttgtatttatgctggcttcaactttacaaaacctggtcctcatcacgacatgtactttcgaaaagcttggagagaactatatgacgttgaaacgatacttcgtagcatagaaggaagacgaacaattgctgcatcaagctttttccctgaaagaagccgccaagcttttaaaaggtcttactctttagaaaaagcgaaaaagtatttaaaaaagagcacttataatggagaggcgatacatatttacttcttcgcatttaaagatagtgcaaatgatgcatatttcctaaaagaacgatgtgacggtctaggtatacaagtagagcttcacccatttctcgtttcagattatatgaaccgttctatcgatcaacatgccgatattattttcatgggagaagtgtttgcttccaatcacgaacttgcattcttaaatgtatttaaaaataaaagttgcttcgtaaaccggttcatggaccagcactatgaaaaacaaattaactgtttgttagatacatttttattagaagaaaataaagagaaacgctatgagctcatgtatgagatcgaagaatttttacaagcagaacacatcattttatttaactatcacgttttaaaaagaaagacatacccttcttctttgaaaaacgtaacaattgattcattcggttgggcaaattttgcgaagttatggatacagccatccatgtct

SEQ ID NO: 9352 - DNA, 913 bp, Bacillus anthracis
gtgaaaatcgcaatttctggtggtaccggctttatcggcacatacctttctactttttttattcaaaaaggatatacggtttacattctcacaagaaaaaaaactactgaaacttctcaccctaaccttcagtatgtgcaatggacaccagatttacaaaccttccctctctcttctattgatgtagttattaatctagctggagagtctattaatagtagatggagcaagaaacaaaagaaaatcattttaaacagtagaatttcaacaacaaaaggactcattatacaattgcaggcacttccgtgcaaaccaacatacttttattaccgcgagtgcaattggatactatggaccgtctgaacccgagtcttttacagaacagcatgtgactcccggaaatgactttttagcaaatacagtatattcatgggaacaagaagcatctaaagcacgctctctcggaatacgaacaatctatgcacgattcggagtcatattaggtccagacggagggagcccttccccaaatagggtattcccatactaattataaattgggagttccaatgggatttggaaacccaatggttatcatggatttctttaaggagatgtcgttttcagtattgttttcttccttcccaaaaaaaaaattgagggccggctcacaattacagttccagaccttaaaagaatgaagggattgggagataccattgcaactataatgaaaaaccctcattggtcacctgtcccttcatttatgcttcatgctttattaggtgagatgagcatacttgtactagaaggacaacatgtattccttagtaaagcaattgagcatgggtatcaatacacatttccaacaatagcccatgcattacaaaatatactttcgcatacaatgtag

SEQ ID NO: 9353 - DNA, 267 bp, Bacillus anthracis
ggctcgtagctggaaaaaggaccattgtcgatgtcatttatgagtaaaatgcaaagctaaatgaactgagcaaaagcaagtggtaaaactgggtctcgtcgttcaacgatcttccctcagttcatcggtcacacaatcgctgtatatgacggtcgtaaacatgtacctgtatatgttactgaagacatggtaggccacaagtagggtgaattcgcaccaactcgtacgtataaaggtcatgatgctgacgataagaaatctagaaga

SEQ ID NO: 9354 - DNA, 1513 bp, Bacillus anthracis
cgtcgtaaaaagttacataccttacgtagcaaagaaatcgatcctttcggtaaacgatttgagcgtacaaatgcaccaaatgacttattaagcctatatggagagtcctctaaagaagatttagaagagaaagaaatctctgtttctatcgttctgtcgtattatgacaaagcgtggtaaaaggaaaagctggatttgcacatattcaagatttacatgttccagttcaaatttatgttcgtaaagatgttgctggagatgaagaatacgaattatttaaaacagcagatttaggtgacttagtaggtattgaaggtaaagtttttaaaacgaacgttggaagaactttcagtgaaagcaacaggctttacactattaacgaaatctcttcgtccattacccggataaatatcatggggtaaaaagatgttgaacaacgctaccgtcaacgttacttagactttatttaccagtatgggaaagtcgtgaaacatttcgtcactcgcagtaagatcattttcgcgaaatgaagaagatccttagatgaccaccggttatcttgaagtgggaacaccttatgatgcatgcaattgcaggtggagcttttgctcgtcctttcatcacgcatcatatggcgttagatatggaattatatatgcgtatcgcaattgatcttcatttaaaacgcctttattgtgggtggattagaaaaagtttatgaaatcggccgtgtattccgtaatgagggtgtatcaactcgtcataatcctgaatttacgatgattgaattatatgaagcgtatgctgattataaagatattatgaaactaacagaaaatatggttgctcatatcgcgaagtcaagtactaggtacaacaacaatcccaatatggtgattatgaaattaatctagaaccagaatggacacgccttcaatatggtagatgcaattaaagaacattctggagccagatttctggaatccgatgagtgtagaagaagcgtcgtgaacttgcaaaagaaacatgatgtagaaattaaggataccaatggaagttggtcatattattaatgaattcttcgagcaaaaagtagaagataaattaatccaacccaccatttttttaccggtcatccgggtagaaatttcgcccacttgcgaaaaagaatgatgaaggatccccatttccaggattcgtttcgaaattgtttatcgttgcacgtgaacatgcaaatgcgttcacttgagctaaatgatccaatccgatcccaaaagaacgttttgaagcgccatttaaaaaacgcccaacaagggaaatgaccaagctcccatgatggatgatgattatatcgaagctcttgagtatggtatgtcctcctacaggtggactaggaattggtattgatcgccttgttatgttattaacgaatgcaccatctattcgtgatgtattattattccctgctatgcgtcataaacactgactaagctattggagatttctccaaagc

SEQ ID NO: 9355 - DNA, 1047 bp, Bacillus anthracis
aagaacgtttctgttttaacaattttagtaggattaatcgttactgtatttttagtgagtttaaatacaaggaacattaaaatccccgccaatggacgtaataaagtccttggttggacttggggctgaagatcagtttgttattttatttgaatttcgtaagccacgtatggttatcgctataataggtggatttgctttaggtaagtcaggtgggattttgcaaggtttatcccgaaatccccttggtgattccgggtattatcggtattaacgctggagcaggattaacagttgttatattcgtctactttttcttcgggaaagttgggactggtacatttttatctgtattatccttcccattcttcgcgttagtgggaggcgatataagcagcgggttattatttatttactagcatgaaaagacggcgtttcatctactcgattgatacttgttggtatcgccgttgcagcaagggtttggtgctgttagtttaattttttctatgaagatgacatctaacgatttccgtttttgcttaggatttggtatagcgggaaagttctttgggggcaccagattgggaagtttcgttttaagtgtcctttccatggaatggttatttttctggcccactaggttatttagtaaaggcacacatttttaaatgtagtgaccttggggcgactctacagccagtgggtttttggtgtaaacgtagaaaaggaaagacgtaaattattatttattgcagtttgtttagccaggtgcatctgtcgctgttgccggaggaattggttttatcggtttaaatggctccacatttagcgaggcgccttgttggtgggaaacatcaaattatgctgcctacagctgcactaataggaacgtttttacttttattcgcagagagtaatttcaagaaaagtggtgttacccacttcagaaataccgggtcggtctttgttatttctgtaattggtggcccccgttattttaatatcctttccttatgggggccaaggtaaaggggaggctttttg

SEQ ID NO: 9356 - DNA, 717 bp, Bacillus anthracis
atgggaaagaaaattttagtagttgatgatgaaaagccgattgcagatattttgaagttcaacctagaaaaagaaggttttgaaattgtaatggcacacgatggtgatgcaagcgattgaaaattccgactccaagaacagccagatatggttttattatatattatgctaccaggtaaggatggcttagaggtttgccgtgaaatacgtaaaagctcagaaatgccgattattatgcttacagcgaaggactctgaaatcgataaagtattaggtttggagcttggggcagatgattatgtaacgaagccatttagtacgaggggaattactgcttcgcgtgaaaggcgaattactgtcgccatcagcaaggtggtgctgcagaaaaagaagaaaatacgaaaatggttattgggcccaattgttatcaatcccaatgcgtatagtgtagcgaaacgtgaggaaaatattgagcttacacaccgtgaatttgaggctgctgcattatttagcaaaacatttaggacaagttatgacacgcgaacatttattgcaaacagttttggggttatgactactttggaaaaggtacgtacagtggatgtaacagtacgtcgtctacgtgaaaaaattgaagataatccaagtcatcctacattaattgtcactagacgtggagtagggtattacttgcgtgacccagagcaggaatagtat

SEQ ID NO: 9357 - DNA, 177 bp, Bacillus anthracis
atgcgtttaacgaactttttcggcgatgtaggtcgcgaaatgaaaaaagtaagttggcctaaaaaagatgaattactccgttcaacagcgactgttatcgctacagttgtcttctttgcgattttcttcgcagtagttgatatgggcatttcttctttaattcggttaattcttggt

SEQ ID NO: 9358 - DNA, 444 bp, Bacillus anthracis
atgaaagtaatttttctaaaagacgtaaaaggtaaagggaaaaaaggagaagtaaaaaacgtaccagatggttatgcaaataacttcttgctaaaacaaggattagctgctgaagcaacaaatagcagtatgaaaactttagaagctcaaaaacgcaaagaagaaaaagatgcagcagcagagcttgaaagtgcaaaacaattaaaagaaacgttagagaaactaactgtagaattaaaggctaaatctggagaaggtggccgtctatttggttcaatcacaagtaaacaaatcgtagatgcaatgcaaaaatctcacaagattaaacttgataagcgtaaatttgaaatggatgatgcaattcgtgcactaggctatacaaatgttactgtgaaattgcatccgcaagtaacagcaacagtaaaagttcatgttagtgaacaa

SEQ ID NO: 9359 - DNA, 643 bp, Bacillus anthracis
atgaaattctttattgatacagcaaatattaacgaaattaaagaaggcaatgcatttaggcgtattagctggagtaacgacaaatccatcacttgtagcaaaaagaaggcgtagatttccacgagcgtattcgtgaaatttgcaacgttgtagaaggacctgtaagtgcagaagtaattagcttagaagcagataaaatgatcgaagaaggaaaagagttagcgaaaattgctccaaacgttgtgtaaaaggttccgatgacaacagaaaggtttaaaagcagtaaaagcgttctctgacttaggaattcgtacaaacgttacattagtgttctcagcagttcaagcattacttgcagctcgtgctggtgcaacatacgtttcaccattcttaggtcgcttagatgatatcggtcataacggtatggacttaattcgccaaatcgcagaaatctttgcaattcatggcatcgaaggaagaaattatcgcagcatctgtacgtcacagtgttcacgtaactgacgcagcgttaaatggtgcacatattgcaacaatcccagcaaacgtaattgcttcattagtgaagcatccattaacagatcaaggaattgagaaattcttagctgattgggaaaaaacacaa

SEQ ID NO: 9360 - DNA, 1170 bp, Bacillus anthracis
atgagatacattacagctggagaatcacatggaccgcagttaacagttattttagaaggtgtaccagcaggtttaacgctggcggcggaacatattaataaagaattattaagaagacaaaaagggcacggacgcggaagacgtatgcaaattgaaatggatacagttgaaattgtaagtggcgttcgtcatgggatgacacttggctcacccattacgttaatcgtaaaaaatgatgatttcaaacattggacgaaagtaatgggtgcagagccaatttcggaaaaagaaagtaaagaaatgaaacgtacaattacgaaaccacgtccaggacatgcggatttaaacggggcaattaaatacggtcaccgtgatataagaaacgtactagagcgctcatctgcaagagaaacgacagttcgtgtagctgctggtgcagttgcgaaacaaattttaaaagaattaggcgtagaaattgcagggcatgtacttgaaattggtggagtaaaagcaaaacatatttcaaacttgtcaattgaagaaattcaaataattactgaaaactcaccagttcgatgtttagataaaacagtagaacaagagatgatggatgcgattgataacgcaaaaagtagtggagattcaatcggtggtatagttgaagtcattgcagaaggtatgccaattggcgtcggtagttacgttcattacgatcgtaaattagatgcaaaacttgctggtgcgattatgagtattaatgcatttaaaggtgctgaaattggcgttggttttgaagcggcaagacagccaggaagtaaagtgcatgatgaaattttatgggatgaagaacaaggatacacgagaaaaacgaataatgccggcggtttagaaggcggtatgacaacgggaatgccaattgtcgtaagaggtgtaatgaaaccaatacctacattatacaaaccgttagcaagtgttgatattgatacgaaagaagcattccaagcgagtattgaaagatctgatagctgtgcagtaccagcagcaggtgtagtagctgaatctgttgtagcatgggaacttgcacatgcactagtcgaacaattcggaaaagatcgtatggagttaattcaacaaaacattacgcaacataataaatacgcaaaagaattt

SEQ ID NO: 9361 - DNA, 933 bp, Bacillus anthracis
atgaagtatacaaaattgcaaaaggcaggactacatatttcaaagttggggttaggaacaaatgctgtaggggggcataatttatatgctgatgtgaatgaggaagaaggaaaacaattaatagaagaagctatggggcaagggattacattttttgatacagcagattcatacggtttcggtagatcagaggaattagtaggagaagtattgaaaggaaaacgccacgaaattgtacttgctacaaaaggtggaatacagccgctattaaatggagaggtgtatataaataatgaacgaagctatttaagaaatgctgtggaaaatagcttacgaagattacaaactgattatattgatttatattatttacattttacaaatccagaaacaagttatatagattcaattggagaacttactcgcctaaaagaagaagggaaaattcgttcaattggaatatctaacgtaaacgtagagcaattaaaagaagcgaatcagcacggacacatagatgttgtacaatcaccgtataatatgttggatcgtactgcaggggaagaacttttgccatattgtatagaatcaggtatttcatttatcccttacgggcctcttgcttttgggatattaggtggtaaatatacagaagattttaaattgaacgaaggagactggcgtcaaagtgtaaatctatttgaagaaaatacatataagagtaactttaaaaaagttgagaagttaaaaggcgtagctaaagaagaggctgtcgaagtatcgcatttagcattagcatggctattaaataaaaaaggaattgatactgttattcctggtgggaaaagagcggagcaaataagagaaagtgtaagagctgtggaagtttcattgaatgaaaatgtcatgaaagagattgaatctattttagaagat

SEQ ID NO: 9362 - DNA, 657 bp, Bacillus anthracis
ttgaaaaggatattgttagtttcaacaagcgctcatgatatgaatggacacccgactggtttgtggctggaagagctcgcagctccttataacttgtttaaaaaagctaagttcgatgttgatattgtgtcgatacagggcggtagagtgccgattgatagagtttctattccgaacgggatacctcgtgaatttaagcatgtcgcttctttattgcaaaatacgaagtcgatctcaacggttcatttttcggattatgatgcggttttatttggtggtggacacggggcgattgtagattttccaggtaatccatatgttgcaaatttaattgtgaatatgtacaacaataaccggattgtagccgctgtttgtcacggagtaagttctttagtcggtgtgaaaaataaggacggctcgttttttagtgcaggtaagcgtataacaggttatacaaatgatgaggaaaaagctgtacatttagaaaaacgagtggcgtttttattagaaagtaaaatgaaagaagaaggggctttgttttatgtggctccaaaattcacgccgcacgtcgtagtagatggggcgttaaatacagggcaaaacccacagtctagtatggaaatagggaaagctataggaagagctgtaaataaagta

SEQ ID NO: 9363 - DNA, 982 bp, Bacillus anthracis
aaaagggattggaaaaaacttgcatatgacgtagtagaagaaaaaatgattacgaaagaggatgcaatagcgatattagaagctgatgatacagaagttttagagattatgaatgctgcttacattattcgccatcattactttggtaagaaagtaaaattaaatatgattattaatacgaaatctggattatgtcctgaagattgcggatattgttcacagtcgattatttcagaagcaccaatcgataaatatgcatggctaacgcaggaaaagattgtagaaggagcacacgaagcaatacgccgtaaagctggtacatattgtattgtagcatctggtcgtcgcccgacggataaagaggtgaatcacgtaattggagcagttaaggagattcgtgaaacgacagatttgaagatttgttgttgtttaggtttcttaaaccgagatcaaggcggacgtttaagttggagctggggtacatcgttataaccacaacttaaatacacatgcgaataattacgaaagcatttgctccactcatacgtatgatgatcgtgttgatacagttcaaaaagcgaaacaagcgggtatttcaccatgttctggggcaatctttggaatgggagagacaatagaagagcgcgctgaaattgcattcgaattacaacgtatagatgcagattcaattccatgtaatttccttgttgctgtaaagggtacgccgcttgaaggacaaaaggagttaacgccagtagaatgttaaaagtgtggcaatgatgcttttgtaacccacaaagaaattcgtattcaggagggcgtgaatcaatttacgttctgtacagccaatcggttatttgcagcaaactctatttttgttggagactacttaacgacagctggacaagaaccgactgcagactggggtatgattgaagatttaggatttgagattgaagaatgtgcgttataagatagagga

SEQ ID NO: 9364 - DNA, 1284 bp, Bacillus anthracis
atgaataagtttgtcacgtttcttgataaaaacttatctggaccgatggcaagactttctgaacagagacatttacaagcaatccgtgatggagttatttcagcattaccatttatcatcgtaggaagtttctttttaatcgtagcatttccaccattaccgaaagatagtttcatatccgtttgggcattaaagaatcaaacaagtatattaataccatatcgcctaacgatgtttattatgtctttatatatagcatttggaataggatataatttagcgaagagttataagttagatgctttatcgggagctcagcttgcagtatgttcactgctattaacattaactcctgaattaattgataaaaaaggatttatgcttccgatgacaaatctcggagggcatggattattcgtgactatgattgtttctattttatcagttgagattttaagattttgtaagaagaacaacgtaacgatcaaaatgccagaacaagtaccaccttcagtatcgcgttcgtttgaagcacttatacctgctgcattcgttattattattattatgagccttattacagttgtttttaaagttgatgtacattacgtagtggataaattagccgcaccgttagtcaaagctggagatagttactttggcgtcataatacctgtatttttaattacatttttctggtccttcggaatacatggtgtatcggttgtaggtactgtagcaagaccgctttgggatgtatatttagggaaaaatggtgaagctgtagcaagtggtgcgagtcaatttccattcattgcaccagaaccgttttatcaatggtttatttggattggtggttcgggtgcaacgttagggcttgtgttagcaatgatcgtatttggtcgatcaaaatattcgaaggcattatcgagaacttgtattgtgcctgggatttttaatattaatgaaccagttatattcggcttgccgattgtattgaatccaattttaattattcctttcgtcattacgccgctagtaacagcgactatcgcttatgctgcaactgcaatgggatttgtaacgccaactcatattatgccgccatggacattaccagccccaattggtgcatatttagctacaggaggagattggcgtgcaattgtattagtcttaataaatatagcaatatcattccttatttatttaccattctttaaaatgtacgacaaaaatatgcttgaaattgagaagaatggtgaaggagaatctgttaatcca

SEQ ID NO: 9365 - DNA, 519 bp, Bacillus anthracis
atgtacttaataaatcagaacggttggattgaagtgatttgcggtagtatgttttctggtaaatcagaagagcttatccgccgtgttcgtcgtacgcaatttgcgaaacaacatgcaattgtatttaaaccatgtattgataatcgctatagtgaagaagacgttgtatcacataacggattaaaggtaaaagcagttcctgtttcagcttcaaaagatatatttaaacatatcactgaagaaatggatgtaattgcaattgatgaagtgcaattctttgatggggacattgtggaagtggtgcaagtattggcaaatcgtggctatcgtgtcattgtagctggtttagaccaagatttccgtggtctaccatttggacaagttcctcagctgatggcgattgctgaacatgtaacaaaactacaagctgtatgttctgcatgtggatctccggcaagtcgtacacaacgattaattgatggagaaccagcggcatttgatgatcccaattattctttc

SEQ ID NO: 9366 - DNA, 1128 bp, Bacillus anthracis
atgatagagaagaagaggattgagatttttccgaaacatatgggtttcttcccgtatatgtggttcgtttatctattatttccaatttaccatttagtgcaggcgtcagggtggaagcttataattgggagcggtatgttgataatttttattatcacataccgtcaactttattttgtgcagagaacgtttatttttttggcatgtattcaaatgatactcatctttttatttgctttattttacaatccttttatgatattctttggctttttcacggcaagtgcgatgggatttgcaccaagtaagaaagtatttcgggtattactatgtttgttagttataatgcttggagcatttgtatttgtaaatatgaatcaactaacaccgacaagtttagtaaatatcgttccaatgtttattttaatgattcttacaccatttggtatgcgcaactttaatcagaaaaaaatgttaagaaatcaattaaatgaagcgaatgagcaaattaaagacttagtaaaacgtgaagaacggcagcggattgcaagagatcttcatgatacgttagggcatacattatcactcattactttaaaaagtcagctcgtggagaagttaattgtaaaaaatccggagcgtgcaagtacggaagcgaaggaaattacacaaacatctcgcactgctttaaagcagctaagggaattaatttctgatatgcgtatgattacagtagaagaagagcttgagcaaataaaagcaatcttacaagctgctaatattagattagagattaaacaagaaacgagtgcgagttctttatcaccaattgaacaaaatattttaggaatgtgtttacgtgaggcagtgacgaatgttgtaaagcatagtaaggcgacgcgttgcacagtttctgtactagaatcacaaggcgaattaattttgacggtagaagataacggaattggcttagcagatcaaaaccatgatggaaatggcattcgtggtatgaaagagcgtattgctcttattgatggatctgttgaactggatatgattaatccagggacactattaacagtaaaagttccagttgttattcgaacaggaaaagatggggtgagggca

SEQ ID NO: 9367 - DNA, 1014 bp, Bacillus anthracis
atgaaatctgtcacattagacaaactacaacgtccgttaaaggatttacgtatttcagttactgatcgctgtaattttcgctgtcgatattgtatgccagaagaaatatttggtccggattactcgtttttgtctaatgataaaattttatcttttgatgaaattgaaaggataacgcgtattttcgtttctttaggtgttagaaaattacggattacaggcggagaaccgttacttcgaagaggtcttccacagcttattgagcgtcttaataaagtagatggtgtagaggatattggcttaacaaccaatggatcgttacttaaaaagtttgctcctgatttatataaggcgggtttatcacgtgtgacagttagtttagattccttagaagaagagcggtttttctatttaaatggtaatagaagcaaagtacaaagggttctggaaggcatacaagctgcagctgaagttggaatgaaaattaaaataaacatggtcgttcaaaaggggaaaaacgaacaggacatcttgcagatggcacaatactttaaggaaaacaaacatattcttcgttttattgagtatatggacgttggaaattataatggttgggagttaaaagaggtcgtatctaaacaagaaatagtagatatgattcatcaagttatgccattagaacggatagaagcgaattatgcaggtgaggttgcgactcgctatagttatattggaagtgatgaagaaataggtgttatttcatcagtaacagattctttctgctcttcatgtacgagagctcgtatttctgcagaaggaaaattatatacttgtttattcgcttctaaaggaaatgacttgagagaactgcttcgatctgactacactgacgaggaaataacagatgtcgtacgcgacatatggaacaaccgagaagatcgttattcagatgaacggttaagtaatagtaataaaaaagctatgcctaaaattgaaatgtcacatatcggtggt

SEQ ID NO: 9368 - DNA, 882 bp, Bacillus anthracis
atgttagagaatttatcgacagaacatcgcaatgagaagacgatgaatttagatgagatgaacataaaagaagttctgcaaagtatgaatgaagaagatcgaactgttgcattagcagttgaaaaagagatagaacatattgaaaaggttgtgcgggttgttattcaatcttttgaagaagagggccgattaatttacattggggctggcacgagtggccgtttaggtattttggacgcagtggaatgcccgccgacatttggcacagatgataaaatggtgcaaggatttatagcaggtggattgaaagcgtttactaaagcggtggaaggtgctgaagatcgcgaagagttagcagaagaagatttaaaaagtattggattaaacgagaaagatactgtaattggaattgcggcaagtggccgaactccttatgtaattggcggcttgaagtacgcgaatagcgtgggagcgagtacagctagtatctcttgtaataaaaatgctgaaataagtaaatatgcaaaactaaatgtggaagtagaaacaggcgcagaaattttaacaggttcaacgcggttgaaggctggtacagcgcaaaaattagtactgaatatgatttcaacagcttctatgattggtgttggaaaagtatataaaaatttaatggtagatgtgcaatctacgaatgaaaagttagtagaacgatcaaaacgaattattgtggaagcaacaggggttagttatgaagtagcagcagagcattatgaaaaagcagaacgtaacgtgaaagctgcgattgttatggtgctattgcagtgtgagtatggggaagcactggagaaactaaaacaagcaaaagggtttgtgaagaaggcatta

SEQ ID NO: 9369 - DNA, 1032 bp, Bacillus anthracis
atggaagcacgtttaaaagagctaaagcaaaaagcgttagagcttattgaagaagcgaaagagctaaaaggcttaaacgacgtacgcgtagcgtatttaggaaaaaaaggcccaattacagaagtattacgcggcatgggaaaattatcagcagaagagcgtccacgtatgggagcattagtaaatgaagtacgtgaagcgattcaaacgcgtctagatgacaaaatcagtaacttagaaaaagcagtaattgaagcgaaattagctactgaaacaattgatgttacattgccaggtcgtcctgttgaaacaggttgtcaccatccgttaacagctgttgttgaacaaattgaagatgtattcatcggtatgggttatgaagtagctgaaggaacagaagtagaaaaagactactacaacttcgaagcattaaacttaccgaaagatcacccagcgcgtgatatgcaagatacattctacattacagaagaaacgttactacgtacacatacatcttctgtgcaagcacgtacgatggaaaataataaagaaaaaggcccaattaaaattatttgtcctggtaaagtgtatcgccgtgatgacgatgatgcgacgcattcacaccagttcatgcaaattgaaggtcttgtaatcgataaaaacattcgcatgagtgacttaaaaggtacactgcaagtattcgtgaaaaagatgttcggtgaagatcgtgaaatccgtcttcgtccaagtttcttcccattcacagagccatctgtagagatggatatttcttgtatgatgtgtcacggcaaaggttgcggcacttgtaaaggaactggttggattgaaattttaggcgcaggtatggttcacccgaacgtacttgaaatggctggttatgattcaaaagaatatcaaggtttcgcattcggtatgggcgcagagcgtatcgcaatgttgaaatacggcgtagatgacattcgtcatttctatacaaatgatgtacgtttcttacaacaattcaaacgagcg

SEQ ID NO: 9370 - DNA, 1239 bp, Bacillus anthracis
acaatcatgattcaactaaaggatatcatcgactttacagacacatacggggcaaataactatcacccacttccaatcgttatttctaaagcagaaggcgtttgggtagaagatcctgaaggaaaccgctatatggacttattaagtgcatattcggcagtaaaccaaggtcatcgtcacccaaaaattattaacgctttaattgaccaagctaatcgtgttacgttaacttctcgtgctttccatagcgatcaattaggtccttggtacgaaaaagttgcgaaactaactaataaagaaatggtacttccaatgaatacaggtgcagaagctgttgaaactgcaattaaaacagctcgccgctgggcttatgatgtgaagaaagtagaagcaaatcgtgctgagattatcgtttgtgaagataacttccacggacgtacgagtgggtgctgttttctatttctccaaacgaagagtaccaagcgtgggattcggtcccatgtcttctgggcattatcgtaattccttacggtgatttagaagcgttaaaagctgttcatttacaccaaacacagctgcaatcattttagagccaatccaaggtgaagcaggaattaacatccccaccagctggtttcttaaaagaagctcttgaagtatgtaaaaaagaaaacgtttttttcgtagcagatgaaatcccaaatgggcttaagcccgtactggtaaagtatttgcttgtgattgggacaatgtaactcctgacatgtacatacttggtaaagcacttggcggcggcgtatttcccaatctcttgcgcagcagcaagcccgggacattttaggcgtattcgagccaggttctcacggttctacattcggtggtaacccacttgcatgtgctgtttctatcgcagctcttgaagtgttagaagaagaaaaattaacagagcgttctcttcaattaggtgaaaaattagttgggcaattaaaagagattgataacccaatgatcactgaagttcgcggtaaaggtttattcatgcggtatctcattaaacgagccagctcgtccttactgtgaacaactaaaagcagctggtctattatgtaagaaaacaccacgaaaaatgtaattcgtatcgcaccaccactagtaatctctgaagaagatttagagtgggcgtcccaaaaaattaaaaagcgggtattattggaaataataagagagttcggttcctcc

SEQ ID NO: 9371 - DNA, 963 bp, Bacillus anthracis
gtggaaagaagtttatctatggagttagtacgtgtaacagaggctgcagctttatcatcagcgcgttggatgggacgcgggaaaaaggatgaggcagacggtgcagcaacatcagctatgcgtgatgtatttgatacaattccgatgaaaggtacagttgtaattggtgaaggtgaaatggatgaagcaccaatgctatatatcggagaaaaattaggtacaggatatggtccacgtgtagacgttgcagttgatcctttagaagggacaaacattgtagcagctggtggatggaatgctcttgctgttattgcaattgcagatcacggtaatttgttacatgctcctgacatgtacatggataaaatcgcggttggcccagaagcggttggggcggtcgatattgatgcgcctattatcgataacttacgtgcagttgcgaaagcgaaaaacaaggatattgaagatgttgtagcgacagttttaaaccgtccacgtcatcaagcgattattgaagaaattcgtaaagctggtgctcgtattaaattgattaatgatggagacgtagcaggtgcaattaatactgcatttgatcgtacaggtgtagatattttattcggatctggtggtgcgcctgagggtgtattagcagcagttgcattaaaatgtttaggtggcgaaattcacggaaagctattaccacaaaacgaagctgaattggcgcgttgcaaaaagatgggcatagaagacatcaaccgcatccttcgcatggaggacttagtaaaaggtgacgatgcaatctttgcagcaacaggtgtaacagacggagaactattacgcggcgttcaatttaaaggtagcgtaggaacaacacaatctcttgttatgcgtgcaaaatcaggcacagtacgcttcgtagacggacgtcatagcttaaataaaaaaccgaacttggttattaaa

SEQ ID NO: 9372 - DNA, 723 bp, Bacillus anthracis
atgagtaaaccacttattttcgctcaccgcggcgtaaaaggaacacatcccgaaaatacgatgatcgccttccaagaagctgaacgcattggtgcccatggaattgagcttgatgtccacctatcaaaagatggtgaacttgtcgtaattcacgatgaaacagtcgatcgtacaacaaatggcataggacttgtttctgaaaaaacagtagaggagttacaagctttagatgctggtagtcataaagacgcttctttccatgaagcaaaaattccgacgttacgagaagtatttatttggctatctacaacaaactttcaactcaatattgaattaaaaaccgacgtgattcactatccaaatattgaagaaaaagctgttgctctcgttcgagaataccatctgtcgaatcaaattgtattctcctcatttaaccatgaatctgtttcattattagcagaaatagctcctgaaatcccaagagcaattttatatgacacacctcttgctgatcctatcgctgaagcaaaaactagagaagcaactggtttacatccaaactttcaactactaacaaaggaatttgttcaactcgcgcaaaaacaagggtacgttttccgcccttataccattaacgaatacaaagatttacaaactatgttggattatggcgtagatgtcattattaccgattggccagcacgcgcctttgagctcctttct

SEQ ID NO: 9373 - DNA, 1710 bp, Bacillus anthracis
atgactcttaacattcaagggatcgctgcatcaagtgggattgctattgcaaaggctttcagacttgaaaatcctgaatttaacatcgaacagaaatcaattacaaacgaagctgcagaaattgcacgcttagaagctgcgcttgagaaagcaaaaactgaattagaagctattaaggaccacgcttttgctgagctaggtgctgacaaagctgcgatctttgaagcacatttattagtgttaaatgatccagaactagtaaacccagtaaaagataaagtaaatagcgaaaaagtaaatgctgaatttgcaatggatgaagttgcatcaatgtttatctctatgtttgaaaacatggataacgaatatatgaaagaacgtgctgcggacattcgtgacgtaacaaaacgtgttcttgcgcatttactaggcattaacttctcaaatcctggtacaaattctgaagaagtaatcattattgctgaagatttaacaccatctgatacagctcagttaaaccgtaagtatgcaaaaggttttactaccgatatcggcggacgtacatctcactctgcaattatggctcgctctatggaaattccagctgttgttggtacaaaagttgttatggagaaaatccaaaacggcgatatcgtaatcatcgatggtttagatggggaagtaattgttaatccatcagaagaaactcttcgctcgtttgaagaaaagaaagcgaaatttgaagagcaaaaagctgaatgggcaaaattaaaagaccaagctactgtaacaagtgatggacatcacgttgagcttgttgcaaatatcggaacactaaatgatgtacaaggtattatcgataatggcggagaaggcgttggtttataccgtacagaattcttatacatgggccgtgacaatcttccaacagaagaagagcagttcgaagcgtataaagcagttcttgaaggtgtaaaagaaggtcaacctgttgttgttcgtacacttgacatcggtggagataaagagcttccatacttacatttaccaaaagaaatgaacccattcttaggctaccgtgcaattcgcttatgtcttgatgagcaagatgtgttccgtacacaacttcgtgcattacttcgtgctagcgtatacggtaacttaaaaattatgttcccaatgattgcaactcttgatgagttccgtcaagcaaaagcgatcttattagaagaaaaagcgaaacttgtagaagtgggtacaactgtttctgattctattgaagttggtatgatggttgaaatcccagcttcagcagtattagcagatcaattcgcaaaagaagttgatttcttctctatcggaacaaatgacttaattcaatacacaatggctgcagaccgtatgaacgaacaagtatcttacttataccaaccatataacctatctattttacgtcttgtaaaaatggttatcgatgctgctcataaagaaggcaaatgggctggtatgtgtggtgagatggcgggcgattcacttgctatcccattattattaggattaggtttagatgagttcagtatgagtgcaacatctattcttcctgcaagaacacaactaagcaagttgtcaaaagcagaaatggaaacattagcagaaaaagcattaatgatgtcaactgctgaagaagttgttgaactagttaaaagcata

SEQ ID NO: 9374 - DNA, 555 bp, Bacillus anthracis
atgaaaattaaagagattatcgttgtagaaggtaaagatgatacagttgcgattaagcgtgctgttgatgcggatacaattgaaacgaacggttcagcaatcggtgatcatgttattgaacaagttaaattagcgctacaaaaacgaggcgttattattttcacagatccggattatcctggagagcgtattcgaaaaattatttctgataaggtgcctggatgtaaacatgcttttttaccgaaggaagaagcacttgctaagaggaaaaaaggtgtcgggattgaacatgcttctaatgaatcaattcgccgtgctttagagaatatacatgaagaaatggaagcttacacaagtgaaatcagttggagcgatctagtcgatgcaggtttagtgggcggagaaatggcaaagagtcgcagagaaagaatgggtaagctattaaagattggttatacaaacgcaaaacagttacataaacgtttacaaatgtttcaagtctcaaaagaatcatttgcagaagcttataagcaagtcatacaggaggaaagaaaa

SEQ ID NO: 9375 - DNA, 1362 bp, Bacillus anthracis
atgataaaaaaagtattaatagccaatcgtggggaaattgctgtacgaattattcgtgcttgtaaagaaatggatattgaaacagtcgcaatttattcagaagcagataaagagtcacttcacgtacaaattgctgatgaggcgtattgtgtaggaccaacgatctcgaaagaaagctatttaaatttgacgaacattattagtgttgcgaagttaacaggctgcgatgctattcatccaggatatggatttttagctgagaatgcagattttgcagagttatgccgtgaatgtaacttaatttttatcggtccaagtccagaagctatttcaaagatgggcacaaaagacgttgctcgtgatacaatgaaagaagcaggggtttcgatgtaccccaggttcacaaggaattattaaaaatgccgaagaagcgattgaacttgctaatcaaattggatatccagttattattaaagcgactgcaggtggcggcggaaaaggtattcgtgttgcgcgaccatgaagaagagcttgtaaaaggaattcaaattacacagcaagaagctagtaccgcttttgggaaccctggtgtatacttagaaaagtttcgttgaagatttccgcgcatgttgagattcaaataatggcagatacacacggaaatgccattcatttaggagagcgtgattgtacaattcaacgccgcttgcaaaaactactagaagaaagtccatcaccagcacttgatgaaaatgtgcgtaaacagatgggtgaggcggcagttaaagcggcggtagcggttgattatacaggtgctggtacggttgagtttatttatgaatataaaacgaaaagcttttatttcatggagatgaatacgagaattcaagttgagcatccagttactgaaatggtaaacaggggtggaacttaattaaagaacaaattcttgttgcttctggagaaaagttatcgttacagcaagaaagagtaccattttatggttggggcattgaatgggcgaattaatgcggaaaaccctgccaaaaaatttatgccatctccagggtaaagtagaaatgtacttgcccacaggcggaatttgggtatcgcgtcgattcagctgtatatccgggatattcaatcccacctttctatgattcgatggttgctaaattaattgttcacggaaaaacacgtgaagaggcaattgcaaaaatgaagcgtgcactcagtgagtttgtcgttgaaggcgtacatacaacaatcccgttccatttgcaattgttagatcatcctgattttgtaaaaggtgagtttaatacgaaattttttggaagaaccaggaacttttggacccag

SEQ ID NO: 9376 - DNA, 1242 bp, Bacillus anthracis
atgaaaaatagaataatcgcagcaggagtaatcgcagctagtatattatcttattcatctagtagtttcgcacaaacaaaaacgtttccagatgtccaaacagggcactgggcagaagattctattaactacttagcagaaaaaggcgcagttacaggtaacgagaaaggaatgttcgagcctggaaaggaaatcactcgtgcagaagcagctacaatgatggctaaaatcttaaacttgccaatcgataaaaatgctaaaccatcttacgctgattctcaaaaacattgggctactccaatcatcgcagctgtagaaaaagctggtgttgttaaaggtacaggcaatggatttgagccagacggaaaaatcgaccgtgtgtcaatggcatctcttcttgtagaagcttacaaattagagtctaaagtaaacggtactccagcaactaaattcaaagatttagaaacattaaactggggtaaagaaaaagctaatattttagttgaattgggtatttctgttggtaccggtgacaaatgggaacctaagaaaattctaactaaagcagaagcagctcaatttattaaaaaggcagattcgcttaaagtaggtaatcctttagtagaaaaggtagttattattgatcctggtcatggaggatttgatccagggaatccaggacaaggtgtagaggaaagtaaaattgtatttgatacatctttaagattacagaagttgctagaaaaaaatacgcctttaaaagctttgttaacacgtgaagagaacggaaatccaggaagtaacaaaaatgaatctcttgcgaatcgagtgaaatttggtcaagagaacaatgcagatatatttgtaagcattcatgcaaattcttctgaaaaacatgatggtcatggaacggaaacgtattattataaaaaatcaaagcgtggagaagagacacagattgaaaaggatagcgaagtattagcgaagaaaattcaaaatagagtagtagaagcactacacacaagagatagaaagataaaagacgatcactcactttatgtagtaaataataatacagtaccagcagttttaacagagcttgcctttattgataatgatatagataatggtaaattagctactgaatcaggaagacaaattgctgctgaggcagtttatgctgggattttagattattatgaatggaaaggttttgatgtttccaaatatcgtttagctaaa

SEQ ID NO: 9377 - DNA, 657 bp, Bacillus anthracis
ttgaaaaggatattgttagtttcaacaagcgctcatgatatgaatggacacccgactggtttgtggctggaagagctcgcagctccttataacttgtttaaaaaagctaagttcgatgttgatattgtmtcgatacagggcggtagagtgccgattgatagagtttctattccgaacgggatacctcgtgaatttaagcatgtcgcttctttattgcaaaatacgaagtcgatctcaacggttcatttttcggattatgatgcggttttatttggtggtggacacggggcgattgtagattttccaggtaatccatatgttgcaaatttaattgtgaatatgtacaacaataaccggattgtagccgctgtttgtcacggagtaagttctttagtcggtgtgaaaaataaggacggctcgttttttagtgcaggtaagcgtataacaggttatacaaatgatgaggaaaaagctgtacatttagaaaaacgagtgccgtttttattagaaagtaaattgaaagaagaaggggctttgttttatgtggctccaaatttcacgccgcacgtcgtagtagatgggcgtttaattacagggcaaaacccacagtctagtatggaaatagggaaagctataagaagagctgtaaataaagta

SEQ ID NO: 9378 - DNA, 840 bp, Bacillus anthracis
ctcctagtatcagtagcgttagtatggggagcaaattatacaattggaaagtatggcgtggcatatatgtcatccattcaatttaatagtttacgatttttagtagcatcaccggtattattacttattacatttttaatggaacgctcattacgtattgaaagaaaagattggctacgattagtagcagtcggtatcgttggtacgacaatgtatcaaacgatgtttatgctatctgtgaaatatacttcagcaacgaacgcctcattattaattgcgatgtcacctatatttacagggatattagcagtattgcacaaacaagaacgcttttcgatgaaagtacaaataggttcaatagtagcctttattggtgccgcattcgttttattaacaggtcatacaggaggagctacttacgagtatgcatggctcggaaatataattggattagtcgcagcaattgcgtggggatggtatccaatattagcacaacctcttattacaaaatactccgcaatgagagttacatcatggtctactttaattggaattgtaccgcttgtgatatactgtctattcaacgtaaattctttaacgtggccagtagatacgctaagctgggggtctctagcatattccatcatctttgcgactatcttcggacttgcaatgtggtatgtcggtattagtcaaataggctcaacgaaagtaatggtttatatgtatctcgtaccattattcgcagttatctttgcggcagtaacgattggggagcaaatcaatatgatgcaactcgttggcgggacttattatctttggggggtctatatgttgaaa

SEQ ID NO: 9379 - DNA, 1560 bp, Bacillus anthracis
atgagtagtacagtttggatactcatctccattttgcttgcaacagtcggtgcagttgttggcttttttgttcgaaagtctattgctgaagcgaagattaatggtgcagctaatgaagcgaaacgtattctagacgaagcgaatcgtgaggctgaagcacttaagaaagaagcgctattagaagcaaaggatgaaattcatacacttcgtacagaagctgaattagaaattcgtgaccgtagaagcgaattacaaaaacaagaaaatcgtttaatgcaaaaagaagagaaccttgatcgtaaagacgaaacgctcgataaacgcgagctacagttagaaaagaaagaggattctcttgtagcgagacaacaacagattgaagagttggaaagcaaagtgggagagttagttcaaaagcaacaaacagaattagagcgcatttccaatctgacacgcgaacaagcgaaagcaattattcttggtaaagtagaaagtgaagtttctcatgaaattgccgtaatggtaaaagaaagtgaagttcgtgcgaaagaagaagcagataagaaagcaaaagagattttatctcttgcaatgcagagatgtgcagctgatcatgttgctgaaacaaccgtttcggttgtaaatcttccaaatgacgaaatgaagggacgtattatcggacgtgaaggtcgaaatattcgtacgttagaaacgttaacaggtattgacctaattatcgatgatacaccagaagcggttatcctttctggattcgacccaattcgtcgtgaaacagctcgtatcgctcttgataaactagtacaggacggacgtattcacccagcgcgtattgaagagatggtcgaaaaatcaagacgtgaagtggacgagtatattcgtgaagtcggagagcaaacaacgtttgaagtgggtgttcacggtttacatccagatttaattaagattttaggtcgtttaaaataccgtacaagttacggacaaaacgtcttaaaacactctatggaagttgcatatttaactggacttatggcagcagagcttggtgaggatgaaaaactagcaagacgtgctggtctattacatgatatcggtaaagcgattgaccatgaagtagaaggtagccacgttgaaattggtgttgaactcgcaacgaaatataaagagcatcctgtagttataaacagtattgcatctcaccatggggacacagaaccaacttctatcattgcagttttagttgcagcagcagatgcattatcagctgcaagacctggagctcgtagtgaaacacttgagaactatattcgtcgtcttgaaaagttagaagagatttcagagtcttatgaaggcgtagaaaaatctttcgcaattcaagcaggacgagaagttcgtattttggtaaaaccagatacaattgatgatttagaagctcatcgtttagctcgtgatattcgaaaacgtattgaaaatgaactggattacccaggacatattaaagtaactgttattcgtgaaacacgtgcagtggaatacgcaaaa

SEQ ID NO: 9380 - DNA, 1504 bp, Bacillus anthracis
acatttcgagaattaggattaagtgattctttactgcaatctgttgaaagtatgggctttgaagaggctacgccaattcaagctgaaacaattccacatgcattgcaaggtaaggatattattgggcaagccacaaacaggtacagggaaaacagcagcattcggattcccctctattagataaagtggatacacataaggaatcgtttcaaggtatggttatcgcgccaacgcgtgaattagcaattcaagttggagaagagctatacaaaattggtaaacataaacgtgttcgtatcttacccaattacgggtggtcaaagatattaacccgcccaaattcgtgctctaaaaaaaccacccacacatttattgttggtacaacaaagtacgtattttagatcaatattaaccgtaaaacactttcgcttacaaaacgtagagacagttgttcttgacgaaagcgatgaaatgttaaacatggggcttcattggaagatatgaaagcaattttaacagatgtgccagaaacacatcaaacattactattctcagcgacaatgccgggcccaagttgttttattgaggagggttttaagaatggggcctcacccccttaatgtaaaagcaaaagaggtaacaatgccaaacattcagcatttttatttagaagtgcaagaaaagaaaaagttttgacgtgtaaacacgcttactagatattcaatctccagagcttgcgattgtgttcggtcgtacaaagcgtcgtgttgatgaattatcagaggcattaaacttacgtggttatgctgcagaaggtatccatggtgatttaactcaggcgaaacgtatgtctgtattacgtaaattcaaagaaggttctattgaagttcttgttgcaacagacgttgctgcacgtggtcttgatatttcagggcgtaacacacgtatataacttcgatattccacaagatccagaatcatatgtgcgccgtattggccgtactggtcgtgcaggtaaaaaaggtattgcaatgctatttgtaacaccacgtgaatctggacaattaaaaaatatcgagcgtacaacaaaacgtaaaatggaccgcatggatgcaccgacacttgacgaggcactagaaggtcaacaacgtttaatcgctgaaaaacttcaaagcacaattgaaaatgaaaacttaggcatattacaagcgtattgcagaagaaatggtagaagagaacgactctgtaacagtagtagctgctgcctttaaaaatgatgacaaaagagccagatacaactccaatcgctttaacatcagaaccaccagttgtttcaagaggtggcggttctaaaaaacgcggcggtaacggaggcggataccgtgatggtaatcgtaatcgtagtcgtgatggacgcggtggcgatggtcgtaaccgtgaccgcaatcgtgatggtcgtaatcgtgacggtaaccgtgatcgcaatcgtgaaggtagccgtgat

SEQ ID NO: 9381 - DNA, 912 bp, Bacillus anthracis
atgaaaaaacgtcaattaggaaactcagatttatttgtgacagaaatgggacttggctgtatgtctctcggtacatctgaagcagaagctatgcgtattatcgacgaagcaatcgatttaggaatcaatttttttgatacagcagatttatatgattatggattaaacgaagaatttgttggaaaagcattaaaagggaaacgagatcaaattgttcttacaacgaaggttggaaatcgatggacagaagaaaaaaacggctggtcttgggatccttctaaaaattacataaaagctgaagtgaaagaaagtttacgtagacttcaaaccgattatattgatttatatcaacttcatggcgggacgattgaagatcctatagatgaaacaattgaagcctttgaagaattaaaaaaagaaggtatcattcgccattacggtatttcttctatacgtccaaatgtcatccgtgagtatgcaaaacgttcaaatatcgtcagtgtactaatggaatatagccttttaaatcgtcgccctgaagaatggttcccgcttcttaatgaacatcaaattagcgtcattgcccgcggaccgcttgcaaaaggaattctaactgacaacaatgcaagaaagatagaaagagtaaaagaaaaggattacctttcttattcttacgatgaattatatgggacactcgcgaatgtaaaagaattaatcgtggaaagttctttaacaggaacagctattcaatattgcttacataacgacactgtagcagctgtaatacctggtgcaagctctattcaacaattacgagaaaatgtacaagcctgtaagcaaacacagttaacaacagaagaatatatacagcttcagcaaatcgctaaatgtgatacgtacgctttacatcgt

SEQ ID NO: 9382 - DNA, 915 bp, Bacillus anthracis
atggtcatttttaattatattttagtatgtattattttcggaacaacatttctaacgataaaaatcggaattgaagcaggagcgcccccattattttcagcgggaattcgtttctttttagcaggagtaatcttaatgattatatttaagctaaaacgaaaagaaattatgccacacatattttcaagacgaattatatatgctggtttttgcttaacatttatgacattcgcaacattatattgggcagaacaatatatttcttcagggttagctgctgtgctatctgctacagggcctatgatgattttgttgttacagacaaagagaaataagacaaaattaaaaaaggaacaacttcttgctttaattattgcactaataggtgttgtttttgtttctttacctggaatgcaccaagaaataagtttcatatggagtatcgcttgttttgtattaataataggagagttattttacggaataggctctattcgctcaaaagaaatactttcggatttacaaagtgtatcgctatttctcattaatggtattcaaatgttttacggaggagttttactactaatcgtatccttcatagtagaacaaccgaatgtaactgtattagcttcatggagtgtacagtggcctattttatatctcatatttatcggatcaattggtgggcacggattatattactggctcttatcaaaaacaaatcctgtattcccgtcaacttggttatatgtctcaccattaattgctattatagttggatacatcatattaggagaacctttaaaccctataatgggaataggcgcttgtttcattttagttggtgtatttttagctaatcgatccacactccgtacttatttcaaacaagggagattatttgagaaggaaatg

SEQ ID NO: 9383 - DNA, 963 bp, Bacillus anthracis
ttgaaattgaataaaaatttacaactatgtatattaattggaacattaatatgttattcaatctattttatgtttttttatctgttccccactcatttttcaaattcggatgtacgcttcgcttcacttattgttgaagccattacatttgtatcactcatttattctatatattctaaaaaagttagttcaaatccattttggatatgtatcacgatagcaattggtagttttttattaggaaaaatagtatatacatatcaagatagcttcttcaaaattccaatacatcgttttactatttctgatgtgttttatatgctttttctactcttctgtcttattgctttctgctataaaatcctaaaagaatgcgataaatgggaaaaagcattctttatttgtgatatatgcatagtacttacttccatattcacattagagtggtatttatttaatcaaccaaatttaaatatattctctctttcactaggagatgtttttctttcatttctatatccaattgcagatttattattccttctactaggtgttagtctctttttccgtccaacaatttttaattctaaacggaaaatttatatctttatttttgtattaataagttctgcaacttttaactatatttatttttacttaaataaccatttatcaactgaaacgataacattattacgtcttttatatagaatacctatattacttattgcaatagctggatctatttcagaagatcgtaatagtcataaaaattatttcattgtaaaccctataataggaaaaaaggctttagttgtatttccctatcttgctgttgcaatactaattggggttacatttaaaagaacaaacatcatcttcaactctcattacgggaaattgtattacttttattttcgtactcattcgtcattctattgtacgtatgcaaaacaattcccc

SEQ ID NO: 9384 - DNA, 865 bp, Bacillus anthracis
gtaatggtcatttttaattatattttagtatgtattattttcggaacaacatttttaacgataaaaatcggaattgaagcaggagcgcccccattattttcagcgggaattcgtttctttttagcaggagtaatcttaatgattatatttaagctaaaacgaaaagaaattatgccacacatattttcaagacgaattatatatgctggtttttgcttaacatttatgacattcgcaacattatattgggcagaacaatatatttcttcagggttagctgctgtgctatctgctacagggcctatgatgattttgttgttacagacaaagagaaataagacaaaattaaaaaaggaacaacttcttgctttaattattgcactaatagggggttggttttgtttctttacctgggaatgcaccaagaaataagtttcatatggagtatcgcttgggtttgtattaataataggagagttattttacggaataggctctattcgctcaaaagaaatactttcggatttacaaagtgtatcgctatttctcattaatggtattcaaatgttttacggaggagttttactactaatcgtatctttcatagtagaccaacggaaatgtaactgtattagcttcatggagtgtacagtggcctattttatatctcatatttatcggatcaattggtgggcacggattatattactggctcttatcaaaaacaaatcctgtattcccgtcaacttggttatatgtctcaccattaattgctattatagttggatacatcatattaggagaacctttaaaccctataatgggaataggcgcttgtttcattttagttggtgtatttttagct

SEQ ID NO: 9385 - DNA, 669 bp, Bacillus anthracis
atgaacattgcaaagttaattgaccatacaattttaaaagctaatactactaaagaagatgttatgaaagtaatcgaagaagcaaaggaatataaattcgcttctgtttgtattaatcctacatgggtaaagctagctgctgaagaattagctggacatgatgtagatgtttgtactgtaatcggtttcccattaggagcaagcacgactgaaacaaaagcatttgaaacaaaagatgcgattgcaaaaggtgcaactgaagttgatatggtaatcaacgtaggcgctttaaaagatggcgataacgaacttgttgaaaaagacatttatgaagtagtacaagcagcaaaaggaaaagctcttgtaaaagtaatcattgaaacttgcctattaacagatgaagagaaagtacgcgcttgtgaattatcagtaaaagctggtgccgatttcgtaaaaacttcaactggattctcaacaggcggagcaactgctgaagatatcgcattaatgcgtaaaacagttggaccaaacgttggtgtaaaagcatctggtggtgttcgtacacgtgaagatgcagaaaaaatggtagctgctggagcttctcgcgttggagcaagtgctagtgttgcaatcgtactaaatgatgcaaaaggtgctacagataactac

SEQ ID NO: 9386 - DNA, 2631 bp, Bacillus anthracis
ttggaaaaaaaggtcgtattagtagatggtaataatatcgcgtatcgtgctttctttgcactaccgcttttaaataacgacaaaggtatacatacgaacgcaatttacggttttacaatgatgttaatgagaatattagaggaagaaaaaccgacgcatatgttagtagcatttgatgcggggaaaacgacattccgtcataaaacatatagtgagtataaagggggacgtcaaaagactccgcctgagttatcagagcaattcccgtttattcgtgagatgcttgatgcattcaatgtaccacgttatgaattagaaaattatgaagcggatgacattatgggaacgctagcgaaagaagcgagtgaacaaggcgcaagtgtaaaagttatttcaggagataaagacttacttcaacttgtttctgataacacgcttgtatgtattcctcgaaaagggattacggaagtagacgaatatacgaaagaagctttatttgaaaaatacagcttatcaccaaagcaaattatcgatatgaaaggtttaatgggagaccaatcagataatattccaggtgtaccaggagttggtgaaaaaactgcgattaaattgttaacacagtttggaacggttgaagaagtgtatgaaaatatagatcaagtaagcgggaagaaattaaaagaaaagctggaagcaaataaagaccaagctcttatgagtaaagatcttgcaaccattattacagacgcaccgattactgtgaatgtggatgatatggagtataaaggatatgaagcaagtgatgtcattccaatgttcgagaatttaggatttacatctcttttaaacaaattaggtgttacgccagaagaaacagctccggctgaattagatgatattacatttgatattgtagaagaagttacagaagaaatgcttcagcaagatagtgcgcttatcgttgaagtacaagaagataactatcataaagcagacattcaaggtttcggtattcaaaatgaaaatggatgttactttattcagacagacattgcacttaaatcagatgcttttaaagagtggcttgcagatggagaaatgagaaagtatacatttgatgcgaagcgtgcgatcgttgcgctgaaatggaacggtatagatatgcaagggattgactttgatctattaatcgctgcttacttacttgatccggctgatacagataaagatttccgtactgtagcgaaaatgaaagaaacgcatgctgtgaaatctgatgaagaagtttacggaaaaggtgcgaagcgtgctgttccagagttagagatagtagcggagcatgtagctcgtaaagtgcatgtattatatgatgtaaagcaaacatttgttgaagagttagaaaagaatgagcaatatgaactgtttacagagttggaattaccacttgcacgtgtattagctgatatggaagtaaaaggtgtaaaagttgatacagaacgtcttcgtaatatgggagaagaacttgcaggtagattaaaggaaatggaacaggaaatttataagctggcgggaacagaatttaatattaattcaccgaagcagcttggtgtgattctgtttgagaatttaaacttaccggttattaagaagacgaaaacaggttattctacatcagcagatgtattagacaagctgatggatcaccatgaaattattccaaacattttacattaccgtcaattagggaaactcaattcaacttatattgaaggtttattaaaagttgtacatgaagattcatctaaaattcatactcgcttcaatcaagtattaacgcaaacaggtcgattaagttcaacggatccaaacttgcaaaatatcccgattcgattagaagaaggaagaaagattcgtcaggcattcgttccatcagaagaaggatggattatgtacgcggccgattattcacaaattgaacttcgtgtattagctcatattgccaatgataaagggctagttgaagcgttccaacatgacatggatattcatacaaaaacagcgatggatgtatttggcgttgaaaaagatgaagtaacttcaaatatgagacgacaagcgaaagctgttaacttcggaattgtgtatggtattagtgattatggtctttcacaaaacttaggaattacaagaaaagcagcagcggaatttattgaaaagtatttagaaagtttccctggtgtacaagaatatatggatgacatcgtaaaagatgcgaagcaaaaaggatatgtggctacattattaaatcgtcgccgttacattccggaaattacgagtcgtaatttcaacttgcgtagctttgctgagcgtacagctatgaatacaccaattcaaggtactgcagcagatattattaaaaaagcgatgattattatggcagatcgtttagaagaagaaggattacaagcgcgtcttcttctgcaagtacacgatgaattaatatttgaggcaccaaaagaagaagttgaaaaattagagaagcttgtaccagaagtaatggagcatgcaattgaactggcagttccactgaaagttgattattcttacggtccaacttggtacgacgcaaaa

SEQ ID NO: 9387 - DNA, 1110 bp, Bacillus anthracis
atgcgagtagatggtagagagaaaaacagagttacgccatatacatattcatcacgaattatttaaaacatccagaaggatcagtattaattgaggttggggataccaaagtgtatttgtcttcagcgacaattaaaggggccttcccccccatttattggggggagaaggaaaaaggaatggttaacagctgaatttggggatgtttcccgggggggccagaacaagggtccatttggggggtcaagtaaaggaaaagtaacaggacgtacaatggaaatccagcgcttaattggacgagcattacgtgcggtagttgacttagaagcgcttggcgagagaacggtttggattgattgtgatgttattcaagcggatggtggaacgcgaacggcttctattacaggtgcatatgtagcgatggtattagctttcgagaaattattacaagcagaaaaagtatctaaaattccagtaaaagattatttagcagcaacgtcagtaggaattgttgaagagcaaggcgttgttttagatttaaactacgcagaagattctaaagcagacgttgatatgaacgtgattatgactggaaaaggccagtttgttgaagtgcaaggaactggagaagaaggcgacttttagcagagcacagttaaatgaatttcttgatgctgcgggaacaaggcattttccatttgattgatattcaaaaaagaagcgttaggtgactatcgtatctcatatagagtagaggtggaaaatatgaaacaagttgttgtagcgacaaaaaatatggggaaagtacgtgaatttgctgagttatttgagcgatttgatttagaagtaaaatcattacacgatttccctcatattgaagaagtcgaagaaactggtgaaacatttgaagaaaatgcgattttaaaagcggatagtttgagtagacagttgaatgcaatcgtaattgcggatgattcaggtcttattgtagatgctttaaacggaaaaccaggtgtgtattcagctcgttttgctggagagccgaaagatgatcaagcgaatatcgataaagttttacaagaattaaatgaagtagcgtttgaaaagcgt

SEQ ID NO: 9388 - DNA, 600 bp, Bacillus anthracis
ttgcaagatattaaactcgttgcggttacaaaaacggtaggaattgaaaaaacaaacgaagtaattgaagctggaattatcgatttaggtgaaaatagaaatgaaggtttcttacagaagtacgaacatttcggttcaaaagtgaattggcattttattggatcattacaaacgagaaaagtaaaagaaattattaatgaaatcgattatttacattcattagatcgtctttcacttgcaaaagaaattcaaaaacgtgcgaataagaaggtgaaatgttttattcaagtgaaaacatcatctgaagaatccaagcaaggattggcaatagaagaaacagtttcttttattcaaagtttgcaagaattggataagattgaagtggtaggattaatgacaatggctccgtttacagaagaagaggaagaaattagacgctgttttaaggagttacgtatgctacaaaaagaggtgcaggggctagaattattacatgcaccatgcaaagaattatcaatgggaatgtctaatgattacacgattgcaattgaagaaggtgctacatatattcgtttggggacgattttagtaggaaaagcg

SEQ ID NO: 9389 - DNA, 351 bp, Bacillus anthracis
atgaaaaaaggaaaacttatagatagttttggatatgctatagttggtatattcttttgtcttcgtcatgaacgaaatatgaaaattcattatttagccgcagtcattgttttatgctgcggcttttatttccatattacgaaagtagagtggatgatattacttattgtaataggaattgtaatgagtttagagatggtaaatacggctgtggaaaaaacagtagatttagcgactactgatatacatccatttgcgaaagttgcaaaggatgttgcagcgggagcggttttattgtttgcgataatagccgttataattggtgctattatcttcttaccgtatgtggta

SEQ ID NO: 9390 - DNA, 1088 bp, Bacillus anthracis
atggaagaaaaatacgaattatacttggtatgaaaacaaagttgtgatgaaacagcagtagcggttgttaaaaatgggaagagaaaattatggggaattgtctttccatcacaaattgaaagtcataaacgttttgggcggagttgtaccagagattgcatctcgtcatcatgtagaagaaattacagttgtgttagaagaagcttttaaaagaaggggattatccctttggaggttatgaaggcaattgctgtaacagaaggacctggtttagttaggagccatttctaataggggtaaatccagcgaaagccagtggcttttccacatgatatccttatagtgggcgttcatcatatcgctgggcacattttatgcgacccctttagtaaaagaagttcaattccccattactatcacttgttggttctggtggacatacagagcttgttttatatgaaagaacatggttccatttggagtaattggtgaaacgcgagatgatgcagcaggagaagcatatgataaagttggcttgctacgttttttttgccccatttcccgggggggcctcattatttatcccctcgccccagggagggaaccccacccattcgattttacttcgtgcatgggcttgaaccctgattcgaatgaattccagtttttagcggattaaaatccaggccgttttcaaccgctgtgcataacgcaaaaccagcgcggtatagagattgcacccggaagatttagcggacatgttcccaagagagtttcattgacgtactagtaacgaaagcatctcgtgcagcggatgcttatagcgtaaagcaaagtgcttcttgctggtggagtggctgctaataaagggcttcgtgcacgcttagaaacagaatttgcacaaaaagaaaatgtagagctaattattcctcctctatctttatgcacagataatgcagcaatgattgcagccggaggtaccaattgcatatgaacaaggaaaacgtgctacatagcttaaaaatgcaatcccaggattaggatatcgaagcatagttatgcacaaaattaaccacgagcttggtgga

SEQ ID NO: 9391 - DNA, 1104 bp, Bacillus anthracis
atgagcactgagttgttagatgccttgctcgtattagagtcagaaaaaggaattagcaaagatattattattgatgcgattgaagcagcgttaatctctgcttataaacgcaattttaaccaagcacaaaacgttcgtgtgagctttaacccacaagtgggaacaatccaggttttagcacgtaaagacgttgttgataatgtgtttgatccacgtcttgaaatttctgttgaagaagcaagacaaattaatccaaactatcaagatggtgacgtactagaaattgaagtaacaccaaaagatttcggtcgtattgcagcacaaactgcaaaacaagttgtaacacaacgagtgcgtgaagctgagcgtggtgttatttactctgagtttagtgaccgtgaagaagatatcatggttggtatcgtacaacgtcaagatgctcgtttcatctatgtaagcttagggaaagtagaagctttattacctgtaagtgagcaaatgccaaacgaacaatacaaaccacatgatcgtattcgcgtattcattacgaaagtagaaaaaacaacaaaaggaccacaaatttacgtatcacgtacacatcctggtcttttaaaacgtttattcgaaatggaagttcctgaaatctatgatggaacggttgaaattcgttctgtagcacgtgaagcaggagatcggtctaaaatctctgtacatgcagagaacattgatgttgatccagtaggttcttgtgtaggaccgaaaggacaacgtgtacaacgcattgtagacgaactaaaaggtgaaaagattgacatcgttcgctggtcaaatgatccagtagaatatgttgccaatgctttaagcccatcacaagttgtgaaagtacttgtagatgaagaagaaaaagcaacaactgttgttgttccagaccaccaactgtcattagctatcggtaaacgtggacaaaatgcacgtcttgcagctaaattaacaggttggaaaattgatattaagagtgagtctgatgcgaaacaacttggtattgtaacagaagaagatagcgtagtcgcattcggattcgattcagttgaagacgaaatcgaa

SEQ ID NO: 9392 - DNA, 1437 bp, Bacillus anthracis
gtgttactttgcgaattgaaacaagggtggaaccacgaatataacactcgtcccttttttagggaggagtgtttttttatttcatttttgcatcacactaggattggaaggaggatacgcagcatgcatcatgatgagaagaacaaaattggtttaacggtagcactttctatcgtagtaggaacgattattgggtctggtgtgtttatgaaaccagggagcgtattagattactcggggagttctaatatggcgattcttgcttgggtaattggtggtctgttaacgttagcaagtggtttaacagtagctgaaattggagcgcaaatcccgaaaaatggtgggttgtatacgtatttagaggagatttacggaagtttttggggatatttatcaggctggatgcaaacgattgtttatgggccagctattattggaacattagggttatactttagttctttaatgattaattttttctatttagataaagtatggaatttaccaatcgcaattggaacagttgtgttccttggcgttgtaaatagtatgggaacaaaatacggaggtatcgtccaaacgatcacgacaatcgggaagatgattccaatcgtattaattgttgtgttaggtttttggaaagggaatagcgatatctttaacgtagttgtgccgatatcagaaaatcaaagtatcgggatggcgatcttagcaacgttatttgcttatgacggctggattttacttgcttcgattggcggagaaatgaagaatccaacaaagctattaccgaaagcaatgacagttgggattttaattgtaacagctgcttacgtattaattaacttagcgttactgaatgtattaccagcaacgcaaattgtagaacttggagaaaatgcaacagcgacagctgcgggcatgctacttggggaatatggcgggaaaattattagtatcggtattatcgtatctattttcggttgtttaaatggaaagattttaacgttcccacgtatcccgatgtcgatggcagaacgtggacaacttccatttgctaagtttattgcaaaggaaagtccaagatttaaaacaccagcaaatgcgattactgttgaaatcattttaggaattattttaatgattattagtgatccaaataagctatctgagatttccgtattcattatttatattttctacgtaatgacgtttatcggtgtcttcattttaagaaaacgtaataagaataaagagcgtgcatacagtgtaccgttattcccaatcgtcccaatcgttgcgattttgggctcactctttgtaatcggtagtgcgattattaacgatccactaagttgtttcttatcaattggaattgtctttacgggacttccggtatattggtatttaaataagaagaacaaaactgaagtgtca

SEQ ID NO: 9393 - DNA, 1491 bp, Bacillus anthracis
atgttgcagtttctacaacgtattggtaaagcgttaatgcttccaatcgccgtactaccagcagcaggattattgcttcgtttaggacaagaagacgtatttaacattcctgttatggcacaggccggtgcagcaatttttgataatttagcacttatttttgcaattggtgttgcaatcggtttgtctgttgacggtagtggagcagctggacttgccggagcaatcggatatcttgttttacaaaatacaacgaatgctctaagtaagacgtattcagcagcagagttaaatgataaattaaaaagtgttcaagatttagtcggttcagtagatccaactaaattagcagatacaatgacaaaggtttcaaaagcagcggcgttaacgccaaaaataaatatggccatactcggtggtattattgcaggggttgttgcgggattactatacaacaaattccataagattaaactaccagaatggttaggattctttgcaggaaaacgcttcgtaccaatcattacttcaatcgtaatgttacttttaggattggtattcggtcaaatttggccaacaattcaaagtggtattgatgcagtggcacatggtatcgtgaacttaggttcaattggtgctggtttatttggattattaaaccgtttattaattccaattggtttacaccacgtaatgaacacatacttctggttcgtacttggtgactttacaaatgcagctggcgatattgttcatggtgatattgcacgtttctttgcaaaagatccatcagcaggtatgtttatgactggtttcttcccagttatgatgttcggtttaccagcagcatgtttcgcaatgattgcagctgctaaaccagaaaaacgtaaaatggttacaggtatgttaggtggtctagcattaacttcattcttaactggtattacagagccaattgaattctcattcatgttcttatcgccagtactatatggaattcatgctgtattaacaggtctatctctattcattacaacaacacttggcattcatgatggtttctcatttagtgccggggcaatcgattacgtcttaaacttcggtattgcaacaaaaccattgttactagcaggaatcggtttaatttacgcagcaatttactttgtagtattctacttcttaattaagaagttcgacctaaaaactcctggtcgtgaagatgaagaggaaatggctgaaggcgaagaagctccagttgcaggttcaattggtgaaacttacgtagcagctttaggtggaaaagaaaacttaacagttattgataactgtgcaacacgtctacgcttacaagtgaaagatgctggtcaagtaaacgaagcagcattaaaacgtgctggtgcaaaaggtgttatgaaattaagtaacacgagtgtccaagttatcgtaggtacaaatgttgaatctgttgccgatgatatgaaaaaacacgta

SEQ ID NO: 9394 - DNA, 1374 bp, Bacillus anthracis
atgaaatcattatattctagatttgtatttatgacagtcggtattatgctacttagtagtattatcggctttttattaacgaacgtatattatcaagtgaagttaaaaccgtataacagtgaaaagattttaaagtatgcggaagaagttaaatcgttatatgaaaagcaaagcgaagaaaatcaagaggcgtacttacaatctattgcgaagttagggtatgaaatttatattgtagatgatcaaaagaatggaaagcgtatcggcaatgcgtttcgtaagacgacgataagtgatgatacaatccgtaaagtgttgaatggcgaaacgtttaatggtgtttccacatatccgactcgtctctttattaccggttttttcgataatgaattaataaatagtgtcggtgtaccactaaagcacggtgataaacagtacgcattatttattcgccctgacattcaaaaccaatttggcgagatgcgaattttcttagcggtgttacttgggtttatcgtactattaagtattatttttattgcgattgcagcaggttacatcgttcgtcccattcgtaagtttacgaacgcgacgcaaaaaattgcgagtggggaatatgaaattgaattagacgtaaaacgaaaagatgaaatagggacgctatctacaagcttccaaaagatgacgaaaagtattaaagaattagatgaaatgagacaagagtttgtttcaaacgtttcacatgaatttcagtcgccgctttcttccatacaagggttttcaaagacattgcaaacagaaaagatgagtgtggaagaaagaaaccattacttacaaattattgagggcgaaagtaagcgaatgtctagtttatgtaaacagttacttacgctcgcttcattagataaagaagagaaagttttacaaataaaagaattcaatttgcagaagcaaattaaagacgtcatttttatgctcgagtggaaatggcgtgagaaaaatattgccattgaatttgatgtgccggatatcactataaaaggtgatgagaacttacttcatcaagtatggagtaacattttcacgaatagcatcaagttttcaaatgagggtgggaccattgagtttttcgtcgaagagttagagtctagcgttatcatctctatatccgataatggaatcggaatggaaaaagaagaaatggatcgtatttttgatcgcttctacaaagtagatacagcaagagcaagaaatgtagaaggcagcggtttagggttatcgattgtgcagaagattgttgaactgcataacggaaacgtttcggtttatagcacgaaaggggaagggactactgttcgggtggagcttccaaaa

SEQ ID NO: 9395 - DNA, 1519 bp, Bacillus anthracis
atgtcattatttgatcattcagtatcagagttacatacagaagttaaacaacaaagaaatttccgttacggatttagtagaagaatctttacaacgtattgccgatggtgaaagatacgtaaaaagcttttcttactttagatgaagaaaaacgcacgcgcgaaagcgaaagaattagacgcaaaaattggcgctgaaagataatggtttattatttggtatgccaatcgggggtaaagataacattgtaactaacggggcttcgtacaacttgtgcgagcaaaatattagcaaacttcgatccaatttatgatgcgacagttgtgcaaaaacctaaagctgctggacaccattacaatccggtaaaattaaatatgggatgaattccccaatgggggttcttcgaatgaaaactcaggtttctacgactacgaaaaaatccctgggaactctacattacgtttaccaggggggatcctaaggggggggttctgcagcagctgtagcagcaggagaagtattattctctctatgttctgatacgggtggttctatccgtcagccagctgcatattgcggcgtggtaggtttaggacgaacttacggacgacgtatgtcgttacggattagtagcattctcatcttgacttgaccaaatgcggaccggagtacacagtacagtacgaagacaatgcatacttattacaagctatttcaggccttgaccgtatggatgcaacttctgcaaacgttgaagtaggaaaattacttaggttggtttacacaggcggcgtttaaagggtttaggcaattgctgtcccgaaaagaaatactagggtaaagttgtttgcggagggagccccgtaagtcagtgctagctgctttaaaaagtattagaaggtatgggcgcaacttgggaggaagtatctcttccacactctaaatacgctctagcaacgtattacttactatcttcttctgaagcatctgctaacctttcacgcttcgacggcgtacgttacggcgttcgttctgacaatgtgaataacttaatggatctttacaaaaacacacgtagcgaaggcttcggtgatgaaagtaaacgtcgtattatgcttggtacatttgcacttagctctgggtactatgatgcatattacaaaaaggcactacaagtacgtacattaattaaaaacgactttgaaaatgtatttgctaactacgatgttattatttggaccaactacgccaactccggcatttgaagtgggcgaaacagttgatgatctaatgacaatgtatgcaaatgacatgtttactatgccagtcaaactagacggctgttccacccgattactgatcccatgtggattcggtgctaacaacatgccacttggtctacaaatcattggtaaacacttcgatgaagcgacaatttaccgcggttgcacatgcagtttgtccacagcaactgaccatcgtacaaaaagaagcaagtctgtaaaggaggcgagcatag

SEQ ID NO: 9396 - DNA, 612 bp, Bacillus anthracis
atgaacgaagtgaacgttttttacaaccttgaaggaattggtgacactctaattgttgccttacaagatattactttagagaaccgtacttttgatcgcaaaggagatgttgctcgcgtatacgatcgtgaaagcaacgaaacagcaggattcaacatctttaatgcatcttcttatttagaagtaaaagaaacaggtaaccttacgttaacgaaagaacttgtagaaaaaattaacgaaattttagcgaagaacggctttgaagaaacagtagaagcagatctttctccaaaatttgttgtaggctatgtagctgaaaaagaaaaacatccaaatgctgataagctaaacatctgtaaagtagaaatcggtacagaaacattacaaatcgtatgtggcgcaccaaacgttgatgcaggacaaaaagttgtcgttgcaaaaatcggcgctgtaatgccaagcggtatgttaatcaagccagctgagcttcgcggagttccttctgctggaatgatttgttcagcacgtgaattagagcttccagatgctccacaagaaaaaggtattcttgtattagaagatagctttgaagttggacaagagtttaaattt

SEQ ID NO: 9397 - DNA, 403 bp, Bacillus anthracis
atggcacgtaaaacaaacactcgtaaaaaacgtgtgaaaaagaatattgaagctggtgtagctcatattcgttctactttcaacaacacaatcgtaacacttacagatactcacggtaacgcactttcttggtctagtgctggtgcacttggtttccgtgggatctcgtaaatctactccattcgctgcacaaatggctgctgaaactgctgctaaagctgcaatggaacacggtttaaaaactttagaggttactgtgtaaggtccctggtgctggtcgtgaagctgcaattcgtgctctttcagctgcaggtctagaagtaacagcaattagagatgttactccagttcctcataatgggatgcaaacccaccaaaacgtcgtcgtgtgtaatttttctgt

SEQ ID NO: 9398 - DNA, 186 bp, Bacillus anthracis
atggctcgtgtttgtactattactggaagaaaagctcgttctggtaactctcgttctcacgcaatgaacgctacaaaacgtaagtggggcgctaaccttcaaaaagttcgcgtacgcatcgacggaaaagttcaacgtgtttacgtttctgctagagcattaaaatctggcaaaatcgaacgtgtt

SEQ ID NO: 9399 - DNA, 653 bp, Bacillus anthracis
atgttttaaaggctttcgggaagaaattgaaagtcgtttttgaacagggatccagcgggcaagaaagttatttcgaagtcattttgacttactctggattacatgcagtttgggcccatcgaattgcacatgctttttataaaaagaatttcttctttattgcacgttggatctcacaagttagtcgtttctttactggcattgagattcatccaggaagcacaattggtcgtcgttttttcattgaccatggaatggggggttgtaatgggagaaacgtgcgaaattggtgataatgtaacgatctaccaaggagttacattaggtgggacaggtaaagaaaagggaaaagaggccccctacaattcaagataatgtattaattgcaacgggtgctaaagtactaggttctattacagttggagagaactctaaaattggagcaggttctgtcgtattaaaagaagtccctgcacattctacagttgtaggtatacctggccgagtcgttattcaaaatggagtaaagatcggtcaagaattaaatcattccgaccttccagacccaatttttgataaattaaaggtcatggaagtagaacttgataaattgaaaaaacaacttgaagtaaaggtagaaaggaaggataaaa

SEQ ID NO: 9400 - DNA, 2688 bp, Bacillus anthracis
atggaattatatattcctgcaggcatgacagtggaaaaggtacaagcaattcttacggtcttgccgggaaatagaaataaagattatgtaaaagctgccaacttaatgatagaaaaaaatacttatatgattcctccattcggaagtagttcatattctaatttaattaactggaatgaacaaagagaacggggatatttaagattaatacacggtcatacgtttttaggatgcttaatagccgcgtataatgatactggtgatatgaagtatataaaaaaatctatagagttaattaaagattggattaataatcattcatttgaacttcaccaacattcaatggcttttcatgatgaaactacagcgctacgtctacagtattggttaagattctacatttttacacgtcaagtgttatcagaggaagaaattatattgttagaaaaaagtatggaagatactgcgaaacttttatcagaggacttttttcatgctactaatacaaatcatggtatgtttcaagatagagcgctacttacttatgcatcgtattttaaaggagaaaatccttcccttgaaaaatatataaagttggctgtaacacgtttaaaggattattttgaaaaggtctttactgaagaaggggttcataaggagcattcaccatcttatcatttattagtagcttctaatatcaagaagttagcaaactggatgaaagaattcgataaggaagtaagtttgatttttaataagatttataaaaaaacagaagagtatgccatacatatcattcgtccagatggttctttaccaccaatatgtgatacggaagcaaatttagtgggaaataattataaggatttatatgagagtgatcagtatctttatgtagttactaagggcaaaaagggaaaagcccctacagaagatgataaggtatttcctaaatcagggtatgcaatctttaggaatgattggagtaaagaagagaaggctacttatgttttatttacagctgcttatcatgtagattaccataagcatagtgatgatttaaatttatatatttattcaaatggtgaaattattacagaagcgggtcctaatggatataattataaagatccttttactgaatatgcgtattcatcatttgctcataatacactgattgttgacggaaaggggttacctagaactgatcgtcagtatgaaaaagtctatttatcagattatgaaatcaacaaagataaagttgaagcgacgggaattaatttacgttatacaggtgttgaacatagtcgtactgtaagttacatgaaagacgaagaaaaaatagtagtgaaggatttggtgaaatctgataaacgtcatgaatataagttattatggcatgttgcatcagatattacagtacatgtaagagatcgtattgttgagttatttcgtaacaaccataaagtaatggaaatggaagtaactacagttactggtgttagtatacgagcattaaatgaacaaacaaagcctcaggtgagtggctgggtatttccaaaaatgggggaaaaacgaggtgctacaacaattgaggtggacattagtggttctaatgtagagtgtataacagagtttcgattgaaggattttaaattaggtagagacgatttgattccctataatttagagaaaacattcaagagtacacgtaatttaaggtatcattttgaggaagctaagaatcagaaacacaaagataaattatttgttgttttttctgctatggcaccggaatataagtttgctttcaactatatgagatctttaaaggacgtagatgttaataagttatttattttagatgatttcggggaccagggcgcttattatttagggaataagagagatcatgctattgaaactgcagtatcttcattaattcaatatattatggctaaatataagatttgtcatgaacaggttactgcaataggatcctcaaaaggaggatatgcagcagtctactttgcactaaaatactattttggaaatgttatagctggtgcaccacagagtaagcttggacattttttaattaatcaagccaatcataaaaatatagcaaggtatattgcaggtggggatgaagagtcagattgcttctatctggatcaattagtatttcaattattaaatcagcccaatgatatttcgcctagcataaaccttatagtgggaaccaaagatcatcactatttgaaccatgtaatgcctttatatgaagtgttggttgaaaatggatatgaagttcaacttgaaatagaagaagatttaactcatgcagatttaaaagtccattttccactttatttacaaaataaagtggaagaaattctagataaaaaacattcttctttatctaactttgaagaacctattatccattcgattgacattaggtatatagaaggaagtaatattattttgacatgcgatgctacgggaagtaatatacactacgcatattacgtttataaagatggtcatacaattgataaatttatgtatactatgaaatcacacctatattatgaattaaaagacttaggtgaatatatgtttaaagtttttgttaaagatcagtacaatagaattattacaaaaactttcaagtttggtaaagta

SEQ ID NO: 9401 - DNA, 843 bp, Bacillus anthracis
atgagcaattcccgttccattttatctcagccagagtggcgtattgtagatcagtctagtttaggaccaacattccatgcacttcaatcattcgcaatggatgatacattatgcacaagcattggaaagggcgagtcagctgcaacaatgcgctcttgggttcatcacaatacaattgttcttggcattcaagattcacgcctaccacacttagaagaaggtatttcctttttaaaagaaaacaacttcaatgttatcgttcgtaattctggcgggcttgcagtcgtacttgatgaaggtgtgttaaacgtatcacttttattccaagaaacagaaaaaggtattgatattgatcttggatacgatacgatgtggcatttaattcaggagatgctaaaagattatgacgttacgattgaggcaaaggaaattgttggttcttactgccctggcagctacgatttaagtattcgcgatcaaaaatttgctggcatttcacagcgacgtattcgcggtggtgtcgcagttcaaatttacctttgcgctacaggaagtggttctgagcgtgccgcactcgttcgtgatttttataatctagcaatccaaggagaagaaacacgctttacgtatcctgaaattgtgccgagtacgatggcttcactttcagaattacttgatgaaaccattacagtacaagacttaatgatgcgccttttaaaaacattgcaacaattcgctccaaagttaacaccatctcaattaacaatagatgaaatacctttatatgagacgaatttacagcgtattattgatcgtaataataaagcacttggcttagaaaaa

SEQ ID NO: 9402 - DNA, 645 bp, Bacillus anthracis
atgaagaaatttaaactttcatcttttcttccgttaagttatatacttctactcgtactcgtaagtcccctttacgatgtattaaataaatcgactgtacacgcagtagatgtcacaactgtagtagatgattggattccatttgtgaaagcatttattattccttatttaatttggtttccttacttatacggtgcacttatttattactgctttgcagatcgaaaacaatattatgtcactttaagtagtatcattcttggaaaacttgcttgtttctcgatttattatttttggcagacaactgtaccacgtccaaccgtcgttggaacagacgtattttccgaactagtccgctatatttatagtatcgatcaaccggtaaattgtttccctagcattcatgttcttactacatttgtcattatgctagctgcctttaaacgtagagaacaacatgcttttgaatattacactcttaccttcttcggtacgcttattattttatcaacgctatttacgaagcaacatgcatttgtagacgccatctctggaatgacgcttgcaagcgtactttacttcggcgttcagctgttattagcaaaagaaaccgtacgtgttccagtaaaacaacatcataaaatg

SEQ ID NO: 9403 - DNA, 268 bp, Bacillus anthracis
ttgagtatactgtttgtatctcaattacatgtttatgcagaagaaaatcgatggacatggcctgttgaaggtcagctaagtgattattttgggacataggcatggaaaacactatggtattgatgtagctgcgccgattggaacgcctgtggtagctatccaagatggtaaggtaacgaggtcttattattcaagtagttatggaaatgttgtatttattaaacacggagaatatgaggctgtatatgcacatttaaataagagaaaa

SEQ ID NO: 9404 - DNA, 894 bp, Bacillus anthracis
atgaaaataattaaaggggcatttccagtattaatcacaccgatggatgagtttcaagaaattaattggaacggtgtaaaacaaaacgtaaactactttattgagcaaaaagtggctggcattattataaacggaagcacaggagagtttgttagtttgtcaaaagaagaacgatttaaaatggtagaaacagtattaaaagaagttaatggccgtattccggttattgttggaactgcagcagaaacgacgaaagaaacgattgaatttacaaaacatgcagaaacgcacggagcggactgcgcattaattattaactcatactattgtaagccaaaagaagaggaaatttattttcactttaaagaaatctcaaatgctgtaaatataccaattatgttatataataacccgtttacatctggtgttgatatgagtacagaactcatgctacgtatcgggaaagactgtgaaaatgttacacatattaaagaatctagcggagatattcgaaaagcaagagatttagtaagacaaggcgaaggtgcttttcaagtcttctgcggatctgaagatttagttatggaatcttatttagttggtgcgacgggatgggtttcagtagcaggaaatgtcgtaccgggacttgttacgaaaatgtatgagcattttcaaaatggtgaattagaaaaagcttgggaaataaacgatgcaattttacctctttgtgagttcctggagggatcagggaaatatgtgcaaatcgtgaaacgttctatggaattacaggggcaagctgggggaccttctcgttatccaagacttgggttaactgaagaagaagatcaaaaacttcaagcgattatttcaaaaattgcagctcatgcagctgtt

SEQ ID NO: 9405 - DNA, 1272 bp, Bacillus anthracis
atgcttgatattaaatttttacgtacaaattttgaagaagtaaaagcaaagttacagcatagaggcgaagatttaactgattttggtcgctttgaagaattggatacgagaagaagagaactacttgttcaaacagaggaactaaaaagtaaacgtaacgaagtatctcaacaaatctctgtattgaagcgcgaaaagaaagatgcagaagctctaattctagaaatgcgtgaagttggagaaaaagtaaaagatcttgataatgaacttcgtacagttgaagaagatttagaaagattgatgttatctattccaaatatccctcacgaatctgctccagttggtgaaacagaggatgataatgtagtagctcgtacttggggagaagtgaaagaatttgcttttgaaccaaaaccacattgggatcttgctacagatttaggaatcttagattttgagcgtgctggaaaagtaacaggaagccgcttcgtattctacaaaggtgctggcgcaagattagagcgtgctttaattagctttatgcttgatcttcatactgatgagcatggatatgaagaagtattacctccgtacatggtaaaccgtgcaagcatgacagggacaggacaacttccgaagtttgaagaagatgcattccgtattgaaagtgaagactacttcttaattccaacagctgaagtacctgtaacaaatatgcaccgtgatgaaatcttaaataaagagcaattacctataagatatgctgcatttagctcttgtttccgttctgaagcaggttcagctggccgtgatacacgtggtttaattcgtcagcatcagttcaataaagtagagcttgtaaagttcgtaaaaccagaagattcttacgaagagttagaaaaactaacaaatgatgcagaacgcgtgttacaattattagagttgccatatcgcgttatgagcatgtgcacaggcgatttaggatttacagcagcgaagaaatacgatatcgaagtatggattccaagctatggcacatatcgtgaaatctcttcttgtagtaatttcgaggctttccaagcgagacgtgcaaatatccgtttccgtcgtgagccaaacggcaaaccagaacatgttcatacattaaatggatctggtcttgcaattggacgtacggtagcagctattttagagaactaccaacaagaagatggtacaattataattccagaagttcttcgcccttatatgggaggaaaaacagttattaag

SEQ ID NO: 9406 - DNA, 1411 bp, Bacillus anthracis
atggaacaagtagtaaacttagcgaaacatcgcggttttgttttccctggttctgaaatttacggtggtcttgcaaacacttgggattacggtccacttggaatcgaattaaaaaataacgttaaaaaagcttggtggaaaaaattcattcaagaatctccataccacgtatggtttagacgcagctattttaatgaacccaaaaacttggatcgcttctggtcacgttggtaacttcaacgatccaatgatcgactgtaaaaaatgtaaagcgcgtcaccgtgctgacaaattaattgaagatgcattagatgcaaaaggcatcgaaatggttgttgatggtcttactttcgaccaaatggctgacttaatgaaagaacatgaagtaaaatgtcctgattgcggtagtgaagaattcactgaaatccgtcagttcaacttaatgttcaaaacattccaaggtgttacagagtctagcacaaacgaaatcttccttcgtccagaaacagcacaaggtattttcgtaaacttcaaaaacgtacaacgctctatgcgtaaaaaacttccatttggtattggccaaatcggtaagagcttccgtaacgaaatcacgcctggtaacttcacattccgtacacgtgaattcgaaacaatggaactttgattcttctgtaagcctggtgaagatttagagtgggtcgcattctggcgtgaaactttgtagaactgggtacttttcacttggtatgacggaagaaagcatgcgtcttcgtgaccacggtgaagaggagttatctcactacagtaacgcaacaactgatattgaattcaaattcccattcgggtggggcgaactatggggcgtgtgcatctcgtacagacttcgaattaaaacgtcacatggaaaactctaacgaagacctttactatatcgatccccaaacgaatgagcgttacgtaccggaatggctcgagccatcctttagtggttgaccgcgtaactttagatttcttatgtggaggcctatgaagaaaaaacaattataaaaaaggattcttcggtacagtttctttcgtttccaccctgccttagcaccatacaaagcagctatcttaccattatctaaaaagctatctgaaagtgctactggagtattcgcagaaatagcgaaagacttcctgggtagacttttgacgaaactggttctatccgtaaacgttaccgtcgtccagacaaaatccgtaccccattctgtatcaccttccacttccaactcagttgaagaacaacttgtttcagtacctggaccgtgacacaatggaacaagttcgtatgccaattagcgaactaaaaggtttcttagagaagaaaatccagttctaattacaaaaaaagaggcgctctattgag

SEQ ID NO: 9407 - DNA, 276 bp, Bacillus anthracis
atggaagaaaatcaaattacaattgtagacgaaaaaggtaacgaacatttatgtgaaattattttcacttttgacgctgaaaaatttggcaaaaaatcatacgtagtcttctctccaatcggtgaagtagacgaagatggagaccaaatttatgatgcaatggcctatgagcaaaatgaagaagagggcggaactttacttccaatcgaatctgaagaagagtgggaaatggtacaagaaatgttcaacactctagctgatgagcaagaagctgaa

SEQ ID NO: 9408 - DNA, 3681 bp, Bacillus anthracis
atgaagaagaaaccttcagcactaatgagacgtttaaaatatttttcaccaatagatcgttataacgataatcatacacaagaaacatatgaagatcgtgaatgggaaaatgtgtatagaaagcgttggcagcatgataaagtaattcgttctacacatggtgtgaactgtactggttcatgtagttggaacatttatgtgaaagatggaattgtaacttgggaaggacaggagcttaactatccaacaacaggtccagatatgcctgactttgaaccacgaggatgtccacgtggagcgagtttttcttggtacatttatagtccacttcgtgtgaaatatccgtatgtacgtggtgttctttggagtatgtggctagaggaattacaaaataatgagtcaccattagatgcttggaaaagcattgtggaaaaccctgaaaaagcacgcaagtataagcaggcacgtggtaaagggggattcgttcgtgcgaattgggatgaagtgttacaactcgtttcagcttcattattatatacagtaatgaaatacggtccagaccgaaatgttggcttttcaccaattccagctatgtcgatgttaagtcatgctgcaggcagccgctttatgcaacttatgggcgggccaatgcttagtttttatgattggtatgcagatttaccaccagcttcgccgcaaatttggggcgatcaaacagatgtaccagaaagtagtgattggtataactctggttacattatgacgtggggttcaaatgtaccgatgacgagaacaccagatgctcactttttagcagaggttcgatataaaggaacgaaagtcgtttctgtcagtcctgactttgctgaatctacgaagtttgcggatgattggattagtgtgaaacaaggtacagacggtgcagttgcgatggcaatggggcacgtgatcttacaagaattttacgtagataatcaagtggaatacttcacaaagtatgcgaagcaatatactgattttcctttcttcgttacattgaaacaaaaaggagaccaattcgttgcggatcgattcttaaatgcttctgatattggacgcgaaacaaagttaggagaatggaaacctgtactttggaacgagaacacgaatgattttgcaacacctcatggcacaatggggtcacgttgggataacgaaaagaaatggaatttacgtttagaagatgaagaaacaggtggaaagattgatccacgtctttctttacttggaatggaagatagtgttcaaacggtgcaaattccgtacttctctgatgatggaaacacagtgttagaacgtacaattccagtgaaaaaggttatgacagaagaaggcgaagtgttcgttacaaccgtatacgacttaacgttagcaaattacggtgtgaaccgagggcttggcggacaagagccgaaagacttcaatgatgacgtgccgtttacacctgcatggcaagagaaaatgacaggagtaaaacgtgagcttattattcaaatcgctcgtgagttcgcacaaaatgctgttgatacgaacggtcgctcaatgattattgtcggagctggtattaaccattggtttaactctgatacgatttatcgcgccgttttaaatcttgtacttctcgtcggagcacaaggtgtaaacggcggtggctgggcgcattacgttgggcaagaaaaattacgaccagcagaaggatggcaaacaatcgcaatggcaaaagattggcaagggccaccaaaattacaaaatggtacatctttcttctatttcgtaacagatcaatggcgctatgaagatacaccagtgggacatttagcatcaccagtcgaaggcaactctcgttatcaacatcacggtgattacaacgtattagcggcgcgacttggctggttaccttcgtatccgacatttgagaaaaatggaattgaactatataaagaagctgttgctgctggtgcaacaacccaagaagaaatcggaaaatatgttgcacaaaaattaaaagaaaaagaactaaaatttgcgattgaagatccagataacaaaaataacttcccacgcaacttattcgtatggcgtgcgaacttaatttcaagttccggtaaagggcacgaatatttcttaaaacatttattaggtacaacaaatggattaatgaatgacgatagggattcgttacgaccagaagaaattaagtggcatgaggatgcaccagaagggaagcttgatttactcattaacttagacttccgtatggctggaacagcgctttattctgatatcgtcttaccagcttcaacttggtacgaaaaacacgatttaagcagtacagatatgcatccatttgttcatccgtttaatccagcaatcggttcaccatgggaagcacgttctgactgggatattttcacttcactttctaaagctgtgtcagatttagcagagaaaattgatcttgacccaatgaaagaagttgtggcaacaccacttcttcacgatacaccgcaagaattagcacaaccacttggtaagattaaagattggagcaaaggtgagtgtgaaccaatacccggtaaaacgatgccacaaattcatgttgtcgaaagggattataaaacgatttatgacaaaatgactgcgctaggaccaaatgccgggaaacaaccgattggtacgaaaggaatttcttggtcagcagaaaaagagtatgagcaattaaagagccggttaggagttgttcgaacagattctattgcgaaaggttgtccagacataaaagaagcaatcaatgctgctgaagcggtattaacgctttcttctacaacaaacggtcatatggctgtaaaagcatgggaagcacttgaaaaacaaacagatttaaaattacgtgatttagcagaagaacgtgaagaagaatgcttcacatttgaacaaattacagcgcagccaaaaacagtaattacttctccagcctttacaggttctgaaaaaggtgggcgccgttactcaccatttacaacaaatgtagaacgtctcatcccttggagaacaatcactggacgacaatctttctatttagatcatgacatgatgaaagaatttggtgaaacgatggcaacatttaaaccaattctacaacataaaccgttccgtaaatcacggcctgaagtagaaggaaaagaaattacattaaactatttaacgccgcataataagtggtccattcatagtatgtactttgattcattaccgatgttaacgctgtttagaggtggtccaaccgtttggatgaataaagaggatgcagctgaagcaggcgttgcggataatgattggatcgagtgttttaaccgtaacggtgttgttgtagcacgtgctgttgtaacgcatcgtataccgagaggaatggcgtttatgcatcatgcacaagatcgtcatataaacgtacctggtacgaaattaacaagtaaccgcgggggaacacataatagtccaactcgcattcacgtgaaaccaacacatatgattggtggatatggtcaattaagttatggatttaactattatggtccaactgggaaccagcgcgatttaaacgttgtaattcgcaaactgaaggaggtagattggcttgaagat

SEQ ID NO: 9409 - DNA, 364 bp, Bacillus anthracis
atggcatacagaaaattaggccgtacaagtgcgcaacgtaaagctatgttacgtgacttagctactgatttaattatcaacgagcgcatccaaacgacagaaactcgtgcaaaagaacttcgttctgtagtggaaaaaatgatcactttaggtaaacgcggagatcttcatgctcgtcgtcaagcagcagctttcattcgcaatgaagtagctaacgctgagactggtcaagatgcacttcaaaaactattcgctgatgtagctccacgctatggctgagcgccaaggcggatacactcgtattgcaaaaattggtccacgtcgcggagacgcagcaccaatggtaattatcgagttagtataa

SEQ ID NO: 9410 - DNA, 2337 bp, Bacillus anthracis
gtgttacaaccgaagacgcgttggaaagaaaaagaatataatggcgagcgagtgagtgaattagcaagtaaattacaattatcaccacttgtcgtttcgttattcctcggtagaggattagatacagaagataagattttagattttttaaatacagaaaatcaagaatttcatgatccatttttattagaaggaatggatagaacggtagaacgtgtaaataaggcgattcaaaatggagagcaaatattaatatttggtgactacgatgcggacggagtaagtagtacgactgtgttatatcttgccttgcaagaattaggtgcagacgtagaattttatatcccaaaccgttttacagaaggttatggaccaaacgaagaagcatttcgttgggcgcatagcgcaggattctcattaattattactgtcgatactggtatcgcagctgtacatgaagcgaaagtagcgaaggaacttgggatagatctaattattacagatcaccatgagccgccaccagaattgccagaagcacttgcgattattcatccgaaattagatggcggtgtgtatccgtttcactatttagcgggcgttggtgttgcgtttaaagttgcgcatgcactactgggccgtgtaccagaacatttattagaaattgcagtaattggtacagtagccgatttagtatcacttcacggtgaaaatagattgctagtgaagcgcggtttaaaacatatgcgcatgacgaaaaatattggactaaaggcgctatttaaagtagctaatgtttcgcaaagtgaaattacagaagagagtattggcttctcaatcgcacctcgtattaatgcagttggacgtttagaagatgctacgctggctgtacatcttttattatcagaggatccggaagaagcgaaagagctggctgaagaaattgatgaactgaacaaactgcgaaaagatattgtaaagcaaattacagaagaagctatcgctgaggtggaaaataatttcccgcctgaagaaaataaagtattagtgcttgcaaaagaaggctggaatccaggtgtaattggaattgtcgcttctaaattagttgaacgtttttatcgtccaacgattgtattatgcattgatcctgtaaaagaaactgcaaaaggttcagcgcgtagtattgcaggattcgatttgtttgcaaacttgtcagattgtagagagttattgccacacttcgggggacatccgatggcagcgggaatgacgctacatatgaatgatgtagatgaattacgccgccgtttaaatgagcaagcagaggaaattttaacggaagaagattttatcccaattacagctgtcgatgctttttgtaaagtggaggacgtaacacttgcagcaatcgaggatatgcaaaagttggcaccatttggtgttggaaatccaaagccacgtattgcggtgaaggatgcagagttagaaagtattcgtgcaatcggatcagacggttctcatttaaaaatggctcttcgtgatggacaggcaacactggatacaatcgggtttggatttggagcgtatgcgaaagaaatttctccagttgcaaaagtatctgtaatcggggaagcgtctattaatgaatggaataattttaagaagccgcaattaatggtgaaagatattgctgtagaggcatggcaattatttgattggcgtagtatgcgtaacgtagaagcaaatgtagcagaacttccgaaagaaaaaataacgatggtgtatttttctaaagaggtattgcataaattttctttagaagactataaagagcatatgatgcatgcatcagaagtaaccgagttagatgagcaatacatcgtgttacttgatttaccaaaaggaacagatgaattacgagatctatttaaagttgggttcccgtcgcgaatttatacgctattttatcaagagaataatcatttatttagtactgttccaacgagggatcactttaaatggtactattcattcttgagccaaaaatcaccattttctttaagacaatatggagaacaactatgtcaacataaaggttggtcaaaagatacagtaaatttcatgacacaggtgttttttgagttagaatttgttacaataaaagatggcgtcatttttatggcagacaaaaaacaaaagcgtgatttaattgaatcgaacacatatcgtgagaaaatgaaccacttacaattagaaaaagagttggtttatagcacatatcagcaactatatacatggtttgaaacgattcgtaatcataaagaagtagaacagctaggg

SEQ ID NO: 9411 - DNA, 412 bp, Bacillus anthracis
ggtacaggaatatcaacctgttgtccatcgcctacgcctgtcggcctcggcttaggtcctgactaaccctgagcggacgagccttcctcaggaaaccttaggcattcggtggacgggattctcacccgtctttcgctactcataccggcattctcacttctaagcactccaccagtccttccggtctgacttcactgtccttagaacgctcccctaccactgataccattggtatcaatccgcagcttcggtggtgtatttagccccggtacattttcggcgcagagtcactcgactagtgagctattacgcactctttaaatggtggctgcttctaagccaacatcctagttgtctaagcaactccacatccttttccacttaatacacactttgggaccttagctggcgg

SEQ ID NO: 9412 - DNA, 1587 bp, Bacillus anthracis
atgaagtatcgtgcagtcgcggcaggtattttagccgcaagtttattatcgtctccagtaagtagtttcgcagcagcgaagaagttttcggatgttcctacatgggcgcaacaatcagttgattatttagtaggaaaaaaggcgcttgatggaaagccagatggaacgttttctccatctgaagcagtagatagagggtcagctgcaaaaattttagcagtcgttcttggtttaccagttgatccaaaagcaaagccatcatttaaagatgcacaaaaccattgggcagctccgtacattgctgcagtggaaaaagcaggtgtaattaatggggatggtactggtaaattcaatccatcaagccaaattaaccgtgcatctatggcatctatgttagtacaagcatactcattagataagaaaattattggagaacttccaacacagtttaaagatttggaacctcattggggtaagaaacaagctaatattttagtagctttagagatttctaaaggtacgggaaatggctggaatcctgaaggaactgtaactcgtgcagaagcagctcagtttattgcgatggctgatcaaaataaaacaagtacatcaaaaagaatgtatatgaacagaaacgttattacatatcatcaaccatcattatcctctggtattactgatgttcaacataagccacaaatggttgaagtgacagagcaaagagcagacggctggttgaaaattgtaacaagtaaaggtgagaagtggacacctctaacagaaaaaacagaaacgattaatgaagaatttactacttatgaaacagcttcacatagttctaaagtgctaggtacatataatgcacaaacagtaacggttatggaagagagtggtagctggattcgtatccgcgtaggcgctggtttccagtgggttgataaaaatcaattaaatccagtaaaacaagagaactttttagaaggtaaagcaattattattgatccaggtcatggtggaattgactcaggtaatgttggttattacgagaaagaaagtgaaactgtattagatgtatcattacgattaaagaaaatatttgagcaaaaagcaccatttactgttatgttcactcgtacagataatacacgtccaggagtaaactcaacagattcattgaaaaaacgagtagagtttgctcaggaacataatggagatatctttgtaagtatccatgctaatggttctgcagagaaaaatggacaaggtacagaaacattatattatcagtcagcaagagcaaaagtaacgaatccgcatgtagaagacagtaagttattagcacaaaaaattcaagaccgtcttgtagcagcacttggaacaaaagatcgtggtgtgaaacatcaggacttatacgttactagagaaaatacaatgccagctgtattaacagaattagcatttgtagataataaaagtgatgcagataaaattgctacaccaaaacagagacaagctgcagcagaagcgatttatcaaggtattttagattattacgaagcaaagggtaataacgtatcttctttccgt

SEQ ID NO: 9413 - DNA, 657 bp, Bacillus anthracis
atgggtcaaaaggttaatccaattggtcttcgtgtcggcgttatccgtgactgggaatctcgttggttcgctgagaaagattacgctacattattacatgaagacatcaaaatccgtgagtacattaatgtacgcttaaaagattctgctgttgctaaagtagaaatcgaacgtgcagcaaatcgtgtaaatgttacaattcacacagcaaaacctggtatggtaattggtaaaggtggtactgaagttgaagcacttcgtaaagctcttaaccaattaacaggcaagcgtgtacacatcaacattttagaagttaagagagctgatcttaacgctaaattagtaggcgaaaacattgctcgtcaattagaaaaccgtgtatcattccgtcgtgcacaaaagcaagttattcaacgtgctatgcgtgcaggtgctaaaggtattaaaacacaggtttctggtcgtcttggcggagctgatatcgctcgtgcagaatcttacagtgaaggaactgttccacttcatacacttcgcgctgatattgactatgcagcagttgaagctgatacaacatacggtaaattaggcgtaaaagtatggatctaccgtggagaagtccttcctacaaaaaagaaagcttctgaggaaggaggaaaa

SEQ ID NO: 9414 - DNA, 2040 bp, Bacillus anthracis
atgtataaaacgtttactaatataagcgaagggaagaatagcatgtcacattcaatcgaacaactttctatcaacacgattcgcacattatccatcgatgcgattgaaaaagcaaactctggtcacccaggaatgccaatgggtgcagcaccaatggcttatacattatggactcaatttatgaaacacaatccaaataacccaacgtggtttaaccgtgatcgtttcgtattatctgcaggtcatggttcaatgttattatacagcctacttcacctatctggttatgatgtaacaatggatgacttaaagaacttccgtcaatggggaagcaaaactccagggcatcctgagtacggtcatacagctggtgtagatgcaactactggtccacttggacaaggtattgcaactgctgtaggtatggcaatggcagaaagacatttagctgctaaatataaccgtgatgcgtataatatagtagatcattatacatacgctatttgtggtgatggagatttaatggaaggcgtttctgctgaagcatcttcattagctgctcatttacaattaggtcgtcttgttgtgctttatgattcaaacgatatttcattagatggcgatttaaatcgttcattctctgaaagtgtagaagatcgttacaaagcatacggatggcaagtaatccgtgttgaggatggaaacgatattgaagctatcgcgaaagcaatcgaagaagcgaaagctgacgaaaaacgcccaacgctaattgaagtaagaacgacaattggtttcggttctccaaacaaatcaggaaaatcagcttcacatggttctccacttggtgtagaagaaacaaagttaacgaaagaagcatacgcttggactgctgaacaagacttccatgtagcagaagaagtatatgaaaacttccgtaaaacagtacaagatgttggtgaaactgcacaagctgagtggaatactatgctaggtgaatatgcacaagcatatccagaattagcaaacgaactgcaagcagcaatgaacggtcttcttccagaaggttgggagcaaaacttaccaacttatgaattaggatcaaaagcagcaactcgtaattcttcaggtgctgtaattaatgcaattgcagagtctgtaccatcattcttcggtggatctgctgaccttgctggttctaacaaaacatacatgaataacgaaaaagactttacaagagatgattacagcggtaaaaacatttggtacggtgtacgtgagttcgcaatgggtgcagcaatgaacggtattgcactacatggtggtttaaaaacttacggtggtacgttcttcgtattctctgactacttacgcccagcaattcgtcttgcagcattaatgcaattgccggtaacgtatgtattcacacacgacagtatcgctgttggtgaagatggtccaacacatgaaccaatcgagcaattagcagcgctacgtgcaatgccaaatgtatctgttattcgtccagctgacggtaacgaatctgttgcagcttggagactagctctagaatctacaaacaaaccaactgctttagtattaactcgtcaagatcttccaacattagaaggtgcaaaagacgatacgtatgaaaaagtagcaaaaggtgcgtatgtagtttctgcaagcaagaaagaaacagctgatgtaatcttacttgcaactggatctgaagtaagtctagctgttgaagctcaaaaagcattagcagtagacggcgttgatgcatctgttgtcagcatgccatctatggatcgctttgaagctcaaacagctgagtacaaagaatctgtattaccaaaagcagtaacaaaacgtttcgcaatcgaaatgggtgctacattcggatggcaccgttacgtaggtcttgaaggagatgtgttaggtatcgatacattcggtgcttctgctcctggtgagaagattatggaagagtatggatttactgtagagaacgttgttcgtaaagtaaaagaaatgctt

SEQ ID NO: 9415 - DNA, 972 bp, Bacillus anthracis
atgaagaaaattctcagtattttcatagtagtttttctattcgctgttggatgcggacagcaaaaagaggagaaaaaagaaacaaaagcggacaataaaaatcaagctataacaattaaacacgctgaaggggaaacgaagttagataaaccagcgaaaaaagtagttgtacttgaatgggtatattcagaagacttattagcacttggtgttcagccagtagggatggcagacattaagaattataataaatgggtaaatacaaaaacaaaaccgagtaaagatgttgtagatgtcgggacacgtcaacaaccaaacttagaagaaattagccgtttaaaaccagatttaattatcacagcttcattccgtggtaaagcaattaaaaatgaattagaacaaattgcaccaacagttatgtttgatccatcaacaagcaataacgatcactttgctgaaatgacagaaacatttaaacaaattgcaaaagcagttggaaaagaagaagaaggtaaaaaagtattagctgatatggataaagcattcgctgatgcaaaagcaaaaattgaaaaagcagacttaaaagataaaaacatcgcaatggcacaagcatttactgctaaaaatgtgccaacattccgtatcttaactgacaattctttagctttacaagttacaaaaaaattaggtttaacaaatacttttgaagcaggaaaatctgagcctgatggtttcaaacaaacaactgtggaatcattacaaagtgtacaagattcaaacttcatttacattgtagcggatgaagataacatttttgacacgcaactaaaaggcaaccctgcttgggaagaattaaagtttaaaaaagaaaacaaaatgtataaattaaaaggcgacacttggattttcggtggtcctgagtctgcaacatctttagcaacacaagtagcagatgtaatgacagcgaagaag

SEQ ID NO: 9416 - DNA, 414 bp, Bacillus anthracis
ttgttaaaaggaatcaatcatctttgtttttcagtatctaatttagaagattctattacattttacgaaaaagtattggaaggagaattattagttagaggaagaaaacttgcatattttaatatatgtggagtatggatagcgcttaatgaagaaatacatattccaagaaaagagattcatcaatcttatacacatattgcgttttctgttgaacagaaagactttgaacgtctactgcagcgattagaagaaaacgatgttcatattttacaaggaagagaacgggatgtaagggattgtgaatctatatattttgttgatccagacgggcataagtttgaatttcattcagggacattgcaagaaaggcttaattactatagggaagataaacctcatatgacgttttac

SEQ ID NO: 9417 - DNA, 1826 bp, Bacillus anthracis
atcgcggaacatgcaacaatacaaagttttttaaattgttatttaagagaaacaggaagtggagaatggattacagaggataaaaggatagaggatattttctacccattatttcaaaagagatacttgctctacttatttatgctgtcggttatcggcacaaaacattatctttgtatggagaagttatatataaatcaccaacagatcgccatttgtttggagaacaattttattaccaaatgggagatatatattttgttttagaaagccagatttcggttcccagttaataccattttaataaaaagggatgttttttcaatctggggagaagggacgaacccttgctgaccttatgtttcgagttattccgtaggtgtcaaaatattgggggatttttcaaaaggagagaaaagaagatccttctgcattatacggtttccatacatccttaatagagccggagcaatctttattatttggacatttagcgcatccacttccaaagagtagacaaggtatttgggaaaggaaaaaagtgggatgttattcttccaagaattaaagggggaaaatgccagtttcattattttggggccacataagaggtatggggaattgaaaattcattttttgtgagtttttccagcagtaattttaaaagaggagttccccaaatgatgaaatggttagtaaggaatttatatcgagagtattgtaatgaagatgaatattcattatttccaattcatccgcttcaggcaaaggggtttttaccccaacccttcctttcaggattggatagagcaaggagtacttgaatatatcggtcctacccggtaagtgttatatggcaaacatcatcacttaggacgttgtatcatcctgacgcaaagtatatgcttaagttttcattcccagtaaaagtaacaaattcaatgcgcattaataaattaaaggaattagagagtggtcttggacggcacggcatagttaattctggcgatgggtgaatgcttagagaaactttcagggcttgatatcatttgcgatgcagcctttattacattaaattatggaacacaagaatctggatttgaagtgattattcgagagaatcctttttatagcgaacatgctgatgacgctacattaattgcagggctagtgcaagacgctatccctggagaacgtactcgtttatcaaatattattcatcgcctagcagatttagaaagtagaagctgtgaagaagtaagtttagagtggtttagacgatatatgaatatttctttaaagccgatggtatggatgtatttacagtatggtgttgcattagaagctcatcagcaaaatagcgttgttcagctaaaggatggttatccggtcaaatattatttccgtgataatcaaggtttttatttctgtaattcaatgaaagagatgcttaataatgagttagctggtattggagaacgtactggaaatttatatgacgactatattgtagatgaaagatttcgttactacttaatttttaatcatatgtttggactcattaacggatttggtacagctggattaattagggaggaaattctccctctcggaattaagaactatacttgaatcgttccttccaatataataatgaaccttctacctttttaagagatttgtcgaatgaggataagtcggcatgtaagcaaaatttattaacgagatttttcgatgtcgacgagttaagtaattctttagaacaagcaatttacgtacaagtacagaatccgctcgttagagaagtggctgttcgttcataaata

SEQ ID NO: 9418 - DNA, 1188 bp, Bacillus anthracis
atgaaaaaattggggaacctcatcctgtttatcggttttctcaccattatcttttcatttggcatattatcgttactcaaaacagaccgagacatttcaccagttgaaaatcggccgctcgctcaaaaaccagcacttacgaaagaagctctcctaactggtagcttctttaaagattttgaaacatacacaaatgatcaactaatcggacgagatgagcttattaaaaactatacgattgctcaaattaatatgggcaaatctctcattaacgacattattttaactgatgataaatggctcctgaaaaatccggcgtggacaacaaaatataatgaaattgaccaatccatgcctgctataaacgacttatctcagttttcaaaagaacaaaacgttgagttttactttgctttaccaccgtcaaaaacgaatgcattatcatttaaattaccttctcatattcacacatatgcacaggaaaatttaaattactttctaacgaaactaccagctgacgtaaaaccaataaaacttatggaacacttgaaaaagaactatacgaatgaagaaatacaagacatgtatttcaaaacagatcatcattggaatatggacggtgccttcttaggttaccaatatataatgaacacaatcgggcaacaatcttctatatataaaggaaaagaaataaaaaaagaagattacactcgtacatgcgcgcaaaataaacatttagtcggaagcttcaacaaccaactataccaactcatcgatgcaactggtgaaaaattgtgctactacacaccgaaagacggttttaacttcacaagcgtaaccgcaaaagatgtgaaaggcactattcatcaaaacttagatgaaatatatggcgtagaaaaacaaaaagatacaacatcatacgcaggttattacacagatgactatccagaaatcgtcatcgaaaataacaacgcacaaaatgaagtacgcgccttagtcctaaaagactcattcgcaaacgcgatcgtgccacacttagcacaaagtttcaaacacacatccatcctcgacctgcgtcactatcacgaaaaagatgtatatcaatacatgaaagacaataacattaacatggtattgttcgtgtatagtgattcgaatttgagtggggatatgtttaagtttaagaaa

SEQ ID NO: 9419 - DNA, 270 bp, Bacillus anthracis
gtgagcattaataatgtgcagtacgaagtaattaaaaactttcgtgacggttttagtgaagaagcatttaaagagcgctatgcagaaattttaaataaatatgattacatcgttggagactggggatatgagcaacttagattgcgcggtttctttgatgatagtaaccaacgtgcgacatatgatacaaaaattagtacgttatcggagtatttatacgagtattgtaacttcggttgtgcacacttcgtattacgaaaagtgaagaag

SEQ ID NO: 9420 - DNA, 1191 bp, Bacillus anthracis
atggaaagatttaaaaaagctagttctattattgagactttaaagcagcaaggacatgaggcttactttgtcggtggaagcgtaagagaccttattatcgataggccgattggagatattgatattgcgacatctgctttacccgaagaagtgatggctatatttccaagacatgttcctgttggtcttgaacatggaactgtaattgtagtagaaaatggtgagccttatgaggtaaccacttttcgaacagagagtgaatatgaagattttcgaagacctagtagtgttcaatttgttcgttcattagaagaggatttaaaacgtcgtgatttcacaatgaatgcaattgccatgacagaagaaggcgaaatggtcgatttatttgcaggacaggaagcgattcaaaagagagaaattgtgacagtgggaaatgctgcggatcgttttcaagaagatgccctgcgaatgatgcgtggtattcggttcgtaagtacgttaggtttttctttagagacgaaaacgaaacaagcaattgaaacatatggacatttgctggaacatatagcaattgagagaattacagtggagtttgaaaaactgttaactggcacatattgcgtgaagggtctcaaagaattagtggaaacgaaactattttctcatctgccatatctacaaatgtcagaagagagattattaaaagctacgcagtataactgggattcttttgaaacagacattgaggcatgggcgtttttcttatattgtattggagaagaacatccatctgtctttttacgtcaatggaagttttcaaataaaaaaataaaagatatcgtcgcagttttattaacaatccgtaagagaaaggagaaggattgggatacagtccttctttataaaacgggaattcatatagctgaaatggcagaaagagtatatgaagcgatgattgaaagctatgatcatacatctgttgaacgggtacaaacgttgtttcaagcattaccaattaaaagtcgacaagagatggatgtgactgggaatgatttgttaaactgggcaagtaaaaagcccggtccatgggttgctgaaatgattcaaaagattgaggaagcaatcgtacaaggaaacgtagttaatgagaaagagtgtataagggagtggctgcaagaatgcaatctacta

SEQ ID NO: 9421 - DNA, 1306 bp, Bacillus anthracis
ggtgctgtagctctaattgtagaaagagatgtaaatattgagatacctaaaataattgttaaagatgctaggtatgctatggcagttattgcgtcacatttctatggttatccatctaataaaatgaagttaattggaattacagggacaaatgggaaaacaactacttcctatttacttgaaaaaattttaagtgattatggatatcacacggggctcatggggaataacggagtgaaagtgggttcaaaatggtatcctactgatattaatacgcaagaacctccaacacttcaacggaatttgcaaatgatgaaaaatcaaaatgcagattattgtgttatggaagttacgtcacaagggttacatatggaaagagttaaagggtgtaactttaaaatagctgttttcacaaatttaacacaagatcatttagattatcatggaacatttgatgaatataagcatgtaaaaagtcttctttttgcgagattaggaaataatttatctactatagataaaaaaatagctgttttgaatgcagacgatccatcggtaggatactttaaaaaattactttcagctgagggtaatcacatatggaatacataatggagcagatgttcaagcgaaagaacatacttttaagtcccaaaaggaattcgtttttttagttttcgtcctttaatgggcgaaatagaggggtaagcttaaatctttgtagggcggttttaatggtttataaatgcattagcagcaataacagttgcattggttgaaggtattccgcttacaaacattagtgatagcttatctaacttaaagagtattgaaggtagaatggaaatcatagatgaaaatcaagatttccttgtaatagtggactatgctcatacaccggatgcgttagaaaatgttctctctacaattagagagtttgcaaaaggtaaaattattactgttttcggttgtggtggagatagagacgcaaaaaaaacgatctataatgggtggaattgctggaagttatagtgattttgtttttattacttctgataatccacgttcggaagatccgcaggcaataatgaaagatattgaaaaaggattttcgcaaaataataatttgaattataaagtggaagtagatcgtgaacttgcaattaatcacgcaataaacatggcatcttctaatgatattgttttgattgcagggaaagggcatgaaacgtatcaaattttaaaagattcaactattcattttgatgataaagaaaaagctcgacaagcaattattaataaatga

SEQ ID NO: 9422 - DNA, 896 bp, Bacillus anthracis
attttcttaaatggagaatttgttccaaaagacgaggcaaaagtatcagtatatgatcatggttatttatatggcgatggagtatttgaaggaattagagtttatagcggtaatgttttccgtttgagagagcatcttgtccggttatatgaatcagcaaaatccatcatgttagaaattccatattctttagatgaaataacgaatattgttgttgagacgatccgacaaaataaattatctaatggatacattcgcctagttgtatcgagaggagcaggaaatcttgggttagatccctgattcttgtacgaaaccgaatgtagtagtaattgcagagcaactatctttattcccgcaagagtattatgaaaaaaggattccagttgtaacagttgcgacgcgccgaaaccgtccagatgtattgtcgcctcaagtaaaatctttaaattacttaaacaatatttttagttcgcatcgaagcgaaaattggctggagtacagaaagcgcttatgttaaatgatcaaggatacgtagctgaagggctcaggagataacgtgttattggtaaaagggaataaatttattaccaccaccaagttctgctgagcgtttagaaggtattacacgaaacgctattttagaaatcggtgaaaaacttggatatgacgttagagaaagagttatttaccaagacatgatgtatatgtaagctgatgaaagtatttttaaccggaaccgggctggcggaaagaaattggctgttacgacagtagatggtagaacgatcggtttagggcaaacaggtccacatacgaatcgtttattagaagaattccgaaagttagttatagaagatggagagaaaatttacgaagaaaataaagttggataa

SEQ ID NO: 9423 - DNA, 288 bp, Bacillus anthracis
atgttaagattagatcttcagtttttcgcatctaagaaaggtgtaggtagtacaaagaacggtcgtgactctcagtcaaaacgtcttggtgctaaacgcgcagatggtcaaacggtttcaggtggttcaattctttaccgtcaacgcggtacaaaaatttatccaggtgttaacgttggtcgtggtggcgatgacactttatacgcgaaagttgacggcgtagtacgcttcgagcgtcttggccgtgaccgcaaacaagtgagcgtatatcctgttgctcaagaagca

SEQ ID NO: 9424 - DNA, 555 bp, Bacillus anthracis
atgggacaacaagtattaaagttttcaaatgaaaaaatggaaaaagcagttgctgcttattctcgtgaattagcaacagttcgtgctggccgtgcaagcgcgtctgtattagataaagtacaagttgattactatggtgcaccaacaccagttgtgcaattagcgaacattacagttccagaagcacgtttacttgtaattcaaccttatgataaaacttctatcggtgatatcgaaaaagcaattttaaaagcagatttaggcttaaacccttctaatgacggaactgtaattcgtattgcattccctgcattaacagaagagcgtcgtcgtgatcttgtaaaagttgtgaaaaaatatgctgaagaagcaaaagttgctgttcgtaacgtacgtcgtgacggtaacgacgatcttaaaaagcttgaaaaagctggcgagattacagaagatgatttaagaggatatactgaagatatccaaaaagaaacagataaatatattgcaaaagttgacgaaatcgcaaaaaacaaagaaaaagaaatcatggaagtg

SEQ ID NO: 9425 - DNA, 132 bp, Bacillus anthracis
atgaaaagaacttaccaaccaaataaacgtaagcgcagcaaagtacatggtttccgcagccgtatgagcacagcaaacggacgtaaagtgctagcagctcgtcgtcgtaaaggaagaaaagtattatctgcg

SEQ ID NO: 9426 - DNA, 969 bp, Bacillus anthracis
gtgagcaacttatttacaacagtaaaagaaaaagttcaaggaaaaggcatttctatcgtacttcctgaaggaactgatgaaagaattttaggcgctgcagagcgtttagcaaaagaagagttagtaaaaccaatcttagttggtaataaagaagaaattagcgcaaaagctgctagcatgaatttaacattagcaggcgttgatatttacgatccagctacatacgaagaaatggatgcaatggtagcatctttcgttgaacgccgtaaaggtaaagcaacagaagaagacgctcgcaaaatccttaaagacgaaaattacttcggtacaatgcttgtatacatgggcaaagcacacggtttagtaagtggtgcagctcactctacagctgatacagttcgtccagcacttcaaattattaaaacaaaaccaggcgttacaaaaacttctggcgtattcatcatggtacgtgaagaagagaaatatgtatttgctgattgcgcaattaacattgcaccaaatagccaagatttagctgaaattggtatcgagagtgcgaaaactgctgaactattcggtattgacccacgcgttgctatgttaagcttctctacaaaaggttctgcgaaatctccagaaacagaaaaagttgtagaagcaactcgcattgcaaaagaaatggctccagaattaactttagatggagaattccaattcgatgcagcattcgtaccatctgtagctgagaaaaaagctccaggttctacaattaaaggtgatgctaacgtattcgtattcccaagtttagaagctggtaatatcggttacaaaatcgctcaacgtttaggtaacttcgaagcagtaggaccaatcttacaaggtttaaacatgcctgtaaatgacctatctcgtggatgtaacgaagaagaagtgtacaagttagctttaattacagcagctcaagcactt

SEQ ID NO: 9427 - DNA, 762 bp, Bacillus anthracis
atgaaaaacattgattcagtacaaaatccgcgtgtgaagcagtggaaaaagctgcaaacgaaaaaagaacgcgataaaaaaggtttattttttgtagaaggattccatttagtggaggaagctttaaaagcaggagttgtaacagaacttatcgtttcagatcagacagaccttccgaaagattggacagttaatgatgtagaaatgtatatcgtaccggaagcaatcgtaaaagtacttcgtgaaacagaaacgacgcaaggtgtatttgctgtttgtgagaaacacgagagtgaagtagctcttactgatgggaagtttcttttattagatggcttgcaagacccaggtaacttagggacaattattcgcacagctgatgcagctggtattcatgccgttgtgcttggagaaggttgtgttgatgcatataatagtaaagtactccgctctacacaaggctctattttccacttaccaattgtaaaaggaaacttaaaagaatgggtagacaaactaaaagaaaataacgttcctgtatatggaacagctcttgaaaatggagttccttacggtgaagtaacaccagcaggaagttttgcattaattgtaggaaatgaaggaaacggcgtacgccaagaaattcttgcaaaaacagatcaaaacttgtatattccgatttatggcggggcagaatcattaaatgttgcagttgcagcagggattttaacgtattatttacaaagcccagttgcgaacaaa

SEQ ID NO: 9428 - DNA, 1338 bp, Bacillus anthracis
ttggaaaacatctctgatttatggaacagcgccttaaaagaactcgaaaaaaaggtcagtaaaccaagttatgaaacatggttaaaatcaacaaccgcacataatttaaagaaagatgtattaacaattacggctccaaatgaattcgcccgtgattggttagaatctcattattcagagctaatttcggaaacactttatgatttaacgggggcaaaattagctattcgctttattattccccaaagtcaagctgaagaggagattgatcttcctcctgctaaaccaaatgcagcacaagatgattctaatcatttaccacagagtatgctaaacccaaaatatacgtttgatacatttgttattggctctggtaaccgttttgctcacgctgcttcattggccgtagccgaagcgccagctaaagcatataatcccctctttatttatgggggagttggacttggaaaaacccatttaatgcatgcaattggccattatgtaattgaacataacccaaatgccaaagttgtatatttatcatcagaaaaatttacaaatgaattcattaattctattcgtgataataaagcggtcgattttcgtaataaataccgcaatgtagatgttttattgatagatgatattcaatttttagcgggaaaagaacaaactcaagaagagtttttccatacattcaatgcattacacgaagaaagtaaacaaattgtaatttccagtgatcggccaccaaaagaaattccaactttagaagatcgtcttcgttctcgctttgaatggggactcattacggatattacgccaccagatttagaaacacgaattgcgattttacgtaaaaaggcaaaggctgaaggacttgatataccaaatgaggtcatgctttatatcgcaaatcaaatcgattcaaatattcgtgaactagaaggtgcactcatccgcgttgtagcttattcatctttaattaacaaggatattaatgctgatttagcagctgaagcacttaaagatattattccaaattctaaaccaaaaattatctccatttatgatattcaaaaagctgttggagatgtttatcaagtaaaattagaagatttcaaggcgaaaaagcgcacaaagtcagttgcctttcctcgccaaattgcaatgtatttgtcacgcgaactgacagattcctccttacctaaaataggtgaagaatttggtggacgtgatcatacaaccgttatccatgcccatgaaaaaatttctaagctacttaagacggatacgcaattacaaaaacaagttgaagaaattaacgatattttaaag

SEQ ID NO: 9429 - DNA, 662 bp, Bacillus anthracis
caggaaagcgggatgggtgctggcaaaaataagtttgtcctactttattaatgaaggaccgattattgcggcatacgttacgtgcttttgaaaaggataaagcatgtaaaaatattattatggcaattaacgaagaagagcgtccatattttgaagagttaatgcagaagtatccggttgaaaagccagtacaatttattcaaggtggagctgaaagacaagatagtgtatataatgcgattcagcatacgactgatgttgagtatgttcttgtacatgacggtgcgcgcccgttcgtaacgaataaagtaatccaagatgtattaactgcagcagaaaaatatggagcttccatttgtcgggtcccagggaaagattcctttatagaaatatggagcaaggtttttttttcgaaaacggttaaaaagattgccaatttaaagcctgtcaaacccccgccaagggtttttttgttccgcttggttagaaagctcatagaagtgggaaacaagagttgtttcctgggtacaggtgatgcaagtttcgtagaagttatcgggaaagcaagtagttgtagtagaggggagtttcttataatataaaagtgacggccccaggaggatttactaattgctgaaagttttcttcacgttcaaaagaaa

SEQ ID NO: 9430 - DNA, 519 bp, Bacillus anthracis
gtgaaacaagcacaagaagaaaatgcagtgcaatcaaaacaattgctggatgcacttaaacagcttggtattgctgataaagatatagaaacgatttcttatacgattactcctcaatacgagtatgtaaatgataaagcgttactacaaggataccgtgtggaacatttgtatgaaattaccgttttaaatgtacaaaaagcaggggaagtatatgatatagccgtttcaaatggagcaaacgtagcaaaaggattacgttttcgaatatctcacccaaataaatattatgagcaagctctcattcaagctctgcaacaagcggtagaaaaagctcgtgctattgcgagtacatacaatttaaatattaatcctgttccactctcattcgttgaagaatctgcccaattgccacgggaagtgacgtcctatgctactttacatgcacaagcagctcctcccattcaatcgggagaattagagatcatttctacaatacgggcgatttttacgtattta

SEQ ID NO: 9431 - DNA, 1011 bp, Bacillus anthracis
atgcaagagcgatattcaagacaagtattgttttctggaataggtgaaatgggacaaaggaaaataagggaaaagcatgtgctcttaattggtgcgggggcgctaggagctgcaaatgcagaagcgctcgttcggatgggaattgggaaattgacaattgccgatcgtgattatgtcgaatggagtaatttacaacggcaacagttatatacagaagaagatgcaaaacaatgtaaaccaaaagcaattgcagcggcagaacatgtaagaaagattaattctgaggtggaaattgtaccagttgtaacggatgtcacaatgaaagaaatggaagagttaacgaaagaagtggatctcatattagatgcgactgacaactttgatacgcgtctacttataaatgatatttcacaaaaagaaaatataccttggatatacggtggatgcattggaagttacggtgtaacgtacacaattcttccaggaaaaacaccatgttttcgctgcttaatggatcatccgatgggcggtgcaacatgtgatacagcgggaattattcagccagctgtacagatggttgttgctcaccaagtgacagaagcaatgaaaatattggtggatgacttcgagacgctacgaggaacaatgttatcatttgatatttggaacaatcaatttctctcattaaaagtaaataaacagaaaaaaagtacatgtccatcttgcggaaatacacgtacgtacccaagtttaacatttgaatcacaggtgaaaacggaggtgctatgcggacggaatacagttcaaatccgtccaggaataaagagagttctaaatttaaacgaaattaaaaaaagattacaaaaaattgtacatgtccaaaaaacgccgtacttactatcatttctaattgatgaatatcgtttcgttttatttacagacggtagggcatttgttcatgggacaaatgatgtgaaaataggaaaacgattgtacgcaaaatatatagga

SEQ ID NO: 9432 - DNA, 1146 bp, Bacillus anthracis
atggtagagaaaatgaatgaagaagttatggattcaaaagaattacaagttggtgacgttgttacaggttctgtaacgaaagttgaagagaaacaagtgcttgtaaacgttggatacaaaacagatggcgtaattccaattagtgagttagctaacgttcatattgaaaaagcaagcgatgttgtagaattagatcaaacactagaattaaaggttattaaattagaagagaatgatcttgtattatctaaacgtgctgttgatgcagaaaaagcatgggtagaattacaagagaaatttaattctggtcatgtatttgatgttactgtaaaagatatcgtgaatggtggattagttgtggaccttggtgttcgtggttttatcccggcttcacttgtagaagtacattatgtagaagattttactgactataaaggcaaaacgttagccgtgaaaattgttgaattagaccgcgaaaaaaatcgtgtaatcctttcacataaagcggtagtagaattagaactagattctaagaagaaagaagcgatttcttcattaaaagaaggagacgttgttgaaggaacagtgcaacgactaactgacttcggcgctttcgttaacgttgggggtgtggacggtttagttcatatttcacaaatttcgcacgaacgtgtagagcaaccttctgaagtattagagcaaggtcaaaaggtaaaagtaaaggtattatctgttgatgctgacacacaacgtatttctttatcaattaaagcagctcagccgggaccttgggaaaatgttggtggcgaagtaaaagctggagatattcgtgaaggagtagtaaagcgtcttgttacattcggtgcattcgttgaaattttaccgggcgttgaaggtcttgtgcatgtatctcaaattgcaaatcgtcatgtgaagaatccaaatgaagtattggaaatgggacaagaagtaaaagtgaaagtgcttgaagtgcatgtagcagaaaaacgtatttctttaagtataaaagaagcgcttgaggaaaataatgtaactgaagattacagtcagtatgaaccaaatgctgattctgctactttccaattaagtgatattattggtgaacaactgaaaaaattaaagaaa

SEQ ID NO: 9433 - DNA, 1536 bp, Bacillus anthracis
atgttgcagtttctacaacgtattgggtaagcggtaatgcttccaatcgccgtactaccagcagcaggaatatttgcttcgtttaggacaagaagacgtattttacatttctgttatggcacaggccggtgcagcaatttttgataatttagcactttatttttgcaattgggtgttgcaatccggtttgtctggttgacggtagttggagcaacctggactttgccggagcaatccgaatatcttggttttaccaaatacaacgaatgctctaagtaagacgtattcagcagcagagttaaatgataaattaaaaagtgttcaagatttagtcggttcagtagatccaactaaattagcagatacaatgacaaaggtttcaaaagcagcggcgttaacgccaaaaataaatatggccatactcggtggtattattgcaggggttgttgcgggattactatacaacaaattccataagattaaactaccagaatggttaggattctttgcaggaaaacgcttcgtaccaatcattacttcaatcgtaatgttacttttaggattgttattcggtcaaatttggccaacaattcaaagtggtattgatgcagtggcacatggtatcgtgaacttaggttcaattggtgctggtttatttggattattaaaccgtttattaattccaattggtttacaccacgtaatgaacacatacttctggttcgtacttggtgactttacaaatgcagctggcgatattgttcatggtgatattgcacgtttctttgcaaaagatccatcagcaggtatgttttatggcttgttttctccccagttatgatgttcggtttaccagcagcatgtttcgcaatgattgcagctgctaaaccagaaaaacgtaaaatggttacaggtatgttaggtggtctagcattaacttcattcttaactggtattacagagccaattgaattctcattcatgttcttatcgccagtactatatggaattcatgctgtattaacaggtctatctctattcattacaacaacacttggcattcatgatggtttctcatttagtgccggggcaatcgattacgtcttaaacttcggtatttgcacaaaaacattgttactagcaggaaatcggtttaatttacgcagcaatttactttgtagtattctacttcttaattaagaaagtcgaccctaaaactcctggtcgtgaagatgaagaggaaatggctgaaggcgaagaagctccagttgcaggttcaattggtgaaacttacgtagcagctttaggtggaaaaaggaaactttaacagttattgataacttgtgcaacaggttttacgctttacaggtgaaagatggctgtcaaagtaaccgaaagcagcattaaaacgtgctggtgccaaaaggtgttatgaaattaagtaacacgagtgtccaagttatcgtaggtacaaatggtgaatctgttgccgatgatatgaaaaaacacgtataaataattagataagaagatatc

SEQ ID NO: 9434 - DNA, 1182 bp, Bacillus anthracis
attatggacaggccattccgttatgtatttataaaaaactttgtaaacaaaccaggtgctcgctttaagaactggtacataccgccgcaccgtgtcattttgaacaccaacatttatgccagttggtacacttgcaaacagttagaacatgtcacccagaagaattaaaagcaatggaatctgggcattaattttaagtaatacgtatccatttatggttaccttccaggcacgaaaatcttcctgaaaaccagggggttgccataatttttgaactggggatcgggcaatcttaacggactctggtggtttccaagtattcagtttaagtgacttccgtcgcattgaagaggaaggcgttcacttccgtatccacttaaacggagataaattatttttatctccagaaaaagcgatgggaaattcaaaatgcattaggttcagatattatgatggcatttgatgagtgtccaccattcccagctacttttgaatatatgaagaagtctgtagagcgtacaagtcgctgggcagagcgttgcttaaaagctgcatgaacgtccacaagatcaaggtttattcggtattgtacagggcggagaatttgaagaacttcgccgtcaaagtgcaaaagaccttgtttcaatggacttccctggttacgcggtaggtggtttatctgtaggtgagccgaaagatattatgaaccgtgtacttgagtttacaacgccacttcttccagataataagccacgttacttaatgggagtaggttctcctgattcattaatcgatggtgcaattcgtggtattgatatgtttgactgcgtactgccaactcgtatcgctcgaaatggtacatgtatgacaagtgaaggccgccttgttgttaaaaatgcgaaattcgcaagagacttcggtccgcttgatccaaattgtgattgctacacatgtaaaaattattctcgtgcgtatattcgtcacttaatgaaatgtgatgaaacgttcggaattcgtttaacgtcttatcacacccttcattttctgttaaacttaatggagcaggtgagaacagctattcgtgaagaccgtcttggcgatttccgcgaagaattctttgaacagtatggctttaataaaccgaatgctaaaaacttctaatacataatttaaaaggaggaa

SEQ ID NO: 9435 - DNA, 1755 bp, Bacillus anthracis
atgcgtaaaactaaaattgtatgtactataggtcctgctagtgaaagtattgaaaaattagagcaattaatcgaagcaggtatgaacgttgctcgtttaaacttctctcatggtagccatgaagagcacggtgctcgtattaaaaacattcgtgaagcttcaaagaaaactggtaaaacagttggtatcttacttgatacaaaaggtccagaaatccgtactcatgacttcgtagacggacaagctgagcttgtaacaggtgcagaagtagttctttctactgagcaagtattaggtactgcagagaagttctctgtatcttatgctggtctttatgacgatgtagatccaggttctcgcattctaatcgatgacggtcttatcgagctagaagtaatcgaaaaagctgacggaaacatccgtacaaaagttcttaacagcggaactgtaaaaaataaaaaaggtgttaacgtaccaaacgtaagcattaagcttcctggtatcactgaaaaagacgtaaaagatatcatcttcggtatcgagcaaaaagttgatttcatcgcagcttcattcgtacgtaaagcagctgacgtattagaaatccgtgaattattagaagagcataacgctcaatacatccaaatcgtaccaaaaattgaaaaccaagagggtatcgacaacatcgattcaatcttagaagtttctgacggcttaatggtagctcgtggtgacatgggtgtagaaattccaccagaagaagtaccattagtacaaaaacgtctaatcaaaaaatgtaacgtgttaggtaaaccagttattactgcaacacaaatgttagattctatgcaacgtaacccacgtccaactcgtgcggaagcaagtgacgtagctaacgcaatcttcgatggtacagatgcaatcatgctttcaggtgaaacggctgctggacaatacccagtagaagcagtaacaatgatggctaacattgcagtacgtgttgaaaaatcattacaatatgaagatatgttcaaaaaacgtattaaagagttcactccaacaattacagatgcaattagccaatctgttgcgcatacagcacttgctcttgatgtagctgcaatcgtagctccaacagaaagtggatatactgcgaaaatgatctctaaataccgtccaaaatctccaatcgtagctgtaacatctgatgagcaagtaggacgtcgtcttgcacttgtttggggtgtacaagcatttatggctgagaagcgtgcggcttctactgacgaaatgttagatacagcgattcaaacaggtatggatgcaggtctaatcggacttggagacactgtagtaatcactgctggtgttccagttgctgaaactggtacaacaaacttaatgaaaatccacgttgttggtgaagaagttgctaaaggacaaggaatcggtcgtaaagctgcaaaaggtaaagtagttgtagcgaaaacagctgctgaagctgtagcgaacgtaaacgaaggtgatatccttgttacaacaagcactgataaagatatgattcctgcaatcgaaaaagctgctgctttagttgtagaagaaggcggcctaacaagccatgcggctgttgtaggtgtatcaatcggtattcctgttatcgttggtgtaaacggcgtaacagcaactttaaaaaatggccaagaagtaacagttgatgcagcacgcggaattgtttataatggacatgcggaagtgcta

SEQ ID NO: 9436 - DNA, 729 bp, Bacillus anthracis
atgaatttgaaaaaatttgaagaggtaataaatggagaaggattacacgaatcgtttcatcatttagaaatacatggtgtctgcatagattccaaaaacattaaagaaggaaatgtattcgttccaatcattagggtgaaggatgggcatgagtatgtgaaagaggcaatggataatggagctatcgcttccttatggaaaaagtcttacggttctccgccaaaagggattccaattatatttgtagatgacactttgtttgctttgcaacaattggcacaattttatcgaagagagataaatgtaaaagtaatcggaattaccggtagtaatggaaaaactacggtaaaagatatagtagaaggtattttaaggtcaacttatagagtgcataaaacaaaaggtaattttaatagtcaaatcggtttaccgttaacaattttagagatgaaacgagatacagagattttaatacttgaaatgggaatgagtgaaaaaggatgtcgtattattgaaaggttcacgtggaatagctttagaggaaattgtccaaaagtggatgtgaaaaatcaaaatttatttaaaaatgcttgcattttacaaagtgaagagatagaatactctgtaaatataaaaagtgatgatcaggaaaagtacatgatgcaaagatctacagagagcaatcggttgctggaaagattgcgataccgcatgatggaaagacacctg

SEQ ID NO: 9437 - DNA, 476 bp, Bacillus anthracis
gaatccagagtgtttaaaacgagccgagtatttccgacagatttaagtgatcacaatacgctatttggtggaaagatattagccgagatggatatggttgcttctatttcagcgacgaggcatgcaataaaagaatgtgtaacagcctctatggattggggggatttcttacatccagtgtcgctcttcagattgtgttaggtatgaatccttcgcaatgttggacgggtagaacttctatggaagtatttgtgaaggtagtagcggaagatttaatttcaggtgagaagcgtatcgcagcaacgtcttttgttacttttgttgcactgagtaaggaaaataatccagttcctgtgccgcgagtaatccctgaaacagaagaagagaaagaattacatcgcattgcagtgttgcgtgcagaacaacgtcatatacgtaaggcagagagtaagaaagtagctacattactaactttt

SEQ ID NO: 9438 - DNA, 132 bp, Bacillus anthracis; identical to SEQ ID NO: 9425

SEQ ID NO: 9439 - DNA, 2061 bp, Bacillus anthracis
cgtatagaagaactacgtgatttgttaaatacatttaactatcaatatcacgtattagacaatccttctgtttctgatgcggagtatgaccgtaatatgcaggagcttataaaattagaagcagagaatccagagtttatgagtgaagactctccctctattcgagttgggggaacgggtcttgatatatttgaaaaagtaacacataagtcaccgatgttaagtttaggaaatgcatttaacgaaggagatttacgtgattttgacagacgagtacgtcaaggaattgatgatgcgaatgtaagatatatatgtcgaattaaaaattgacggacttgctgtttcacttcattatgaaaaggactgctcatcaaaagggccaccacgtggtgatggtgtaccagtgaaagatatacccccaaattttaaacgcgatttaagcaatcccgcttcgtttaaatgaagaagtaacgttagaagcacgaggcgaagcttatatggccgaagcgttcattcgttaagttaaatgaagaaaaagagcaaaatggtgaaagatgtatttgggaatcccgcgtaatgcggcagcagggttcattccgcccaacttgatccgaaaattcgcagcgaaggcgtaactttatctatatttgtatacggtcttgcgaatgtagagtactaaaccaatcccatcacatagtgaatcgcttgattacttaggtgaacttggattcaaaacaaatccaaatcgtcgtacatgtgaaacaattgaagaagttatagcttatgtagaagaatggcaagaaaaacgtccgcatcttgattatgagattgatgggatcgttataaaagtagatgatgttgctcttcaagaaagtctaggaactacagcaaagagtccaagatgggcgattgcttataaattcccagcggaagaagttgtaacaagattaacgggcattgaattaagtgttggtcgtacaggagttgtaacaccgactgcagagctagagccagtgcgagtggctggtacgatcgttcgtcgtgcttctttacataacgaagatttaattcgtgaaaaagatattcgaattggtgactacgttgttgtgaagaaagctggagatattattccagaagttgtaaatgttatttttgataagcgtactggggtggggaagaagaatatcatatgccaacgcattgcccagcaggtgagagtgacctaggtcgttaagaagaaagagttagcatttcgtgtaataattccaccttgtccctcttcaaattggagaagggtttaatccatttcgtttcaagaaatggcatgaatattgatggtcttggagaacgtgttattacacaactctttgatgctgattatattcgtacatttgcggatttatattcgttgacgaaagagcaattattacagttagaacgattcggagtctacctcagcaacgaatttagtacaagcaattgagaattctaaagaaaactcattagttgcgattattatttcggtcttggtattcgccatgtcggagcgaaagccagcacgtacatttgcagaagcatttcgaaaggatggatgcacttgtgaaagcggccgaagaagatataaaaccaaattacggagattggtgaaaaatgggctcaatccgtcgtggcgtattttgataatgaagacgtattagagctattacaacaatttaaaggagtatggcgtgaatatgacataaaagaggtataaaaattgctgatttacaaaatgttgagtcgtacttttgcaggaaaaaacctgtcgttttaaactgggaaaattggaagttatggaagttagggaagcgaggaagaagattgaggcattaggtggaaaagtaaccaggaagtgttagtaaaagtacggatttagttgtcgcaggtgaagcggcaggttcgaaattagcacaagcggagaaacataatgttgaggtttggaatgaagagaggttcttacaagagctaaataagtaagaggtgcaaacttaccatgaaaaaaatagcattagcggatattaa

SEQ ID NO: 9440 - DNA, 1110 bp, Bacillus anthracis
atgacaaagcagaataaggcgtacaagtttcgtctgtatccaacagaagaacaagcacatctcatacgtaaaacgttcgggtgtgtacgctttgtatataataaaatgctggctgaacgaaaggaagtatatgaaaaacacaaagcgaataaggaagaactgaaggagcaaaaattttctacacctgcaaaatacaaagtggagtatgaatggttgaaagaagttgattcattggcattggccaacgctcaattaaacttgcaaactgcttataagaatttttttagtggtcaaagtgattttcctacattcaaaagtaaaaagagtagaaaatcctatacaacgaatcgagtaaacggaaatattatgttatttcatggttatatcaaattaccaaaattgaaaatggtgaaactgaagcaacatagagaaatcccgccaaaacatatcatcaaatcgtgtacgatttcgatgacacctactggtaagtattacgtgtctattttgaccgaatatgaaaaagaaatcactccaaaagaagtagaacgtgtagttggattagacttcgcaatggttgaattgtacgtgagtagcgaagatgagaaagccaattatcctcgcttttatcgtcagatgttagagaaattagcgaaggcacaacgagtattagcaagacgtgtgaaaggttcagagcgctggaataaacaacgcattcgtgtagcgaaattgcatgaaaaggtcgccaatcaacgtaaaaattttcttcatcacaagtctaaagaattagctacgagttttgacgttgtagcaatcgaagacttacatatgaaaggaatgtcaagagcacttagatttggtaagagtgtagcggacaacggttggcggatgttcacggcatttttagcatataagctacaagaacaaggaaaacaacttgtaaagatagataaatggtttccttctacaaagatgtgtagtcgttgtggaaataaaaaagaaatgccattatgtgaacgcacgtatgcgtgttcgtgtggactcacaatcggccgtgattataacgcagcgatcaatatcaaaaaagaagccatacgcttattagcgctggca

SEQ ID NO: 9441 - DNA, 412 bp, Bacillus anthracis; identical to SEQ ID NO: 9411

SEQ ID NO: 9442 - DNA, 519 bp, Bacillus anthracis
ttgatgaatcgtgttatcctcgttggtcgtttaactaaggaccctgacttacgttacacgcccaatggtgttgcagtagctacttttacgttagctgtgaatcgcgcatttgcgaatcaacaaggtgagcgtgaagctgactttattaattgtgtaatatggcgtaaacaagcagaaaacgtagcaaattatttaaaaaaaggtagcttagcaggcgtagatggacgtcttcaaactcgtaattacgagggacaagatggtaagcgtgtatatgtaacagaagttcttgcggaaagcgtacaatttttagagccgcgtaatggcggtggggagcaacgtggttcatttaatcagcaaccatcaggagctggtttcggtaaccaaagctctaacccatttggtcaatctagtaattcgggcaaccaaggtaaccaaggaaactctggatttacgaagaatgacgatccattttcaaatgtaggtcaaccgatcgacatttccgacgacgatttaccgttc

SEQ ID NO: 9443 - DNA, 519 bp, Bacillus anthracis
atgggagtggattttacatgtttaaaatttcagaagttcgtggatttatttaaattaattgatagctctaatattgatgaatttgaataccaaaaaggatggtacgaccattccaaatggaaaaggcgtggtaatgaaagttgttggcggtgccaaccacctgttagcgaaacaaggccgtgcaacccagtagcacctgttgaagttgaaacgacagtagcggcagcgcaagtggaagtcccaaaccagaaagagaaaaaagctgttcagaatgaaaacctacataaaattacatcaccaatggtaggtacattctattcttcttcttcttcttctccggatacacctccatatgtaagtgtaggagatagagtatcgaaagattctatcgtatgtattgtcgaggctatgaagttatttaacgaaatcgatgcagatgtagatggcgaaattgttgagattcttgttaataacggacaacttgtagagtatggacaaccgctatttcttgtaaaagcg

SEQ ID NO: 9444 - DNA, 1137 bp, Bacillus anthracis
atgcgtttttcaattcaaaaagactatcttgtaagaagtgtacaagatgtaatgaaggctgtttcttttcgtacaacaattccgatccttacaggaattaaagttgtcgctacggaagaaggagttacattaacaggaagcgatgctgatatttcgattgaatcttttatcccagttgaagaggatggaaaagaaattgtagaagtaaaacaatcaggaagtattgttttacaggctaaatattttagtgaaattgtaaaaaaattgccgaaagaaactgtagaaatttctgtcgaaaatcatttaatgacaaaaataacttctgggaaatcagaatttaatttaaatggtttagattctgcagaatatccattgttaccacaaattgaagaacatcatgtttttaagattccaacagatttacttaaacatatgatcagacaaactgtatttgcagtctccacttctgaaacaagaccaatcttgacaggtgtaaactggaaggtatataacagcgaactaacttgtattgctacagatagtcacaggttagctcttcgaaaagcaaaaattgaaggtattgtagatgaattccaggcaaatgttgttattccgggaaaaagcttaaatgaattaagcaaaattctagatgagtctgaagaaatggtagatatcgttattacggagtatcaagtattattccgtacaaaacatttattattcttctcaagattgttagaaggaaattatcctgatacaactcgattaattcctgcagagagtaaaacagatatttttgtaaatacaaaagaatttttacaagcaattgatcgtgcatctctgttagctagagatggtcgtaataatgttgtgaaattatcaactttagagcaggcaatgctagaaatttcttcgaattcaccagaaatcgggaaagtagtagaagaagttcaatgtgaaaaagtagatggagaagagttaaaaatatcttttagtgcaaaatatatgatggatgcactaaaggcattagatagtactgaaattaagattagctttactggagcaatgagaccattcttaattcgtacggtaaatgatgaatccattattcaattaattttaccggttcgtacttac

SEQ ID NO: 9445 - DNA, 309 bp, Bacillus anthracis
gtgaagatggcatatttattacaagttgattttccgtttgaaggtccttttggtgaagaaatggaaaaaggattttgggatttagcaaaaagtattaacgaagaagaaggattccattggaaaatatggactgagaatcaagaaacaaaagaagctggaggcatctatgtatttgaagaaaaacaagatgctgaaaaatacgctgaaatgcacaagaacagacttgaagcagctggtgttaaagatattagagtaagaatttttaacatcaatgaaaagttaacggaactgaatcgtgggtatacgaaa

SEQ ID NO: 9446 - DNA, 909 bp, Bacillus anthracis
atgatctatacagtaactttaaacccatctattgattatgtagtacaagttaattccttagatttaggcgcagtaaatcgagcggagaaagatatgaagtttcctggggggaaagggattaatgtttctcgtgttcttcatcgcttaggtgttgaaaatgtagcacttggatttactggtggatttaccggtcgatttattaaagatgtattacagacggaaggggtaataacaaacttcgtccaagtagatggagattctcgaattaatgtgaaaataaaagggcaagaagaaacagaattaaatgggcaaggacctagtgtgacaaatgaacaatttgaacaattaatgaaacaaattgaaagtatgcaaaagggagattatgttgtactagctggaagtgtaccggcgtctattccaactactttttatgaatcaatcgcagcgttcggagctgaaaaaggtattcgtgtagtagtagatgcaagtggtagtgctttgcagcatgtagttaaaaataaaccatttttaataaagccaaatcatcatgaacttggtgagttatttggagtagaaatttcaacagcagaagatattttaccgtatggaagaaaattaattgaacaaggtgtagagcacgttatcgtatcaatggccggagatggagctttattgtttacggcagaaggtatatatgaagcaacagttccaaaaggtgttgtaattaattcggttggggctggagattctctcgttgctggatttgtaggtaaatatgaacagacaaaagatattgaaaaggcatttcaatatggcgttgcaacggggagtgcaacagcattttcagctgatttatgtgaaaaggaaaaagtagaagaattattgtcgcaagtaattgtaactaagcga

SEQ ID NO: 9447 - DNA, 759 bp, Bacillus anthracis
cttgcaacgcgtattgaatttactaaagatagaagtgtacgtacgcttgatgcagcaaacttacgtcttgtagtaagtattgcaaagcgctacgtaggtcgcggtatgcttttcttagacttaatccaagaagggaatatgggtctaattaaagcggttgaaaagttcgattatcgtaaaggtttcaaatttagtacgtatgcaacttggtggattcgccaagcaattacacgtgcgattgcagaccaagcaagaacaattcgtatcccagttcatatggttgaaacgattaataagttaattcgtgtacaacgtcaattattacaagatttaggacgtgaaccatctcctgaagagattggtgaagaaatggatcttgctccagaaaaagtgcgcgaaatcttaaaaattggtccagaacccagtctctcttgaaacaccgattggtgaagaagatgactcccatttaggtgattttattgaagaccaagaagcaacatcgcctggcgaaccatgcagcgtatgaattgctaaaagaacaattagaagatgtgttagatacactaacagatcgtgaagaaaaatgttctacgtcttcgttttgggttagatgatggacgaactcgtacgcttgaagaagttgggaaagtattcggcgtaacgagagaacgtattcgtcaaattgaagcaaaagcacttcgtaaattgagacatcctagccgtagtaagcgtcttaaggatttcttagaataaggctac

SEQ ID NO: 9448 - DNA, 694 bp, Bacillus anthracis
gagcagattaattcacttcatgcgaaattagtcacaaacaatcaagagtttcccacgaatcagcaacagcagcaaacctttattagcgatctacatacgaaagtagcaaaagtagattcagagattgaaggattagaagaatctaaaggtattttagaaaatcagcgtcaagctgttcaaaaagcaattgaagaagaaaaacgtgcagaagaagcccgtaaggcagaagaagctcgtaaacaagctactacatctgctcaaaaagctcaagcagctccaacaccacacgatacaaatattggcggctttattaaaccagcagccggatcaaaaacttctgggtttggcgtgcgttctatagataaccataaaggaatcgatatcgcagcttcaggaaccgttccgattattgccgctgcagatggcgttgttattcgctcacaattatcttctagttatggaaatgttgtgtacttatctcaccgtattaacggaaaaacatacacaacagtatatgctcatatgagtagccgttctgtatcaaatggacaaactgtaaaacaagggacacaacttggatttatggggaacactggttcatcataccggaccggattttccccttccaaactttcaccttggagaatggaacgtcggcaagacaaacgcagttgatccatctccttatatcgga

SEQ ID NO: 9449 - DNA, 2379 bp, Bacillus anthracis
atggcaaaacaaaagcaaagagggacgaaggcaaaggcaagacgtacgataaagccaactttgtattatgaaatcgtcggtttaactctttttgcactttcaatcattacgattttacagctaggcgttgtagggaaatcgtttgtgttattttttcgcttcttctttggtgagtggtacataattggtgtgttaggtgtaatagctttatcagtttcattcgttataaaacgtggatggccgaaccttttaaataaacggttaatcggtttttatttaatagtattggcgatattaatgtttagtcatattacattatttaaccttcttacgaaagatggagcagtgcaaaatacttctgttattgtgagtacgaaagataatttctttcttgaaatgaaaaaaggcccagatagcgttcatttaggtggtggcatgtttggtgcgcttatgtttgcgacatgttacttcttatttgacgaagtaggagcttatattattggtattattttagttattctcggtatactttgtataacaaataagcatattggagaagtgttagctccagttggtagaattcttagaagtcaatttcaagtgatgcaaggggactataaagattggagagccaaaagaacggctgaacaaacagaaaagaaaaagacaacaagaagcacaaggagcaaacgtgctacagaacaagaggaaattattgagccgatggaagaaatttcaattgaccctccgattatttcaaatttcactgagaattatccagtaaatgaacaagaagataaacgaattgaagtagagcaagaagagttaatcacttcaccgtttattgaagaggctccaccagttgaagagccgaagaaaaagcgtggagaaaaaatcgttgaatcactagagggtgaaacacaagcacctcctatgcaattttcaaatgtagaaaataaagattataagcttcctgcacttgatatattgaagtttccaaagaataagcaagttacaaatgaaaatgcggaaatttatgagaatgctcgtaaattagaacgcactttccaaagctttggagtgaaagcgaaagtaacaaaagtacatagaggtcctgcagttacaaaatatgaagtatatcctgatatgggagtaaaggtaagcaaaatcgtcggtttaagtgacgatctagcgcttgctttagctgcaaaggacattcgtattgaagctccaattcccgggaaatcagctgtagggattgaagttccgaactcagaagtttctatggtaacgcttagagaagttcttgattctaaggctaataatcacccagaagagaagttgctgattggtcttggacgagatattacaggtgaagctgtattagcacgcttaaataaaatgccccatttactagtggcaggtgctacaggtagcgggaagagtgtatgtattaacggtattattgttagtattttaatgcgtgcaaagccgcatgaagtaaaattaatgatgattgatccgaaaatggtagagttaaatgtatataacggtgtgcctcatttgttaacaccagttgtaactgatccgaaaaaagcatcacaagcgttgaaaaaagttgtaagtgaaatggagcgtcgttatgagttatttgctcatagtggcacgcgaaatattgaaggatataatgattatataaaagagcataataatcaatcggaagcgaaacaaccggaattaccttatattgtcgtaattgtggacgagttagcagatttaatgatggttgcttcgtcggatgtagaggatgcgattatgcgtctagcgcaaatggctcgtgctgccggtattcatttaattattgcaacgcaacgtccatcagttgatgtaattacaggagttattaaagcgaatattccgtcacgtattgcattcgctgtatcatctcaaacagattctcgtacaattcttgacggcggtggtgcagagaaactgctaggtcgtggggatatgctatttataccaattggtgcatcgaagcctgtacgtgtacaaggtgcgtttttatcagatgatgaagttgagagagttgtagaatatgttattggtcagcaaaaagcgcaatatcaagaagatatgattccgcaagatgttcctgatacgaagcaggaagtagaagatgaattatatgatgaagcagttcagctcgtagtggaaatgcaaacagcctctgtttctatgttgcaacgtaggtttagagttggttatacccgtgctgcccgattaattgatgcaatggaaatgaatggtgtagtaggaccgtacgaaggtagtaaaccacgagaagtgctcattaatgatgtacaagaaaaaagttca

SEQ ID NO: 9450 - DNA, 2217 bp, Bacillus anthracis
atgtcgttaatgcttgaaccaaatccaacacaaattaaagaagagcgcatatatgcggaaatggggctaacagacgaagagtttgccatggttgaaaagattttaggccgtctgccaaattatacagaaacaggtttattctctgtaatgtggtcagaacattgtagttataaaaattcaaaaccagtgcttcgaaaattcccaacaacaggtgagcgcgttctgcaaggacctggggaaggtgctggaattgtagatatcggtgataatcaagcggttgtatttaaaatggaaagtcataaccatccttctgctattgaaccatatcaaggagcagcaacaggcgttggtggtattattcgtgacgtattctctatgggggcacgtccagtagctctattaaactcacttcgctttggggaattacaatcaccacgtgtgaaatacttattcgaagaagtagtagcaggaattgcgggatacggtaactgtatcggtattccgactgttggcggcgaagtacagtttgatccatgttatgaaggaaacccacttgtaaatgcaatgtgcgtaggcttaattaaccacgaagacattaaaaaagggcaagcgcacggtgctggaaatacagtaatgtacgtaggcgcatcaactggtcgtgatggtatccacggtgcaacattcgcatctgaagagttatctgaaagctcagaagcgaagcgtccagcagttcaagtaggagatccatttatggagaaacttcttattgaagcttgcttagaacttattcaatcggatgcacttgttggaattcaagatatgggtgcagctggtttaacatcatcttctgcagaaatggcaagtaaagcaggaatgggtattgaaatgtacttagatgatgtaccgcagcgagaaacaggaatgacaccatatgaaatgatgttatctgaatcacaagagcgtatgttaattgttgtgaaaaaaggtagagagcaagaaatagtagatttatttgagaagtatggtcttgcagccgttacgatggggaaagtaacggaagacaaaatgcttcgtttattccataaaggtgaaatggtagctgaagtgccagcagatgctcttgcagaagaagcaccaatttatcataaaccatcaaaagaagcagcatattttgctgaattccagcagatgaaaatggaaacaccaaaagtagaaaattataaagaaacgttattcgctctattacaacaaccgacgattgcaagtaaagagtgggtttatgatcaatatgattatcaagttcgcacaagcacagttgttacaccaggttcagatgcagcagttgtacgtgtacgcggtacagaaaaaggattagcaatgacgacagattgtaactctcgctacatttatttagatccagaagtgggcggtaaaattgcagtagcagaggcagcacgtaatatcgtatgttctgggggagagcctcttgcaattacagattgcttaaacttcggtaatccagaaaaaccagaaatcttctggcaaattgagaaatcagtagatggtatgagtgaagcttgtcgtacgttacaaacaccagttatcggcggaaacgtatcaatgtataacgagcgtagtggtgaagcggtatacccaacaccgacagttgggatggttggacttgtacatgatttaaaacatgtaacaacacaagagtttaagcaagccggcgatttagtttatgtcattggagagacgaaagctgagtttggtggaagtgaattacagaaaatgcttcacggaaaaattttcggccaatcaccaagtatcgatttagacgtagaattaaaacgtcaaaaacaagtattagcagccattcaagctggccttgttcaatctgcacatgacgttgctgaaggtggtttagcggttgcgatttcagaaagtgcaattggtgctaacggcttaggtgctactgtgaaattagacggggaagcaacagctgcattatttgcggaatcacaatctcgcttcgtaataacggtaaaacgtgaaaataaagaagcgttcgagaaagcggtagaagccattcaagttggtgaagtaacaaatacaaatgaagtaacaattcataatgaagaaaatgaagtattacttacagcaaatgtagatgaaatgagaaaggcttggaaaggggcaatcccatgcttgctgaaa

SEQ ID NO: 9451 - DNA, 899 bp, Bacillus anthracis
atgggtgtacaaaaaattgttgtaattggtgcaggacaaatggggtcaggaattgcgcaagtatgtccaatggcacgattttgcgtggaaagttccaggattttaaaacaagagccaaatagataggaggattgggtttccactacgaaaaacttaggcgcgccaagtagaaaaaaggccgcatgaaggaagaagagaaagaagccactttaaatcgtcttacagtaacgcttgatttagattgtgtgaaggaagcggatcttattattgaagcagctgttgagaaaatggatattaaaaagaaaatctttgcgaatctagatgaaatttctcccagaccccgcaatttttgggggggaattcgtccttcccgcccaataaaaaaattcccgcctattaaagaagcccccgggaaaaagtaatcggtatccccttttatgattcccgtttccggttaagaaaccttgttgaaatcattcgtggtttggctacagatgatgcggtatacgaaacaattgaagatattacgaaagaagattgggaaagtaccagtttgagtgaaatgattttccaggatttgtatcgaaccgtattttattaccgatgattaacgaagcgatctatacgttatatgaaggtgtagcgaccaaagaagcgattgatgaagtaatgaaacttggtatgaatcaacccgatggggcccttttacgctcgctgattttatcgggtttagatacatggttatactttatgggaggtgttgcatgaaggcttaggtgataagaaatatcgaccatgtccattgctacgcaagtaccgtaattgcggggtggcttggtcgttacacagggcgggggttctaacgttacgaaataaattcacccttggtaaaagagtga

SEQ ID NO: 9452 - DNA, 1386 bp, Bacillus anthracis
atgaagaaagaagagagaatggcgaaagaaatttcagagcaacttgggggagtaaaaaatattcgtggcattgctcattgtatgacgagattacgattaacgcttcatgatgaaagtaaagtaaacatggaccttttgaaaaaggtagaaggggttatgggcgttattgaagatgagacgcttcaagttgttgttggtccaggaacggtaaataaagtagcagctgagatgaaagttttaaacggacctccgaattggtgaggtggcagattatcaccttgaagatcttgggcaagagatgaagtcagagattaagaagaaaaataatacaccagtgaaaaactttttaaggaaaaataagaagtatccttaatccattaattccgggtcttggttgcatcaggtattataaacggggttgctaacttggcgaaaaaacgcaggtgctgatccgaatgcaacttggctacaaatgttactacttatgggtggcggtatctttacattcttaggcattttagtcggctggaatacagcgaaagagtttggcgggacgccagttcttggggcaattgctggtattttaattttcaacccggcaatggcgaatgtaaaattatttggtgaagcgctcgtacccggacggggcggattatttgcagttatttttgcagcatggcttatggttgtagtggaaagacaagttcgaaaagctgtaccaaatgcagttgatattattataacgccgcttattactgtgttagtcgtaagtatcgtaacgatgtacgcaattcagccggtagcaggtttcttatctgaaggaattacaaacggaatttaatggcattttaaatattggcggagcgtttgcgggagcagtacttgcaggaacatttttaccgctcgttatggtcggattacatcacggtttaacaccgattcatatggagtttattaatcaaacgcacgtaacgcctttattaccagtactcgcaatggctggagctggtcaagtaggtgcagcgattgctatttttgtaaaaacaaaaaacaaacgacttcgtaacgtaattaaaggggcattaccagttggatttttagggattggtgaaccgttattatacggggttacattaccactgggaaaaccgttttcttacagcttgtttaggagcagcagttggcggtgcgttccaagcagttatgaaaacagctgcactcggaatcggtgtatctggattatcattaattccgttaattgctgataataaatatttattatatttccttggattagtagtggcatatacgttcggattcatctttacgtacttcttcggatttaaagaagaaatggcagaaaacatatagagaaagggattcctt

SEQ ID NO: 9453 - DNA, 980 bp, Bacillus anthracis
aaaaaagttcttattttttgtgatcctgggattgatgatacgatggctctcctcttagcattctttatcgatgaaatagaaatcatcggcatcgttgctgattacggcaatgttccaaagaagatggccgtacaaaatgctcatttccttaagaatgaaacaaggaatagaaatattaagatattcggtggttcagaacgccctcttactggtgccccgcctgctttttttacagaagtacccacgggaaacaaagaggttggggcaattattcttttatggggaaggtggataacggcagaaagggaggaattccttttgaagggattccctcctttttggagccggattaagaatggaatttaatcccttggtaggtttaaggaaggactaaccttctcccgccaatttttatttattatgttggaaaccagcttattggaaaaaaatttaatttcttttttacgtaatgggcgggtgccttttaccatcctggtaacgttaccccttatttcagaagctaacttttatggcgacccctactgctgctaacattgttcttcaatccgcagctaacatgtacatatacccgttaaacgttacccaatactcccgtcattacaccagaaatggccgagtacattgaagcaaaaggaaaagtcccactcgtcaaaccattattcgatcattattactatggatattataaaaatgccctgccagatttaaaaggtagccccttccatgacacaatgccaatactcgctttacttgataactctatgtttacgttccacaaatcacctatcgttgtcatggcagaatcttatgcacaaggagcaagcattggagaatttcgttccttaggaaaacctaaaccatttatggattggccgagtcatcaaatcgcaattgattttgattataaccgtttctttaaacatttcatgtcacttatgacaggtgagcaattttaacat

SEQ ID NO: 9454 - DNA, 2406 bp, Bacillus anthracis
atgagctttaatcatcaagaaattgagaagaagtggcaagggtactgggaagagaataaaacattccgtacgccagatgagacagaaaaaccaaaattttatgcactagatatgttcccatatccatcaggtgcaggcctacacgtaggacatccagaaggttatacagcaacggatattttatctcgtatgaagcgtatgcaagggtataacgttcttcatccaatgggatgggatgcattcggtcttccagcagagcaatatgcacttgatactggaaacagcccggctgaatttacagagcataatattaatacgttccgtaaccaaattaaatcattaggtttctcttacgattgggaccgtgaagtaaatacaacagatccaaactactacaagtggacacaatggatcttcctaaaactatttgaaaaaggcttagcttacgttgatgaagtacctgtaaactggtgcccagcacttggtacagtacttgcaaacgaagaaatcattgacggtaagagtgagcgcggtggacatccagttgagcgtcgtccgatgagacagtggatgttaaaaattacagcttacggagatcgtctattagaagatctagacgagcttgattggccagaaagcttaaaagatatgcaacgtaactggatcggtcgttctgaaggtgcagaagtacacttcaacatcgacggtacagatgagaagttcacagttttcacaacgcgccctgatacactatttggtgcaagctactgtgtacttgctccggaacatgcgcttgttgctgacattacaactgctgatcaaaaagaagctgtagaagcttacattaattctgtaaaaatgaagagtgatctagagcgtacagaacttgcgaaagagaaaactggtgtattcactggtgcttatgcagttaacccagtaaatggtgagaaattaccaatctggatcgctgattacgttcttgcaacttacggaacaggtgctgtaatggcggttccagctcacgatgagcgtgactatgaatttgcatcaacgttcaatcttccaatgaaggaagttgtaaaaggtggagatattacgaaagaagcatacacaggtgatggtgctcacgtaaactcagcattccttgatggtttaaataaagaagaagcaatcgcaaaaatgattgaatggcttgaagtaacgagcgcaggaaatcaaaaagtaacataccgtctacgtgactggttattcagccgtcaacgttactggggtgagccaattccagtaattcactgggaagatggcacaatgacagctgtgaaagaagaagaattaccattagttcttccgaaaacagaaaacatccgtccttcaggtacaggtgaatcaccacttgctaacattgacgagtgggtaaatgttgttgatcctgagactggtaaaaaaggtcgtcgtgaaacaaatacaatgccgcaatgggctggtagctgctggtattacctacgttacatcgatccaaacaacagcgaagcacttgtagatcctgaaaaagtaaaacaatggcttccagttgatatttatatcggtggtgcagaacacgctgtacttcacttactatatgctcgtttctggcataaagtattatacgatatcggtgtagttccaacgaaagagccgttccaacaattattcaaccaaggtatgattctaggtgaaaacaacgagaaaatgagtaaatcaaaaggtaacgttgtaaaccctgatgatatcgtagcaagccacggtgcagatacacttcgtctatacgaaatgttcatgggaccattagatgcttcaatcgcttggtctgaaaatggtcttgatggagcacgtcgtttcctagatcgcgtatggcgcctattcgttcaagataacggtgaattaagtgagaaaattactgatgcaccaaataaagatcttgaaaaagcttaccaccaaacagtcaagaaagtaacagaagactatgcagagcttcgcttcaacacagcgatttctcaaatgatggtgttcatcaacgatgcatacaaagctgaaacacttccgaaagaatatgtagaaggtttcgtaaaaatgattgcaccagttgcacctcacatcggggaagagctatggagcaaacttggatacaatgaaacaatcacatatgcaagctggccaacatttgatgagtctaaacttgtagaagatgaagttgaaatcgttgttcaagttatgggtaaagttcgcgcaaaactaacaatgagtaaagacgcatcaaaagacgaaatggaaaaacttgcacttgaagcaattcaagaccaaatcgaaggaaaaacagttcgtaaagtaattgtagttcctggaaaacttgttaacgttgttgcaaac

SEQ ID NO: 9455 - DNA, 333 bp, Bacillus anthracis
atgatgtcaaataataatcaagttttaaaagtaggagattgggttcgtggaatatcaaatgagggcgaatttatagttggttacgttgtatcgcttgatgaagtggaagatgtagttacagttagtattgtgaaacgctacgacaagtacacaaaaaacgaagcgattttactctttagtaaacatgttaacaaacttcctgaatcaaatgtaatcaataaggagcaaatcctttatctaatagaccttgcattattaacaggagacgaagaatggtttatcgagctttcttcaaaattaaactcgataaaagagctagttaacgagaggttt

SEQ ID NO: 9456 - DNA, 378 bp, Bacillus anthracis
ttggaaaaaatctctgaagtactaaaggtattggcgcatcctgtccgtttatcattagtaaaaataatgcttgcaaaaggtcctactaatgtaacaacaatgtatggggatttggaaatgcctcaaagtacaattagtcaacatttatctaaactaaaagctgctaaaatggttacaggtactcgaaaaggattagaaatttattatgaagtaactgcacaatcgcacaaaatcaatattagcatgtttagtttaaatgctgacatctatttcaaaataagaaacgctattcttttctatgattttacagagagaatagcgttttttatttttaaggagtatctttttattagcttgatggtgatatggtattatctc

SEQ ID NO: 9457 - DNA, 3084 bp, Bacillus anthracis
atgagcccgatccagcgtataatgacgctattcggcccatataaccagaatgaagtaactgattttgccgatctgggagagcatagtattttagccatttttgggaacacggtcgtgggaaagacaacgatttttgatgcgaattggaatggcgtatatggggaggggagcgggagaagaaacaaatgatacgagcattgctcccccggcaaattgcctgaggataagggaaaccaaccgcagaaacaaccttttccctcaaaagggaaccgtttgaattaaacacacaacttgggcataaaaaacaagggaataagacgattacgggacatgcggtagaattatatgaagtaattgatgaagagaaggttccggctgttgatcgttttcatgtaacggatgtaaataaaaaagtagaagatttaattggtttaagtaaacatcaatttagccaaattgttatgttaccccaaggggaattccgaaaactattaacatctgagacagaaaataaagaagagattttacgtcgtatttttaaaacagatcgttataagttaatgcgtgagttacttgatcaaaaacgaaaacaatggaaagacgttttacaaggaaaagcggaaggagcgagagttatacttccgtaatgtttttaaattaccaatccgtgatggagcgatattagagactttagtggaacaagagcatgtaaatacgcatcaagtagtagaagcattagaacaagaaacagctgtgtataaggcagaggttgagcaattacaagtagaacaagatgttcaaacgaagcaattaaaggatgctgaaacacgttttcacgcggcgaagtctgtaaatggagaaatttctagatttacaacaaaagaatgagaaatataatactttacaagaaaatcgtacagttattgaaatgaaagaaacatcttttaagcgtgcggaacaagcaaagcgcttattaccatttgaacaatggcacgaagaagcgatgcaaaatgagcagaaagctgaaagtttgttaaaacaaattatcgccaaaaaagaaaatataatgaataattttgaacttgctcaggagaaatatgaagtagtaaagaataaagaatctgagagagaaaatgtcaaaaaacttgttcaaagattagaagaattacaaccgattattgcatcattagctgagaaacagctgaatttacaaaatgcagaaattcaaatcggaaaattaaaagaaagtatgcaaaacttagatcgacaattagaagagcatacaaatcaaaaacagctaatgactggtgaattacagcaattagagcaagcgcttgaacaatatgtagataaagtagaagaactaacgaatatgcgagaagatgcaaaagttttaaagcaagcatatgatgtatggcaagaaaaacaaaaattcgagaaagaaaaagaagcagcatatagtaagatgcaattggcagttaacgcatatgaaaatatggaacgccgctggttaagtgaacaagctggtatattggctcttcatctacatgatgggtgaatcttgtccagtatgtggtagtacgacccatccgaaaaaagctacagagcaaagtggtgcgatcgatgaaaaagggatttaaaatggttttaaggagaaaagaaggaattattggtggaaaaattcacctgttccatttagaaggagaaatggaattttctatcctcctccaatttggaccaagtaatagaagaggtttagaagcgagggctcccaatgcggaagaattagttgaaccatatagtgcgctggtccaaaagggaaaccaattagcacctgagtggaatacgttaaaagctagtgaaggaaccgcgtaaagcaaatagctgtgaaaaataaaaagcgtagaagaaaaaagtagatgcacttcagaaacaaaaaccgtgaagtagaaacagagcagcaccgtatcgaaatggattgtatgcagctgcgtacgtcatatgaacatgataagaaaaacattcctgaaaacttacaaacagtacaagcttgggaaaagttcatttgacccaagctatgcatgaactcaaattaatggaggacgaatggaaagaaagtgcaggaagcatattcacattggcaaaacgaaaatatacgtatttcagcaagaacaggaaggtgttattattccatttgaaaagtgcaaaattgaagaaaggaagggcttttcacggccttttatgaagagaactggagcagaagcgggttttacagatcaatcttcgtttaagaaagctaaattaagtgatggcggggtggaatttattcaaaaaagaattcaaaagttattattcttttctggaagtacttgcgaaaacaaattggaggagttacatgttgaattaaaagataaagagtatatggatattacagcgttaggtgaacacaataaagaactagaaattaaccttgatatcgaggaagaaaaacgtcaacgtgggcaaaatggggttaacatatattttcgatctccctgaaaaaattaggcgtatgatggagcaaattcatgagggagaaaaaagcgttccaagaacttgttgacttatatgaagtaatgaaaggtgataacgaaagccgtatatcatttgaacgttacatcttaattgagtatttagaacaaattgttcaaattgcaaacgaacgattacgtaaattatcaaatggacaattttatttaaaacgaagtgaacgagttgaaaaaagaaatcgtcaaagtggattaggtctagatgtatacgacgcatacacaggccaaacacgcgatgtaaaaacattatctggcggcgagaaatttaatgcatcactttgcttagcgcttggaatggcagatgtcattcaagcgtatgaaggtggtatttccatcgaaacgatgtttattgatgaagggatcgggttcattagatgaggagtcattaacaaaagcagtagacaccttaattgacttacaaaaatcaggccgatttatcggtgtcatttcacacgttcaagagctgaaaaaccggcaatcccaccttttctaaaag

SEQ ID NO: 9458 - DNA, 987 bp, Bacillus anthracis
atgagcttttttaaaaaactaaaagaaaaaatttcaaaacaaacggatacggtaacagagaagtttaaacaaggattagaaaaaacgagaaattcgtttgcggataaagtaaatgatttagtctttcgttaccgtaaagtagatgaagatttcttcgaggaattagaagaaatcttaatcggtgcagatgtgggcgtttcaacagtgatggaattaatcgatcagttgaaagaagaagtgcaacgccgtaacattcaagacccaagagaagtacaagctgttatttcggaaaaattaatagaaatttataaaggtgacagcgattttactaatgaagttaatatgcaaaaggatggcttgacagttgttttatttgttggtgttaatggtgtaggtaaaacgacaacaattggtaagatggctcataagtttaaatcagaaggtaagtctgtcttattagcggcaggagatacattccgtgctggagcgattgaacaattagaagtttggggcgatcgcgttggggtagaagtgattaaacaaggatcaggatctgatccagcagcggttatgtatgatgcggtacaagctgcaaaagcacgtaacgtagacgtattactatgtgatacagcaggacgtttacaaaataaagtgaacttaatgaaagagttagagaaagtaaagcgcgtaattgagcgtgaagtaccaggagctcctcatgaagtattacttgttattgatgctacaacgggacaaaacggtttaagtcaagcgaaaacattccgtgaagcaacgaatgttactggtattgttttaacgaagttagatggaactgctaaaggtggtattgtattagcgattcgtaacgaaatggatgtaccggtgaaattcgttggattaggagaacaaatggatgatctgcaacagttcgatccagaacaatatgtatatggtttatttgcgaacttagtagaaacagaagaagta

SEQ ID NO: 9459 - DNA, 972 bp, Bacillus anthracis
atgcgagtggcacaatcagtttcagaattattcgggaaaaacgccgatcgttaagtggacccgcatcgtagaatcagacagcgcagatatatacttaaaattagaatttatgaatccggggagcagcgttaaagatcgtatcgcattagctatgatgaaagatgctgagaaaaaaggattattaaaagaaggcgatacaatcattgagccgacaagtggtaacacaggaattggctttatcgatggtagcagctgctaaaggatataaagcaatttttagtaatgccagaaacaatgagcgtgaggcgtcgcaatttattacgtgcttatggcgctgaattagtattgactccagggccctgaagaatggggcggagcaattcgtcaagcgactgaattagcaaaagaacatggctactttataccgcaacagttcaaaaatcaatcaatcccagaaattcattcgtttatacaacaggtccagaaattgtggacaaaagggggtaccaatagaatgcctttattccccagttatggtaccggggaaacaattgtgggtgctgggaaagtgcagaaggaaccatataaaggttttaaaattttggccaggaagacctgggggtatttcgccggttttttgggggagaaaaccgggttcccacataaaatccaaagaattggggggctggttttttttcccagaaaacatttggatgtagaagtatatgatgaaatcatttcagtgaaaacagagcaagcgttcgaatacgcaagaagagtggctaaagaggaaggtattttagttggtatctcttcagggagcgggtatttttatgcagcgacagaagttgcggaaaaagttagggtaaggggaaaaaggtacttgttattatcgcaagtaatggtgaacgtcatgtaagtacaccactttatcaatttgagtcttaattacatgtgattgaaaaagcatcg

SEQ ID NO: 9460 - DNA, 1584 bp, Bacillus anthracis
atgagtactgtgaatgtccaaattggtttacacgaattattgaacggaagcaatgcacagattcaactaagtgttccgcaattagtggaaaaagtattaatgcgaaatgaagggaaattaacttcgactggtgccgtttctgcttcaactggaaaatatacaggacgttctcctaaagataaatttattgtgaaagaagcatcggttgctgacaaaattgcttggggagctgtgaatcaaccgatttctgaagaacattttaataaattatatactaaagttttagaatacttaaaagaaaaagaagagttattcgtcttcaaaggatttgcaggcgcggaccgcaattaccgtctaccaatccaagttattaatgaatatgcatggcacaatttatttgtacatcaattattcattcgtccaactgaagaagaattaacgactcatgaatcagaattcacaattgtttctgcaccaaatttcaaagctgatccagctgttgacggtacaaactctgaagcattcattatggtttcattcgaaaaacgtatcgtactaattggtggtacagaatacgctggagaaatgaaaaaatcaatcttctctattatgaacttcttactacctgaacaagatattctttctatgcattgctctgcaaacgtaggtgaagaaggcgacgtagcactattcttcggtttatctggaacaggtaaaacaacattatctgctgatccaaaccgtaaattaatcggtgatgatgagcatggttggtctgataacggtgtattcaatattgaaggcggttgctacgcaaaatgtgtaaacctttctcacgagaaagaaccacaaattttcgatgcaatcacatttggatctgttttagaaaacgttatcattaatgaccaaacgcgtatcgcagactataacgatactactttaacagaaaatactcgtgctgcataccctatgcatgcgatcgacaatatcatactgccaagtgttgctggacacccaaatacaattattttcttaactgctgatgcatctggcgtattgcctccaatcagcaagttatcaaaagaacaagctatgtaccatttcttaagtggttacactagtaaactagcaggaacagagcgcggcgttacatcaccgcaagcaacattctcaacttgcttcggttcaccattcttaccacttgatgcatctcgctatgctgaaatgcttggtgagaaaatcgagaaacacgatgcaaaagtattcttagtaaacactggctggactggtggcgaatacggcgttggtaaacgtatgaacttaggttacactcgtgcaatgattcaagcagcattaaacggtgaacttgcgaaaactgaaacagctaaacatgacatcttcggtcttgaagttccacttcacgtaccaggtgtacctgacgaagtgttaatgcctgaacaaacttgggctgataaagctgcttacaaagcaaaagcaatcgaacttgcaaatgaattcaaagcgaacttcaaaaagttcgacagcgtatctgaagacattattaacttaggcggtccaatcgct

SEQ ID NO: 9461 - DNA, 921 bp, Bacillus anthracis
atgatttatacagtaactttccccccatttattgattatgtagtacaagttaattccttagatttaggcgcagtaaatcgagcggagaaagatatgatttttcgtggggagaaagggataaatgtttctcgtgttcttcatcgcttaggtgtagaaaatgtagcacttggatttactggtggatttaccggtcgatttattaaagatgtattacagacgggaaggggtaataacaaacttcgtccaagtagatggagattctcgaattaatgtgaaaataaaagggcaagaagaaacagaattaaatgggcaaggacctagtgtgacaaatgaacaatttgaacaattaatgaaacaaattgaaagtatgcaaaagggagattatgttgtactagctggaagtgtaccggcgtctattccaactactttttatgaatcaatcgcagcgttcggagctgaaaaaggtattcgtgtagtagtagatgcaagtggtagtgctttgcagcatgtagttaaaaataaaccatttttaataaagccaaatcatcatgaacttggtgagttatttggagtagaaatttcaacaggcagaagatattttaccgtatggaagaaaattaattgaacaaggtgtagagcacgttatcgtatcaatggccggagatggagctttattgtttacggcagaaggtatatatgaagcaacagttccaaaaggtgttgtaattaattcggttggggctggagattctctcgttgctggatttgtaggtaaatatgaacagacaaaagatattgaaaaggcatttcaatatggcgttgccaacggggagtgcaacagcattttcagctgatttatgtgaaaaggaaaaagtagaagaattattgtcgcaagtaattgtaactaagcgatagggggaa

SEQ ID NO: 9462 - DNA, 1561 bp, Bacillus anthracis
atgagcatcagagctgaagaaattagcgcactgataaagcaacaaattcgagacttatcagtctgaaatcgaagttagtgatgttggtacagttatccaagttggtgacggtatcgcgcgtgctcatggtcttgataacgttatggctggtgaacttgtagagttctctaacgggcgttatgggggctagcacaaaatttagagggaaaacaacgtagggtattatcattttaggaccttacacagaaatccgtgaaggcgatgaagttcgtcgtactggtcgcatcatgcaagtaccagtaggaaaagaattaattggtcgtgttgtaaacccattaggtcaaccagttgatggtttaggcccaatcaatacaacaaacactcgtccaatcgaaagtccagcaccgggtggtaatggatcgtaaatctgttcatgagccgcttcaaacaggtattaaagcgatcgacgctcttgtaccaattgggccgtgggcaacgtgaggtaatcatcggtggaccggcaaacaggtaaaacagcagttgcacttgatacaatcattaaccaaaaagatgaagatatgatttgtatctacgtagcaatcggacaaaaagaatcaactgtacgtaacgtagtagaaacactacgtaagcatgggggcattagagtacacaatcgttgtaactggcatctgcttctcaaccagctccattattatacctagctccttatgctggtgtaacaatgggtgaagagttcatgtacaatggtaaacacgtattagtagtatatgatgacttatcaaaacaagcagcagcttaccgtgagctgtcattactaatacgtcctcctccaggtcgggaaagttttccagggggaggtattctccttccattctcgcttataagagcgtgcagcaaaattaagggatgcaaagggcggcggttcttaaacggctctacttttcatcgaaacaacaagcaggggacgtatcagcttacatcccaacaaacgtaatctcgattacggatggacaaatcttctttacatctgacctattcttctctggcgtacgtccagcgatcgatgcgggtaccttcggtatctcgtgtaggtggatctgctcagattaaagcaatgagtaaagtatcaggtacacttcgtcttgaccttgcatcttaccgtgagttagaagcgttcgctcagttcggttctgacttagataaagcaactcaagcgaaactaaaccgtggtgctcgtactggttgaggtattaaaacaaggattacacaaaccgttacgtgtagagaaaaacagtatcattctttacgcttttacacgtggattcctagatgatatcccagtagtagatatcactcgttttcgaagaaagaattccatgcttggttagattctaatgcgactgacttattagaagaaatccgcacaactaagaaacttgcggatgacgacaaatttgcagcagcaattaacggatttaaaaaagtattcgtagcttctgaataataataaaaagtgaagccgactgttcagccccatcgg

SEQ ID NO: 9463 - DNA, 818 bp, Bacillus anthracis
atgaaagaaatgaaagtaattatcgctggaccaagaggacgtatgggacatgaagcagttcttcttatggaaagaacggaacattttaatttagtagcagcagtggattataagcatggtggagagaaaatctctgatttaccgggaatgccagcgctagatgcaactatttacgcagatttacatacttgtttagagggaagtagaagcagatgtgtgtttagattaaccaccgccagaaagttgggaaacaacacgttacactagcagttgagcgtggacttcgttctgttattggtacaactgggtttacagaagaagagctaaaacaaataaccgagactgcgaaagaaaaagcagtaggaacaattatcgctccaaactttgcagaaggtgcagttctgatgacgaattacaggtgaaatggcagcgaaatatttccaagatgttgaagtaattgaattgcatcatgatcaaaaactagatgcaccatctggtacagcggtaaaaacagtagaattgattcggcaaaatcgtgaatctaagcagccaggtcctcccaatggaagtaagagcacttaaaaggggctcctgggtgccaaatgtaaatgggcttccatattcatagtgtgcgcttaccaggacttattgcacatcaagaagtaatgtttggtggagacggacaaatgttaacagttcgtcatgattcattctatcgtgcatcatttatgtctggtgtaaaactatcaattgagacagtaatgaatctagatcatcttgtgtacggtttagaaaatattatcgactaaaggagagac

SEQ ID NO: 9464 - DNA, 1758 bp, Bacillus anthracis
ggggaggattatgtgcaaggtataaaaagatatttgcaatttgttaaaccatatcgatggcttattgctattacgattatgattggtctagttaaattcggcatcccgcttattatgccgtggttattaaaatatattattgatgatgtaattcagggcgcagggtcacttcaagataaaacgtcccaactagtaacagcgattgggattgctttttttatttttgcagtattaagaccgccccatgaaatattatcgtcaatatttcgcgcaacgtattgcaaatacaatactatatgatttgcgaaagcatatttttggtcatttacaaaagttgagtttacgctattattcgaatacaaaaaacagggggagattatttcacgtgtcattcatgatgtagaacaaacgaaggactttgtaattactggtttgatgaatgtttggttagatacggcaacaattgctatcgctattatgtttatgttttctatgaatataaaattgacatttgttgcgctattaattttacctatttatgtagtagcagtgaaatattttttcgggcgtcttcgtaaattgacgaaggagcgttcacaagcgttagcaacgatgcaaggatatttacatgaacgtattcaagggatgcaagtgacacgtagctttgcattagaagagtatgaggggaagcagtttgaaaaaagaaataatgaatttttgacgaaagcgttaacgcatacgagttggacggcgagaacattttcggcagtaaatacgttaacagatttagggccgttacttgtaattggttttgcagcatatgaagtgattcaggggcagttaacattagggactatggttgcctttgtcggatatatggatagtttgtatagtccgcttcgccgccttgttaattcatctacgacattaacgcagtctttcgcatcgatggaccgagtgtttgaactgttagatgaaaaatacgatattgtcaatgtgccaagtgcagtacaaacgaaaaaattaaatggtgaagtgatatttgataatgtatcttttcgttataatgcggatgaaaaagagatattacataaccttttggttaactatgttgccaggagagaaggtagcacttgtaggagcgagtggggggaaggaagtcatctcttgctagtttaattcctcgtttctatgatgtttcctcagggggcagttatgtagatggaatagatgtcagaaagtatgatatgagaaatttacgtagccatattggaattgtattgcaagataatttgttatttagcgatacaattcggggcaaacattttatatggaaatccgaaagctacagaggaagaagtaattgcagctgctaaagctgcgcaaattcatgattttattatagagttacctgatggttatgatactgtcgttggggaacgtggtgtgaagttatctggtggtcaaaggcaacgtgtagcgattgcacgagtgtttttaaagaatccatcattacttatattagatgaagcgactccccgctttagattaggtaaatgaccgatattttcaagaggcgctcaagacgttagctgccgatcgaacgacaatcataattgcacatcgatgggcgacgattaccgcatgtggatacaattatttaccttgaagaatggggaactaaaaaaaccaggttcccctggaaaaataattggaaaaaaaaggaatttttttaccccctttattcaactttcaaca

SEQ ID NO: 9465 - DNA, 1800 bp, Bacillus anthracis
atgtgtggaatcgtaggatttattggagagcaagatgcaaaggaaattttattaaaaggtttagaaaagctagaatatcgtggatatgattcagcaggtattgcagtacaagcagagaacggtgttgttgtatacaaagaaaaaggccgtatcgcaaaacttcgcgaaatcgtagatgagaacgtagcagcaagcgtaggtatcggacacacacgctgggctacacacggtgttccaagtaaagtaaacgcgcatccgcatcaaagtacatcaaaacgctttacactagttcataacggtgttattgaaaactatgaattagtgaaaaaggaatatttacaagatgtaacgttcgtaagtgaaacggatacagaggttatcgtacagcttatggaacaacaagtgagcacaggactaagtgtagaagaagcgttccgtaatacgctatctcttttacatggctcttatgcaatcggattacttgatgctgaaaatccaaacatgatttatgttgctaaaaacaaaagcccgctattagtaggtgttggtgacaactttaatgttgtggcgagcgacgctatggcgatgttacaagttacagatcaatttattgaattaatggataaagaaatcgtaattgtaatgaaagaaagtattacaattaaaaacttacaaggtgaaacgattgaacgtgcaccgtttacagcggaattagacgcaagtgatattgaaaaaggaacataccctcatttcatgctgaaagaaatcgatgagcaaccacttgtaatccgtaatataatccaaaagtatcaagatgaaaatggcgagattgaattagatcaagacatccgcaatgctattttagatagcgatcgtatttacatcattgcatgtggaacaagttatcatgcaggtcttgttggaaaacaatttatcgagaagtttgcaaaaatgccagttgaagtgcatgtagcaagtgaattctcttataacatgccattattaacagaaagaccattcttcatttacatttcacaaagtggtgaaacagctgatagccgtgcagtacttgtacaaacaaatgaaatgggtcataaagcattaacgattacaaacgtacctggttctacactttctcgtgaagctgattatacacttccgttatacgcgggaccagaaatcgcagttgcatcaacaaaagcttacacagcacagcttgcagtactttcaattttagctgcggatattgctaaagcaaaaggtgaagttcttggttttgatttaacacatgaactaggacttgtagcaaatgcaatgatagaactttgtgatcaaaaagaagaaatggacgcattagcaaaacaatttttagcaacaactcgtaactgtttcttcatcggacgtagcgttgacttctacgtaggattagaaggcgcgttaaagctaaaagaaatttcttacatccaagcagaaggatttgctggaggagagttaaaacacggtacaatcgccttaatcgaaaacggtacaccagttatcgcacttgctacacaagaacacgtaaaccttggaattcgtggtaacgtgaaagaagtagtagcacgcggagctaacccatgtatcatctcaatgaaaggcttagaaatggagggtgacagcttcgtactaccagctgtacacgaagcactagcaccgctagtagccgttattccattacaacttatctcatactacgcagcacttcaccgcgagtgtgacgttgataagccacgtaacttagctaagtctgttacggttgag

SEQ ID NO: 9466 - DNA, 883 bp, Bacillus anthracis
aaaaaagagaaacttcggacagaaaatatatcatttcaatatcctggtgcagccacttatgcattaaaagatgtttcattctccttatttgaaggagaatgggtatctgttattggacaaaacggttcaggggaagtctacacttgcaaaattattgaatggtttgtttttgccggaagccagggacaattacagtaaatgatactcaacactctgtcagaggaaacggtatgggattttcgaaaacaaattgggatggtatttcaaaatccagataatcaatttgttggaacgacagtgcaagatgacgttgtctttgggttagagaatattggaatgccaagagaacaaatggtagaaagattaaatcaggctttacgactagtccgtatggaagattttcttaatgatgagcctcattcgttatctgggtggaccaaagcagcgagtaccaatagcaggcgttttagccatttcagccctttttttttgatattaggaggaagcagccgtaaatgcttagccccctcaagggagacgtgaagttagtagaaacggttagaccaactgtttattgaaaaaggttattactgtgttatcaatttacgcacggatttaggaagaagcgggcacaattcagacctgtgtcattatttttaattaagggagaagatattagaggaaagggcttccagaacaaaattttcaaagtccttccatatgctccaagaaaatgggataggatgtccctttttcagggaaaatgggcagaattttaaaaaggaaatgaaatttctctgcaaaaatacccatcttcacatggaaaacttggtgaacgaactttgggagattacattccaaaaagttagacctttgttttcaa

SEQ ID NO: 9467 - DNA, 549 bp, Bacillus anthracis; identical to SEQ ID NO: 9145

SEQ ID NO: 9468 - DNA, 468 bp, Bacillus anthracis
atgcctcgtaaaggacctgttgcaaaacgtgacgtgttaccagatccaatgtacaattcgaagctagtaacacgccttatcaacaaaatgatggttgacggcaaaaaaggtaaatctcaaacaattctttataatgcgttcgatatcgtaagcgaacgtactggtaaagagccaatggaagtattcgagcaagctcttaagaacattatgcctgttcttgaagtacgcgctcgtcgtgttggtggtgctaactaccaagttccagttgaggttcgtccagaacgccgtacaactttaggtcttcgttggttagtaaactacgctcgtcttcgtggtgaaaaaactatggaagagcgtcttgctaacgaaatcttagatgcagctaacaacgctggtgcatctgttaagaaacgtgaagacactcataaaatggcagaagctaacaaagcatttgctcattaccgttgg

SEQ ID NO: 9469 - DNA, 1009 bp, Bacillus anthracis
atgacaaaaatcacagtagtggagccaggtagctgggaaccagcgttagcgatggtattagctgacaattggcatgatgtacgtatttggggaaatcgttctgaacttatggatgagattaatacaaaacatgagaatagtcgatatctcccaggaattacattgccaagcacaatcgtagcctactcttctttagaagaagcattagtagatgtaaatgtagtacttattgtagtaccaacgaaagcgtatagagaagtactgcaagatatgaagaaatatgtagcaggcccgactacttggattcatgcaagtaaaggaattgaacctggtacgtcaaaacgtatttcggaagtgattgaggaagaaattccagaggacttgattaaagatgttgttgtattgtctggaccgagtcatgctgaagaagtagggttgcgtcaagcgacaactgttacgtctgcagcaaagcgtatggaagcggctgaggaagtacaagatttgtttatgaatagttacttccgtgtatacacaaatccagatatcgttggagttgaacttggtggtgcgttaaaaaatattatcgcattagctgctgggataactgatggtcttggattaggtgataatgcaaaagcggcattgatgacacgtggtttaacggagattgctcgtttaggaagaaaaatgggcggaaatccgttaacgtttgctggactaactggtatgggtgacttaattgtaacttgtacaagtgttcatagccgaaattggcgcgctggaaatatgcttggaaaagggacactctttagaagagagtgttagaaagcccatgggtatggttgtcgaaggtgtaagaacaacgaaagctgctcatgaattggcagaaaaaatggaagtagaaatgccgattacagctgctttatatgatgtgctattcaatgggaataatgtaaaagatgcagtaggctcattaatggggcgtgttcgaaaacacgaagtggaagct

SEQ ID NO: 9470 - DNA, 450 bp, Bacillus anthracis
atgaaaaaacttattatgactttatttatcgcgatgctagcattggctggctgtaatacaaacaaagaagaaccgaaaaaagaacagaaactggaagctgtaaaagtagcagttcaaacaaatccgaaagaaattaaaccaggtgaaaaaacagaagtacaagcacttgttacacaaggaaaagaaaaagtaacagatgctgatgatgtaaagtttgaagtttggaaagctggtgacgaaaagcacgagatgctagaaggtaagcataaaggaaaaggtgtttatgctgtagagaaaacgtttgaaacggatggagtataccatattattgctcacacaaatgcgcgtgaaatgcatgttatgccagaagtaaaagtggctgtaggaaatgcgaaagtagaagatgcgaaaaaagaaaatagtgatcatggtgcagggcatggtgatcat

SEQ ID NO: 9471 - DNA, 1398 bp, Bacillus anthracis
atgtttacgatggtacagaagctttggttgacagtagtatgtgcagtatttgtaacagtttcctttctttactttgtatctttatattcgtatgaaaaactatatgttgataatttaaaagattcattagtaatggaagggaagcgtcttgctgcgcaatacgataagagcgaaggaatatcaacttttgaagagaaagtaagagcgtttgatcaaatatctagttcagatgtacttttcgtgtctaatccacgtgatttaagtgcatgtttaccatttgatgtgcaccatcattctcttataagtgaaggggataggcaagctttattagatggaaaaactgtgacaaagatagggtatgaggaacattttgaacgtaatattatgggggttgtcattcctgttttagaaaataaaaaattagttggcattgtatattcttatattcctttaaaaagtataaaagacttaatatatgatatgggccttattttagcaccgttagcacttgctattactttactgacaatatggattggtagaaaaattattattgctattacgagaccactttcgcaaatggaacgagttgccaatcatttggctacgggagatttctcagaacgaattacaatttcttctgaagatgaaattggacgattaggaaaagcatttaataaaatggcaaattctttagagacagaagacgtaaagcgtaaggagtttttagctaacgtttcgcatgaactaagaacaccacttagttatataaaagggtatagcgaggctattttagatggtgtagcgaagggaccgcagcaagaaaaagtgacacagctcattcataaagaagcagatcgtatgcaacgtctcgttcatgatttattagatttagcacaattagaaggggaacattttccgttacagaaacaacctattgttttttcacaactaattgaagatgtgctagatacgtatgagattaagtttatagaaaagaaaattcgtatttcaacaaatttaaatccagaaatcattgtaatgattgatgaggatcgtatgcaacaagtgcttcataacgtgttagataatgcgatacggtatacaaatcaaaacggggatattatgataacgctcaggcagatagatgattactgtgaattgagcataaaagatacaggaatcggtattgatacggagcatttagaaaaccttggcgaacgtttttacagagtcgataaagcgagaagtcgtcaacatggtggaacaggtttaggcctggcaattgtaagacaaattgttcatatacatgatggacagtggcaaattgaaagcgaaaaagggaatggaacgacggttagtattaaattgaaagtacagaatgaggagagcatgttc

SEQ ID NO: 9472 - DNA, 1344 bp, Bacillus anthracis
atgaaaagcatgaagggacgtttaaggccaggtgatacggtagcaattggtttaatgttatttgcactatttttaggagcaggaaatttaatttttccaccagttttagggcaacaagctggagagaatgtttgggttgctacaattggcttccttgtaacgggagtcggattacccctattagctgttacagctgtcgcgtttgtagagggggacttgaaagcgctatcttctagagttcaccctatatttgcatttgttttcccattaattagttatttagcgattggaccatttttcgcgattccgcgtactggagccgtttcatttgaaatgggtatgaagccatttttatcagaggcattggtttcagagtggtacatgctatttcttttcacgataattttcttcggaataacgtggtatttatctttaaatccatctaaattagtggattggttcgggaaatttcttacaccagtattagtattgattgttgctgttattgtcggaaaggcaattattgatccgattggagaaccagctgcgccgttagcggcatacaaagaaaatgctttctttggtgggtttattcaaggatatttaacgatggatgcaattagtgcacttgtatttggaattgtcgttgtacaagttatccgctctaaaggaataaaagagagcaatcaaattgcaaaaataacagtagtatcaggtattattgcagtacttggtttaacgttaatttatttatcacttgcttatcttggttcaacaagtacatcacttgggatatcagagaatggtggacttattttaacgaatgttgtaaatgagttatatggaacaggtggtaaaattttattagggcttgttattatacttgcttgtttaacaacttctgttggattaacatcagcttgtgctggcttctttacaaacttattcccaaaactttcgcataaaacgattgraacaatggtatgtgtatttagtttaattgtatctaacttaggtttaacacaattaattgcagttactttaccagtgttaatgattatttatccagttgcaatcgtattaatcgtactttcttacttccataaatggattgggaagcgtaataccatttatattggagctattttaggtgcattgttaattagtttctttaacggtttagaaagtgcgaagattaaaattgacgcgatttctaatgtattacaaatattaccattatataacgaaggaataggatggttaatcccatcatgtattggcgggattctcggtttctttttctataaatcaaatgaatcaagtgaactacaaaagaaaggtgct

SEQ ID NO: 9473 - DNA, 547 bp, Bacillus anthracis
atgtctcgtattggtaaaaagattcttgaaatccctgcaggtgttactattacagttgcagaagacaatactgtaacagtaaaaaggccctaaaggtgaattaactcgtactttcaatgctgatatgcttatcaaaattgaagagaatacattaacagttgagcgtccatctgaacagaaggaacaccgtgcattacacggtacaactcgtgctttttatcggaacatggttgaagggtgtaactgaaggtttcgcacgcggactttcattagtcggtgttggttaccgtggctcataaacaaggtgataaacttgtattaagcgtaggttattctcatccagtagaaatgactccggaagcaggtcttgatacatgaagtacctgcaccaactaagatctttatcaaaggtatcgacaagcaacgtgttggcgaatttgctgctaacatccgtgctgtacgtgctcctgagccttacaaaggtaaaggtattcgttacgaaggcgaagttgttcgtcgtaaagaaggtaaaaactgctaagtaaac

SEQ ID NO: 9474 - DNA, 1839 bp, Bacillus anthracis
atgaagaaagtcggtttttttcaatctattcatttaaaatttgtactcatatatatgctattaatattgatagctatgcaagttattggagtatatttcgtaagagagttagaaaagagtcttgtacaaggatttagagattctttaacgcaacaaacgaacttattatcgtataacttgaaacaagagtttaaaaaaagttatacaaaagcagagacagagtcaacagatgaaacgattaaaacttccattcgaaaatttgcctctgatcgaaagaaagatattcaagaggtaagtgtatttgatgcgaatagaaagctgctcgctatttcagatgagtcaaagcaaaacaaggtaaatagaacatcaactgatatagctgttcagcgggtattggtacaaaaaaaaccagaagtgaaaattgagaaggatggtcgtacaggtcaccgtgtacaagttatgattactcctattatggatgataacaacaaagatgcacttggtgccatttacgttgttgcatccatggaagatgtttataagcagatgaaggatattaatcaaatctttgcgaccggaaccgttattgcattactcgtaacagctgtacttggaattttgttagctcaaacgattacgagaccaatctctgatatgcgaagacaagcgattgaaatggcaaaaggaaactattcaagaaaagtaaaagtgcatagccatgatgaaattggacaattagcattatctttcaataatttatcaaaaaaattacaacaagctcgttcttcaacagaaagtgaaagacgtaaattgtcatctgtattatcacatatgacagatggagtaatcgctactgaccgaaaaggggacattattttattaaatgatcctgcggaaaagatgctaaatgtttcgcgtgaaacggcgctcgatcaatctgttttagaagtattgggaatacaagaagaatttacgctcgatcatttatacgaagagcctgattctgttttattagattttagtacgagaaatgagccatatattttacgcgctagtttttctgttattcaaaaagagacaggaaaagcaaatggtttaattgccgtattatatgatgtgactgagcaggagcgtatagaaagggaacgccgcgagtttgtagcaaacgtctctcatgaattaagaacgccattaacgacaatgcgcagctacttagaggcacttacagacggtgcatggcaagatccgaatattgcaccgcaatttttaacagttatacaagaagaaacagaaagaatgattagacttgtaaatgcgttattgcaactatctaaactagatagtacagaacatcgtttaatgaaagaatgggtcgactttactgacttctttaataacattattgatcgttttgaaatgtctaaagagcaaaacgtaagtttcaaacgatctttctctaaaaaatctcgatttattgatatggatacggataaaattacgcaagtattgtataacattatttcgaatgcattaaagtattcaccagaaggtggaacagtaacatatcgtttacgtgatcgcggagaattattagagattagtgtaagtgaccaaggaatgggtattccgaaagaaaacgtcgataaaatctttgaacgtttttatcgtgtagataaagcgcgctcacgacaaatgggtggtacaggacttggattagcaattgcgaaagaaatgattgaggcacatggtggctcgatttgggcgaagagtgaagaaggaaaagggacaacgatttatttcacattaccaatggcagcggatgaagaggacgaatgggaa

SEQ ID NO: 9475 - DNA, 909 bp, Bacillus anthracis
gtgacagaattaggacaaaagctgaaagaagcaagaggaacgaaaggcttgtctattgatcagctgcatgagattacaaaaattcaaaaacgccatttagtagcgattgaagaaggcaattatgatgtattgccaggagctttttatgcgcgtgcattcattaaacaatacgcagatgcggttggattaaatggagaggaactacttgtagaatatcagagtacgataccacaatctgaaaaacgtgacgttccacaagtatcaacaggacaaaaaacgcaagaaacaatgcaaaaatcttcatcatggccaattgcagatcacatgccgaaaattttagttgcgctgttagtaatcgcagttggagtggtaatttggtttgtttttcaagcgttaactggaaaagatgatgagaaagttccgaatactcaaagtgagaaaattgaagttaaaaaagcggaaaactctccgttagatacgaagaaagatgaagtgaaagcggaagagccgaaaaaagaggaaccaaagaaagaagaaccgaagaaagaggaacaaccagcacagccaactggacaacaagaagtgaaagtagttgggacaactggtaaagtatctactttggaaattcataataataaaacattagaactggaaatatcgggtaagggtgcgagttatgtagatgttaaagatgatgcgggtaacgaagttttaaacactacaatacaagatggtcaaacagaaaaacgagatttatcaacagcaaaagaagtgcgacttaatattggaaatgcaacgaatgttgaagttaaactgaatggccaagtggtcgcttatccattggatccagaaaaagaacttcaccaaagattggtgataaaaaaccaagggatagagcaacctgcacaa

SEQ ID NO: 9476 - DNA, 852 bp, Bacillus anthracis
aaattgaagtaaaatatggatcaattttcaccagctgaaaaaaaggttgccatgtacataatggagaatgcagagattgttccgaacttaccgacgaaagaagtgtcaacgaatgcaggcgcaagtgaggcgagtgttgttcgcttttgtaaatcgattggaatcggaagttttaaagcatttaaaatcgcgctcgttcgtgaattaacgattgctgattataatattaatgatttttacagtgatgaataccgaagatggaccgtatgacttgttttataagagtacatatgtgaaataaagctgcaatttgaggcgagcgtgacgccgattgataaagagggagctggagaaaccagcagatcgtattgtaaatgcggataaaattatattttacggagtaggtggatccacaaattccgggggatggcgcgggttttataattttcaagggctgggaatttacggcaatgatgctatttggattttcaatatgatgttaccgcttgtgacgaatttaaaagggggggattatatttgtagcgatttcaacatctggtcgtacgaaagatgtacttgaaatgggttaacactgcgaagagacaaggtgcaacagttattgcgattacgaagcttgatcaatcatcgccgttatataaagaggcggatattcgtctttgtatgccagatgtagaacaagatcatcgtattgcaagtattgcttcaagaatgacgcaattgaacatgatagatgctctatatgtgattacctttaatcgtattggtaataaagtgctggatcaatttatggaaacaagagaaaaagctttgcgattacggaagctgcaatga

SEQ ID NO: 9477 - DNA, 1017 bp, Bacillus anthracis
atgtttggatttggtggctttactcgcgatcttggaatagacttaggaactgcgaacacgcttgtatatgtaaaaggaaaaggtgtagtgttacgtgaaccttcagtagtagcgttacaaactgatacgaaacaaatcgttgctgtaggtagcgatgcaaaacaaatgattggtcgtacaccaggaaacgttgtggcacttcgcccgatgaaagacggtgtaattgctgattacgaaacgacagcaacaatgatgaaatattacattcaacaagctcaaaaatcaaatggattcttctcacgtaaaccatacgtaatggtatgtgtaccatctggtattacagctgtagaaagacgtgcagtaatcgatgcgactcgtcaagctggtgctcgtgatgcttatcctatcgaagagccatttgcagcagcaattggtgcgaacttacctgtttgggaaccaactggtagtatggttgttgatatcggtggcggtacaacagaagttgcaatcatttctttaggtggtattgtaacaagtcaatcagttcgtgttgctggtgatgatatggacgattcaatcattcagtacattaagaaaagctacaacttaatgatcggtgaaagaacagctgaagcattaaaattagaaattggttctgcaggcgagccagaaggtatcgaacctatggaaattcgcggtcgtgatttagtaagtggtttaccaaaaacagtgctaattcaaccagaagaaattgcagatgcattaaaagatacagtagatgcaattgtagaatctgttaaaaatacgttagagaaaactccacctgaattagcggcagacattatggaccgtggtatcgtattaacaggtggcggagcattactacgtaacttagataaagtgattagtgaagaaacaaatatgccagtgcttgttgcagaagacccattagattgcgtagcaattggaacgggtaaagcattagacaatatcgatcttttcaaaactgctgctcga

SEQ ID NO: 9478 - DNA, 720 bp, Bacillus anthracis
atgagtaaaccgaaatataatcgtgtcgttttaaagctgagtggagaagctttagctggcgagcaaggatttggaattaacccagctgttattaaatcagttgcggaacaagtgaaagaaattgcagaacttgatgtagaggttgctgttgttgttggtggcggtaacatttggcgtgggaaaattggaagtgagatgggcatggatcgtgcaggagcagattacatgggcatgttagcgacagttatgaattcattagctcttcaagatagcttggagaatatcggaattcaaactcgcgtacaaacttcaattgagatgcgtcaagtggcagagccttacattcgtcgtaaagcagttcgtcacttagagaagaaacgtgttgttatctttgcagcaggtacaggtaatccatacttctctacagatacaacagcagcattacgtgcagcagaaattgaagcagacgtaattttaatggcgaaaaacaatgtagatggcgtatataatgcggatccatctattgacccaacagctacgaaatacgaaacgcttacttacttagatgtattaaaagaaggtttaggtgtaatggattctacagcttcttctctatgtatggataatgatattccattaattgtattctcagttatggaaaaaggtaatattaaacgtgccgttttaggtgaaaatatcggaacagttgtaagggggaaa

SEQ ID NO: 9479 - DNA, 1170 bp, Bacillus anthracis
atgttagagtttgatactactcaagatcaattagcgaatataaaagttatcggtgtcggcggtggcggaaacaatgctgtaaaccgtatgattgaacacggtgtacaaggtgtagactttatcgctgtgaatactgatgcacaagcattaaatctatcaaaagctgaaacgaaaatgcaaattggtggaaaattaacacgtggacttggtgcaggtgcaaaccctgaagtagggaaaaaagctgcggaagaaagtaaagaacagatccaagaagcacttcgtggtgcagatatggtcttcgtaactgctggtatgggcggcggaactggaactggtgcagctccagttgttgctcaagtggcaaaagaactaggtgcattaacagttggtgttgtaacacgtccatttacatttgaaggacgtaagcgtgcaacacaagcggcatctggtattgcggcatttaaagaaaatgtagatacacttattgtaattccaaacgatcgcttattagagattgttgataaaaacacgccaatgttagaggcattccgtgaagcggataacgtattacgtcaaggtgttcaaggtatttctgatttaattgcaacaccaggtttaattaacttagacttcgcagacgtaaaaacaattatgtctaatagaggttctgctttaatgggtatcggttctggtaatggagaaaatcgtgctgctgaagctgcgaaaaaagcgatttctagtccatttattagaaacatctattgatggagctcaaggtgttatcatgaacattacgggtgggagctaatttaagcttatacgaagttacagaagcagcagacattgtagcttcagcttcaaatccagaaagtaaaatgatcttccggtcgggtattaatgaaaggataaaagatgatatcgttgtaactgtaattgcaactggttttgatgatagcattgcaactccaccaccaaaaccaattatccgtccgaatgtgaatcacacgcaacaacagcaacagccagtagcgcaaccaccaaaccaacgtgaagtaaaacgtgaaatgaagcgtgaagagcccggtggtacatgagcgtcattcagattcagattcagatgatatcgatattccagcattcttacgtaatcgccgtagacgataaaagaaa

SEQ ID NO: 9480 - DNA, 1011 bp, Bacillus anthracis
atggaaaaaaatacgattatacttggtattgaaacaagttgtgatgaaacagcagtagcagttgttaaaaatggaacggaaattattgcaaatgtcgttgcatcacaaattgaaagtcataaacgttttggcggagttgtaccagagattgcatcccgtcatcatgtagaagaaattacagttgtgttagaagaggctttaaaacaagcaaatatcacatttgatgatattgacgcaattgctgtaacagaaggacctggtttagtaggagcgcttttaataggggtaaatgcagcgaaagcagtagcttttgcacatgatattcctctagttggtgttcatcatatcgctggccatatttatgcgaatcgtttagtaaaagaagttcaattcccattactatcacttgttgtatctggtggacatacagagcttgtttatatgaaagaacatggttcctttgaagtaattggtgaaacgcgagatgatgcagcaggagaggcatatgataaagtagctcgtacgttatctatgccatatccaggtggtcctcatattgatcgccttgcacatgaagggaaaccaacaatcgatttacctcgcgcatggcttgaaccggattcatatgatttcagttttagcggattgaaatcagcagttatcaacactgtgcataacgcaaaacaacgcgggatagaaattgcaccggaagatttagcagcaagtttccaagagagtgtaattgacgtactagtaacgaaagcatctcgtgcagcggatgcttataacgtaaagcaagtgcttcttgctggtggagtagctgcgaataaaggactgcgtgcacgtttagaagcagaatttgcacaaaaagaaaatgtagagctaattattcctcccctatctttatgtacagataatgcagcaatgattgcagcggcaggtacaattgcatatgaacaaggaaaacgtgctacattagctttaaatgcaaatccaggattagatatcgaa

SEQ ID NO: 9481 - DNA, 1284 bp, Bacillus anthracis
atgaaacaaccactcgcacatcgaatgcgccctacaaatattcaagaagttatcggacaacaacatttagttggcgaaggaaaaattttatggcgaatggtccaagcgaatcattttcaatctatgattttatatggccctccaggcactggaaaaacatctatcgcgagcgcaattgccggaagtaccggaaccccttttcgcctattaaacgctgttactcataataaaaaagatatggaagttgtcgtacaagaagcaaagatgcatcgacacctcgttttaattttagatgaagtacaccgtctagataaagcaaagcaggattttctattacctcatttagaaagcggacttcttaccttaattggtgcaacgacgagtaatcccttccatgcgataaactccgctattcgaagtcgttgtcaaatcttcgaattacacgcattaacagaagaggatcttttaattggcttaaaacgagcacttgaagataaagaaaaaggtcttggggaatatgatgtaactgttacgcctgaagcattacatcactttgcaaatgcatcaggcggagatatgcgttccgcttataatgcacttgaactagctgttttatctagctttacaactgatgacaaagctgcggaaatcacgctagaaatcgcagaagaatgcttacaaaaaaagagcttcgttcatgataaaggtggagatgctcattatgacgtattatcggcatttcaaaaatcggtgcgcggaagcgatgtaaatgcagcacttcattatttagcacgtcttattgaagctggtgatttacaaagcatcggtagacgtcttcttattatggcatatgaagatattggacttgctagcccgcaagctggaccgcgtacactagcagctatagaatcagcggaacgagttggattcccagaagcacgcataccacttgcaaatgctgttatcgagctttgcttatcacctaaatcgaactcagcttataaagcacttgatgctgcattacacgatttacgtaacggtcaaacaggcgatatcccaagtcatttaaaagatagtcattataaaggcgcagaggcacttggaagaggcattggatacttatacccacacgaccaaccaaatggctgggtacaacaacaatacttacctgataaaataaaaaacaaacaatattataaaccaaaaacgacaggaaaatttgagcaagcactttctactgtatatgaaagattacaaagttcgaataaaacaaaaaataaaggg

SEQ ID NO: 9482 - DNA, 2842 bp, Bacillus anthracis
gttattgttgtagggttaatgattttaccatcgttatatgcatggtttaacattaaagctttctgggaatcggtaggaaaatccaaaggaggttcccattgcagtttcctaacccagatgcaaggctctaattttaaaagagaaagatatttatattccgggaacgaaaattgtaaattctcttgaaaaaaaacaaaaatccttgggtggggaaatttgtagatgaaaagccaagccaatttacggagttgaccgcggggattactatgcgagcatttcaatccccaaaagacttctctgaaaagattggcacgggtcctggatgaaaatccacagaaacccgaacttgattactatggtaatgaaaagggaaacgccattgcacccaaaaattccagcaaaaggtgcatccgggatttccgaaagaaattagtaaaaacttttgttaaaaacgcaaagggggaaaatttttaaatccccaatggacccttgaatcgaattttaaaacaaactttcccagtatttggaaaagtaaaagatcttgtatttaagttagaagcgcagttcccagaaatgaatacactgatggataaggcgttagatgatgcgactcgagcagaggatctagtaaaagtagcgcaaaaagagttgccagttgtagaaagtgttattaatgatgggccaggaagcgttaacaaatttagataagttctttgcaaacaatgatcaaacattgcaaaatgcacctggggacgatacgaaatcattttaacgccggctaaaaatgtaatgggataaagctaatgctctttacggatttttttatgcttccaggaaataaacttttcttgtatgaaaagattgccctgaatttccaccgcggcccggactttccaaagtggaacaatgaaggttataaaaaatattgcaagaaatattaatcaaacagtgaataacgttttaaactcggcacgtgcaggaacaacatacggtaaaagtgttgtaaacggattgcaaaatggtcaatttgatccagaaaaggcaaaaacagaatcttaatgcggtttctgaaaatctcaaaggtcgtacagatagtattgcatatcttattaatgtatttactgaactacaaaaatcagcgacgactgattttggtcaaagctttttccaaagcccgtgtggatcgcttaactaaagcttaaagcgggtatggaaaatgcaaacaacggtattaaagacattgtaaatgttattggcacacggaccagaagtaaagaaagatgtaacagatgtagcaaatcaaaaattagatgcagcaaatggatttattgatccagccagaaaaagattattaatgaaaccatttgtagcagatttataaaaaagcagttagcacagtcgatcaagctaaaagctgatgccaaaggaaacgtatgttacgtgtggaaaaattgaatatgataagttcaaaaatgggtgtgaaagatgctaaagccaaacatatcaaataaaaggtgtaactgattagaaatgggcaaaaagtatctttaaacgatttaaatggtcaattacaagctactaataatctaattggtgatgcgattccggttttagaaagcacaaataaggtattagcagatgtaaatagcggaaaaaacctttaatgggggggtttccaaaaatgacaccaaattccaaaattctgttccaaaaggttataggagccaccggaataaggcacccccctttattacccaatggccagaacccttcaaaaggggttggtggaaggtattaatgacgccacctcaaaatgcttccagctcaattaggagatttcttagcaccatatgattcagaaatccgttccaaactttaacacagcaattggaacgtacgaaacgtatgtcttaaaacacatctccaaattttaaaaaaaacagaccaaaaagcttcccaaatgttaaaaaattactagaagattcatcaaaaggtttagtagacggtagaaagaaattagcagatattaaagctgaaatgccagctactgagaaaaagattaaagaattagcagataaaattcgtgattttgaatctgaagaggatttaaaagacatcatccgtttgttgaaaaacgatgcttgagaagcaaagtgattactttgcaaatccagtaaatttaaaagagaataaatttatttgcaatgccgatctatgtttcagcaatgtcaccattctatacagtgctgcaattatgggtaggcgcattattaatgggttcgctatttccaggaaaaaatacttgaagaagccgccgattattagaagcctgtgaaatttcttcggaagggtttttaaacttcttaacgatgggtctttcacaggcgtttatcgtatcgatgggagatatattcttactcggtacgtacgtagtcgataagttctgggttgtattatttagtttatttataggtggagtatttgtttgtatcgtgtactcactcgtttctattttcggaaacgtagggaaatcgatggcgatcattttacttgtactggcagtagcaggatcgggcggaacattcccaattcaaatgacaccggcgttcttccaagcgatttatcgttttcttaccgttcacatacgcaattagtgcaattcgtgaaacagtaggcggaatgctatgggatattgtaacgcgagattttacttggttaaagggctttcgtagtagtaaggatggttgctgcgttatttctgaaaaaccccaattacccaattcaagtgaaaatttcgttgagaatgcaaaggaaagtaaaatcattcactaccataaaaggt

SEQ ID NO: 9483 - DNA, 885 bp, Bacillus anthracis
atggcaatcactgcacaaatggtaaaagaattacgtgaaaaaactggcgcaggtatgatggactgcaaaaaagctttaacagaaactaacggcgacatggagaaggcaattgacttcttacgtgaaaaaggtatcgcgaaagctgctaaaaaagcagaccgcatcgctgctgaaggtttaactttcatcgaaacaaacggtaacgacggtttaatcttagaattaaactctgaaactgatttcgttgcgaaaaacgaaggtttccaaacattaattaaagaattagctgctcacttattagctaacaaaccagctaacgttgaagaagctatggctcaaacaatggaaaacggcaaaaaagtagaagagcacatcaacgaagcaatcgctaaaattggtgaaaaacttacacttcgtcgtttcgaaatcgtatcaaaaactgatgcagatgcattcggcgcttacctacacatgggtggacgcattggtgtattaacagttcttgaaggatctactgatgaagcggctgctaaagatgttgcaatgcacatcgctgcagttaaccctaaatacatcgaccgcgatgctgtaacagctgaagaagttgagcatgagcgtcaagtattaacacaacaagcattaaacgaaggcaagcctgaaaaaatcgttgcaaaaatggttgaaggccgtcttggcaaattcttcgaagaaatttgcttacttgaccaagcattcgttaaaaaccctgatatgaaagttcgtcagttcgttgagtctaaaggcggaacattaaaaggattcgttcgctacgctgttggtgaaggtatcgaaaaacgcgaagacaactttgctgaagaagtaatgaaccaagtaaaaggtagtaac

SEQ ID NO: 9484 - DNA, 1059 bp, Bacillus anthracis
ttagagtgaagaccctaatttattatgggagcggggcaagctggattaacaaatgggatattactgaagccagaaggggtataatttttatttactgagggcaggaaatcgagttggtgattcatggagaaatagatatgattctttacagctttttacccccaggttcttacagtagcttgccaggtatggcgttaataggtgaaaaaaatgatttcccatataaagatgaaattgcaacttatttagaagaatatgcaagacattttcaattaccggtacaattgcaaactgaagttttaaaaataagaaaagagaaaggaatatttgaattacatacttctacagagattctacaaacgaaaaaagttattatcgcaacaggtggttttcagcaaccatttattccctcagtttcagcaaatctatcatcacatgtttttcaaatacattcatcacaatataaatcaccatcgcaaattccacaggggaaagtactagtagtaggtggcgggaattcaggtatgcaaattgcagtagaatttgcaaagactcatgaagttacaatgtctattagtcatcctttaacgtttttaccgttacatctttttagaaaaagtattttcaattggttagacaaattgggtctattgtacgctgaagtaaatacaaagaggggaaaatggtttcagaaaagaaaggatcccatttttggatttgaaggtaaggaactcatttcgtatgggagcaatacaactacaggaaaaagtggttagtgcatcagaaaataatattatgtttcagaacggtgaaacatatagtgcagaaagtattatatggtcaacaggttttattcagaattataactggattgaaatagaaaaggtggtaaatgagaatggattgcctaatcagataaagggaataagtccagtaagaggattatattatatcggcttgccatggcaatctcaaagaggttctgcacttatttgtggtgtaggaaaggatgcagcatatttgctttctgaaatcaaaaaaatagatcagtagcagcga

SEQ ID NO: 9485 - DNA, 786 bp, Bacillus anthracis
atggataaacaggaagcagatgatgttgaaaccggtgacgttataaaaacagatcctgtagcaggtagagtcgtgaaagaaaactctaaaattactatctatcaatcaggtgggaaaaagaaaagtaagatgattgatttcacaggaaaagatttagagagtataagaacagagttagaagagaaatataaacaagttacagtatattatattgaagatgataggccgaaaggtgcaattgtagagcaaattccgacgtctgaccaaatggtggtagaggccgagcaagaactgaaaatctgggtaagtaaaggcccttatcaaattagaccgggtgatttttcaaggtggactgaaaatagtgtaactggttatttgaatgagagaaaactaactccagatataaaacgagagtattccgatactgttgataaaggacttgtaatttcgcaatctccaaaaccgggaacgccgttaaaagaaggggataaagtgacgattatcatctcagagggccctaagccgaaagtaacgaaaaccgtgaaagtggataatatttctattccgtatgagtcttctataataggtgagaaaaaaccgcaaacaatagaaatttataaagaagatatgcaacaaaaaatggatagaccaattgaaactagaacaatttcagagtcggcaactatttcattagaatttgtaattcaagaagatacaaaaggacgctataaaattgtaagagatggtgtaacgattattgacaaagaagtaccatatccaacacaa

SEQ ID NO: 9486 - DNA, 1275 bp, Bacillus anthracis
ttggaatggaaaagtgcgatgtattctccagaattaaaaggagaatgccagctgcattattttcgggcacataaaagtattgtgaatgaaaaatcattattattagattctacaacagtaattttaaaagaagagttacgcaatgatgagatggttagtaaggaatttatatcgaagtattgtaatgaagatgaatattcattacttccaattcatccgcttcaggcagagtggttattacaccaaccttacgttcaggattggatagagcaaggagtacttgaatatatcggtcctaccggtaagtgttatatggcaacatcatcacttaggacgttgtatcatcctgacgcaaagtatatgcttaagttttcattcccagtaaaagtaacaaattcaatgcgcattaataaattaaaggaattagagagtggtcttgaagggaaggcaatgttaaatacggcgattggtgaagtgttagaaaagtttccaggctttgatttcatttgcgatccagcctttattacattaaattatggaacacaagaatctggatttgaagtgattattcgagagaatcctttttatagcgaacatgctgatgacgctacattaattgcagggctagtgcaagacgctatccctggagaacgtactcgtttatcaaatattattcatcgcctagcagatttagaaagtagaagctgtgaagaagtaagtttagagtggtttagacgatatatgaatatttctttaaagccgatggtatggatgtatttacagtatggtgttgcattagaagctcatcagcaaaatagcgttgttcagctaaaggatggttatccggtcaaatattatttccgtgataatcaaggtttttatttctgtaattcaatgaaagagatgcttaataatgagttagctggtattggagaacgtactggaaatttatatgacgactatattgtagatgaaagatttcgttactacttaatttttaatcatatgtttggactcattaacggatttggtacagctggattaattagggaggaaattctcctcacggaattaagaactgtacttgaatcgttccttccatataatcgtgaaccttctacctttttaagagaattgttggaagaggataagttggcatgtaaagcaaatttattaacgagatttttcgatgtcgacgagttaagtaatcctttagaacaagcaatttacgtacaagtacagaatccgctcgttagagaagtggctgttcgttca

SEQ ID NO: 9487 - DNA, 549 bp, Bacillus anthracis; identical to SEQ ID NO: 9145

SEQ ID NO: 9488 - DNA, 1425 bp, Bacillus anthracis
atgaatttagaaacaattattggtttagaggttcacgttgagttaaaaacaaattcgaaaattttctctgcgagtccaacagaattcggagcggagccaaatacacaaacaagtgtaattgacttaggatacccaggggtacttcctactttaaataaagaagcagttaactttgcaatgaaagctgcaatggcattaaactgtgaaatcgcaacggaaacgaagttcgaccgtaaaaactatttctacccagataatccgaaagcttaccaaatttctcaatttgataagccaattggtgaaaatggctggattgaaatcgaagtagacggtaaaaagaaacgtatcggtattacacgtcttcatttagaagaagatgctggtaaatcaacgcatacagctgatggttcattagtagactacaaccgtcaaggtatgcctttaatcgagatcgtgtctgagccagatatgcgtacgccagaagaagcatatgcatacttagagaagttaaaatcaatcattcaatacactggcgtatctgattgtaagatggaagaaggttccttgcgttgtgatgcgaacatctctcttcgtccagttggacaagagaagttcggtacaaaagcagaactgaaaaacttaaactcattcacttacgtacaaaaaggtcttgagcatgagcaagtgcgtcaagaaaaagaattattatctggtggtatcatccaacaagaaacacgtcgttatgatgaagcaacgaagaaaacaatcttaatgcgtgtaaaagaaggatctgacgattaccgttacttcccagagccagacttagttgaactttacatcgatgacgcgtggaaagaagaagttcgcgcttctattccagaacttccagacgcacgtaaagcccgctacgttgcagaaattggcttaccagcttatgatgcacacgtattaacattaacgaaagagatgtctgatttctttgaagcagcaattgcagatggagcagatgcgaaattaacatcaaactggttaatgggtgaagtgcttgcgtacttaaacaaacaacaaaaagaattaaaagatgttgcattaacgcctgctggtttatctaaaatggttcaattaattgaaaaaggtacaatttcttctaaaattgcgaagaaagtatttaacgaattaattgaaaaaggtggagacccagaagaaatcgttaaagcgaaaggtcttgttcaaatttctgacgagggtacacttcgtaaagttgtaacagaaattcttgataataatgaacaatctatcgaagactttaaaaacggtaaagaccgtgcgattggcttcttagttggtcaaattatgaaagctacaaaaggacaagcaaatccaccgctagttaacaaaatcttacttgaagagattaataagcga

SEQ ID NO: 9489 - DNA, 837 bp, Bacillus anthracis
ttgaaaacaaaaacagattttttgaaaatgaaagagcaaggtgagccgattacaatgctaacggcgtatgattatccttctgctaaattagcagaagaagctgaagttgatatgattctagttggagattctctcgggatggttgtgctcggctacgattcaacagtaccagtaacagtagaggatatgattcatcatacaaaagctgtacgccgcggagcgaaagagacgtttattgtaactgatatgccatttatgtcgtatcatgtgtcactgcaagatacgatggtgaatgcacgccgcatcgttcaagagagtggtgcccatgcactgaaggtagaaggtgcgggagaagtgatatcgactattcactatttgacgaatgcgggaattcctgtcgtggcgcacttaggtttaactcctcaatctgtaggagtgctaggtggatataaagtacaaggaaaagacgctgaaagtgcaaaaaaattaatagaagatgcgaagaaatgtgaggaagctggtgcaattgcactcgtgttagagtgtgtgccaatgcagttagcagaacttatttcagagcaattaacaattccaacaatcgggattggcgcaggacaaaaagtagatgggcaagtgcttgtttatcatgatcttatctcatatggggtaaatcgtgttccgaaatttgtgaagcaatatacgtccgttcaagaagaaattgtacgcgggatttctcaatatgttgctgaagtaaagacaaggcaatttcctgaagaaaaacattcgttcacaatgaaagaggaagaatgcttagcgttatacggaggaaaacaatca

SEQ ID NO: 9490 - DNA, 823 bp, Bacillus anthracis
atggctggttctacattacgcggtaaaaggctcacacgtttcaattgatggcaaagaaattttaaaaggtgtaaaccttgaagtaaaaggtggagaaatccacgcaattatggggacccaacggaacagggaattccactttatcctctggcaatatgggggcccccaagtttggaggttacacgaagggagcctccttcttccaccggggaagatgtatttaaaatgtggaagtaaaccaagcggccgcaaaccagggcttttccctaaccatggcatattccaatggaaatttaacgggagaaacaaaagctgacttcttacgttctgcaattaacgcacgtcgtgaaggaaggcgatgaaaattctcttaggaaatttatcggtaaattagataaaaaccatggatttcatagaaatggatccagaaatggcacaacgttacttaaccgaaggtttctctggtgaagagaaaaaccgtaacgaaattcttcaattaatgatgatcgagccaaaaatcgcaatcttagacgaaatcgactcaggtcttgatatcgatgcgttaaaagttgtatctaaaggttattacgaaaatgcgtggcgaagaattcggttgcctaatgattacgcattaccaacgtttattaaactacatcactccagacttcgttcacgttatgatgaacggtcgtatcgttaaatctggtggcccgtgagcttgcacaacgtctagaagctgaaggttacgactggattaaaaaagaaattaggtatgaaagacgaaacaacagagccagaaagcgtaggagaggagcataaccat

SEQ ID NO: 9491 - DNA, 1269 bp, Bacillus anthracis
atgaagaatacgtggcgtgaattaagggagatggaccgtaacgtatggattcggtttattggtgagacgttaaatggaattgcgatgatgatgttgatgcctttctttgcgttatatttaaaagataaggtggattcattattacaggttggagttattatggcgctttctccaattgctgcgagctttggatccattataggtggaagaattgctgatatatatggacgaaagccgattatgatattttcgatgacgagtaatgcattattaatgctcggttttttatttatagaaggatttattccctatgcaattttatcggtttttttagggttaagtaattctttatttcatccagctgcatcagcgatggttgcggatgtaacggcgccagaaaaaagaacagaagcatatggtttgttgcggatggggcataatataggtgctgcaattggcccgataatgggggcttcagtagttatgttgtcgaagaaccttgtgtttattattgcctcgtctacgatgttattctatgcattacttgtattcgttcttattcaagagacaatgccaaagagtgcgaataaggaagaggataacgaaaaggaatcaggagtggtgtggaaaattgtattgcgagataaggcacttatgatttatttattagcaggtatcattatttcgatgggattttctcaaacagaaggcatgttgccattgcattttgataatgaaatgaaagatatttttggaactaacaatccatacccatatttaatggcgttaaacggactattagttgtgttgttccaatttcaaatttcaaaatgggccacagataaacctgtcggaaagacgatgttatatggtgcatgtttgttcgggataggtttgttttttataggctggttaccgaagtggtttggaggattggatacaaatgctacaattattttaataatgttactgtttgtgtatgccatatatacattaggcgagatgattatgtcgcctgtacagatgacgtttgtagcgaatttggcccctgagcatttaagagggacttatatgggggctgcaagtttgcagtggattacaggaaatgcatttggtccacttcttggggggtttttattagatcgattacttggtcacttcctatttacaattttagctataggatgtgtagttgcaggtgttgtatatatttctttagatcgtctcgttgaacaaaggcaaaaaggcacactaaccaaacaatcttct

SEQ ID NO: 9492 - DNA, 366 bp, Bacillus anthracis; identical to SEQ ID NO: 9131

SEQ ID NO: 9493 - DNA, 720 bp, Bacillus anthracis
atgaaaatgatggacgctaacgaaattatttcgtttattcaaaaaagtgaaaagaaaactcctgtaaaggtatacataaaaggggatttaaaagaagtaacattccctgaaacagtacaagcatttgtaaataaaaagtctggtgtattatttggagaatggtctgaaattaagacaattctagatgaaaatagcaaatacattgttgattacgttgttgaaaatgaccgtcgtaattctgcaattccaatgcttgatttaaaaggtattaaagctcgtattgagccaggtgcgattattcgtgaccacgttgaaatcggcgacaacgctgttattatgatgaatgcaacaattaacatcggtgctgtaattggtgaaggttctatgatcgacatgaacgcggtacttggtggacgtgcaactgttggtaagaactgtcacgtaggtgcaggtgcagtacttgcaggcgttattgagccaccttcagcaaaaccagttatcgttgaagacgatgttgtaattggtgctaacgtagttgtgttagagggagttacagtaggtaaaggtgcagttgtagcagcaggagctgttgtaacagaagatgtacctccatatacagttgttgcaggtactccagcacgtgtaattaaagaaattgatgagaagacaaaagcaaaaactgaaattaaacaagagcttcgtcaattaaacccagagaaa

SEQ ID NO: 9494 - DNA, 1473 bp, Bacillus anthracis
atgaagaaccaagaccaagcacttatctttgaagtgagtaaagaaggacgcataggatatagcttaccaaaattagatgtagaagaagtgaaactagaagatgtgtttgagagcgattatattcgagtagaagatgcagagctaccagaagtatctgaacttgatattatgcgccactatacagcactttcaaaccgtaaccacggcgttgattctgggttctatccacttggatcttgtacgatgaaatataatccgaaaattaatgagagtgtagctcgtttcgcaggatttgcaaatattcatccgttgcaagacgagaagacagtacaaggtgcaatggaattaatgtacgatttacaagagcatttaattgaaattacaggtatggatactgttacattacaaccagcagctggtgcacacggagaatggacaggcttaatgttaattcgtgcataccatgaagcaaatggtgactttaaccgtacgaaagtaattgttcctgactctgctcacggaacgaatccagcatctgcaactgtagctggttttgaaacaattacagtaaaatcaaatgaacatggtcttgttgacttagaagatttaaaacgtgttgtaaatgaagaaacagcagcacttatgttaacaaatcctaatacattaggtttatttgaagaaaacattttagaaatggcagaaatcgtccataatgcaggcggtaaattatactatgatggtgcaaacttaaatgcagtattaagccaagcgcgcccaggagatatgggatttgacgttgtgcatttaaaccttcataaaacatttacaggtcctcacggcggcggtggcccaggttctggtccagtaggtgtgaaagctgatttaattccgtacttaccaaaaccaattttagagaaaacggaaaatggctatcactttaactatgatcgtccagaagcaattgggcgcgtaaaaccattctatggtaacttcggaattaatgttcgtgcatacacatacattcgttctatgggtccagatggcttgcgtgcagtaacggagtatgcggtattaaatgcgaactatatgatgagaagattagcaccattctatgatcttccattcgatagacattgtaagcatgagtttgtattatcaggtcgtcgtcaaaagaaacttggtgtacgtacattagatatcgcaaaacgcctgcttgatttcggttaccatccaccaacgatttacttcccgttaaatgtggaagaatgtattatgattgagccgacagaaacagaatcaaaagaaactttagacggtttcattgataagatgattcaaatcgctaaagaagtagaagaaaatccagaagttgtacaagaagcaccgcatacaacagtcattaaacgtttagatgaaacgatggctgcacgtaaaccagttttacgttatgcaaagccagctcctgtacaagtt

SEQ ID NO: 9495 - DNA, 902 bp, Bacillus anthracis
caagcacaaagtattttattagaaagcggaacaaatgaattagagattgttacatatactgttggtgaaaacctatttagtattaacgtaatgaaagtacgtgaaatcattaatccattccctgttacaactgtgccagaatctcatcatgcagttgaaggtgttgttcaagtacgtggtgaaattttgcctgttattaatttagcaacagctcttaatttaaaatcgacaaagccacttgatcaaacgaaatttattatctctgaattaaaccaaatgaaagttattttccgtgttgatgaagtgcatcgtattcaacgtatttcgtgggaacaaattgatgaaccagcttcattgtctatggggctagaagaaacgacatctggtattgtaaagctagatggcaaattattttgctattagattatgaaaaaattgtatgtgaaattagcggtactggttatgacaataaatcactgcaggggttagaacagaaaacagatcgagctgaaaaagttatttatattgcagaagattcagcaatgcttcgccaaatattagaagaaacattatcgtcagctggatatacgaaaatgaacttcttcagcaatggtgcagaagcgttagcacaaattgaaaaactagcgaaagagcaaggggaaaaaatgtttgaacatattcacttgctaattactgatattgaaatgccgaaaatggatgggcatcatttaacgaaagcggttaaagatagtgaagtaatgaatcgtttaccagtcattattttctcttcattaattacaaatgaattattccataaaggcgaagctgtaggagcaaatgctcaagtaagtaagccagatattcaagagttaattggtttagtagataagctagtgctttaa

SEQ ID NO: 9496 - DNA, 108 bp, Bacillus anthracis
atgtcgctttattatctagatgatttatctcttggtgaaattgcggaagaatttgatgtaagtcgccaagccgtgtatgataacattaaacggactgaaagcgatgct

SEQ ID NO: 9497 - DNA, 1060 bp, Bacillus anthracis
atggctgagcggtattcacgacaacagttgttcaaaccggttgggggtggggggccaagaaaagttttgaaataaaacaggtttaattgtagggggcaggccgcattaggaaagtgcaaggtggtgaaaagtttcgtacgtgccagccattgggaaagttgacgaattattgatcgtgattatgttgaatggagtaattacaaaagacaccaactgtactctgaagaagatgcgagagagaaatgccaaaaagcaatcgctgctaaaaatcggctagaaaaacttaatttcggaagtacaaatagatgctttcgtaatggatgcatgtgcagaaaacttggaaggactattagaaaagtgttgatgtaataattgatgcaacagataatttcgatatccgatttataataaatgatttatcacaaaaatataatatcccgtgggtatatggttcttgcgttggctcgtacggtatgagttatacaattatgcaaccaagagacaccgtgtttacattgtgtgctgaagaacgtttccattacggggggtgacgtgggataacgcttggatttattaatccaactggtcaaatcgttgcagcatatcaagtggcggaagcactaaaaattttagtagaagatttttgcagcaaatagaaaaacattttttattgttgataatatggagtaatccaaacccatttattaaactaggaaaaatcaagacagacgattgcctttcgtgcggtttgaatcggacttatccttattatccattcgaaaatcaaacggaggtagccgtttttgtgcggaagaaatacagttcaaattagaacggtagaaagtagacagtacaattttgatgatatagaaaaaagtattaaaaaaactggggggaagtagatcggaatccgtatttactatcttgcccacttaaagaattccgggttggtaatttttggaaaggttggtgtttccattcatgttccaaaggatatttcaaaagggaaccagttatattttcgggtattcggttaatagaaaagggttgtcaataatgg

SEQ ID NO: 9498 - DNA, 1865 bp, Bacillus anthracis
caaaaggaaatgttaataggtgatggtgcggttgggaccattattccattcaccacggtttgcaaaagtagttttgaagaattgaatatatctgatccagatgttaattatatcgattcctaagcaatatgtagctgcctggggcagatgtaattctcacaaatacgtaccggagcaaatgcaagcgaaattgcgtatgtatggtttagaaaatcaagttactgagattaatagagccgcagtaaaactggcgaaagcatctgttacagacagaaatgcaattttaggaacaataggtggtatgaaacatattggagcggttacgacaactgatatggagcgagaatttatgttactggaacaagcaagtgcattattagaagaacaggttgatggactgctattagagactttttatgatgagtttgaattactccatgctgttcaggtgttacgaaaagaaacgaatattccaattgtagcgcaattagcgttacatgaggcaggtacgactcaaaatggaaatgatgtaaatgaaatattaaaacagcttttagattacggtgcaaatgttgttggattgaactgccaactagggccacttcatatgacggaagcttttaaaatgatatcgattccgaaaaatggttacttgtcagcgtatccaaatgcaggtctcccaaattatgtggagggacgttatgtatacgaggggagtccagcttattttgaagcgatgacactgaaatttattgagcaaagtattcgggtatttgggtggttgttgtggcacgactccagaacatattgaaagtatgaaacgtgcgactctaaatgttacacctgtaatagaaaaagatacgattcaaagaccgaaaggtagttcatacacacgagaaacgtttcaaaagctcatgtcactttagcagagaaagcaaaaaatcaaccggcagtagtagttagaattagatccaccgaaaacgttagatacgcagcgattttttgaaggcgcaagagcattgaaaagggctggagcagatgctattactctagcagataattcattagcatcgcctcgtatctcaaatatggcaatgggagcattattaacgaagcacgatattccggtattgacgcatttaacgtgtagagaccataacgtcatcggactacaatctcacttgctaggcttgtcagcgttaggtatggaagaagtattagctttaactggtgatccagcacgcgttggtgattttccaggggcccatttcggtaaaagatttacccctctagggagcctctttaaaaagtttaaagaaaatgacccgaggggcttcttattttaaggaaaatcgatggctccaccaccaaggtttttcagtaggcggcgcgtttaatcccgcatgtaagacatttaaaagcagcggttaagcgaatggaacggaaaatagatgctggagcggaatatttcttaaacgcagccgatttatgatatcgcgttaatcgaagaagtgtacgaagcgacgaagcatttggaacaacctatttttattggcagagtgtacattaataagtaaacggaatgcagattttcttcattttgaggtgccaggtattacgctaccggaagccgtaagggagaggatggatggtcatgaaacgaaagaggcggcaattgaggaaggaattcgtatttcacaagagttgattgatgagacgatgaaatattttaacggtatttatcttattacgcccatttctaaaatatgaaatttacagacattctgtttaaatatgtgagagaaaagcaagaaagtgaaagaaggtgatgaatgatgaaatgtattgtccctttatgaatgaaa

SEQ ID NO: 9499 - DNA, 1485 bp, Bacillus anthracis
atgtccaatttattagctttcgatgctggtacaggaagtattcgagcagttctttttgatttacatggtaatcaaattgcagtaagtcaaaaagaatggattcacaaatctgacccactttatccaggctctatgaactttgatgtaatagaaaattggaaactagtacaagaatgcacgaaagaggttcttcaaaaaagcaatactcttgcctcttccattcttgctattagtgcgacaagtatgcgggaagggtttgttttatatgatcaagatgggcaagaaatatgggcgtgtgcaaatgttgatgggcgcgcatctgctgaggttagtgaactaaaagaaattcggtcaccaccttgaaaaagatttatatacaaagtctggtcaaacttttcaattaggtgctttacccccgcctactttggattaaaaaacatgaacccgacgtctataatactattcactcttttacaatgttaaacgattggatcttatataaattaagcagagtgctgcaaatcggtccttcaaacggatgtacgtcaggtatttttcgacacacaaataggaggggggaataacaatttcgctaaggagggcggttttttctttccctttttcaccaacaataaaagaaaggtggtacagtaattggcaacgttacaaaagagtgtgcagcattaactggattatgtgaaggaattcctgtcgtagccgggggcggagatgctcaaatggcatcgctcggaactggagtcgtgaaaccgaatcaaacattaatatgcggaggtagtttttggcaacaagaagcgaatgttactgagccaataccagatccacaagctgcgattcgtataaattgtcacgtcgtacgtaacctatggcaatacgaaacgattgcctttttcccaggcctcgttatgcgctggtttcgagacgctttttgtcaagaggaaaagaaacttgctgacaaactcggtgtagatgcttatgaattactagaagaacaagcgaaagacgtacctgtcggttcacatagcattatccctactttttcaaacgttatgaactacatttcttggcgtcatgccgcacctttcttttttaatttaaagttagacgctgacaaatgcggaaaaaaaaagactggtttcgtgctattgaaagaaatgccgcctttcgctacacttggaaaacttaaaattaatagaaaatctaactggtatattcccttctgaagttatttttgctggtggtgccgctaaaggaaaactatggccacaaattctatcagacgtccttggtattcctgtaaaagtacctgttgtgaaagaagcaactgcttttagaactgccattgcctcaggaattgggggcggcctaatttcttccttgaaaaaaccggcccaacactttggacatggggaagcaaaatttcaacccgttcctggaaatccccaatttttaaagagtttttttaac

SEQ ID NO: 9500 - DNA, 921 bp, Bacillus anthracis
atgaacgtacaggaaagtttcgttacggcattggatgaatcggaaatttatttacgcaagtggttaccagaatgtgaaccgaaagggattattcaaattgcgcatggtatgacagaacatgcaggtgtttatacagactttattgatgcgttattagaagcagggtatggtgtgtatgcgcatgatcataaaggtcatgggaaaacagtaagaagagaagaagactatgggcattttgaaccggatatagggtggaatcaggctgtgtctgatgtgatctttgtttcggaaatgataaaagaagagcaggcatgtctattgtttttacttggtcatagtatgggatctttcctatcaagacgagctgtgcaacttagaggcgaactatatgatggatttcttatttcaggcactgggggaaatccagggtttgtaggagtcgttggtcataaagtagcgacaattgagatgaaattgcgcggtgcaaaaacgaaaagtccgatgctaaactttttatcttttggcaactttaattcgaactttaagccaaatcgtacaaattttgattggttatcttcagataatgatcaagttgataaatatattgccgatccgttatgtggattcatttgtacgacgagtttttatcgagaattattttctggtgtattagaagtgaataaattagaagaatacaagaagacgccaagcaatcttccgatacatatattctctggagaccgtgatcctgttggagatatgggaaaaggtgtgaaagaagtgtatgaaaattataaaaaatgtggtgtgaaagacgtgacactacgtttatatgaaaatggaagacatgaaatgttccatgaagtgaataaagaagaagtatttaaagatttgatttcgtggttagatgcgcataataga

SEQ ID NO: 9501 - DNA, 1722 bp, Bacillus anthracis
atgaactggaaacaagaatttagtcgctggctttcatatgcagagttagacgcagaactaaaagaacagttagaaaacatgaagcaagatgagaaaaaaatcgaggacagcttttataaaaatctagaatttggcacaggtggtatgcgtggtgaacttggtgctggtacgaaccgtttgaacgtatatacagttcgtaaagcaacacaaggattagcgaagtttattgaaaagttaggtgaagaagcgaagaagcgcggtgttgttgtagcgtatgattctcgccataaatcacctgagttcgcaatggaagtagcagctacacttggtgcacacggcattacaacatatgtgtttgaaagcttacgcccaacgccagtgctttctttcgcagttcgtcatttacatacagtgagtggaatcgttcttacggcaagccataatccgcctgaatataacggttataaagtatatggtgaagatggtgggcagttgcctccgaaagaagctgatgaattaattagctatgtaaacgcagtagaagatgaattaacagttgaagttgctgatgtagagcaattaaaagctgacggtttattacatatgattggacaagaagtagatgatgcatatgctgcagaattgaacaatgtcattattaataaagaaatggtacaaaaggttgggaaagacttaaaaatcgtcttcacaccactacacggaacatcaaatctttctgtacgccgtggtttagcagaagttggatttacagatgtaacagttgtaaaagagcaagagttaccagatccgaatttctctacagtgaaatcaccgaacccagaagagcatgcagcgtttgaatatgcaattcgtgacggtgagaaggtaggcgcagatgtgttaatcgcaacagatcctgacgcagaccgccttggtgtagcagttcgtaatcatgatggtgagttccaagtattaactggtaaccaaacaggtgcattaatgcttgattacttattatctcaaaagaaagaaaacggaacgcttccagagaacggtgttgtattaaaaacaatcgtaacatctgagattggccgtacaatcgcgaaagcatacggtttagatacagttgatacgttaactggatttaaatttatcggtgagaaaattaaacagtatgaagaaagcggacaatacgaattccaattcggttatgaggaaagctatggttatttaatccgtccattctgccgtgataaagatgcagtacaatctgttctatttgcatgtgaagtagctgcatactacaaatcacaaggtaaaacgttatacgatggtctattagaagtatttgagaagtacggtttcttccgtgaagatcttgtatcgttaacgctaaaaggaaaagatggagcggaacaaattcaagaaatgatggcaacattccgtgaaaatcctccgaaagaagtagctggcttaacagttgtagcagttgaagactataaagcgagcatcattacatctttacaagatggacataaagaagagattcacttaccgaaatcaaatgtgttaaaatatcaattagaagatggttcttggttctgcctacgtccatctggaactgaaccgaagatcaagttctacttcggtgttcaagataattctttacaaaatagtgaacaaaagttacttactattaaagaagatattatgaatcgttta

SEQ ID NO: 9502 - DNA, 1051 bp, Bacillus anthracis
ttgaataatcgatattctcgccaagaattattttctccgattggggaggaaggccagcaaaagataagaaaaaagcatgtactcattatcggtgcaggcgcactaggtagtgcaaatgcagaaatgtttgtaagagcaggtgttggcacagtaacgattgttgatcgtgattatgtcgattggagtaatttacaaaggcagcaattgtatgtagagagtgatgtggaaaataatcttccgaaggctgtagcagcaaagaagcgtctagaagagattaatagtgaagtaagagtaaaagcgctcgttcaagatgtaacagctcaggaattagaagagcttgttacaaacgttaatgtaatgattgatgcaactgataatttcgaaccgcgttttcatgtgaatgattatggcacaaaaatattctaattccatggatttaccggagcatgtgtagggagttccggcttttcttacacaatctttcatagtaaaacgcccatgtttatcttgtttattacaatcgattccgcttggcggggcgaacatgtgatacagcgggggataatatcgcctgctgtatctctcgtcgtttctcatcaagtaacggaaggctcctaaactattagtggaagattacgaatcacttcgaggatggacttgtatcgctttgatgtaagggaagaaagaatatttcaggtatgaatgggcaaaaagctttggtaaccattaatggccctttgggggggaagaggaatgcattatattccttattttaaccaagaaaaatcatcccaaaccagccagttttatgcgaggagaaatacagttcaaattagaccaccttataaagaggaaatggattttgaacgatacaaagagctgctgaatgatcgtgtaaatgatttaaatgtaaatccatatttattatcattttctgtggaagaaaagagattagttgcttttaaagatggtcgcgtacttgtacatggaacgaaagatataaggtaagcaaaaaccagttattcatcgttattttggatagaaagggatg

SEQ ID NO: 9503 - DNA, 1830 bp, Bacillus anthracis
gtgaaattactagatttattgtcaaaaggaattgtaataggtgatggtgcggttggaacattattacattcacacggtttgcaaagtagttttgaagaattgaatatatctgatccagatttaattatatcgattcataagcaatatgtagctgctggggcagatgtaattcaaacaaatacgtacggagcaaatgaagcgaaattgcgtatgtatggtttagaaaatcaagttactgaaattaatagagccgcagtaaaactggcgaaagcatctgttacagacagaaatgcaattttaggaacaataggtggtatgaaacatattggagcggttacgacaactgatatggagcgagaatttatgttactggaacaagcaagtgcattattagaagaacaggttgatggactgctattagagactttttatgatgagtttgaattactccatgctgttcaggtgttacgaaaagaaacgaatattccaattgtagcgcaattagcgttacatgaggcaggtacgactcaaaatggaaatgatgtaaatgaaatattaaaacagcttttagattacggtgcaaatgttgttggattgaactgccaactagggccacttcatatgacggaagcttttaaaatgatatcgattccgaaaaatggttacttgtcagcgtatccaaatgcaggtctcccaaattatgtggagggacgttatgtatacgaggggagtccagcttatttcgaagcgatgacaccgaaatttattgagcaaggtattcggttattgggtggttgttgtggcacgactccagaacatattgaaagtatgaaacgtgcgactctaaatgttacacctgtaatagaaaaagatacgattcaaagaccgaaagtagttcatacacacgagaaacgttcaaaagctcatgtcactttagcagagaaagcaaaaaaacaaacgacagtagtagtagaattagatccaccgaaaacgttagatacgcagcgattttttgaaggcgcaagagcattgaaaagggctggagcagatgctattactctagcagataattcattagcatcgcctcgtatctcaaatatggcaatgggagcattattaacgaagcacgatattccggtattgacgcatttaacgtgtagagaccataacgtcatcggactacaatctcacttgctaggcttgtcagcgttaggtatggaagaagtattagctttaactggtgatccagcacgcgttggtgattttccaggtgccacttctgtatatgatttatcctctattgagctcattaaaatgattaaagaaatgaacgatgggcgttctattttagggaaatcgataggtccagcaacaaggttttcagtaggcggcgcgtttaatccgcatgtaagacatttaaaagcagcggttaagcgaatggaacggaaaatagatgctggagcggaatatttcttaacgcagccgatttatgatatcgcgttaatcgaagaagtgtacgaagcgacgaagcatttggaacaacctatttttattggcattatgccattaataagtaaacggaatgcagattttcttcattttgaggtgccaggtattacgctaccggaagccgtaagggagaggatggatggtcatgaaacgaaagaggcggcaattgaggaaggaattcgtatttcacaagagttgattgatgagacgatgaaatattttaacggtatttatcttattacgccatttctaaaatatgaaattacagaacatcttgttaaatatgtgagagaaaagcaagaagtgaaagaaggtattaat

SEQ ID NO: 9504 - DNA, 1029 bp, Bacillus anthracis
atgaagcgtctagtatatatggattggttgcgagtattagcgacaatcgcagttgttacaattcacgtttctgctggttatgtttccgttttagatgcaaataatgcttcacgctggatggctggtaatctatttgaatcgatttcacgtgcgagtgtcccgatttttgtaatgattagtggagctttactattaaaggggacaaaagatatttcagtcggggaatttttacagaagcgtgcaagtaaagtgattataccttttatcgcttggagcgctatattttatgcatatggagcctatgcagggtattttccagcatctttaaagcaagggataaagcactttttaacggatactatcgggggacatttatggttcttatacatgattgtagggatatatttaattacacctctattaaaagtctttgtgaagaacgctaaaaaaagagagatagaatactttttaattttatggctatacgcgtctgttgtagtcaatttagttaaatattattatcctatcaactttaatattgaattattttacgttacaaattatgtagggtatttcctacttggttattacttatctaattttgatatttcgaaaaagtggagaaatatttcttacattggaggatttgtaggatttattagtacattctttattacgtatttctatacagtaaaagcaaatggacagttagagcagttttggtatggatattttgcgccaggtgtcgtactgatggcgattggattgtttatatttttcaaatatgcattccaaaaatcagaacgagaattaccattgttattccgttttataaatcaagcaagccttggaatctatattcttcacttcttcttattaaataacttgttgtacatggttttccctaaagtaaataatcatgtgcatgcaatattggcaatacctattaatgtaacgattacaattgttctcagtatggtaattacgttagtattgcaaagaataccagttgtgaaaaaactagttccg

SEQ ID NO: 9505 - DNA, 2923 bp, Bacillus anthracis
acgaggaaggataccacgaacaacccttgggccaagttcccccggcccgaaacttggttatgttattggaaagaatgatctttacctaactgggagcagggtttgtttgttcccggaattacaagagctttttgaaatttttgagagctccttcgtttcaagatgatgtcgtaacaggggacaacacagcaacacatttttctcctcaaaacacagggtacacattgaaaagattcttaaagtcgttcaacttgttgaacagattcgttctttcgggcatacgttggctcacatcaatccgatggaggatgctgcaaatggacaatctcttcttgagaaagcaatgaacgaactgagcgatgctgatttgaaagcgattccagcgaaaacagtatggcaagatgcaccagaaggtattcacactgcacttgatgtaattcatagattaaaagaagtgtatacacaatctttagcttatgaattttctcatatacaagatagtgaagaacgcgcgtggttgcatcaaaatggtggaatcaaattcattgcgtcaaccactatcaaataaaaaacgaactgctcttttaaaacgtttaacagctgttgaaggtttcgagcaaattctgcataaaaccattcgtggggcaaaagcgtttctctatcgaggggcgtgatatgcttgtacctggtctagatgaaattgtgctagaaggagctaaaaacggcgtaaaagatgtcatgatttggatgggctcaccgccggtcgtctaagcgtacttgctcacgtattagaaaaaccatatagtcacatgtttgctgagttcaaacatgcaaaaatagaaggcgcagtggcaaattctggctggactggcgacgtgaaataccatttaggtagagaacaagtcgttagtaacgaagaagttagcactcgcgttacattagcaaataacccaagtcaccttgagttcgttaatcccgttgtggaaggtttcgcacgtgcggctcaagaaaaccgtaaaaaatctggtcttccagaacaagatacttcaaaatcattcgtaattttagttcatggtgatgctgcattccctggtcaaggtattgtatctgagacattgaacttaagcagattgaacgcgtatcaaacggggcggaacaattcatgttatcgcaaacaatgcagttggttttacgactgatagctatgactctcgttctacgaaatattcaagtgaccttgcaaaaggtttcgatattccgattgttcacgtgaacgctgatgatccagaagcttgtcttgctgctgctaaccttgcgattcaataggagcatgctgttcaaaaaagatttcctaatcgatttaattggttaccgccgctacggtcataacgaaatggatgatccagcagtttcccaaacccaaggtttaaaaaaagattaaaaatccccccactgttaggagcatttaaggcagatcaaattcaagctgggtgttttctaaaatgcggatgaatttgaacaatttccacattttccgcaagagcaaataaaattctgactttgcacagttcccgcccagttgatacgaggcgatgcaccaatttcacgttaaaagtgcccagatgttgttgcaaaaagtatttcaggcaaattgatactggtgttgagcttgactcacttcgtgccatttatgaaggtctactatcttgggccagaagggctttaacgtatatccgaaagtgaagaaaattcttgagcgccgtaaagatgctcttgaagagaacggtaaaattgaatgggcacttgctgagtcattagcattcgcttctattttacaagaaggtacgccaattcgtttaactggtcaagattcacagcgtggtacattcgcgcaccgtcacatcgtattacatgatactgacacaaatgaaacatattcaccattacatcgcttaccaaatatcaacgcttcattctctgttcataacagtccgttatcagaagctgctgttgttggttacgagtatggttataacgtattcgctccggaaacgcttgttatgtgggaagcgcaatatggtgacttctcaaatactgcgcaagcattatttgatcaatatgtttcagctggaagagcaaaatggggtcaaaaatctggtttagttcttctattaccacacgggtatgaaagtcaagggaccgagcactctattgcgcgtcctgaacgtttcctaaaagtagctgctgagaaccacttgacagttgcaaactttacgaacggcgggacaaaatttccatattctgcgtccgccaagcattcatccttaggaaaaaaagctggttccaccctttattattgatggacgccgaaaaggttatttaggtaccccctttaccctttcccctgctaatcagttaaagcgaaggacgtttccaacttgctttaagacccaagaaaacccttggtacaaacccaaacaaagtaaaccgttcttgttttaagtccaggtaaaatggcgatggacttagcagcagaaatggagtctgggtagccatgagtacaccttagatgaaattcatatcgttggtatgaaacagttgtacccatccctggctgaaaaagttcaattctattattttaacgcttttaaaaacttagaagaaatttatttggggttcagaagaagcctcgtaatatggggcgcatggcattacatgggctccaattctgttcgaactagctggagataaagtgaaaacaggttacatcggacgtccagatcgctctagcccatctggcggcgatccattcgctcacaaagctgagcaagaactgattgtttcacacgctttagatgtaaagtataacttccgtcaagataaactagaaattgaagttttcagcaactaaaaagtaacaata

SEQ ID NO: 9506 - DNA, 518 bp, Bacillus anthracis
atgactacacatatagaaaagtgcacccttaaagatatacacaaacttcaagaaattagttatgaaacatttaatgaaacttttaaacatcaaaattcacccgaaaatatgcatcattatttggaaaaggcatttaacttaaagcaattagaaaaagaactatccaatatctcttctcaattcttttttgtctacttcaacgatgaaattgctgggtatctgaagatcaatactgatgatgctcagtctgaagaaataggcgatgaatcacttgaagtcgagagaatttatataaagagctcctttcaaaaacatggtcttggcaaatatctactaaataacgctatcgaaattgcaatagcaaataataaaaagaatatttggctaggcgtatggaaaaaaatgaaaatgctattgctttttataaaaaattagggtttgtaccagctggctctcactccttttatatgggagatgatgaacaagttgaccttatcatgattaaaacactcatataa

SEQ ID NO: 9507 - DNA, 1767 bp, Bacillus anthracis
atgctaaatttagtacttatgatgattgaacgcgtcggacttattgttattctaggatttttactttcgcatattaaaacattcaggcgccttcttcataagcaagatggttatgtagataagcttaagcttatttgtattttttcggtgtttacaattgtaagcaattacaccgggattgaaatagcagggaatacgattatgaatgaaaattggctacagggtgtttcatcatcgagtaccattgcaaatacacgtattatgggtgttggaattagtggattgcttggcggtcctatcgtcggaattggagtaggatcgattgctggtattcaccgttatatgcttggcgggacgacagcgctaagttgcgcgatctcttcaattttagcaggcgttataactgggtatattggatacatttttaaaaagtataatcgtacaattacgcctaaattttcagcagttttaagtgtgtttatcgtttctttagaaatgattatgattctattaattgtagaggatggcattagcattgtgaaaacaattgcgataccaatgatccttgtaaatagctttggaagttttattttactttctatgatacaagctattttgcgccaggaagagaacgcaaaggcacttcagactcataaggtattacgtattgcagataaaacgttaccgtattttcgccaaggcttaacagaagaatcttgtaagcatgtggcacaaattattcaccgctttacaggaacagatgcggtatccttaacagatacagagaaaatattagctcatgttggattagcgtcagatcaccatattccttcacatagtttaataaccggtttgtcgaaagaagtgttacatacagggaaaataatgaaagcgaaatcacgtgaggtcattaattgtcaacatgaaggctgtcctttgcaagcggcgattgttattccgctaacttcacatggaaatacgatagggacattaaaactatatttcaaaaatcctaaccagttaagtcgtgtggaagaggaattagcagaagggttagcaaaaatattctctacacaacttgaattaggtgaagctgagttgcaaagtaaactattgcaagatgcggagataaaggcattacaagcacaaattaacccacactttttatttaatgcaattaatacagtatcagctttatgccgaacagatgtagaaaaggcaagaaagttattattacagcttagcgtgtatttccgttgtaatttgcaaggggcacgtcagttattgattccactagaacaagaattaaaccatgtacaggcatacttatcactagaacaagcaaggttcccaaataagtatgaagtaaagatgtatattgaggatgagctcaagacaactttagtaccaccgtttgttcttcaactattggttgaaaatgcattgcgacacgcttttccaaagaagcaacccgtatgtgaagtggaagtgcatgtttttgaaaaagagggtatggttcattttgaagtaaaggataatggacaagggattgaggaagaacgtttagaacaattaggaaagatggtagtttcgtcaaaaaaagggactggaacagctttatataatattaatgaacgtcttattgggttatttgggaaggaaacgatgcttcatatcgaaagtgaagtaaatgaggggacagagattacttttgttattccaaaaaaagtaggggaggaagagcagattgttaaaagtattagtagt

SEQ ID NO: 9508 - DNA, 867 bp, Bacillus anthracis
gtgctaagagatttattcgtgaaaaagaaaaagtacgctgcaataccttcagaacaagtacgaaaagatgtaccagatggcgttatgacaaaatgtccgaaatgtaaaaaaatcatgtatacgaaagaagttctaaaaaatttaaaagtatgtgtgaattgtggttatcatcatcctatgaatgcgtgggaacgtcttgatagtatattggacgaagggtcattccgtgagtatgacaaagaaatggtttcattaaatccactcgagtttccaaattatgaagagaaactagagagcgatcgtaagaagactgaattgaacgaagcggttgtaactggtgaaggaacaattgatgacatgcttgttgttgttgcagtaatggattctcgttttcgaatggggagcatgggctctgttgtaggagaaaaaattgcccgtgcggttgaaaaggcatacgacttacaagttccatttattatctttactgcttcgggtggtgcccgtatgcaagaagggatattaagtttaatgcaaatggcaaaaacaagcgtagctttgaaaaagcatagtaatgcaggaggattatttatttctgttatgactcacccaacgacgggcggggtttcagcaagtttcgcttcacttggtgattataatcttgcagaaccgggggcactgatcggatttgctggtagacgtgtaattgaacaaaccgtgcgtgagaaactaccggaagatttccaaacggcagaattcttactagaacatggtcaattagatgcggtagtacatcgtgatgatatgagagaatcgcttcgcaagattttagaagttcatcaaggaggggaaatggctgtatggcagagc

SEQ ID NO: 9509 - DNA, 360 bp, Bacillus anthracis
atggcatacagaaaattaggccgtacaagtgcgcaacgtaaagctatgttacgtgacttagctactgatttaattatcaacgagcgcatccaaacgacagaaactcgtgcaaaagaacttcgttctgtagtggaaaaaatgatcactttaggtaaacgcggagatcttcatgctcgtcgtcaagcagcagctttcattcgcaatgaagtagctaacgctgagactggtcaagatgcacttcaaaaactattcgctgatgtagctccacgctatgctgagcgccaaggcggatacactcgtattgcaaaaattggtccacgtcgcggagacgcagcaccaatggtaattatcgagttagta

SEQ ID NO: 9510 - DNA, 995 bp, Bacillus anthracis
ttgaaacacgatatgaatgcacgtaaacaattatggatagcagttatatgtatgacttttgttgtaattctaggaacattaggatttatgacaattgaagagattagtttatttcaagcattttggatgacgatgattaccgtattaacggttggatacggagatgccattcctgtaacacatgcaggaaaagtatttgcgcttcttatcataccggttggagttggtattgttacgtatgcaattggtgtagtggcagctatgattattgaagggaatttatttcatgcagtacggaggaagaagatggataaacaaatagcacagttacaaaatcatattatcgtatgtggttgcggtagagtagggcttcaagttgtacatgaattgcaagaaaagaaaataccatttgttgtcgtggataaagagaaagcatattagagaaggaaaaacttttgtatgtacatggagatgcaacggaagacaaagtgttacatcatgctggaatttcaaaggcagctggtttagttgccatcgtagcaaacgatgctgaaaatgtatttattacattaacggcaagaggattaaacgatgcaattaaaattgtggcaagagcagaaaaaccagaaaccgaagacaagttaaagagggctggggcaaataaggtgattaatccatctagtatggccggcattcatattgcaaaaggcattgcgaatccgctaacggttcattatattgatacagtactgtatggggtggaacagtcatttgtaattgaagaaattgcagtaggcaagggctctattttaactaataaatcgttattagagagtgatgttagaaatcaatttgatgtaacaattttagcgattttgagaaatgggaatgttatacataatccaacggggcaggaaaagttgcaagaacatgatatgataatagtatttggttcagtagagaagctgggacaatttgagaaagaactacaaagt

SEQ ID NO: 9511 - DNA, 231 bp, Bacillus anthracis
atggcaggacgcaaaggtggacgtgcgaaacgtcgtaaggtgtgtttcttcacatctaacggcatcactcgcatcgattataaagatgttgatttattaaaacgtttcgtttctgagcgtggtaaaattttacctcgtcgtgtaacaggaacaagcgcaaaataccaacgcaaacttacagttgcaattaaacgtgctcgtcaaatggcacttttaccatatgttggtgaa

SEQ ID NO: 9512 - DNA, 1029 bp, Bacillus anthracis
atgacagttacaattaaagatgtggcgaagaaggcgaatgtagcaccatctaccgtttctcgtgtaattgctgataatccaagtataagtgaaaaaacaaagcgtcgtgttcggaaagtgatgagtgaactagggtatcatccaaatttaaacgcaagaaacctagctaaccaaacaacaaaaacacttggccttgttatgccaagttctgcaagtaaagcttttcaaaatccttttttcccagaagttataagaggaattagttcatttgcacatgtggaagggtatgcgctttatatgtcgacaggtgaaacggaagatgaaatttttaacggtgttgtaaagatggtgcaggggcgccaaattggtggcattattcttttatattcaagagagaatgatcggattattcaatatttacataaacaaaattttccgttcgtattaattgggaaaccatatgatcgtaaagaagaaattacatatgtagataatgacaattatacagctgcaagagaagtggcagaatatttgatttcattaggtcataaacaaatcgcattcatcggcggtggatcagatttacttgtaacgagagatcgtttggctggtatgagtgatgctttaaaattagcagacattgtattgccaaaagaatatattttacattttgatttttcaagagaaagtggtcaacaagccgttgaggaattaatggggctaaagcaaccaccgacagcaattatggcaacggatgacttgattggtcttggtgtgttaagtgcactttctaaaaaaggatttgttgtacccaaggatgtttcaattgtaagtttcaacaatgctttattatcagaaattgcgagtccgccactctcgacagttgatgtgaatatataccagctaggatatgaagctgcaaaagctttagttgataaagtagagaatgcggagtctactgcaaagtgtattattattccgcataaattactgaagcgtcaaacttgcgatcattatgcaacaaaaagc

SEQ ID NO: 9513 - DNA, 129 bp, Bacillus anthracis
atggctaaagatgatgtaattgaagtcgaaggtaccgttcttgaaacgttgccaaatgctatgttcaaagtagaattagagaatgggcatgtcgtattggctcacgtttctggtaaaatccgtatgaac

SEQ ID NO: 9514 - DNA, 415 bp, Bacillus anthracis
ttacagaaagctgtagcccctatgaaaaattaaggatacaaacatactggggaattgagaagaaatgctgagattatttgcagctcacaatcgttatttaacggcgaaagacgttttagagcatatgaaggatgattatccaggtcttagctttgatacgatttatcgtaacttaacggtggtttgctgaaatcggtgtttttagacaaacagaaattatacggtgaaaaacattttcgttttacatgttctattatggaacatcatcatcattttatttgtttagattgcggggggacgaaagagattacttcctgcccaaatggattttatgaataaagattttaacggttatgaagtaacaggtcataagtttgaaatatacggacgttgtccaaaatgtgcaaagtaaaag

SEQ ID NO: 9515 - DNA, 1773 bp, Bacillus anthracis
gtggctgaaagaacacatgcatgtggaaaagtaacagtagaagcagttggacaaacagttcaattaaaaggttgggtacaaaaacgccgtgatttaggtggattaatctttatcgacttacgtgatcgtacaggtatcgtacaagttgtatttaacccagaaacatcaaaagaagcgctagaggtagcagaaacaattcgtagcgaatacgtattacacgtagaaggtacagttgttgagcgtggtgaaggcgcaattaatgacaatatggcaacaggtcgtattgaagtacaagcaacgaaagtaagcgtattaaatgcagcgaaaacaacgccaatcattattgctgatgatacagatgcatcagaagatgtacgtttgaaatatcgttatttagacttacgtcgtcctgtaatgtttaacacattcaaaatgcgtcacgacgtaacgaaaacaattcgtaacttcttagatacagaagagttcttagaagtggaaacaccaattttaacgaagagcacaccagaaggcgctcgtgactatttagtaccaagtcgtgtacatgacggtgaattctatgcattaccacagtctccacagctatttaaacagcttcttatggtcggtggatttgagcgttactatcaagtagcacgttgtttccgtgacgaagatttacgtgcggatcgtcaaccagaattcacgcaaatcgatatcgaggcttcattcttaacacaagatgaaattttagatatgatggagcgcatgatgacgaaagttatgaaggatgcaaaaggtgtagaagttagcgcaccattccctcgtatgaaatatgctgatgcaatggctcgctacggctctgataagccagatacacgctttgaaatggaactaacagacttatctgagtttgcagcaggttgtggctttaaagtatttacaagtgctgtagaaagcggcggacaagtaaaagcaattaatgcaaaaggtgctgcgagcaaatactctcgcaaagatatcgatgcattaactgaattcgtaaaagtatacggtgcaaaaggtttagcttggcttaaagtggaagaagacggcttaaaaggaccaatcgcgaaattcttcggtgaagaagatgcgagcgtgttaatgaatacattagaagctactgctggtgacttattactattcgtagcagataagaagagcgttgttgcagatagcttaggcgcacttcgtttgcgtctaggtaaagagcttgagttaattgacgaaagtaaatttaacttcctatgggtaacggattggccacttcttgagtacgacgaagatgcagatcgttacttcgcagctcaccacccattcacaatgccattccgtgaagatgttgagctattagaaacagcaccagaaaaagcacgtgcacaagcatatgaccttgtattaaacggttatgagcttggcggtggatcacttcgtatttacgagcgtgacgtacaagaaaaaatgttcaaagcacttggattctcacaagaagaagcacaagagcaattcggattcttattagaagcattcgaatacggtacgccaccacacggtggtatcgcattaggtttagaccgtcttgttatgttacttgcaggccgtacgaaccttcgtgatacaattgcattcccgaaaacagcaagcgcaagctgcttattaacagaagctccaagcccagttgcagaagcacagcttgaagagctgaacttgaagttgaacgtgaaagaagagaag

SEQ ID NO: 9516 - DNA, 1410 bp, Bacillus anthracis
atggtagtaggagatttcccaattgaattagatacagtcgttgttggtgcaggtcctggtggatacgttgcggcaattcgtgcagcacaattaggtcaaaaggtagcaattattgaaaaagctaaccttggtggcgtatgcttaaacgttggatgtattccttcaaaagcgttaatcaatgcaggtcatcgttatgagaatgcaatgcattctgatgacatgggtatcactgcagagaacgtaaaagttgactttacaaaagttcaagaatggaaaaacggcgtagttaagaaattaactggcggtgttgaaggccttcttaaaggtaacaaagttgaaatcattcgcggtgaagcttacttcgtagatgctaatacattacgcgttatgactgaagaggcagctcaaacttatacgtttaaaaatgctgttcttgcaactggttctacaccaatcgaaattccaggattcaaatactctaaacgtgttatcaactctacaggcgctttaagcttacctgaaattcctaaaaaacttgttgtaatcggcggcggttacatcggtatggaattaggtactgcatatgctaacttcggtacagaagttactgtagtagaagctggcgacgaaatcttagctggtttcgaaaaagctatgagctctgttgttaaacgtgctctacagaaaaaaggtaacgtaaatatccatacaaaagctatggctaaaggcgttgaagaaacagaaactggcgtaaaagttagctttgaagttaaaggtgaaatccaaactgtagaagcagattacgtattagtaactgtaggtcgtcgtccaaacactcaagaaatcggtcttgagcaagttggagttaaaatgactgaccgcggcatcatcgaaatcgatgagcaatgtcgtacaaacgtaccaaacatctatgcaatcggtgatatcgttcctggaccaccattagctcacaaagcttcttacgaaggtaaagtagctgtagaagcaattagtggccatgcatcagctatcgattacatcggaattcctgcagtatgcttcactgatccagaattagcatctgttggttacactaagaaacaagctgaagaagctggaatgactgtaactgtatctaagttcccattcgctgctaacggtcgtgcattatcattaaacagcactgacggtttcttacaacttgtaacacgtaaagaagatggtcttcttgtaggtgctcaagttgcaggtgcaggcgcttctgatattatttctgagattggtttagctatcgaagctggaatgacagcagaagatatcgctcaaacaatccacgctcacccaacattaggtgaaatcacaatggaagcagctgaagttgctcttggaatgccaattcacattgtaaaa

SEQ ID NO: 9517 - DNA, 1432 bp, Bacillus anthracis
aagaagttaggattttttccattaattgcattagtagtcggaacaatggttggtggcggtgtttttagtttaccgcatgatttagcagtaggcgcaaatagtggctctatcataattggctggtgtattacagcgatgggaatgattccactcgcgctcgtatatcaaacgttagcaagaaagaaaccagagcttgagggcgggatttatagttatgcacgtgctggtttcggtgaatatattggatttaacagtgcttggggatactggttagcaggaattttaggaaacgttgcaacaatcatgttactgtttagtacattaggttatttcttcccaatttttaagggcggaaatagtgttgcgtctatcgtaggagcatcacttttattatggacacttcattttctaattttatttggcattcgtgaagcatctattatgaatgtgattgcaacgataggaaaattggttccaatcgtattatttattgttgtaatggtaacagcgtttcgctgggatacatttacacaggatttttggggggaaggaactatttcagtttcctctatactaggtcaagtgaaaaatacaatgcttgtaactctttgggttttcatcgggggtgaaggagcggtagtattatctggaagagcaaaaaatagtcgagatgtcgggaaagcgacagtattaggacttattttagtaatgtctatttatattttaatttctgtcttgtcaatgggagcgaagacaagaggaagaactttttgtttagaaacctcggtcaatggggccatgtattagaacatgttgttgggacatggggggcagttgcgataaacatcgggttagttgcttcacttgtaggtacattaataggctggttttttacttgtttcggaaaatttccccacgtagcagggaaaagattggcgtgtttccgaaaagtcttttcggaaaaccaaataaaaaaccaacccgccgcaatatggcatatggggatctcaaaatggcgttgcccaagttatatttataatcgttctgttttcagaatcaacatatcaaattatgtatttcatagcgtcaacatcaattttagtaccatatttattatcagcgtatattccaatttaaattagtaattacaaatgaactaaaagatgcaaaagtcaaaaatggttcgctagctttaattgcttcactttactctgtatggcttatttatgcagctggtttgaagaatttattgctcgtttcaatcgtatacgggattggaatcattgtttatgtgtatgcaagaaaagaaaaaggaaatcgttgttttactggtatagagagatatgtaatgtgggcaattgtagtagcagctgttacatctctatatatgttattgactggaaatataaaaatgtaaaagtccttttcattt

SEQ ID NO: 9518 - DNA, 558 bp, Bacillus anthracis
atgactacatatacttccatcgcaaatgtaattaaagaaagacgttctgttcgtacatttacagataaagcagtagacaaagagttattaattgaactattaaacgacgcaacatgggcaccgaatcataaacaccgtgaaccatggaattgtaaattatacattggagaaggccgtcagaaattagtagacgcagtattaaattctttcacagaagaagaaagagcaaaacgcggtaaaattttatcggatcgtttcttaagcacacctgcacaaattgttgtatatataaatgaagatccacgtcaaattcaacgtgatgaagattacgctgcaacatgtgcatttatgcaaaacttccaacttcttgcttgggaacgtggattaggttgtgtttggaaatcaggcggattaaactacaatccactatttatagaaggactcggtttaactagaggtcaacgcatagttggaattcttcatcttggctattttgataaatcaccagaaggaaaagctcgtacgccaattacggagaagatggagattattgaaggt

SEQ ID NO: 9519 - DNA, 1995 bp, Bacillus anthracis
gtgaataaaaaaatggagcaattgaagcaccatgttacggataatcaacgcaaacatgctttaacaacaaaccaaggagtaaaaatagccgaggatgaattttctttaaagatgggcttaagaggcccaaccttaatggaggatttccactttcgcgagaaaatgacccattttgatcacgagcgaattcccgaaagaattgttcatgcacgcggagttggcgctcatggttattttcagctttatgaatcgttagaagcatatacgaaagcagattttcttactaatccttccaagaaaacacctgtatttgtacgcttctcaaccgttcaaggttctaaaggatccaacgacgcagtaagagatgtacgcggattcgccacaaaattttatacagatgaaggaaactacgatttagtaggtaataatatgccagtattctttatccaagatgctattaaatttcctgattttgtccatgcagttaaaccagaaccacataatgatattcctcagggagctagcgctcatgatacattttgggattttgttgcgcataatcccgagtctactcatatggttatgtggcagatgagtgatcgcgcaattccacgtagtttacgaatgatggaaggttttggggttcatacatttcgacttattaataaagaaggaaaagcccacttcgtaaaatttcactggaaacctgctcttggagttcattcattagtgtgggatgaggctcaaaagattgctgggaaaaatcctgatttccatcgtcaagatttatatgaagcaattgaaaaaggggattatccggaatgggagctcggattacagctaattccagaagaagatgagcatacatttgattttgatattttagatccaacgaaattatggccggaagaagaagttcctgtaaaactagttggtaaaatgacattgaacaaaaatgttgataacttctttgcggaaacggagcaggtagctttccaccctggtcatgtcgtaccaggtattgatttttcaaatgaccctcttctgcaaggaagattattctcctatacagatacacaattatctcgtttaggaggccctaatttccatcaaacccctattaaccagcccgtatgtccttttcataataatcaacgtgatggtatgcatcaaatgcaaattcatcgcggtcaaacaagctatcatcctaatggcttaaatgacaatcaaccagcaaccgtgcaagctgaacagggcggatatgagcattatcaagaaaagattgatggacataaaattagggggcgcagtaaaagcttccttaacttttattcgcaagctaaacttttctacaatagtatgagccctattgaaaagcagcatataaaagaagctttttgctttgaagttgggaagtgtaaatcagacatggtgaaggcaaatgtaattgctctactgaatcatgtcgatcgtcaattagcacaagaagtcgctaacattattggagctcccttgcctaaggaaaatcacgaagtaaattcagatgcaaaatcacctgcactaagtatgtccaatactatttttaaagctgattctaaaaatgttgcaattgtattaaatggtgacccaagcgtctcccttctgtccgaatggattcaagcttttgcacagcatcgaattaactatagcatcgtagataataaaatttatcagttcaataattccattaaagtaactgatacttatacaacaacagactcttccctttttgatgcagtattagtgtttagtagcgaatctgccattcacccccctgttttagaatttgcagaaactacttttaaacattttaaaccgatagctcatgtccttagtaatcctcatgctttggacaatagtaaaattaaattagatggagcaggaatttacaacttagcaaacacttcaattgaatcatttatagaaggcattgcccaaggacgattttggaatcga

SEQ ID NO: 9520 - DNA, 366 bp, Bacillus anthracis; identical to SEQ ID NO: 9131

SEQ ID NO: 9521 - DNA, 807 bp, Bacillus anthracis
atgagtatagtaaaaaacggaacattgcaagtaattggagcaagcatctattatgaggtgcgtggctcgggtccaattcttcttttgattcatggtgggggtggtgatgccgacaagttccataatatcgccgaccatcttgctaaatggtataccgttgttacttacgatcgtcgtggtcattcccgtagcaatctcgtcaataaaaatgaggattaccatgtgcacacgcatagcgaagatgctcatcggttgctagctaatctgaccaaagaaccggcttatgtattcggaagtagttctggtgctgttatcggacttgatttgtgcatacgtcatcctgagcaggtacagttactaattccacacgaaccggttttattacaacttttatctgaaaatgagttgaagcaggctataaatttcctggaagaccttaaagggaatcatcaaaatgaggtcatgaagttattgtcaaatattgatgatagtaattccgaaccatcgaaggatatgctaacagagcgactacttggcaattcgacgtatttcactgagtatgaaatcccgggaattctcagctatactttaaatatcgatgcattaaagtccctattaaaacctgcatcgatacaggtacgtccagctggtggaagtatttcaagagaaacttttccttatcattgcgcattcaacttagcagagcacctcggaacagaattcgcagagtttccaggacatcatgtgggttataacacagtgcatcataaagagtttgctgagaggttacatgatgttattgagaat

SEQ ID NO: 9522 - DNA, 2478 bp, Bacillus anthracis
aaaaaacgtttagttatgatcggaaatggtatggctggcatacgttgtatggaagaaatattaaaacatgattgtgattcatatgagattactattttttggagatgaaccacaccccaactataatcgcattatgctctctcatgttttaccagggtaaaccaattatccaggatatctttatgaatgaatccagttggtatgaggaaaacgaaataccttggtatacaaatgaaagagttcaaagtattgccggagaagaaaaagttattatgccagaaaggattggtattcttacatatgacaagtttattattgcaccaggttctagtgcttttattttccctgtggaaggttccattcttcttggtgtaacaggttttcgaaccattgaagatacacagtttatgatggatactgctaaagaaaagaaaaaggccgttgtcattggtggtggattacttggtttagaagcagcacgaggtcttattgacttaggaatggacgtacatgttgttcatttaatgcctagcttaatggagcaacaactagatacgaaagccgcttctctactgcgtgaagatttagaagcacaaggcatgaagtttctcatggaaaagaaaactgtaaaaattcttggtacaaaccatgttgagggcattcaatttgaagatggtgaagttgtagattgtgatttaatcgtaatggctgtcggaatccgaccaaatacgcaaatagcaagagatgctggtttaattgtcaatagcggcattgtagtcaatgactaatatgctaacaaatgatgagtccatttatgcagttggcgaatgtgcagaacatgacggtatcgcatatggacttgttgcccctctttatgaacaaggtgcaatattagcgaaacatatatcgaatttacaaactgatggatattcgggcagtatcgtcggtacgcaattaaaagtgtgctggctgcgatttattctctgcaggccaaatttatgaagatgatcaaacgacagctatatccatctttaatgaatgcaaacgttcctataaaaaagtattaattcgtgacaataaagtcctccgtatcgttttatatggtgacacagctgatggtacacgcctctttagcatgttaaagaaggagggaggttttcaaggattttcccccggcgtccattcttcacaaagctggtgaagaaagtgaacttgatgttgctacaatgagtgcggatgacacgaatttgtggatgtaaatggtgttacgaaaaagaaaccaatcgttcaatgcccttttttgaaacaagaagttaacgacttttgaagaagttaaaggctgtacgaaagccgcaggggtcttgtggtaaatgtcgtccgcttgtagaacaatgtttatctcatacactcggaagatgcttttgatgcttcagcccagtctgctggtatgtgcggatgtacacctttatcacgtgatgaagtcgtagcggccaattcatgaaaaaggcttaaaatcaccaaaagaagtacgaaatgttcttggttttgtacatgaagatggctgttcaaaatgtcgtcctgctttgaactactatttacgtatggcgattccagaagaatatgaagatgataaagcctcccgtttcgttaatgaaagaatgaatggtaacatccagcacgatggtacattctctgttattccacgtatgtacggaggcgttacaacagcagatgatttaatgaaaattgctgaagttgcgaaaaagtatgatgttccacttgtgaaaattaccggtgcaagtcgaattggcttatacggtgttaagaaacaagatttaccctaacgtatgggctgacttaaatatgacttctggatatgcgtattcaaaattcttcttggtaatgaaaaatcaagggtgtgggctctggttttccgcggtttcggtacgaaaagatccattaggacttggtatgctcctggaacaatcattagaaatggtagatacacccacgtacaatgaagaggggtgtaacggggctgtccgcgtaactgtgcggaagtacttacgaaagattttggcgttgtttgtgtcgaaaatagaataccaactttatattggtggaaatggtggtacagaagtacgtgaagctgattttgtaatgattgtccctactgaagatgatgttcttcacatcgctacagcttacatgcaatattatcgtgaaactggtatttacggagagcgtactgcctactggacagaacgattagacttcgatcacataaaagaaatactgcaagatgcaaatatggtcactaagttaaatgaacgtttccaaacggcccgtggcacatataaagaagcttggggacaagcactagaaacgaaatcattaaaagcgatgtatgaagtagaaactgtgaaataaggagctgtgatctatatgatacaaacgaaagataaaataaaagttatg

SEQ ID NO: 9523 - DNA, 1079 bp, Bacillus anthracis
atgcgagtagatggtagagagaaaacagagttacgccatatacatattcatacgaattatttaaaacatccagaaggatcagtattaattgaggttggggatacaaaggtaatttgctcagcgacaattgaagagcgcgtcccgccatttatgcgtggagaaggaaagggatgggtaacagctgaatatgcgatgattccacgtgcgacagaacaacgtacaattagagagtcaagtaaaggaaaagtaacaggacgtacaatggaaatccagcgcttaattggacgagcattacgtgcggtagttgacttagaagcgcttggcgagagaacggtttggattgattgtgatgttattcaagcggatggtggaacgcgaacggcttctattacaggtgcatatgtagcgatggtattagctttcgagaaattattacaagcagaaaaagtatctaaaattccagtaaaagattatttagcagcaacgtcagtaggaattgttgaagagcaaggcgttgttttagatttaaactacgcagaagattctaaagcagacgttgatatgaacgtgattatgactggaaaaggccagtttgttgaagtgcaaggaactggagaagaagcgacgtttagcagagcacagttaaatgaattacttgatgctgcggaacaaggcattttccaactgattgatattcaaaaagaagcgttaggtgacatcgtatctcatatagagtagaggtggaaaatatgaaacaagttgttgtagcgacaaaaaatatggggaaagtacgtgaatttgctgagttatttgagcgatttgatttagaagtaaaatcattacacgatttccctcatattgaagaagtcgaagaaactggtgaaacatttgaagaaaatgcgattttaaaagcggatagtttgagtagacagttgaatgcaatcgtaattgcggatgattcaggtcttattgtagatgctttaaacggaaaaccaggtgtgtattcagctcgttttgctggagagccgaaagatgatcaagcgaatatcgataaagttttacaagaattaaatgaagta

SEQ ID NO: 9524 - DNA, 1297 bp, Bacillus anthracis
ggtgttggtaaaacagcaatcgttgaagggttagcacagcgtattgtgaagaaggatgtacctgaaggattaaaagatagaacaacatcatgcgttagatatgagtgcgcttgtattcggtgcgaaattccgtggcgagttcgaagagcgtacgcaagctgtattaaatgaaattagaaagagtgaaggtcgcattttactattcattgatgaacttcacacaatcgtcggcgctggaataacagaaggtgcgatggatgcagggaatatgttaaaaccgatgcttgcgcgtggtgaactgcattgtattgtgggcgacaaccctagatgaatatcgtaaatatattgtagaaagatccagcactagaaagacgtttccaacaagtttttgccagaagaccccacctgttgaaagatacaatttttattttacggtgtttaaaaagagcgtttgaaaattttatcccggtgtaaatattcatggcccgcgcaattgtagcagcatcagttttatcagatgatattatttcagatccgtttcttacccggataaagcaattgatcttgttgacgaagcgtgcgcaacaattcgtacagaaattgattctatgccgaccagattatgatgaagtaacgcggcgccattatgcagctagaaattgaagaagcggctcttgaaaaagagaaggactttggtagccaagaacgcctcaaaacattgcaacgtgaattatcggatttaaaagaagtggcaagtagcatgagagcgaaatgggagaaagaaaaagaagatattcacaaagttcgtgacttacgtgaacatttagagcgtctgcgccgtgaattagaagaagcagaaggtaattacgatttaaatagagcagcggaacttttcccccggaaaaattcctgcaattgaaaaagagttaaaagaagcagaagaaatgggcgcaaataataaacaagaaaatcgtttattacgtgaggaagtaagtgaagaagagattgctgatattgtttcacgctggactggtattcctgtcgcaaaactcgttgaaggtgaacgtgagaaattattacgcttagagcaaattttatcaagacaggttttttggaacaagaggaaagcggataagcctagtattcagatgcagtttcttcgtgcgcgcggttgttataaaagccccgaacggtcccaatggtttccttcatcttctagggaccgactgttgttgtaaacacagagcttggccaaaacgttagcacagtctttatttgatagtgaggagcaaatgat

SEQ ID NO: 9525 - DNA, 987 bp, Bacillus anthracis
atgtcagttatcttttctggtattcagccgagtggaacgattacacttggaaactatttaggagctatgaagcaatttacagagctacagaacgaacacgactgttatttctgtattgtaaaccaacatgcaattacagtacctcaagatccggtacaacttcgtaaaaacatccgcagtcttgctgcactttatgtagcatgcggtatcgatcctgaaaaagctactttatttgtacagtcagaagtaccagcacacgctcaactaggatggattatgcaatccgttgcttacgttggagaattagagcgtatgacgcaatataaagataaagcatcaggtagagattcagttccagctggattactaacttacccaccattaatggctgctgatattttactttacaacactgagatcgtgcctgttggtgatgaccaaaagcaacatatggaattaacacgtgacctagcagagcgtttcaacaaacgcttccgtgaagtattcacaattcctgaaatccgcattccaaaagtaggagctcgcgttatgtcactaacagagcctacgaaaaaaatgagtaaatctgatccgaatccaaaatcaatgatcagcatgcttgacgaaccaaaaacaattgaaaagaaaattaagagtgctgtaactgattctgaaggtatcgtgaaatttgataaagaaaacaaacctggcatctctaacttattaacaatctactcttcattctctggaaaaacagttgaagaaattgaagcaatgtacgaaggaaaaggatacggcgactttaaaggcgatctggcacaagtagtcgtagaagcgatccgcccaatccaagacaaatataacgaactaatcaactcaccagaactagacgaaattctagacaaaggtgccgaaaaagcaaaccgcgttgcattcaaacaactacgcaaagtagaaaacgcaatggggttaagtagaaaacgtagg

SEQ ID NO: 9526 - DNA, 441 bp, Bacillus anthracis
atgagtcttctcggtcgtttaaacgatgatatgaaacaagcgatgaagaataaacaaaaagaaaaattaaccgtcattcgtatggttaaggctgctttacaaaatgaaggtattaaactacagcatactcttactgaagaagaggaactaacagttttagctcgtgaagtaaaacagcataaggactccctccttgaatttaaaaaagctggtcgtgaagaccttgttaataaactgcaaagtgaaattcagattttaagcgcatatttgccggagcaattaacagaagaagagctagttgatataatcaagcaagttatttctgaagttggtgcgacttctaaagcagatatgggtaaggtgatgactgctgttatgccgaaagtaaaaggtaaaacagacggatcacttgtgaataagctggttatccagctattagca

SEQ ID NO: 9527 - DNA, 490 bp, Bacillus anthracis
atgatggatcaatttctatgggtattgtttccctatatcatttttgcaatctttatcggtggacatattttcagatacaactatgatcaatttggttggacatcaaaatctagtgaactattagaaaagaaaatgctccgaatcggaagtatattattccactttgggattatgttcgtaattggcgggcatgttatggggattttaattccagaagctgtataccgttccataggtatttctgagcatatgtatcatgtagtagcaattagttttggtctttcgggcaggtattgcttctatcatcggtttaattatataacggtcccgccggtgtaactttaaaagttctcttggcaacagttccaaggggagattatattgcgcttattctattactttatcgaagggtagcagggactttcctcaacgtttttaaatatcgactcaaaaaggattggattatcgtaaaccgatcggttccatggtt

SEQ ID NO: 9528 - DNA, 1350 bp, Bacillus anthracis
atgtcaaataaagttcctacttcttttatcattattataggattgatgctgtttgcattgttttttggagcaggaaatttaatttttccacctatgcttggtcaaatggctggaaataatgtatggatagccaatgcaggctttttagttactggagttggtttaccattgttagcaataacagcatttgttttttcaggtgaaagtgatttgcaatctttagctagtcgtgtacatccggtgtttggtattgtatttgcgatcgttctctatctagcgattggtcccttttatgccatccctagatctggaactgtatcatttgaaattggaattaaaccgtttttatcaaatgatgcaggtcctgctgcattaaccgtatttacaatcttatttttcatagttacatgcttattatcccttaatcctacaaaacttgttgatatagttgggaaaattttgactcctatcaaattgactgttattgggatgctcgtagttgttgcttttattcacccaattggaagaattcaggcacctagtgaagtgtatgcatcagatgcattttttaaaggttttcaagaagggtatttaacattagatgctcttggagcttttgttttcggaattattattgtgaatgcaattagagaaaaaggggctactactaaaaagcagcttatggttgtttgtgtaaaagcaacgactattgctgctacactcttagctcttatctatactgccctttcctatatgggcgcttctagtgtagaaaaactaggtcatttaaataatggggctgaagttttagcaaaagtttcggactattactttggttcgtatggtgcaattttcttaggtgtaatgattatagtagcatgtttaatcacaagcgtaggacttatcactgcttgttcttctttttttcataaattatttccaaagatttcttacaaaaaacttgctattattttgtctgttttcagtacactagttgcgaatatagggttaacacaattaattaagatttcaatccctgtattaataactatgtatccaattgctattaccttaatatttctaacatttttacactctgtattcaatggtagatttgaagtatatcaagggagtttgatattgacatttatttttagttcgttagatggattaaaagctgctggaatagaaagcgaaataatccataatttttttgagcactttcttcctttatatagtgtaggtttagggtggggatttccggctattataggcggtgtatgtgggtatgttgttagtgtattacggaagaaaaataccttaagttctagtgaaactcaattaaataaa

SEQ ID NO: 9529 - DNA, 879 bp, Bacillus anthracis
atgacagagaataatgatataaaaatggtaattattacaggaatgtctggagctggaaagacagtagctttacaaagttttgaagatttaggatatttctgtgtagataatttgccaccgatgttattgccgaagtttattgagcttatggcggattcaaaagggaaaatgaataaagtagcacttggcgttgatttgcgtggccgagagtttttcgaacatttatggggagcgcttgatgatttatcagaacgcacatggattattcctcatattttattcttagatgcgaaagatagcacgcttgtaactcgctataaagaaacgagacgttcgcatccacttgcaccaactggtttgccgttaaagggaatcgagatagagcgcagcttattaactgatatgaaggcacgcgctaacattgtgcttgatacatcggatttaaaaccgaaagaattacgtgaaaaaattgttcacctattttcaactgaaacggagcaagcgtttcgtgtaaatgttatgtcatttggatttaagtacggcattccaattgatgcagatttagtatttgatgttcgttttttaccaaatccatattacattccacatatgaagccattaacaggactagatgaagaagtttcatcgtatgtgctgaaatttaatgagacgcataagtttttagagaaattgacggatcttatcactttcatgctgcctcattataaaagagaaggcaagagtcaacttgtaattgcaattggatgtacaggtgggcagcatcgttctgttacgcttacagaataccttgggaaacatttgaaaccagagtatagcgttcatgtatctcatcgtgatgtggagaagagaaagggccat

SEQ ID NO: 9530 - DNA, 849 bp, Bacillus anthracis
atgcgtgtctatgaagccctgaaatgggcttcttcttttttacaggagaatgggcgagatgaaaatgcgggagaaattgtcctttgtcatgtattaaagacgaatagaacaggattattgatgaacatgcgtgaagaaataactgcggaacaagaaacaagttttacagagtttatccacaagcatgtagaaggtattccgattcaatatatgattggtcatgaaatgttttatggaagatcgttctttgtgaatgaagaagtattaataccaagaccggaaaccgaagagcttatagtgggagtgttagaaagaatcgagcgccattttggtgatgagaaactacatgtagcggatatcggtacgggtagcggggcgatttcgattacgcttgctttagaaaataaaaatcttcatgtatatacggtagatattgcacaggagtcaattgaagttgcaaaagaaaatgcgaaaactttgggcgcagaagtaacgttctatcatggtgatttattatcaccattttatgaaacgggtcaaaagttagatgttgttgtttcaaatcctccatatataccggaagaagattggcgtggtctttctcctgtggtgaaagagcatgagccaaagagagcgcttgttggtggtgaagacggattagatttctatcgccgctttatggaagaattgccgaatgtgctgcagaagaaagcaattgtagcatttgaaataggagtagggcaaggtgaggacgtgaaagggctgttacaacaagcttttccacatgctcatgttgaggttgtttttgatattaatggaaaagatcgtatggtatttgcagaaatagag

SEQ ID NO: 9531 - DNA, 1179 bp, Bacillus anthracis
atggatactttaatctttgaagttggaactgcgttagtattagtagcttttgcagctatcctcgctgcaaagttaaagttttcgattattccgtttctcattattcttggtatgttagtggggccgcatgcccctgatttaggacttatcgatttaaggtttattgaaagcggagaagttatttccttcctcggccgcgttggcgtcatattcctcctattctacttaggtttagaattctcaataaaaaaattaattaaatcaggaaaatcaattgcttttggggggactgtccacatatcacttaatttcctattaggtttgctttatggatatgtgatgggcttccccttattagagacgttaattattgctggaatcattacaatttcatcaagtgcaattgttgcaaaagtcattgttgatttaagaagatctggtaataaagagacggagctgattttaggaatcattatgtttgatgatatctttttagcggtatatttatcagtcgtttcaggattagtactcggaggggcaacgtcatttgcaggtgctcttacgtcggtgttaattgcagtagggtatatgctcctattttttgtaatcgctagaaaagctacgccgtttttaaataaagtattagatatttcgtctaacgaaattttcataatcgtaatatttgctattttatttttcgtagcaggattttccgaaacaattcatgttgcggaagcgattggagctttattattaggactcgtcttttctgaaacggagcatagcgatcgaattgaaaagctcgtcgtcccattccgtgatttctttggagccatattctttttcagcttcggtttaagtatagatccgttttcgcttggaggcgcagtatggttggcattaggagcagttttcattactatcatcggtaattttactgctggaatgattgcggggagtaaagccgggttatcccataaggcttctacgaatataggcttaacactcgtatcacgcggagagttctccattattgtagcaaatatcgggattgcgggtggcttaatggcagcgattaaaccgttctctgcactgtacgttttaatattagcatcgttaggaccgttattaacgaaagagtctgggagaatatactctctactagataagttgtttaaa

SEQ ID NO: 9532 - DNA, 480 bp, Bacillus anthracis
atgacacaacataaagaagaacagatgaatgaagcgttagccttattttactttgcatataaaacatttactgaaaagccagatgaaattattaaagagtatggtattcaaagagtacatcaccgaattttattttttatcgcacgctttccgggagtaagtgtaaatgagttattatcactactagaaataagtaaacaagctcttcacggaccattacgacaacttgtggaaaagagcttaattgagagtaatgaagctacacatgatcgccgtgtgaaacagttatctttaacagaaaaaggtgccgatttagaaaagaaactgagtgatgtacaaagacaacaaatgggtgctattttttcaaaatttggtgaatcgtgtgaagaaaattggcatcaagttatgaatgaaatggcacatagccgatcaggttttgatgcttggatatcgaaaagggaagttgcattcgatcaaaaa

SEQ ID NO: 9533 - DNA, 3329 bp, Bacillus anthracis
aacatacaagcaacaaaaagcgtaaataaaagtgttgcagcaattggagacgttctcacttatacagttactatccctaatacggggcttcttcccgccaataacgttatttttacagacattctccctaacggtacttcctttatacctggaactgtaacagtagataatgtcccgcaaacgaatgcaaatccggccgctggtatatctcttggaaccattaataacagcgcttctcgtacagtaactttccaagctactgtcgtttctttttccagtcaaaaatctatcttcaacactgctaatattacatttcaatatacaccaatcgccggaggaacgacttttaacggtcttgcaacaagcaactctgctggaaacacaagtaacctcgcagatattaatggcacaaaatcagttaacaaactttttaccgatatgggtgaaacgttaacttacagtatcgcctttagctatataggggatattgctgcaactaacgtaatatatacggatccgattcctagcgggactactttcgttctccgggagtgtaactgttaacggagttactcaggctggagcaaatcccgctactggtatatcaattggatctattgctgctaattctacgactactgttgcatttcaagtatttgttccttctattccccaaacaaatccaatattaaatagtggtacaacaacataccaatacattcctgttccaaatcaaccggcagtaagtgggactgatacgacgaatattgtctccactcaagtgaataacgctactgtaactatggcaaaagcagtagataaaaattttgctgatattggtgatacactaacgtacaccgtttcctttacaagtacaggtaatacaaatgcgaacaacgttatttttacagatgttattcctactggaacaacttttgttctaaacagtttaacaatagatggcacgacacaaggtggagcaaatcccgctaacggtgtgaacattggatcaatcccaactggcacaacaaaaaatgtttcatttcaagtagttgtaaatacaatacccgcgctaaatgtcgtatctaatggatcaagcgcttcttatcatgtacactgtcaacccaagccaatcacccgttacaaaaaacatttcttctaatctcgttttcactcaaattaacaatgcgaatttagcatttaacaaatccacaaataaacaattttgccacaattggtgaaacgataaagttatacaatttcttattacaaacagcggaaatacagctgcaactaacgtgcaactaacagacccacttccaaacggaacgatattgacccctggttctgtaacactcaacggcgttttgcaaaatgtagattccctcgttgctttacctatcggcacaattcctggcggggcgacttttacactttctttcccagtaacagtcattcatattaccacccaaaatcctatcattaataatgcttttcccctcttatctatatactgtaaatccaagtctgcacccaaacttcaaaaacagcaaattctaattctgttacatcaacaattagactagcaaaccttcaagctactaaatctgtagataaaacgtttgcggaagttggggatgtattaacttataccttttctcttacaaacgatggaaatgttgctggcgaacaatatagtactatccgattcaatcgcgaatggtactgcctttgtaccaaacagtgttacgattaacaatgttactcaaccaagcggtacaccagctatgatcaatatcgagcagtaccactgctggtactacaattacagcttcattcaagttaattataactagtatcccaaacccaaatcctatttcaaatagcgctttctatttccctatacttttatcgttgatccaaacgctttccctataagtaagaacacaactttcaccactacattttactcagtaaatgacgcaaatattatttcagcaaaaacagtggatcgagcgtccgctactggtgggggatgtattaacttataccgctgtttttacgaaatgcaagaaagggttctgcctgaaggcctactttcgtagatacgaatccagacggtactacctttatcccaaacactttccttattaatggtgtactccaaaataacgcagatccaaatgtcggtgttcccttaccttccattcctgcgaacggttcacttaccgtctcttatcaagtaactgtcacctctttaccaacacaaaatccaacaataaattcatctagtacacagtatagttttattttaaatccgggcgatccaccaactatagaaacatctttaagtaatactgtaagtacacaaattaatttagcaaatgtagttattgtcaaaacaggtagatttaactattgctgacgttgggcaaccaatcacatatacaattgctttagctaaccctgggaatactcccgcaaataatgtagttgttaccgatatactccctcctggtacaactctcgtaccaaatagtatttttatagggcggggctttacaacttggtgcggatccaagtgctggtcttcaagttggtacgattccagctggtggttttacaacaattgtcttccaaattggtgcaaatagtttaccttcaccaaatacagttcaaaaccagtgctgtacttcaatataactttatcgcagatccaaattcacctcccgttgtaagaaactctgttagtaaaatagtaactgcccaaattaaccctgctaataatgttgctacgaaactaacaaagcacaaattttgctgatgttggcgatgtcataacttatgcaacgattttaacgaataacggcaatatccctgcctcgaatgtaacgtttacagatatcattccagctggtaccatcttcctccctaatactgtaacgattaacggtgtccctatagctaatgcaaaccctgctaacggcattttaattggtacgataggagcgaattcatcacgtactgttgcattccaagtttttgtaccaaccattcctagtgcaaatccgattgcgaatcaatcgagcactacattccaatacacgtacgacccatccaaaccagctgtcatgcagatggttgcttctaacactgtacagacaactattaataatgctacgattacctctgtaaaatctgcagataaacagtttgcgaacgtaactgatatcattacgtacacgactactttaacgaataatggaaacacacttgcatcaaatatagtatttacagatgttattcacaagcggaccatcttttatttc

SEQ ID NO: 9534 - DNA, 951 bp, Bacillus anthracis
atgaaaaaagagagaaaacctaaaattgttatcatgggaggcggaacgggactttctgttttattacgagggttaaaacaatatccggtcgatattacagcagttgttacaatcgctgatgatggtggcagttcaggtagattacgtgatgagctagaaattccacccccaggtgacattcgtaacgtacttgttgcgttatcagatgtagagccactggtggaagctttatttcagcatcgtttcacaaccggagatgggctgaaaggtcatgcgttaggaaatttattattggcaggtatgacctcgattacaggagacttcttccatgccattacagaaacaagtaaagttttaaatgttagaggacgtgtattaccggcagcgaatcaaagtgcagtactgcatgcggaactagaagatggagaaattgtaacaggtgaatcaaagattccttatttcggcaagaagattaaccgtgtctttttaactccagaagatgtagagccgttacatgaaacgttgactgagattaaacgagctgatttacttgttttcggtccaggaagtttgtatacgagtatattaccgaatttagttgttaacaaaattggggacgctgttcttgctgcaaaagcgaagaaggtatatgtgtgtaatgttatgacgcaagctggtgaaacaatgggatatactgcgtttgaccatgtgcaggcgttacatgatcatttaggtaaaccatttatcgatactgcaattgtaaataaccgtgatattccttgtgaattacgtcagttatacgaggaagaaatgtcggcaccagttgtagtagatgaagagcgttttattgaaaataatattgatgtgattcaagatcaattagcgaagtatgatgaccgtgttgtaaggcacgatacattaaaattagcttctattttatattcactgttg

SEQ ID NO: 9535 - DNA, 389 bp, Bacillus anthracis
atgaatcgagaagaattgtttgatgtaactgtgataggcggaggacctgcagggctttattcagctttttaatagggacttcggggaaatgaaaccaaaaataatggaatttcacccacatttaggtgggaaaatacatgtttatccggagaaaatgattggggatattggcggattattaccggttactggcgaaaagttaattgagcaacttgtacaacaagggttaacatttcagccagaagttgtattgaatacaaaaatagaatcaattattcgtaataaagatggtatttttacgttaaaaacaagcactgagagaacaacacttttctaaaacagtgatcgttgcgactggaagtgggatattgaatccacaaaagttatca

SEQ ID NO: 9536 - DNA, 1202 bp, Bacillus anthracis
atgggtgaagaaaaccaaccaaattatacgatttcacaggaaaactggtccctccatcgcaaaggatatgacgaccaacaacgccatcaagaaaaagtacaagaggcaattaagaataatttacccgatcttgtaacagaagaaagttctgctatgtctaatggtaaggatgttgtaaaaataccgattcgttttttagagaggaattataagatttggtttcaaatttatgataaaaaaccaaccccgttgggcaaggaaaatgggtacagcaaaagttggtgatgtctttgggagagatgattcaggtgttcaaaagcaaaaaaggcccaggaaaagggcaaggagcaggagatgcggctggggagaatttttaagaagctgaaggtttctattttagaattagagcaagcatttttcaaagaattagaattacctaatttaaagagaaaagaaatggatgaaaaccggattgaacatgttgaattttaatgatattagaaaaacaggattatggggtaacatcgataagaaaagaacgatgatatctgcatataaacgaaatgcgatgcgtggtaaagcatcctctcccccaattcatcaagaagatttaaagttccgcacttggaatgaagtattaaagccagattcaaaagctgttgtattagcgatgatggatacaagtggaatcgatgggaatatgggagaaatatatggcacggagcttctttttctggatgacgagatttctacgcacaaagtatgaaacagtagatattgaatttattgcccatcatacggaggcaaaagtagttccggaggaagagtttttctcaaaaggagaaagtggcggaacaatttgttcttctgtatacaaaaaagcactcgagctaattgataataaatactcaccagaccgctaatatatttatccatttccatttttcagacggtgataatctaacatcagataatgctagatgctgtaaagcttgtagaagagttaatgaagaagtgtaacatgtttggatatggggaagtgaatcagtacaaccgccatagtacacttatgtccgcctttaaaatttttaaggaatgaaattttccaatatatattttttaaggcaaaagcagatgtattccatgcgatgaagagcttctttagagaagaatcaggagagaaaatggcatagcccccctta

SEQ ID NO: 9537 - DNA, 708 bp, Bacillus anthracis
atgatgagtaagtatgaacaaatttatacagcaatcagcaagtctattgataataaacaattaaaagagggatgcaaaatcccatcagaaactgaattaatgaaacagtatgaagcgagccgtggtactgtaagaaaagcagtggatttattacaagagcgaggatatgttcaaaaaatacacggaaaaggtgtttttgttttaaagcgtaaaaacattgaattcaactttggtggcattgtaagtttccaagaagaaaatgaacgtttagggcgccattgtattacagaagtcgtggaaatagagaaaataaaagcgacaaaagagattgcaaagctattaaatgtgaaagagaaaacagaaatagatcatattaaacgcgtacgaaatattgatggagaaaaagtaattttggatattaatcattttgtatcggaacatatccctggattaacgagtgaaattgcagcggggtccatttataaatacatagagaaagaattaggtcttcatattagttactcacagagggtaattgaggtgcagtcatgtacagaggacgatagaaagtatttagatttaaatggaacagattatgttgtcgttgtgaaaaactttacgcatttttatgatggaagtcagttcgaatatacagaatcacgtcaccgcttagatatttttcatttttcggatgtggcgcggagaaaa

SEQ ID NO: 9538 - DNA, 1794 bp, Bacillus anthracis
atggggaacagaattcctgaagaagttgttgaacagattcggacgtcatccgatattgtcgaagtgattggtgaatacgttcaacttagaaaacagggacgtaactatttcggcctttgtccgtttcatggtgagaattctccttcattctctgtttcatctgataagcaaatttttcattgcttcggatgtggagaaggtggaaatgtcttttcctttctaatgaaaatggaaggactggcttttaccgaggctgttcaaaagctaggtgaaagaaatggaattgcggttgcagagtatacatcagggcaaggacaacaagaagacatatctgatgacactgtcatcatgcaacaggctcatgaacttttgaaaaagtattatcatcatttattagtaaatacagaagaaggaaatgaagcactttcgtatttgttaaaacgtggtattacaaaagaaatgattgagaagtttgaaattggttatgcgtcacctgcttgggatgcagcaacgaaaattttacaaaaaagaggtttatcgctgtctagtatggaacaagctggtcttctcataagaagtgagaaggatgggagccattatgatcgcttccgtggacgagttatgtttccaatctatacgttacaaggtaaagtgatagcgtttagtggaagggcattaggagatgatactccgaaatatttaaatagcccagaaacaccgatttttcacaaaagtaaattgttgtataacttccaccaagcgaggccgtttattagaaaacgtgggcaagtggtcctttttgaaggatatgccgacgtactagctgcggtaaaaagtggtgtggaagaagctgttgcgacaatgggaacagctttaactgaagaacaagcaaaacttctgcgacgtaacgttgaaactgttgttctttgctatgatggtgataaagcagggcgagaagcgacgatgaaagcagggcaattattgttgcaagttggttgccaagtaaaagttacatccttgccagataagcttgatcctgatgaatatgtgcaacaatatgggacaactgcttttgaaaatcttgtgaaatcaagtataagttttgttggttttaaaataaattatttgcgtttagggaaaaatttgcaagatgagtcgggcaaagaagagtatgtgaaaagtgttttaaaagagttatcgttgttacaagatgcgatgcaggcagaatcatatttgaagtcattatcgcaagaattttcgtattcaatggaaacacttttgaaccaattgcaccaatatcgcaaagaacaaaaggtacagcaaaaacaagtaaagcaggtttctaagccgtctcaaattgttcaaacaaaaccgaaattaacaggttttgaaagggcagaaagagaaattatttaccatatgttgcaaagtccagaagtggccgttcgtatggaatcccacatagaagattttcatacagaagaacataaagggattttatatgaactatacgcatattatgaaaagggaaatgaaccttcagtcggaacatttttaagttggctctctgatgaaaagttgaaaaatattattaccgatatttcgacggatgaatttattaatccagaatacacagaagaagtgttacaaagccatttggagacgcttagacgtcatcaagaaaaacttgaaaagatggaaatcatcttcaagataaaacaaatggaaaaaacagatcctgtagaggctgctaaatattatgtagcatatttacaaaatcaaaaagcgagaaaa

SEQ ID NO: 9539 - DNA, 3696 bp, Bacillus anthracis
gtgtttttaaaaagattagaaatagcaggatttaagtcttttgctgaacgtgtatctgtcgatttcgtcccaggtgtaacgtctgtagtaggacctaatggaagcggggaaaagtaatattacggatgccattcgctgggtacttggtgaacaatcggcaaaatcattacgtggtgcaaagatggaagatattatttttgcaggtagtgatacgagaagagcggttaatgttgctgaagtaacaataactttaaataatgaagatcaacgtttaccaattgaatataatgaggtgtgtgtaacgcgtcgtgtatctcgttctggtgatagtgatttttatattaataaacaatcatgcaggttgaaagatattatcgatttatttatggactctggtatgggaagagaagctttttcgattattagccaggggaaagttgaagagattttaagtagtaaatcagaagaacgtcgtggtgtatttgaagaagccggcgggagtgctgaaatacaaacttcgtaaaaagaaagctgaaagtaaattagcagacacacaagaaaacttaaatcgtgtacaagatataattcacgaattaagtagtcaagtagaacctttagaaagacaagcttaaattgcaaaggattattcttgagaaaaaataatgatttttatacgtgcgaaccgcgctttatgtacatgaaaattgaagaattgcatgagaaatgggaaagctctttgaaaatcatttggggcataaaaaaaagcgaaggaggttaaaatgttcagccgcatttacaaaaaaggtgaaagaagatttagaggaaatttcggaggccaatttacaagcgttagatgagtcggtaatttccttgcaagaagtttttttattttctagtaaggagctagaaaaagttagaagggcagcgtgagctattaaaagagagaaagcaaaatgcaacgacgcattgtgcgcaacttgaacagttaattgttgaattaacagagaaagctacaagttatgatggtgaaatcgaatcgagtacagaagtgttgatgcaatttgtaaatcatgtaaaagagttggagatgaaattgcatgataatgagcaattgcttgcaacgtttgctgataatttagaggaacaaattgagaatttaaaaggtgattatattgaactttttaattcaccaagctagtcatcgtaatgagttatctatgattgaagaacaatctaaacaccaaaaatttcaaaaaaatgaacgctttgatgaagaaaatgcgaaatatgtagaaatgcgtatggatactaagacaagaaggacaaaacttgtgggaaagttatgaacaagtaaaagaaaaagtagctggaatcctttcgaatatacaaaagacagaagcggcacttgggaaatgcaaggcgcagtatagtgaaaatgaaacaaaactataccaagcgtatcaatttgtacaacaggcacgcatacagaaaagaaatgctagaagagatgcaagaagattactctggtttcctatcagggggtacgtgaagtattaaaagctagagaaaataggttgcaacgtatccgagggggctgttgcagaattgctaacggtaccgaaagaatatgaaattgcaatggaaattgctctaggtgcagcgatgcagcatatcgttgtacaaaaagaagaacatgctcgtaatggcaattgcgtttttaaaacaaaataaacatggacgagcaacgtttttaccgcaggctgttatgaaaggtagatcgttatcatttgagcaattacgtattgtaaatcaacatccatcgtttgtaggtgtggcagcagaacttgtgcaatataacaataaatatgaaaatgtagtttccaatttattaggtactgttattgttgcaaaagatttacgcggggggaaatgagttggcgaaaccaattgcaataccgctatcgcattgtaaacatcgaaggtgatgtagtgaaccctggcgggtctatgacaggtggcgcagtaaaacaggcgaaatcttcttttattaggacgtcaacgtgagctagaagagtggacgaacaagttaactgatatggaagaaaaaacgacgaaggttagaaaactttgtttaaaagcagtaaaaccagagattccagaaaaaagaagtgcaaatacccgaacctaaggaaaagtgtagaaaacagagccgtgtagatgaaccagaatttatgagaaagaatttaatcgttttagaaattagaagaacatcggcatcaatgaatcgtttatctcatttcccattttaaagattgaaggattcttacaagatcaagtgaagatacaagggcgtaaagaagagctagaaaagatttaagcgacccttcaagcggagattaccgggactagatagcaaaattgtcgctttaacacaacaaaaaagtgagcaacatacgtcgaaagaaatagttcaaaaagaaatgactgaggtaaaagtgttggcggcttgaaaagcaacaacgcttatctaatcaaaaagaaaaagttgaacgattgacgaaggaaaaagaagaaacggatgcaacgccttgtcaaaacaaaagaggatttagcattcttaaaacaagaaatgacatcgaattcaagtggagaagagcaaattacgaatatgattgagaagaagagcgtatgatcgtaatcaaacttcggagttaattcgctctcgtcgagaacaacgtgtatcgttacaagagagagtagaacagttagagcgtaatctgaaagaaacaacgggtaaacataaatacattcttgagatgttgaaagatcaagaagtaaaaataaaccgacttgatgtagagttagaaaatagattccaacattttacgtgaaacatatacgatttcattgaaagcggcaaaaactgaagtatacaatgatgatgcctgctgaggatgcacgtaaaaaagtgaaactaattaaactatccatcgaagagcctaggcacagtaaacttaggggcaattgatgagtatgagcgtgtagcggagcgtcatacattcttacttgagcaaaaagatgatctagaagaagcaaaaacgacattgcaccaacttattactggaatggatgaagaaatgaaaaaacgcttttctactacgtttgaagggattcgaatggagtttcaatcggtgttctctgaattgttggaggcgggtagagcggatttagtcatgacgaatccagaggatttattaaatacgggtattgatattgtagcgcaacccgcaagggaagaaactgccaaacttaggtttactttcagggggaagagcgtgctttaacggcaatttgcgctattattttggtattttaaaagtgcgcccagtcccattctggggtattaaaagaaggccaaggcccctctttgatgaagcaaacgttgcccgttttgcccagtatttaaagaaatttagtgatgagacacagtttattgtaattacacatagaaaaggtacaatggaagagtctgacgtattgtacggtgtaacaatgcaagagtcaggggtatctaaacttgtctcggttcgtttagatgatggagaaaaactagtcgcaagcaaatagggaggatgggacagtatgagcttttttttaaaaactaaaagaaaaaatttcaaaaccaaccggatccgg

SEQ ID NO: 9540 - DNA, 1866 bp, Bacillus anthracis
caagtagtattaacatttgatgatggaccagacccgaaatatacgccggaaatcttagatatattaaaagagaataaaataaaagctgctttttttgtccttggtgaaaacgcgcaactaaatcctagtattgtaaaaagaatatacgatgaagggcatgaaattggtaatcatactttcaagcatcctaacgtagctgatacgtctttactacgaacaaaagtagaacttaatacgacgcaacgtctgatccaggaaataactgggcattctacagttttgtttaggccaccgtacgaagcggatgctaacccggattcctcaaatgaaatattgcctattttacgggcacaaaatatgaactatacaatggtagcagaaaaagtggatcctgaggactgggcaacaccatcaacaaatgaattagtaaagcgtgctcttaatcctgtttataaaggagagggaaatattattcttctccacgatgcgggagggaatcgtacccatacggtagaggcgttgccgatcattattaaagagcttaaaaagcatggatatagttttgtaacaatttcagatttgatgaataaagaacgagatgaaattatgcccccggtttcttctgagggaaagcaatatttactttacaataaagctgtcttttcaggggcgggatactttaaacatatattaacaactattttttatatcgctattggattagggatttttcgattcttattcttaatttattttgcatggaagcaaaaaagaaaaacgctatctcgaactattcattcgtcctaccaaccttttgttagtgttgtcatagcagcatataatgaagaaaaggtgatagctaagacaattcgctcaattttggatagtaagtatggagagtttgaagttattgttgtggatgacggatcgacagatggtacgtcaaaagtaatgcaagaaacattttataaacaccctaaagttcgtttcattcagaaagaaaacggcgggaaatcatcggcaatgaacttagggtttcaacaatcgcgaggagagatcattgtcactttagatgcggatactattattgcgcaagacgccatttctctcatggttagacactttgaagatcaaaatgtagcagcagtttcaggtaatgtcaaagtggggaatagacgaaacttgttaactacgtggcaacatgttgaatatataacaggatttaatttagaacgtagagcttttgatgagttaaattgtattacagtagttccaggggctattggggcgtggcgtaagaagaatgtagttgaatctggatatttaagcgaagatacattagcagaagatacagatcttactattacatttttacgtcaaggacatagaattgtatatgaagaaaaagcgtatgcttttacggagtcacctgaagatgtgaaaagtctcattaaacagcgatatcgttggtcatatggtacacttcaatgtctttggaaacatcgaaaagcgttatgtaattcaaagcataaaacgttaggatttattgcattgcctaacatgtggttattccaatatgttctgcaattcattgctccttttgcagatatattaatgattatagggttatttagtagtgatccgctaaaagttttaggattttattttgtattctttttaatggatcttctcgcatctctatttgcatttaaattagaggaagagaatccgaaaccattagtatggttaattttacaacgctttatttatcgtcaatttatgacttatgttgtcgttaaatctatattctcatcgattcgaggagtagcggtaggttggaataagctaaagagagtgggaagtgta

SEQ ID NO: 9541 - DNA, 1935 bp, Bacillus anthracis
gtgatctttgtgtcaatggaacaaaagcaaatgcaagaaaattcatatgatgaaagtcaaatacaggtacttgaaggactagaagcagttcgaaaacgccctggtatgtatattggatctacaagtggaaaaggacttcaccatcttgtatgggaaatcgttgataatagtatcgatgaagcacttgcagggtactgtgacgaaattaacgttagtatcgaagaagataatagtattcgtgtaacagataatggacgtggtattccagttggtatacaagaaaaaatgggacgtcctgctgtagaagttattatgaccgttcttcatgctggtggtaagtttggcggcggcggttataaagtttctggtggtttgcatggtgttggggcatctgtagtaaatgctctatcaacagaactagaggtatttgtacatcgtgaaggtaaaatccattatcaaaaatacgaaagaggtattccggttgcggatttaaaagtcattggtgatacagatcaaacgggaacgataactcgatttaaaccagatccagaaatttttcaggaaacaacagtatacgaatttgatacactagcaactcgtatgcgtgaattagcatttttaaatcgtaatattaaactgacgattgaagataaacgtgaacataagcaaaaaaaagaattccattatgaaggtggaattaaatcatatgttgagcatttaaaccgctcaaaacaaccaatccatgaagagcctgtatatgtagaaggatcaaaagatggtattcaagttgaagtttccttacagtataacgaaggatatacaaataatatttactcatttacgaacaacattcacacgtatgaaggtggaacacatgaagtagggtttaaaacagctttaactcgtgtgattaacgattatgggcgtaaaaatagtattctaaaagatgcagacagtaatttaactggtgaggacgttcgtgaaggtttaactgcaattgtatcaattaaacatccaaatccacaatttgaaggacaaacgaagacgaaacttgggaatagtgaagcgagaacgattacagagtctgtgttttcagaggcatttgaaaagttcttactagaaaacccgaacgttgcacgaaaaatcgtagaaaaaggtacgatggcagcgcgtgcacgtgttgcagcgaaaaaagcacgtgaattgacacgtcgtaagagcgcgttagaagtttcaagtttacctggtaaattagcagattgctcttcaaaagatccagcaattagtgaaatttacattgtagagggtgactctgccggtggatcagcaaagcaagggcgtgatcgtcacttccaagcgattttaccactgaaaggtaaaattattaacgttgaaaaggcaagattagataaaatcttatctaacgatgaagtgcgtacaattattactgcaattggtacgaacattggcggagattttgatattgagaaagctcgttatcataaagttattattatgacggatgccgacgtagatggtgcgcatattcgtaccctattattaacgttcttctatcgttatatgcgtcaaattattgaacatggttatatctatattgcacagccaccgttgtttaaagtacaacaaggtaaaaaaattcaatatgcttataatgagaaagagcttgaaaagattttagctgaattaccagctcaacctaaacctggaatccaacgttacaaaggtttaggagaaatgaatccaactcagctttgggaaacaacaatggacccagaagtacgttcattacttcaagtttcccttcaagatgcaattgaagcagatgaaacatttgaaattttaatgggggataaagtagagccacgtcgtaactttatccaagaaaatgcaaaatacgtgaaaaaccttgatatt

SEQ ID NO: 9542 - DNA, 807 bp, Bacillus anthracis
atgaagttgaatagagcaatcggtgttatcgattcaggagttggcggcttaacagtagcgaaggaattaattcgtcagttgccgaaagagcgcattatatatttaggggatacagcacgttgcccttatggtccacgttctcgagaagaagtgcgccaattcacgtgggaaatgacggagcatttactagatttaaatatcaaaatgttagttattgcatgcaatacagcaactgcagttgtattagaagagatgcagaaacaattaccaattccagtggtaggagttattcacccaggatcacgtacagctttaaaagtgacaaacacataccatgttgggattattggaacgattggaacggtgaaaagtggtgcatacgaagaggcgttaaagtctattaataaccgtgttatggtagaaagtttagcgtgtccgcctttcgttgaacttgtagagagtggcaattttgaaagtgaaatggcatatgaagttgtaagagaaacgttgcaaccgctgaaaaatactgatattgatacacttattttaggttgtacacattatccgattttaggtcctgtcattaaacaagtaatgggagataaagtacaactcattagttcaggtgatgaaacagcgcgtgaagtaagtacaattttataccatagtaaaatgttgaatgagggagaggagcaaagcgaccatctcttcttaacaacagggaaaataggcttatttaaagaaattgcatcaaaatggttcggtcaaccgattgaaaatgtgaaacatattcatttagaaaaagaa

SEQ ID NO: 9543 - DNA, 1182 bp, Bacillus anthracis
atgaaaagagtatggaaatcaatggattattcattattacttcctcttgttatcttatgtgtgctgggagttataatggtatatagttctagttccattgttgcgatttcatcgaaatataactggccggcagatcacttttttaaaaaacaattagtttctcttgctattggaacggtaatgctagtgattgtcgctatagtaccttacaaattttggaggaagaaaatagttcttgcagctatggggttagggggtattggcttactaacagcagccttccttttcggtaaggtaatcaatggtgcaaaaggatggatactaggtatacaaccagctgagtttgtaaaaatagcagtaattattacgttagcaagtttttttgctaagaaacaagagaggcaaaccccttttttacaagggataatcccccccctatttgtggtgggtggatcgatggtattaattttattacaaaatgacttagggactgacatattaataggtggaacagtgttaattatgttcttctgttcaggagttaatgttaacctgtggataaaaaggtttatattaacatctatcgtatgggttcctgtattgtattttattgggaattataaattgaataattaccaaaaagcccgattttcagtttttcttgacccgtttaacgatcctcaaaatgatggattccaattagttaattcatttattggaattgcctcaggtgggttaaatggtagaggattagggaatagtatacaaaagtatggctacttaccagagccgcaaacagattttattatggcaattatatctgaagaactaggttttataggggtagctattattttaatctgtttattacttattattattattcgttcgtttagagtagcacaaaaatgtaaagatccatttggaagtttaattgcaatcggaattgcaagtttaattggaatacaaacttttgttaatgtcggtggtatgtctggattaataccgcttacaggggtacctttaccgtttattagttatggtggtagttctttattggctaatttaattgcgatgggtatattgttaaatatagccagcaatgtaaaacgacaagagaaagagcaaaatgagataatgaaagaaagagaacaagatggaccacgtcttgtagttgtaaaa

SEQ ID NO: 9544 - DNA, 1333 bp, Bacillus anthracis
agtgttactgcatttattatcggatttaaaatcggagaatatgctcttccaattatggcagttggagctatcttactattcttctttaaaaataaaaaagtacattctttaggtcaagttatattcggttttggtatgttattcttcggtttagaattaatgagcacaggtatgaagcctcttcgctctttagaatcattccaagaattaacggttagcatgagtgataatccaattctaggtattgttgttggtacagtcttcactttaattgtacaaagctcaagtgcaacaatcggtattttacaagaactattcggtcaaggtgcaatcgatttacaagctgcccttcctgtattatttggtgataacatcggtacaacaattacagctgtattagcagcaatcggtacttcaattgctgcaagacgcgcagcattagttcacgttatctttaatattgtcggtacaatcatctttacaattttattaataccttttacaaatttaattcaatacttccaaacgtcattaaacttaaatccagaaatgacaattgcatttgcacacggaacatttaacgtaacgaatacaattattcagttcccattcatcgctgtattagcatggattgtaacgaagattattcgcggtgaagatgctgctattgatttcgaaccgcaacatttaaatccaatctttattgaacaatctccagctatcgctttaactgaagcacaacaagagattattcgtatggctgagttttcattacatggattaaaagaagcaaaccaatttttaaacacacaagataaaaaacacgttgacatggctactcaattagaaggagctattaacaatttagataaaaaaattaccgagtatttagttttactatcagaaaagccactttcaccaacagactctgagaagcattcagttctagcaggtgttgttggcgatattgaacgtgtcggtgatcatgtagaaaaccttgtagaacttgttgatttccaaatttcaaaccgtgctttccctatcaaacgaagcactagctgaattaaatgaaatgctcgagttaacaatctcaacattacaagatgcaattaatgctttaacaaacttcgacactgaactagctcaaacggttattgcaaaagaacgtaaaattgaccaaatggaacgtgttcttcgtaaacgtcacgtattacgtctaaacgaacgtagctgttcaggtgatgcaagtatcatctacgttgatatggtaagcaacttagagcgtattggtgatcacgctgtaaatattgctgatggtgttttaggtgaacaa

SEQ ID NO: 9545 - DNA, 2505 bp, Bacillus anthracis
atgatcggtattttaaaaaaggtgtttgatgtaaatcaacgccaaattaaacgtatgcagaaaacagttgagcaaattgatgcattagagtcatctattaagccactaactgatgaacaattaaaagggaagacgcttgaatttaaagaacgtctaacaaaaggtgaaacagtagatgatctactacctgaagcttttgcggttgttcgtgaagctgcgactcgtgttcttggaatgcgtccgtatggcgtacagttaatgggtggtattgccttacatgaagggaatatctctgagatgaaaacgggtgaaggtaaaacgttaacatctacattacctgtatatttaaatgctttaacaggaaaaggtgttcacgtcgttacagtcaatgaatacttagcgcaacgtgatgcgaacgaaatgggacaacttcatgagttcctaggcttaacagtaggaattaatttaaacagtatgtcacgcgaagagaaacaagaggcttatgctgctgatattacgtatagcacaaataatgagcttggattcgattacttacgtgacaacatggttttatataaagagcagtgcgttcaacgcccgcttcactttgctattatcgatgaagtcgattctatcttagtcgatgaagcgcgtacgccacttattatttctggacaagctcaaaaatcaacagagctgtacatgtttgcaaatgcattcgttcgtacgttagaaaatgaaaaagattattcatttgatgtgaagacgaaaaatgtaatgttaacagaagatggtattacgaaagcggagaaagctttccatattgaaaacttatttgatttaaaacatgtagcacttcttcaccatattaatcaagcacttcgtgcgcacgttgtaatgcaccgtgatacagattatgttgtacaagaaggcgaaatcgtaattgtagaccaatttactggtcgtcttatgaaaggtcgtcgttatagtgaaggtttacaccaagctatcgaggcaaaagaaggcgtagaaattcaaaatgaaagtatgacgcttgcgacaattacgttccagaactacttccgtatgtacgaaaagttatctggtatgactggtacagcgaaaacagaggaagaggaattccgtaacatttacaatatgaacgttattgtaattccaacgaacaaaccgattattcgtgatgaccgtgcggatttaatcttcaaatcaatgaaaggtaaatttaatgctgttgttgaggatattgtaaatcgtcataaacaagggcaacctgttcttgtcggtacagtggcgattgaaacgtcagagcttatttcaaaaatgttaacgcgtaaaggcgtacgtcataacatcttaaatgcgaaaaaccatgcgcgtgaagcggatatcattgcagaagctggtatgaaaggtgctgtaacgatcgcgacgaatatggcagggcgtggtactgatattaagcttggagacgatattaaaaacattggtttagcagttatcggtacagagcgtcacgaaagtcgtcgtattgataatcagttacgtggtcgtgctggtcgtcaaggggacccaggtgttacgcagttctacttatcaatggaagatgaactaatgcgccgcttcggttctgataatatgaaagcaatgatggatcgccttggtatggatgattctcagccaatcgaaagtaaaatggtttctcgtgcagtagaatctgcgcaaaaacgtgtagaaggaaataactatgatgcacgtaagcagttactacaatatgatgatgtacttcgtcagcaacgtgaagttatttacaaacagcgtcaagaggtaatggagtctgagaacttacgcggtattattgaaggtatgatgaaatctacagtagagcgtgcggttgcgcttcatacacaagaggaaattgaagaagattggaacattaaaggtcttgttgactacttaaatacaaaccttctgcaagaaggagatgtgaaagaagaagaattacgtcgccttgctccagaggaaatgagcgaaccaattatcgcgaaattaatagagcgttacaatgacaaagaaaagcttatgccagaagagcaaatgcgtgagttcgaaaaagttgttgtattccgtgttgtagatacgaaatggacagagcatatcgatgcgatggatcaccttcgtgaaggtattcatttacgtgcttacggtcaaattgatccacttcgtgagtatcaaatggaaggattcgcaatgttcgagtcaatgattgcttctattgaagaggaaatttctcgttacattatgaaagctgaaattgaacaaaacttagagcgtcaagaagttgttcaaggtgaagctgttcacccatctagtgatggcgaagaagcgaagaaaaaaccagttgtaaaaggtgaccaagtcggccgcaacgatttatgtaaatgtggtagcggtaaaaaatataaaaactgctgtggtatcgggaag

SEQ ID NO: 9546 - DNA, 1270 bp, Bacillus anthracis
aagaaagcattatcattattaactgtttcagcattatcaattggtatgttatctgcatgcggaccgaaagattcagggaaaaaagaagaaagtaaagcaaagaaagattacgatctactcgtttgggaagatgataaaaaaggtgttggtctagaaccagcagtgaaaagctttgaggaaaaatataaagtaaaagtaaaagttgttgaaatgcaaatgacagatcaagtgaagaagttacgtcttgatggaccagcggggacgggaccagatgttgtaacattaccacatgatcaaatcggaaacgcagtaacagaaggtttactttctgaagtgaaagctgatgatgctgtaaagagtaaatttactgattcatcaatagaagcacaaacgtataacggaaaattatatggtttaccaaaagcaattgagacaccagtctttatttacaataaaaagctaatgccaaaagcgccagaaacgatggacgagctgtttaacttctcaaaagaatttacgaaagatggcaagtacggatttttagcattaggagataacttctactttgctaatgcatttatggcaggtatgcgtggctatgtgtttggtgaaaaagatgtgaaaaccaaatgcaagtgatgttggattaaataatagcggagcagtacaaggtgctgagtatcttcaaaaatggtacaaagaaaaattattctccgaaaggtattatcggtgaatctggtggacctgctgctgatggactatttaacgaaggaaaagcagctttttttatgagcgcccctggggttttccaagccttggaaaaagacgggaattggtttggggggttgttccaaggcggaaatttccaaatgggtcaaccattgaaaacgtttgtcggggttaaaggatggcatgtaacaagcttctctaaacaaaatgatttagctactaagttcactgaatgggtaacgaaccgaagaaacgcaaaaaattcgatttgagaaaacaaaagaaatcccttccagtaaaagcagtaatggaagatccaattattaaagataatgaagctgcaaaagcagttgcaacacaatctgaaaatggaattccaatgccaaatattccagaaatgcaagaagtttggaaaccagctggagatgcgcttcaattagttgttacagataaagaggcaccaaaggcggcgcttgatagtgcagtgaaacaaattaaaggtaatattgaggcaaatcatagcaagcaaaaataaggggga

SEQ ID NO: 9547 - DNA, 981 bp, Bacillus anthracis
ggtgggataatgaccatgaaccccatttcttcaacgatgaatacacttatcgtattaacactgatctcatttccattacttattctcattgcggcagtgggaggatattttattacgcaaagagcgtttcgacctgtgcagcaaatgagtgattcagccagtaaaattggtgatggtcaagcacctttcgaagagaatttatttcaaaggttcaccgaaaagacgaaatgtatcatttagcacaaacttttgacaaaatgtttgagcgattggagacatcatttgaaagtgaaaaacaatttacatctgacgcatctcatgaattaagaccaccaacatctgttattatttcgcaatgcgaatacgcttattcccagagaaataatccgaaagaaatggaagaatcgttagaagtaattttaaagcaatcacgtaaaatgtccgcgctaatctcacaactcttattattagcaagagctgaccaaggtaaatgataatactttccaatttgaatgtatcaatatgagtgaattaacggaaatcgttgtagaagaactttcattaatggttcaagaagcttcgattgatataacaacctcatatagaggaagacctgtttataaaagcagatcaaacattgatgatgcgtttattaatgaatttattaacgaatgcgattgcttatagcaaagcgaacggaactgttcatatgcaactgttccgtgacgaaaccaacataataggtaaagtctccgataatgggcataggcatcagtggagcaacatattacgaaaatttgggaccgcttctatcgagttgacgcagcacgaacatcttcaaacattggaaatacaggtttaggattgtcgatggtaaaatggattgtcgaactgcacggaggagaaataacagttgaaagtggattaggagaaggcagtacttttacctttaaactaccaattgaaaaacaaagcatagtt

SEQ ID NO: 9548 - DNA, 630 bp, Bacillus anthracis
atgaataagcaaagaatttatagtatagtagcaatcctcctatttgttgtaggtggtgtgttaatcggaaagccattttatgatggatatcaagctgaaaagaaacagactgaaaatgtacaggctgttcaaaaaatggattatgaaaaacatgagacggaatttgtagatgcttcgaaaattgatcaaccagacttggcagaagtagcgaatgcatcattagataagaagcaagtaattggtcgtatttcgatcccgagtgtttcattagaacttcctgttttaaaatcttctactgagaaaaacctattatcaggtgcagcaacagtaaaagaaaatcaagtaatgggaaaagggaattatgcattagcaggacataacatgtctaaaaaaggtgttttatttagtgatatagcttctctaaaaaaaggcgataaaatttatttgtatgataatgaaaacgaatatgaatatgcggttactggtgtatctgaagtaactcctgataagtgggaagttgttgaagatcatgggaaagatgaaatcacgcttattacatgtgtatctgttaaggataattctaagcgttatgttgttgctggtgatttagtaggaacgaaggcgaagaaa

SEQ ID NO: 9549 - DNA, 225 bp, Bacillus anthracis
tttagaaacactcgtaatattggtatcatggctcacatcgatgctggtaaaaccacagctactgagcgtattctgtactacacaggacgtattctcaaaatccgggaaactcacgaaggtgcatctccacatggactggatggagccagaagcacagcgtggtatcacaattaatttctgctggcactacagcacaatggaaaagtccccctgttaacattcctt

SEQ ID NO: 9550 - DNA, 723 bp, Bacillus anthracis
atcgacaagtattcaccactcccgatctattatcagattcaagagtgtttgaaacagctaattgaggacggcgaatggaagccgggagataaaatcccatctgtgaatgaactttgcgataagttcgaagtgagtcgtatgacaatcagacaggcgattaataatttagtggaacaaggttatttatatcggaaacgtggaatcggtacgtttgtccaacttccgaaagtggaacaaaaattgcaaggaatgacaggattcacagaagatatgatttctcgtggaatgaacccaagtagtcaattgctaagtttccgcctagttccagctactgcgaaaatagcagaccggctgagaatacaggagggagaatcggtttatgaagtgagacgtattcgtttagcggatgatgaaccgattgcttttgagacgacatatttgtcgccagctcttgtaaaagatattaacgaagaaatattttgcacatctttatatgaacatctagagaaaaaactgggcttttaactttgttagcgctactccatcaattggagctttcaattgcaaccgataatgaagcggaacatctgcatattccaaaaaagggcgcccatgcttttaaagcgtcaatggtcatattcagagggtgaagtcccgttagagtatgtgaaatgtatttatcgcggggatcgttataagtttattacgaacattcgcacgtaa

SEQ ID NO: 9551 - DNA, 1098 bp, Bacillus anthracis
atgattacattacaacgtacaccgttatttgatgtatacgcgaagtatggtgggaaaacaatcgacttcggtggttgggagttaccagttcaattttcaagcattaaagaagaacatgaagctgtacgtacagcggcgggtttgttcgatgtgtctcatatgggagaagttgaggtaaaaggtgtagatagtttagcatttttacaacgtgttgttacaaatgacgtatctaccttaaaggtaggaggcgcacaatatacagcaatgtgctacgaaaatggtggtacagtagatgatttattaatctacaaacgtggtgaagaagactatttattagttatcaacgcatcaaatatcgagaaagattacgaatggttagctagccatgtaattggcgatgcgacagtagtcaatgtttctagcgaagttgcacagcttgcaattcaaggaccaaaagcagaaggcattttacaaaaagttgtgtcagaagatttaaaagaaattaagttctttaaatttaaaaacgatattcttgtagatggaattccagcacttgtatctcgtacaggttacacaggtgaagatggatttgaaatttactgtaagagtgaagatgcagcaaaactttgggagaaacttcttgaagttggagcagaagaaggcttaaaagcatgtggtttaggtgctcgtgatacacttcgcttcgaagcaacattaccactttatggtcaagaattatcaaaagatattacaccgattgaagctggaattggctttgcggtaaaaacaaataaagaagcagacttctttggaaaagcaacgttaaaagagcaaaaagaaaacggtgcgcctcgcaaattagtcggcatcgaagtaattgaacgtggaattcctcgtacgcattaccctgtatttattggagaagaaaagatcggggaagtaacaagtggtacacaatctccaacgttaaagaaaagcattggtttagcactaattgatgtaaaatacgcagcagttgatacagaagtagaaattgaaattcgtaataaacgcgtcaaagcagtagttgttccaacaccattttataaacgttcaaag

SEQ ID NO: 9552 - DNA, 1395 bp, Bacillus anthracis
atgactattcacatttataatacgttaacacgtcaaaaggaagagtttactccattagaagaaaataaggtaaagatgtatgtatgcggacctacagtttataactatattcacattgggaatgcaagaccacctatggtatttgatacggtgcgtcgttatttagaatataaagggtacgatgtgcagtatgtatctaactttactgacgtagatgataaattaattaaagcagcaaatgaattaggtgaagatgtgccgacaattgcggaccgttttgtagaagcgtattttgaagatgtaacggcactaggttgcaaacatgcaacagttcacccgcgtgtaacggaaaatatggatatcattattgaatttattcaagaacttgtgaataaaggatatgcatatgaatccgaaggggatgtgtactttagaacgaaggaattcgaagggtacggtaaattatcacatcaaccaattgcggacttacgtcacggcgcgcgtattgaagtaggagaaaagaaacaagaccctcttgattttgctttatggaaagctgcgaaagaaggagaaatcttctgggaaagcccttggggtcaaggtcgcccaggctggcatatcgagtgctcggcaatggcgcgtaaatacttaggggatacaattgatattcatgctggtggtcaagacttggcatttcctcatcatgagaatgaaatcgcgcagtctgaggcgttaacaggaaaaacatttgcacgttattggatgcacaatggatatattaatattaataatgagaaaatgtctaagtcacttgggaacttcattttagttcacgatattattaagcaatatgatccgcagttaattagattctttatgctatcagtacattatcgtcacccaattaatttcagtgaagagttattacaaagcacaaataacggactggaaagaattaaaacggcttacggtaatttaaaacaccgtatggaaagtagtacggatttaacagatcataatgagaaatggttagctgacctagaaaaattccaaactgcatttgaagaagcgatgaatgatgacttcaatactgctaatgcaatcactgagttatataatgttgcaaatcatgcgaatcaatatttactggaagaacatacgtcaacagtggtaattgaagcatatgtaaaacagcttgaaacattatttgatattttaggattagaattagcgcaagaagagttgcttgatgaagaaattgaggcacttattcaaaaacgcattgaagctcgtaaaaatcgtgattttgcattatcggatcaaattcgcgatgatttaaaagaccgcaacattattttagaagataccgctcaaggtacaagatggaaaagagga

SEQ ID NO: 9553 - DNA, 535 bp, Bacillus anthracis
atggcgcaaattcgtattcatgaagtaaatactcgcattgaaaatgaagtgaaagtatctaaatttctacaagaggaaggtgttttatatgagaaatggaatatttctaaacttcctcctcatttaaatgaaaattattcgttaacagatgaaaacaaggctgaaatattagctgtgttttcaaaagaaattgctgatgtttcagcgcgccgaggttataaagcacatgatgtaatttcactttcaaatagcacacctaatcttgacgaactattaattaatttccaaaaagaacaccatcatactgatgatgaagttcgctttattgttagtggtcatggcatctttgccattgaaggaaaagatgggacattctttgacgttgaacttgagccaggcgatctcatatctgttccggagaaatgcaagacattattttaccttgcaagatgatcgtcaagttgtagctattcgtatttttgttacaactgaaggttgggttccaatctattaaggtagttagttgaataaaagg

SEQ ID NO: 9554 - DNA, 2007 bp, Bacillus anthracis
ttttattatcctggttatgtattgggcattttttgtggtttgggcgtcattccaatcctctgctaccttcattttaagatgggggataatacccctttttttaattttttgtatcgtcctttttgttgttgtacgatttgaacttactttccaaaagaattttgaaaaacatacgacagatatgattacaagggtaaagaaagtgagtaatgaagcatttaaccagatgccgattggtattttgttatacaataaggattatgggattgattgggcaaatccttatttatcttcatgtctgggacagcatgcattagctggatggcacctttatgatgtatcagaaacgttacttctttttattaagggagaaacttccggagaatatagtttctttaaataatcggaaagttccgtgtctttgtaaggaaagaagaaaagttaatttatttctttgatgtaacagaacaaacagaattggaaaaaaatgtacgaagatcaccgtacggttttagctgtaatttatttagataattatgatgaaagtacacagggatttagatgatcaattacgttcgaaatataacaagtcttgtgacatcgcgtctaaatgaatgggccgttaagtatggggcgtatttaaaacgtgcatcttcggaaagattcttcgttgtactaaatgaaagtattttagcacagatggagaaagggaaatttagtattttagatcaagtacgtgaagaaacatccaaaaggaatataccacttacattaagtgtaggtgttggatcaggtgatttacctttatctgagcttggagctatggctcaatcaggtttagaccttgcgcttggacgtggtggaggatcagtagctattaaacaagcgacagggtaagttaagttttatggtgggtagacaaatccagtggaaaaacgtactcgtgtacgtgccagagtgatttctcatgcattaaaggatttagtactagaaagtagcaatgtcattataatgggcataaagggttcctgatagggacgcaatttggtgtgggattggttatttaaagtgtgggcaattaaatgaacggaaaggaatatattggcttcgatgaaaatgattctgataagggaattaaaacgtttaatggataaagtgaaaccaaaatgaagagttatggtcttcactttattacaccagaacaagcgatggaatttgcaaatgatgattcattacttgttgttgttgatacgcataagctttcaatggtgatggaagaaaaactgttacgcaaaattgaaaatgtagttgttattgaccatcatcgccgaggagaagattttattgaagatccattgcttgtttacatggagccatacgcttcttccacggcggaacttgttacggaattacttgaataccaaccgaaaaatttaaaaatgacaatgttagaagcgacagcattattagcaggtattattgttgatacgaaaagctttacattccggacaggtgctcgtacgtttgatgctgcttcttatttacgctcacacggtgcagatactgtacttgtacaagagcttttaaaagaagatatggatcagtatttacgggttgcaaaagccattaaaaatgcgtacatttatacaaatggaattgcgattgcaaaagttgatagcgatgattactacgatcaagtgcttattgcgcaatcagcggacacattattaacaatgacaggaattattgcatcatttgttattgcaaaacgtggcgagaatttcattggaattagcggcaggtctttaggtgaagtgaatgtgcagctaattatgccacctcttatttgagggtgggcatttaacaaatgcagccacaccaaatgaaaaatgttaccagtagatgaagctgaggagaagctttcgatttgttattgatgactatttacagggaggcacacaatcatgaaagtaattttttctaaaagacgtaaaaggtaaagggaaa

SEQ ID NO: 9555 - DNA, 1377 bp, Bacillus anthracis
atgtcaaacagatttgcagtgattctagctgcaggtaaaggcacacgtatgaagtctaagctatacaaagtgcttcatcctgtatgtggaaaacctatggtacaacatgttgtcgatcaagtatctcaattagggttgcagaaacttgtaacagtcgtaggacatggtgctgaaatggtacaagaacagctaggaaacgtaagtgagtttgcattacaagcagaacaacttggtacagcgcatgctgtagatcaagctgcaggtgtacttgcaaatgaagaaggaacaactttagttatttgtggtgatacgccgctaataactgctgaaacgatggaagcattacttcagcaacataaagaagcaggggcaatggcaacggtgttaacagcttacatagaagaacctgctggatatggtcgtatcgttcgtaatgagaatggtcatgttgaaaagattgttgagcataaggatgcaaatgagaaagaattagctattaaagaaatcaatacaggtacgtattgttttgataataaagctttattcgcttcactttctaaggtttcaaatgataacgtacaaggtgaatattacctgccagatgttattgagattttaaaaaatgaaggtcatattgtatcggcttatcaaacagagcacttcgatgaaacgttaggtgttaacgacagagtcgctctatcgcaagcggaaattattatgaaaaaccgtatcaaccgaaagaacatggtaaatggtgttacaattattgatccaagtaacacgtatatttctgctgatgcaattatcggtagtgatacagttcttcatccaggaacaattattgaggggaacactgtaattggttctgattgtgaaattggaccgcatacagtaattcgcgatagtgaaattggagatcgtacgacaattcgtcaatctactgtacatgatagtaagcttggtacagaagtatcggttggtccatttgcacatattcgcccagattcagttattggagatgaagtacgcgttggaaacttcgtggaaatcaaaaaaactgtttttggtaatagaagtaaagcttcacacttaagttatatcggggatgcgcaagttggagaagacgtgaatcttggttgtggttcaattacggtgaactatgacggtaagaataaattcaaaactgtgattggtaacggggtatttattggatgtaattcaaaccttgttgctcctgtaacagttgaagatggtgcttatgtggcagcaggctctacaattacagagaatgttccatcaaaagcattatctgtagcacgtgcacgtcaagttaacaaagaagactatgttgatcaattgctgaataagaaaaaatca

SEQ ID NO: 9556 - DNA, 636 bp, Bacillus anthracis
atgaatcgaaattgggaagaatttttagcaccttaccatcaagcggtggcagagctgaaagtgaaactaaaaggaatgcgtactcaatttgcaatgttaacagagcattctccaattgagtttgtaacagggagggtaaagtcggttgcaagcattattgataaagcggagaagagaaatgtaccgttagaccgactgagagaagatatgcaagacatcgcaggtcttcgaatgatgtgtcaatttgttgatgagattaagcctgttgtagaatatcttagaaaacgaaatgactttgaaatcgtggaagagcgtgattatgtcacgcaaaagaaagatagtggttatcgttcttatcacgttgttattagttatcctgttcaaacaattcaaggagaacaaaaagtgttggtagaaatccaaatacgtacgttagcaatgaacttttgggcaacaattgagcattctttaaattataaatatagtggacgttttcctgaagatattaaaatacgcttgcaacgtgcagcagaagcagcatttttattggatgaagaaatgtcttctattcgtcttgaaattcaagaagcacagaaagctttttcaagaaagcaagaaacgaaagattctgaatca

SEQ ID NO: 9557 - DNA, 264 bp, Bacillus anthracis
gtgaaaagtatggcaaacatcaaatctgctatcaaacgcgctaaacttagcgaagagcgtcgtgcacataacgcttctatcaagtctgacatgcgttctgctgttaaaactgtagaagctttagttactaataacgatcttgaaaatgctaaagaagctttcaaaactgcttctaaaaaacttgacaaagcagctcgtaaaggtcttatccaccaaaacgctgcagctcgtcaaaaatctcgcttagcgaaacaagtaaacgcg

SEQ ID NO: 9558 - DNA, 600 bp, Bacillus anthracis
atggctcgttatacaggtccagcttggaaactgtctcgtcgtcttggaatctctctaagcggcacaggaaaagaattagaaaaacgcccttacgcaccaggtcctcacggtcctaaccaacgtaagaaactttcagaatacggtttacaattacaagagaaacaaaaacttcgtcacatgtacggcatgactgagcgtcaattccgtcgcacatttgaccaagcaggtaaaatgcctggtaagcacggcgaaaacttcatgatccttcttgaagctcgtcttgacaacttagtttaccgtatgggcttagctcgcactcgtcgtgcagctcgccaattagtaaaccacggtcacatcatggttgatggtgctcgcgtagatatcccatcttaccgtgtaaaacctggtcaaactatcagcgttcgcgaaaaatctaacaaccttgttgttgttaaagaagcgatcgaagttaacaacttcgtaccagaatacttaactttcgatgctgacaaattagaagctacttacactcgtcatgctgagcgcgctgagttaccagctgaaatcaacgaagcattaatcgtagagttctactctcgt

SEQ ID NO: 9559 - DNA, 1118 bp, Bacillus anthracis
atgctttttcctgatttagcgaataaaattgtacgagaagtacgcagactaattaaagaaaatattattatcattaatatacaaggcgttattatcgcaagtacagatatagaaagaatcggtcaatttcatgaaggcgcactccgctgtgcgaaacaaaagaaaactgtcattatttacaaagaagatgaacgacgtttgcatggcgtaaaggcggggtatgaatctccctttactattccatgacgaagtaattggtgtcattggaaatacaggtgaaacctgaaacatttccccattacggagaaatattacgtaaaatgaccgaactactcattcacgaaaactacttttttaaacaagctagaattgaaacaccggtccttatgaagcattggcctttggaatgggctccaaaatacagactggtctccaagctttctcgatcgtgccaaaacacttggtattgatttatataagaagaaacaacttattttggtctctatcgatcaaaatgacacgatgcttcagcgtaagatttggcaacacgtacgccatctattaaacaaggagcatctatttggtcgctggggaaatgatcgattcattttatttacagcgatgagctctaaagagcaaacatatcaatttttaaaacgattaaaacaagactgtgaaactttattttctattcctttatatatcgggaattggacaatcgcgttacgccaagcaatatgaatttatcgtacgaacaagcattacaagctctttccgtatcacttgcaacgaaaaagattgtatttaatgacgatttacgtttagaaatgtgcttacaagatatttctgcggaaacgagagaacagtttctaaagcgcaccatcaaaaacttactatcatcgcctgagcttatgcacactttacgtttatttatcgattataaccaatcctataaacaaacagcggagcaattacatatacacattaacacattgcattacagacttaaaaagattgaggagtatacaggacttgatccgaaacaattcaaagacttaaacattttatacttctcgctcctcttattagataatcacacaaaaaagaatgataaaata

SEQ ID NO: 9560 - DNA, 861 bp, Bacillus anthracis
ttgaagtttaataaggacgtaaaagaaaaacttttatttcatgttacaataaacgtaattgttattagaaatatgatagaaaggttgaaagtaggtgacatcatgggaaaaatcattgctattgccaatcaaaaaggtggcgttgggaaaacaacaacatctgttaatttaggggctggattggcacaagtaggtaaaaaggtccttcttgtagatattgacgctcaaggaaatgcaacgactggtgtgggaattgaaaaatccgaattagatcaatgtatttacaatgttcttgtggaagatgcagatgttcaaggggttatacagaaaaccgcaactgaaaacttagatgttctacccgctacaattcaattagcaggtgctgaaattgaattggtaccgactatttcccgggaagtacgtttgcaaagggcattacagccagttcgtgatgaatatgattatattattatcgactgtcccccgtccttagggttattaacgattaatgcattaactgcagcggattctgttattattcctgttcaatgcgaatattacgcactagaagggttaagtcagctattaaatacagttcgacttgtgcaaaagcacttaaataaaaatctagcaattcaaggtgtattgctaacaatgttggatgcccgtacaaatttaggcattcaagttatagatgaagtgaaaaaatactttagggataaagtatatcgttcaattatccctcgtaatgttcgtttgagtgaagcaccaagtcatgggaaaccaattatgcagtatgacgctaaatcaagaggggcagaagtatatatagatttagcagaggaagtgattgcaggtggc

SEQ ID NO: 9561 - DNA, 792 bp, Bacillus anthracis
atgcagcagttgattattggaaggtatattccagggaattctcttattcatcaacttgatccacgtacgaagctgctgattgtctttttatatgtatttgttgttttcttagcaaataatgcgatttcatatggatttttatttttatatgcactcattgctttattttttgcaaaagtgccgattcgttatgtactttcgggcttaaaaccaattctatggatttttctttttacatttttcctgcatattttcacaaataaagaaggggaagtattattccagcttggttggttttcgatacatgaaaaaggattagagcaagggatatacatttctatacgattcttcgttattattttaatgacgacattattaacgttaacgacgacacccattgagattacagatggtttggagacgttattaaagccgttgaagcgtataaaagttcctgttcatgaaatcgcattaatgatgtcaatttctcttcgttttattccgacattaatggatgagacgagtaaaataatgaaggcacaatcgtcacgtggtattgatttcgcagggggaccgataaaagatagaatgaaagctatcatttcactactcgttcctctatttatcagtgcttttaagcgtgcagaggacttagcaatcgctatggaagctcgtggatatcaaagtggcgaagggcgtactaaatttaggcaactacgctggaaaacaagcgatacagtaacgattataagcttactttgtttagcttgtattttggcatgggtgcgatcg

SEQ ID NO: 9562 - DNA, 659 bp, Bacillus anthracis
ttaatttctaaaggtatgtatcgccctggttacaccaggagaacgagaaattaaagagttagagaaaaaggaagtttggaaagagttacgtgcggagtatgagaaactgaaaaattggttaaaaggtccggatgtccctgtctttattttattatcagactcctataatcgaacggtacaagaagagtataacggcagggctggattatctatgcgccacgttattttcttattcgtatgtggacggaattcggtggaagaattaaaagtgctgttggcgcatgaatatcatcacatatgcaggttacatcaaatttgagacgaaagaaacagaatatacattacttgatacgatgattatggaaggattagctgagcaagcggtaacggaaagatattcagaaaaaaacaatgcaccgtggacgacgtatctttcaaaggaagaggctatatattattggaaaaatgttgtacatgaaagaataagtataaagcgaggaacaagggagcacgacatcttattaaatggattgcactcttatccgaaattgcttggctatgcgcttggatttcatattgtcaaagattgtgtaactttgcaaggagaagatacactttctttattgcctatagatgcgaaagaaatattaaataaagcc

SEQ ID NO: 9563 - DNA, 1584 bp, Bacillus anthracis
ttgacaacatttcgagaattaggattaagtgattctttactgcaatctgttgaaagtatgggctttgaagaggctacgccaattcaagctgaaacaattccacatgcattgcaaggtaaggatattattgggcaagcacaaacaggtacagggaaaacagcagcattcggattaccactattagataaagtggatacacataaagaatcggttcaaggtattgttatcgcgccaacgcgtgaattagcaattcaagttggagaagagctatacaaaattggtaaacataaacgtgttcgtatcttaccaatttacggtggtcaagatattaaccgccaaattcgtgctctaaaaaaacacccacacattattgttggtacgccgggtcgtattttagatcatattaaccgtaaaacacttcgcttacaaaacgtagagacagttgttcttgacgaagcggatgaaatgttaaacatgggcttcattgaagatattgaagcaattttaacagatgtgccagaaacacatcaaacattactattctcagcgacaatgccggacccaattcgtcgtattgctgagcgtttcatgactgagcctcaacacattaaagtaaaagcaaaagaagtaacaatgccaaacattcagcagttctatttagaagtgcaagaaaagaaaaagtttgacgtgttaacacgcttactagatattcaatctccagagcttgcgattgtgttcggtcgtacaaagcgtcgtgttgatgaattatcagaggcattaaacttacgtggttatgctgcagaaggtatccatggtgatttaactcaggcgaaacgtatgtctgtattacgtaaattcaaagaaggttctattgaagttcttgttgcaacagacgttgctgcacgtggtcttgatatttcaggcgtaacacacgtatataacttcgatattccacaagatccagaatcatatgttcaccgtattggccgtactggtcgtgcaggtaaaaaaggtattgcaatgctatttgtaacaccacgtgaatctggacaattaaaaaatatcgagcgtacaacaaaacgtaaaatggaccgcatggatgcaccgacacttgacgaggcactagaaggtcaacaacgtttaatcgctgaaaaacttcaaagcacaattgaaaatgaaaacttagcatactacaagcgtattgcagaagaaatgttagaagagaacgactctgtaacagtagtagctgctgctttaaaaatgatgacaaaagagccagatacaactccaatcgctttaacatcagaaccaccagttgtttcaagaggtggcggttctaaaaaacgcggcggtaacggaggcggataccgtgatggtaatcgtaatcgtagtcgtgatggacgcggtggcgatggtcgtaaccgtgaccgcaatcgtgatggtcgtaatcgtgacggtaaccgtgatcgcaatcgtgaaggtagccgtgatggtaaccgtggtcgtcgtggcgaaggtcaaggacgcccaggatcttcaaacggacgcggcgaaagaaaacatcatagccgtaagccacaagct

SEQ ID NO: 9564 - DNA, 1413 bp, Bacillus anthracis
gtggtacaaatagaaaagaagttaggattttttccattaattgcattagtagtcggaacaatggttggtggcggtgtttttagtttaccgcatgatttagcagtaggagcaaatagtggctctatcataattggctggtgtattacagcgatgggaatgattccactcgcgctcgtatatcaaacgttagcaagaaagaaaccagagcttgagggcgggatttatagttatgcacgtgctggtttcggtgaatatattggatttaacagtgcttggggatactggttagcaggaattttaggaaacgttgcaacaatcatgtcactgattattacattatgttatttcttcccaattcttaagggcggaaatagtgctgcgtctatcgtaagagcatcactgttattatggacacttcattttctaattttattaggcattcgagaagcatctattatgaatgtgattgcaacgataggaaaattggttccaatcgtattatttattgttgtaatggtaacagcgtttcmctgggatacatttacacaggatttttggggggaaggaactatttcagtttcctctatactaggtcaagtgaaaaatacaatgcttgtaactctttgggttttcatcggggttgaaggagcggtagtattatctggaagagcaaaaaatagtcgagatgtcgggaaagcgacagtattaggacttattttagtaatgtctatttatattttaatttctgtcttgtcaatgggagcgatgacaagaggagaactttctgttttagaaactccgtcaatgggacatgtattagaacatgttgttgggacatggggggcagttgcgataaacatcgggttagttgcttcacttgtaggtacattaataggctggtttttacttgtttctgaaatttcccacgtagcaggaaaagatggcgtgtttccgaaagtctttacgaaaacaaataaaaaacaaacgccgcatatggcattatggatctcaaatggcgttgcccaagttatatttataatcgttctgttttcagaatcaacatatcaaattatgtatttcatagcgtcaacatcaattttagtaccatatttattatcagcgttattccaatttaaattagtaattacaaatgaactaaaagatgcaaaagtcaaaaatggttcgctagctttaattgcttcactttactctgtatggcttatttatgcagctggtttgaagaatttattgctcgtttcaatcgtatacgggattggaatcattgtttatgtgtatgcaagaaaagaaaaaggaaatcgttgttttactggtatagagagatatgtaatgtgggcaattgtagtagcagctgttacatctctatatatgttattgactggaaatataaaaatg

SEQ ID NO: 9565 - DNA, 456 bp, Bacillus anthracis
atgtacatttatcataatggacttattattcgtgagggaacgaatggtgtacctgcatatgcaattaagactttatttgaagatgccggttggagcaatgagaatatcccttcttggcaaattgaaaaatttacgatagcatttgaaaattcaacatgggcattcacaatttgggatgaagaagagatgattgcaatggttagagtcatttctgatggaatcatggtcgcgaacatagtaaatttagttgtgaaatgtgaatatagagggaagggattaggtaagaaacttgtcgctctttgtttgcaaaaattgccacatggtgactggtttgcacatacttctgcgaataattttgatttttatagaagttgtggttttgaggtgagagagttatcgagaaatggaacatgtgcgtactatggatatcaaatagccaaaaaagaggggcaccga

SEQ ID NO: 9566 - DNA, 741 bp, Bacillus anthracis
atggatagaataaaatgtacggttgcatatgatggcatgcatttttgtggttatcaaattcaaccgcagcatcgtactgttcaacaagagatagagaaggctttacagaaattgcataaaggagaacttgttcgtgttcaggcatcaggcagaacggattctaccgttcacgctaaaggacaagtgatacactttgatacaccgttgtctcttgaagagtggcaatggagtaatgcattaaacacaatgctaccagatgatattgttatcacacaggtagagaaaaaaacagaagaatttcatgctcgatacggtgttgagagaaaagaatatcgttatcgtgtactagtatcaaagactgcggatgtattccgtagaaattatgtatatcaatatccatatccactcgaagtaaactctataagaaaagcgatcccttattttattggaacgcatgatttcacttctttttgttcggcaaaaactgacaaaaaagataaagtgagaacaatttatgaaatcgagctaattgagcaagacgatgaattaatttttcgttttgtagggaatggatttttatataatatggtcaggattattgttggtacgttacttaacgtaggccaaggaaagcttgatccggatagcattccagagattttagcgaaacaaaatcgtcagtttgctggaaagatggctcctggtcatgggctttatttatggcaggtaaactataacaac

SEQ ID NO: 9567 - DNA, 939 bp, Bacillus anthracis
gaaaaagtactagttttcgggcataaaaacccagatacagatgcaatttgttctgcaattgcttatgcagaattgaaaaaagaattaggaatgaatgctgagcctgtacgtttaggtgaaatcagcggtgaaactcaatttgcgttagactattttaaagtagaaggaccgcgttttgttgagacagttgcaaacgaagtggacaacgttattttagtagaccataacgagcgtcaacaaagtgctaacgatatcgaatctgttcgtgtgttagaagttattgatcatcaccgtattgctaactttgaaacaagcgatcctatttactaccgttgtgagccagttggttgtacagctacaatcttaaacaaaatgtacaaagaaaacggcgttacaattcgtaaagaagttgcaggtttaatgttatctgcaatcatttcagattctttactattcaaatctccaacttgcacagagcaagacgtaacagcagctcgtgaattaccggaaaatccctggtgtaaatgctgacaaatacggcttagaaatgttaaaagctggtgctgaccttaagcggaaaaacaagggaacgaattaatctctccttggaccctaaagaattcccaaatgggaaatggcgaaagttggaattcgccacaagtaaaacgctggtggatacaaaatgaagtttctttgtacaccaagcggaacttgaaaaagttatctctgcagtagtagaagaaaaagggtttagacctattcttattcgttgtaactgatatcttaactaacgattctgtcggtcttgcgatcggtaaagcagcaaacattgttgagaaagcatacaacgtatctctagaaaccaatactgctacattaaaaggtgttgtatctcgtaagaaacaaatcgtaccagtattaacagaagcattccaagct

SEQ ID NO: 9568 - DNA, 2176 bp, Bacillus anthracis
atgaaaatgttagtgaaggaattaggctttaccgaaaagcaagttcgtcatgttattcaattaacagaagaaagtaacacagttccatttattgctcgttaccgaaaagaatggacaggctctttagatgaagtgcaaattcgtacaatttttaaagagatggcgtagatataatgcagcttgaagatatgaaagaagaaggtcttcctcttatttgatgagaaaggaaaactgacacgagaattacctctgcaaatttttaaagctacaaagttgcaagaagtagaagatttatatcgtccatataaagaaaagagaagaacgaaagcaacgattgcaaaagaaaaaggattagagccattggctgaatggttattgttatatacgaaagaagatccgaatcagaaggcaatggagtttataaatgccgagaaagaagtgcaatctgcagaagaagcattacaaggtgctcaagacatcattgcagaaatcgtttcagatgaagcggcatatcgtagttggattcggaatgttacttttagaaaagtgtgttatgtcttcggttgtaaaaggatgagggggaaggttgaaaggaattttttgggaaatggtttgcggataaggaaaaccttttgcagaaagtagtaccgcatcgggtgttagcgatgattcgcggtgagaaagaaagatatattgagagtttctgtgtttccgccagtagatgagatagtacttttcttatataagaaagtaattcgcgataacgattcaaaaagtgcacagtatgtaaagttagcaattgaggatggttataaaagattaattcaatcctctatgaaaagagagattcgaaaagaattaacagaaacagctgaggaacaagcgatacatattttctctgagacttacgtaaatttgtatttacaccctcccaatgaaaggaaaaggttgtgttagctgtagaccctgcatatagaaccggggtgtaaattagctattgtagacgataccggggaaagttttatatattggatgttatttatcccgcatccaccagtgcgtaaatatgaagatgccaaagcaaaagttctttctattatagataaataccaagttgagatgattgcgattgggaatggtacagcttctagagaatcggaagaatttatagttgatgtattacaaaatgtgaaacgagaagtcttctatattattgtgaacgaagctggtgcgagtgtgtattcggcttctgatttagcccgtgaggaattcccggatttacaggttgaagaaagaagtgcggtttctatcggtagacgtctgcaagatccacttgctgaacttgtaaagattgatcctaaatcagttggggttggacaatatcagcatgatgtatctcaaaaaagattaaatgaatcattaacgtttgtagtagagacagcagttaaccaagtcggtgtgaatgtaaatacagcttcagttgcatggtggcaaatatgttacagtcttatcaaaaacttgtgcgaaaaaatatgtagccaaagcgtgaagaagaagggaaatttacaaaaagaacagacctaaagaaaataccacgtctaggtgcgaagacatatgaacaatgtataggtttcttgcgtatattagaaggggcaaaatccgttagaccgtacaggtattcatccggaacaatataaaaatgttgaattgttattaaagagtctagggttatcaaaagatgacgtagggcaaccacaattacaaaagagtttagaagaagtggagatttctaagttgtcggaagaaacgggaattggagagccgacattagtcgatattatagatgcactcattagtccagagcgagacatgagggatgagttgcctaaaccgcttctgaaaaaagggattttgaaattagaagatttaaaacgtggtatggaactggaaggaacagcacgtaacgttgttgattttggtgcttttgttgatgtaggtgtgaaacaagatgggttagtacatatttctaaactaagcaaacaatatgtgaagcatccgttagatgttgtatctgttggacaaatcgtcaaagtatgggtagatgatattgatacgaaaaaaaggtcgtgttgcattatctatgttgccaattgaatagtaagagaagagagcagat

SEQ ID NO: 9569 - DNA, 504 bp, Bacillus anthracis
atgactgaagtaaagggaaaaacagcaaatgaatccagagtgtttaaaacgagccgagtatttccgacagatttaaatgatcacaatacgctatttggtggaaagatattagccgagatggatatggttgcttctatttcagcaacgaggcatgcaagaaaagaatgtgtaacagcctctatggattgggtggatttcttacatccagttcgctcttcagattgtgttagttatgaatccttcgtaatttggacgggtagaacttctatggaagtatttgtgaaggtagtagcggaagatttaatttcaggtgagaagcgtatcgcagcaacgtcttttgttacttttgttgcactgagtaaggaaaataatccagttcctgtgccgcgagtaatccctgaaacagaagaagagaaagaattacatcgcattgcagtgttgcgtgcagaacaacgtcatatacgtaaggcagagagtaagaaagtagctacattactaactttt

SEQ ID NO: 9570 - DNA, 412 bp, Bacillus anthracis; identical to SEQ ID NO: 9411

SEQ ID NO: 9571 - DNA, 716 bp, Bacillus anthracis
atggctaaaagaggtaaaaagtacgtaaaagctgcaaagctttggtgatcgtgccactgcttactcttcaacaaaagcagtagaattaggtcaagaaaccaaacacagctaaatttgatgcaactggtgaaaactgcattccgtttacgtggttgaccctaagaaggctgcccaaccaaatcctggagcaaactgttcttccacacggccctggtaaaagtcaacctttttttagcatcccctaaagggtgaaaaagctaaagaagctgaagctgctggagctgacttcgtaggcgatgctgattacatcggtaaaatccaacaaggttggttcgatttctatgtagtagtagcaactcctgacatgatggggtgaagttggtaaacttggtcaaatattaccacctacaggtttaatgccaaaccctaaaaaaagaacagttactttcgatgtaactaaagctgttaacgaaatcaaagctggtaaagttgaataccgcgttgataaagctggtaacatccacgttccaatcggtaaagtatctttcgaagatgctaaattagtagaaaacttcagaacaattgctgacactttacaaaaagttaagccagctgctgcaaaaggtacttacatgaagaacgtaacagttgcttctacaatgggacctggcgtacgtgtagacgtttctacattagcgtaaattttggaagttgac

SEQ ID NO: 9572 - DNA, 1698 bp, Bacillus anthracis
atgaaacaaagtatggtattcagtcctacattacgtgaagttccagctgatgcggagattaagagtcatcagttattacttcgtgcaggttttatgcgtcaaaatgcttctggtatttatagttttctaccatttggattaaaagtactacacaaagtagaacgtatcgttcgagaagagatggagcgcgcaggtgccgtagaattattaatgccagcgatgcaagctgcagaattatggcaagagtcaggtcgttggtattcttacggatctgaattaatgcgtatgaaagatcgtaacgctcgtgaatttgcattaggagcgacacatgaagaagtaattacagatcttgtacgtgatgaagtgaaatcgtataaaaaattaccgttaacattatatcaaattcaaacaaaattccgtgatgaacaaagacctcgtttcggtttattacgtggaagagagtttctaatgaaagatgcatactctttccatgctacgcaagagagcttagatgaagtgtacgatcgcttatacaaagcatactctaacatctttgctcgttgtggcttgaatttccgtgcggttattgctgattctggagcaatgggtggaaaagatacacatgaatttatggtattatctgatgttggtgaagatacaattgcatactctgatacatctgattacgcagcgaacatcgaaatggctcctgttgtagctacgtatacgaagagtgacgaagcagaaaaagagcttgaaaaagtagcaacaccagaccaaaaagcaattgaagaagtatctgcattcttaaacatcgaagctgacaagtgcattaagtctatggtatttaaagtagatgagaaattagtagtggtacttgttcgtggtgatcatgaagtaaacgatgtaaaagtgaaaaatgtatacggtgcttcagttgttgagcttgcctctcatgaagaagtaaaagaattattaaattgtgaagttggttcattaggaccgattggtgtaaatggtgatatcgaaattatcgctgatcacgctgtagcatcaattgtcaacggatgttcaggagcgaacgaagaaggattccattatgtaaatgtaaatccagaacgtgactttaaagtaagtcaatatacggatttacgcttcattcaagaaggagaccaatctccagacggaaacgggacaattcttttcgcacgcggaattgaagttggtcatgtattcaaattaggaactcgttatagtgaagcaatgaacgcaacattcctagatgaaaacggaaaaacacaaccacttattatgggttgttacggcattggtgtgtctcgtacagtggcagcaattgcagagcagtttaatgatgagaacggtttagtttggccaaaagctgtagcaccgttccatgtgcatgtaattccagtgaatatgaaatctgatgcacaacgtgaaatgggtgaaaacatctacaactcattacaagagcaaggttatgaagtattactagatgatcgtgcagaacgtgcaggtgttaaatttgctgatgctgatttattcggccttccagttcgcgtgacagttggtaaaaaagcagacgaaggtattgtagaagtgaaagtacgtgctacaggtgagtctgaagaagtaaaagtagaagaacttcaaacatatattgctaatattttaaaa

SEQ ID NO: 9573 - DNA, 1901 bp, Bacillus anthracis
atgtgtggttttgtaggatgtttatgtgaaaaccctagagagttttcagaaacagaaaaacatcaatttgaaaatatgaacacgatgattttccaccgtggtccagatgacgaaggatattttcgtgatgaacatgtacaattactgcttccgccgtttaagtatcattgacttagaggcaggacatcagccgctaacttatgaaaatgatcgatatgtaattatttttaatggtgaaatttacaactatgtagaattacgtgaaatgttacttgaaaaaggtgcaacgtttgcaacgcaatctgatacagaagttatcattgcattgtatgcacatatgaaagaaaaatgtgtagactaccttcgtggtatgtttgcatttatgatttgggatcgtgaagagaagaaacttttcggagcacgtgatcacttcggtattaaacctttatacatcgcacaacaaggtgatactacattcttcgcatctgagaagaaaagtattatgcatgtgatggaagataaaggcgttaatccaacgtcactacaacattactttacgtatcaatatggtccagagccagaaacattaacaattgatgttaataaaatcgagcctggtcattatttcgtaaaagaaatcggtaaagagatggaaatccatcgctactgggaaccttatttcaatgcttcaagtgcaacgaaagaggaacatatccaagcgattcgtgatgtgttatatgattcagtaaaagtgcatatgcgcagtgatgtaccagtaggttcattcttatctggtggtatcgaatcatctattatccgcttctattgcaagagaaatgaatccaaatcttttaacattctctgttggttttgagcaacgtggttttagtgaagttgatgttgcgaaagaaactgctgagaaattaggcgttaaaaaccataacgtattcatttcagcgaaagagtttatggatgagttcccaaaaatcatttggcatatggatgatcctttagcagatccggcagctgtaccattgtacttcgttgcaaaagaagcacgtaaacatgtatcagttgttcttgcaggtgaaggtgcagacgagctatttggtggttataacatttaccgtgagcctaactcactgaaaatgttctctaacattcctagcccaggtaagagcgttctaatagcattaagtggtgctcttaaagaaggctttaaaggaaagagcttcgtagagcgtggatgtacgccaagtgaagagcgttactatggaaacgcgaaaatcttccgtcaagaagagagagatgaattaatgaagtattacaatgatagtgttaactatatggatatctcgaatccattgtataacgaaattaaagattatgatgatgtaagtaaaatgcagtacattgacatgttcacatggttacgcggtgacattttattaaaagctgataaaatgacaatggtgtattcattagaacttcgtgtaccgttcttagataaacaagtatttgatgttgcatataaaattccatctgaatttaagattgctaacggaactacgaaagctattttacagtgaagcagcacgcggaatcgttccagatcacgtattagatcgtaaaaaacttggattcccagtaccaattcgtccctggctaaaatacgaaatgcatgattgggctattaatattataatcgaaagtaatacagagcatttaatcgacaaacagtatgtattaaacttactggaagcacattgtgcagataaaggcgattataggccgtaaaatttggcactgtacttgcatttatggtatggcatcaaatttatgttgagcataaatacgatacgaataagttccacgaagaaacgaaacgtgcgtatagctta

SEQ ID NO: 9574 - DNA, 1345 bp, Bacillus anthracis
atgaataaagatatatcaaaagatgaacatgtcccttctcaaagtacaactgttcaatcagcgcatttagcatttagcggacaaacaaaaggcttaaaaagactattaccattctttaggtccctgctttcatcgcttcagtcgcttatattgatcctggcaatttcgcgacaaatattgccgctggatcacaatatggatatttattactctgggtaattcttgcttctaatttaatggctgtattaatccaaactttatccgctaaattgggaatcgctacgggcagaaaccttcctgagatcgctcgagaaaacttcccaaaacctgtttccatcggtttatggatacaaggtgaactcgttattatggggactgatttagctgaatttattggagccgcactcggattgtatttattatttgggattcggatgttacccgcagctttaattacagctgcgggatcatttattattcttgaatttcaacgcagaggctttcgtccattagaagcgattataacggggggatgattttatcgttggtatcgccttttggtgtacaagtcttttatgcaaaaccggaattaagtcctttactttcagggcttttcattccgaaattccaaggtgtagacagtatattacttgcagctggaattttaggtgcgacagttatgccgcacgcaatctatttacattcccgccttaacacaacgccgcgtagtcggaacaaatgatgaacaaaagaaaaagattttctcggtttggattttaatgaatatcattttgcgcaaaggattattgctggagcaaattaatgcaaagtatgtaattggtggtgctcgcactatttctaaaaaacggctttgcatgttgaagatcttgatgtgccttttaaccagtttagtaacttagtcggtccttgtatcagctgctttatttggaattggtctcttatcagccgggttattcatgtttttcggtcggtacaatgtccaggtgatatattaggcaagggttccattggaatgcccattccgttattcttacgccgatttattacaatgattccaccattagttattatcgctttaggggtaaatcccaacttacgctctagtcatgagcccaggtcgtcttatcattcggtattgcctttgcattagtaccacttattatgtttacaagtagtaaaaaaaattatgggtacactcgttaatcaccgcataactacctttatcgcttggattattgctgtacttgttatcattttaaatattttcttactgtatcaaacatttgtgggttaataaaaaaggtatttcccaattcattttggg

SEQ ID NO: 9575 - DNA, 1509 bp, Bacillus anthracis
gtgactgattttatacaaacgtttcaagaacgaaaaatagaattactaactgcattaagtgagcatttacaaatatcgcttatttcattattttttgcagtaattattgcggtaccgctgggcattttattaacgagaaaagaaagaatggctgagttgattataggaacttctgcagttatgcagaccgtcccatcacttgcattactcggactattaattccgttggtaggaatcggaaaaatcccggccgttattgcattagttgtatatgcactattacctattttacgcaatacatatacaggaatacgggagttagatgaatctttaatcgaagcagcgaaagctatggggatgaatagttggagaagactgtggaaggtagagcttcctcttgccttaccaattattatggccggtattcgtacggcaatggtattaattgttggaacagctacattggcagctcttataggtgctggtggactcggtaaactcatattacttggtattgatcggaatgatcatgcacttattattttaggggccgtaccagccgcgttactcgctttattctttgatgtagtacttcgagtgcttgagaagccaaaacgctcgtctaagcgtgttatattgacgatatgtatcgtttgtataatggttgcttctccatttctttggaatacagaaaagaaagatattgttattgcgggcaaacttggatcagaacctgaaattttaattcaaatgtataagcagcttattgaacaagataccgatttacacgtacaattaaaaccaggtcttggaaaaacagcatttgtatttgaagcgttgaaatcaggagaagtagatatatatcctgagttttcgggaacagctttatctactttcgtgaaagaagagccaaaaagtacaaatcgggatgaagtatatgagcaggctcgcgttggaatggaaaagaaatataatatggttatgttgaagccgatggagtataacaatacatatgcactggctatgccgaaaaaaatagcagatcaaaataatataaatacaatctctgatttaggaaatattgcacaggatacgaaagtaggattcacattagaatttgctgatcgtgaagacggttataaaggaatgcaaaagttatataactataagttttcaaatgtgaaaacgatggaaccgaaattacgttacagtgcaattcaatcaggggatgttaacgtaatcgatgcatattcaacagatagtgaattggagcaatacggacttaaagcgctaaaagatgataaagggttattcccaccataccaaggtgcaccattattaagaaaagagacattacaaaaatatcctgaacttgaaaaagtattaaataaattatctggaaagattacagatgaagaaatgcgaaaaatgaattatgaagtaaatgtgaatggtaaaaatagtgaagaagtagcgaaacaatttttacaaaaagagaatttacttcgt

SEQ ID NO: 9576 - DNA, 514 bp, Bacillus anthracis
ttgattcaaatgaatttgaaaaaatttgaagaggtaataaatggagaaggattacacgaatcgtttcatcatttagaaatacatggtgtctgcatagattccaaaaacattaaagaaggaaatgtattcgttccaatcattagggtgaaggatgggcatgagtatgtgaaagaggcaatggataatggagctatcgcttccttatggaaaaagtcttacggttctccgccaaaagggattccaattatatttgtagatgacactttgtttgctttgcaacaattggcacaattttatcgaagagagataaatgtaaaagtaatcgggaattaccggtagtaatggaaaaactacggtaaaagatatagtagaaggtattttaaggtcaacttatagagtgcataaaacaaaaggtaattttaatagtcaaatcggtttaccgttaacaattttagagatgaaacgagatacagagattttaatacttgaaatgggaatgagtgaaaaaggatgt

SEQ ID NO: 9577 - DNA, 366 bp, Bacillus anthracis; identical to SEQ ID NO: 9131

SEQ ID NO: 9578 - DNA, 1455 bp, Bacillus anthracis
atgaaaaacacattagtaaaaaagtctgtatagagatacagataaatacgcaggtcaaacagtacaagtatcagggtggattcgtaacttacgtgattcaaaagcatttggtttcatcgaatttaacgacggtagcttcttcaaaaggcgttcaaatcgtttttctatacagaattagataacttcaaagaaattgcaaaacttccacttagctcttcagttaaagtagaaaggtaaagtaattgcaacgcctggagcgaaagcaccatttgaaatttaaagcagaaaaaattgatatcgagggcttatcagattctgattacccacttcaaaagaaacgtcatacgtttgaatacttacgtacaatcgctcacttacgtccaagaacaaatgcattgctctgcaacgttcccgcgtacgttctatcggcagcattttgcgatccaccaatttctcccaagagcgtggattcgtacatgttcacacaccaatccatccttggtagggatccagaaggtgccgggcgaaatggtcccgcgtaacaacgcaagatttaaccaacgtaccaaaaaggcgaaagacggacaaagttgatgaatcaaaagacttcttctgcaaagaaacaaacttaacagaaagtggacagctgaacgctgaggcttatgcattagcattccgtgatgtatacacatttcggacctacattccgtgcagaaaactcaaacaccactcgccacgcagctgagttcttgatgggtgagccctgagattgcatttgctgaactaggtgacgtaaatgacctttacagaagatatgctgaaatatgcaatgaaatacgtattagagcatgcaccagaggaaatggaatctttcaccagcttcgttgataaaacagttctagagcgcatgaacaacgtaatcaacttctgacttcggtcgcatcacttatacagaagcaattaaagtacttcaagagtcaggtgctgacttcaaatacccagtagaatggggtattgacttacaaacagagcacgaaagatacttatcagaagaaatcttcaaacgccctgtattcgtaactgactatccgaaagacattaaagcattctacatgcgcttaaatgacgacggtaaaacagtagctgctactgaccttctagttcctggcatcggcgaattaatcggcggaagccaacgtgaagaaagaatggacgttttagtagacagaattaaagaactaggcatgaacgaagaggactactggtggtacttagaacttagaaaatacggcggtacaaaacacgctggattcggtctaggtttcgagcgcttcctaatgtatatcactggcatggctaacatccgtgacgtaattccatttcccagaacatccaggttcttctgaattctaaaatatgaaaaagcgagagggttttctctcgcttttttatttt

SEQ ID NO: 9579 - DNA, 7074 bp, Bacillus anthracis
gtgccttttttgaatcgctttacgacaacagtacctggtgccgtcacgttcactgggaacacgttaggacttagtcctatatcgcctgcaccaggtaatatttttggtacacttgctgtttttacaacggtaaatacagcgctgcaagcaccagggttcccagcaggtacaacggatgactggcgattgaattcttcaagtgcaattttaaatcttccggcagggagtagtattttgtatgcagagttagtttgggcaggaactttccggactgatacggaagatgttttaccatttttaaatgataatattacatttacaacaccagcaggaacattttctgttacgccagaccctgctaccgcgcagcaaggttcagtagggaatcagttttattatgcacgctctgctaatgtaacgaatcttgttagtgcaggtggggcaggcacatatacaacaggtgccgtaccagctacaagaacttcagctgatccaacaatcagtcgttcagctggctggacgcttgaggttgtgtatcaaaatgcaagtttaccacttcggaatttgtcagtatatgcagggcaagaaattatcgatgcttcatcaccaccggttgatgctactatttcaggatttgcaactcccgcaacaggagctgtaacaggaagggtacttgtaactgcacaagaaggtgattctaacatttctggagatcaacttcgttttggaccgaatgcgaatactacagttgctttattcggaccaagaaatcccgcgaataatttctttcagtcacaaatttgtaatgacagtggaaatttagatacgagcggtacatttggagatttgaatcagccgttaggagtagctttggccgtccgaaggcaagggtgggatattacgaatgtagatgcctcctcatctttagtaaataaccaaacgtcagcaactgttcgcttcgtgacaaatggggatggatacgctgcagctggttttggtgttcaaattgatgcaacaggtccgattattaatcctgttaaatcggttaatagaacagtcgcgggggtaggggatactcttacctatacgattacggttccaaatacaggaacaggaagtgcagaaaacgttgtattacgtgatagtattccgaatggaacgacgtttgttgcaggtagtgtaacggtaggaggggtaacacagccgaatgcgaaccctgctactggaattaatttaggtacaatcccaaataatacgcaaagaattgttacctttcaagtgcgaataacatcgtttccgaacccaaatcctattccaaatcgtgcaatggtgtcatatcaatttcgtcctttcgtcggtagtccacttattactagtatgtcttcttcgaatacagtacaaacgacagtgaatcaagcaactataagtatgcaaaaatctgtagatctacagacggcaacgcttaatgatgtattaacgtacacggttaatgtgacgaataatggaaacgttactgcaaacaatgttatttttgttgatagtattcctgcaggaacaacatttgtagcaaacagcgttatagtaaatggagtagcacgtccaggagcgaatccagcaagtagtattaatctaggaagtattaatgcttcgcaaacgaccgtagtgcgctttcaagttcgagtaacatcgaaccctcttgtcaatccaattccgaaccgtgcaagtgcaacatttacctttactccagtgcctggtcaacaaccagtttcagggcaagcgacaagtaatactgtagttacgacaattaatatagctgatataagaacgagaaaaatagtggatagagcttttgcgacagtgaatgatgttctgacgtacactgttacaattgaaaatacaggaaatgtacttgcaacgaatgttgtttttcaagatccgatcccaattggaacgacttttatcacaaatagtgtgactgtggatggggtttctcaacctggggcaaatccagcgactgggtttacagtagcaaatatatctcccggcggaagtaggacagtgacttttcaagtacgagtgacatcgacgccatcaggaggcacgattccgaatcgcggaaatgtaactgctaatttcgtcgttattccaaatcagccaccaataacgattaatagacaaacgaatacagttgtgacacaagttaatacaggcggtttaaatgtaataaaagaagtgaatacaacgcaagcggtagtaggggacactttaacatacacaattgccgttcaaaatacaggaaacgttccgttaacaaatgtatttttccaagacgctatttcttccgctgtttcatttgttgcaaattctgtaacaattaatggagtaccgcaaagtggattgaatccgaatacaggattttctcttccgaatattcctgcggctcaaaccgttgtagtcacatttgatgtattaattatacaggatccagaaaatgaagatattttaaatcaggcgaatgtaacagcaagttttcaagtgaatccgagtgaaccaccagtaacaatcaatgttccgagtaacattgtgaatacaactgtacagtcagggaattttgaagttgtgaaatcagtaaatacagatgttgcgacggtaggggatgttttagtatatacaatcgaaatcataaacgcgggtagtgtaccagcaacaaatgtatttttccaagattcaattccacaaggtacattatttattgaaaacagtgtctttgtgaatggggtcttacaagaaggggcagatccagaacttggattcccgctaaatgatttgcctactggtgcgagtgtaattgttacatttgaagtattgattgatgaaattccgcttggaaacaacgttgtaaacagtgcgaatgttacaggagatttcctagtaaatccaacagagccaccaattactgtaacagaaccaagtaatactgttatgacagttgtgaattcttcaggtttaaatgtaataaaaagtgtaagcgctactgaagcgggtgtaggagacacgttaacgtatacagttcgtatacaaaatagtggaacggtagcagctacaaatgtatcattccttgatccaattccatctggaacaacgtttgtagcaaatagtgtaataataaatggaacgcctcaaccaggtttaaacccaacaactggatttccacttgctaatattccagtaggagggatggtaacagttgcttttcaagtgacgattacgagtgtaccaccaaatagagttcttccgaataatgcgaatgtcactgctgatttccaagtaagccctctccagccaccaattacaattgtaacgattagtaatattgttgtgacgcgagtgaatgtaggatcactgaatgtaatgaagagtgtaaatacactgcaagcgggtgtaggagatacgttaacgtatacgattcttattcaaaatacaggaactgttcctgcaacgaatattattttccaagatccgattccgtctggtactgcgtttgtagcaaatagtgtgacgataaatggagttgttcagcaaggcgcggatcctatggcaggttttccagtaccaaatattccggtcgggcaaacggccacggttacgtttcaagttacagtgacgagtattccgagcggtggaaatataagaaaccaatcgaacattactgcaagttttcttataaacccagcaaaccctccaataacgactgttacgaatagtaatttcgttgtgacgcaagtaaacacagcgcagttaaatatacaaaaaacttcatctgtacaacaagcagcacttggagaaacttacacgtattctgttgtcattcgtaataatggtacagtaacagcaacgaacgtttctttcattgatccaattgctccagaaacaacatttgtagcaaatagtgtaacgataaatggaacgccacaacctggatttgacccgaatgtcggtttcccgcttcctaatattgcagctggaacatccttgacagtaacgttccaagttacggtaattgcaccgtctacacgtggagcagtattaaatacagcatctgctatagccactttcttattaaatcctttacaaccacctgtaacaacaacgaactcaagtaatacaacggtagttacaataccgttacctcctcctggtgaagtaacagcaacaaaaacagttgacgttgcagctggagcggttggggatgtattaacgtacactgtgcttatttcaaatgtaggaattataccagttgcagatgtgttcttccaagatgtcatcccagaaggaacgacatttgtagaaggtagtgtaacgataggtggagtgcagcaacttggtttaaatccggaaataggatttacagttactccattattaatcgctggtggaagtattgagatcacattccaagtgacgattacagaaattccagataatgaagttatattaaatgatgcagacgttacatttacttcacaaccaaatccgcaagaaccaccgattacggaaacgatattaacaaatttagtcgttacaacgattaatatagcgtttgtttttccattgaaactagtagataaagaagtagcgactgtaggggaaatattaacgtatgatgtattgatttttaatttcggaacagtgccagcgacgaatgttcaatatagtgatgtattaccttcctctatagcgttcgagccgaacagtgtaacgatagacggtgtgttacaacctggattcaatcctaataatggattcccgcttccagatataaatccaggtgaaagtgtagaagtaacattccaagtaacagtggttagtgttccatcaaatggaacaattgttaatacagcaaatgtaactggaagctttgtattagtaccaggagaaccaccagttatagtaacagggccgagcaatacaacacttacaactgtaaatagaggacaatttaatgttataaaacaggtaaatagggctgctaccctagttggggatgtattaacgtatacggttcaaataacgaatacaggaacagtaacagctaatgatgttcagtttattgatacgatttcagcaggagcgtcatttgtaccaaatagtgtaacgataaatggagccctgcaaccaaacttaaatccgattactggctttggagttggagatataccagttggtgaaacggttgtagtgacgtttcaagcgacagttacaaacatcccggcatcaggaacaattacgaacgttgcaaatataacaggaagctgtactttagtaccaggagagccaccggttgtagtaacagagccgagtaatacgacaataacaagtataaatagagggcgttttagcgttataaaatctgtaaataaagaagcaacacgtttaggagatacgttaacgtatagtgtgcaagttacaaatacgggaacagtaacagcgacaaatgttcagtttattgatgttccatcacctagcttagaattcgttcctggaagtgtacaaataaatgggattccgcaagtaggtttaaatccatttataggcttttcattaccggatcttgcagtaggggatagcgtattaattacatttgcagtaaatgtaatcgcagttccgccttctagtagcattatgaatacagcgagagtaacgggtgatttcgaattgattccaggagaacctccgtttacaattacgaattcaagtaatacgacagttacaccagtaaatagaggtagtttagatatgcagaaagaagtagacaattcaatcgttggagtaggagaaacggtaacgtatacggttcgtatattaaatactggtactgctgatgcgatgaatgttcaatttatcgatgtgctatctccggaagctgtttttgtaccaaatagtgtaactgtaaatggagtagcgcgtccgggagtaaatcctcaggttggatttacgattgtagacattccagtcggtgagacagcgattgtaacatatgaagctacgattacaagttttccagatggtggtacagtagtaaacgttgctggggcgttagcagagtatattttagtgccaggagaacctccagttacagtgatggatacgagcaatacagttatagtgacggtaaatactgcaatcttatttgttgcaaaaggagcaaactttgaagtagcgatggtaggggatgttgtcacttatggaattgccgttataaatgatagtacagttcctgtgaccaacattgtgttaacagatatcattgatccaaatacgttatttataaatggcacggtaacggtaaacgatgtagctcttccatttgctaatccaaataccggtattccattaggtgattttcagccaaatgatgcggcaattattaatttccaagttgtaataacaggagggcaaataaataatttagtcacaaatactgctatagcaaatgggctcgcaattgtaaatccgaatgagctgccagtagtagtggagggtgatagcaatacagttgttatcccgtttattcctcaaaatgtctcaacgacagtcgtaaaaacggcagatttacaggcagcaacgattggagatgttattatctttacgacagttattacaaatacgggtgatactgtcatacaaaatattcgttttcaagatatgttagatagtagtgttcgatttgtccttggaagtgtaacggttgataatacaccagtaccaaatgtaagcccagtatcagggtttcttatagggaatttaaatccaggtgaagcacgaacagtttcgttccaagtagtagttcagagcgcgccaaatggttcagggaattatattaatcaagcgagtattcgcttcgaacatcaagtaggcacagtgttaccacctgttacacaaatagtagaaagtaatatagttgttattccatttgttccaacgatagaacaaatttgcgaaacgaatcttaattgtttagggaagattccttttcaatgttctccgtgtgatcacttgcaaataaagagaaaa

SEQ ID NO: 9580 - DNA, 198 bp, Bacillus anthracis
atgagtgagagcggactaaaagaacaaattactggtaaagtggaaaagacaaagggacaagtaaaagaaggaattggtgaggttacagaagatagaaagttgaaaaatgaagggaagtgggacaagacgaagggaacgataaaagaaaaagtcggaaaagtgaaacaaaagataagtgatgggttggataataaagaa

SEQ ID NO: 9581 - DNA, 618 bp, Bacillus anthracis
atgtataaaccaattacattttcgttgaaatatatatttaaaacaagctgggaaagtgagaagtgcaaagggaaggagaaaagttaccagaaggggggcccataggttgttgcgtgtaccacatacaaggttttatgggatgtatttaatgtagctacaggggattgtacccggaccggaaatcatttacatggccaaaaaaagaattatttgaagggaaaattcaaaaaattggttccttaaaaaaggtaaatgcattccctgtagttcgtgcaaatccaggaccggagtacacttaaaattccatcacgcttattaaaagaaggaaaagtggtagggattttcccgagtggaacgagatcgacagaagacgtttcgttaaaagctggtgctgtgacaattgcgatgcgttctaacgttccattaataccggcagcttatattggtccctcaagtgtaaaagaattaataaagggaaaaagagcacaattaatttttggagaccccaattcaaattgatgctgaggaccaaatagatcgaaaaacagctatgaaaatgatgccggatcaaataaaatgagaagtttgaggggctttatggaagctttacaatcaaat

SEQ ID NO: 9582 - DNA, 2382 bp, Bacillus anthracis
atgtattgtaatataaaatggttgaacaggagtttaatttattatggaggtgctatgtctagtatgaatacgaatgaaagaatcgtacccctcctaccattaagaggcgttctcgtatatccaacgatggttctgcatcttgatgtaggacgtgataaatcgatacaagcactagagcaggcggcaatggatgaaaatatcatctttttagcaatgcaaaaagaaatgaatatcgatgatccgaaagaagatgacatatatagtgtaggtacagtggcgaaagtgaagcaaatgttaaaattgccgaacggtacgcttcgtgtccttgtagaaggtttacatagagcagaagtagtagagtttatcgaagaagaaaatgtagtgcaagtttctattaaaacggtaactgaagaagtggaagctgatttagaagagaaagcacttatgcgtacattactggagcatttcgaacaatatattaaagtttcgaaaaaagtttcaaatgaaacatttgcaacggtagctgatgtagaagagccaggaagattagtggatttaattgcttctcacttgccaattaaaacgaagcagaaacaagagattttagaaatcatatctgtgaaagaacgattacatacacttatttcaattattcaagatgaacaagaattacttagtttagaaaagaaaattggacaaaaagtgaaacgttcaatggagcgcacgcaaaaagaatatttcttgcgtgagcaaatgaaggcgattcaaactgaacttggcgataaagaaggcaagggcggggaagttgaagaacttcgtgagaaaattgaacagtcaggaatgcctgaagaaacaatgaaggctgcgctgaaagaattagatcgttatgaaaagttaccagcaagttctgcggagagcggtgttattcgcaattatatggattggttattagcacttccgtggacagacgcaacggaagatatgattgatcttgctcattcggaagagattttaaacaaagatcattacggtcttgagaaagtgaaagagcgcgtactggaatatttagcggtacagaagttaacgaattcattaaaagggcctatcctttgtttagtagggccacctggggtcggaaaaacttcgttagcgcgttctattgcgacatcattaaatcgtaattttgtccgtgtatcccttggtggtgtgcgtgatgaatctgaaattcgtggtcaccgtcgtacgtacgttggagcaatgccaggacgcattattcaaggtatgaaaaaggcaaaatcagttaatccagtcttcttattagatgagattgataaaatgtctaacgatttccgtggagatccttcagcagcattacttgaagtgttagatccagaacaaaaccataacttcagtgatcattatattgaagaaccatatgatctatcgaaagttatgtttgtagcaactgcgaatacactttcaagtattccaggtccattacttgaccgtatggaaattatttcgattgctggctatacagaacttgaaaaagttcatattgctcgtgaacatttattgccgaaacaattacaagagcatggcttacgaaaaggtaatttacaagtacgtgatgaagcgcttcttgaaattattcgctattatacacgtgaggctggtgttcgtacactagagcgccaaattgcaaaggtttgtcgtaaagtagcaaaaattatcgttacagcagaacgtaagcgtattgtagtaacagagaaaaacgttgttgatttacttggtaagcacatattccgttatgggcaagctgaaaaaacagaccaagttggtatggcgacgggtttagcgtatacggcagcaggcggcgatacactggcgattgaagtgtccgtagcgccaggtaaagggaaattaattttaacagggaaacttggggatgttatgaaagaatccgcacaagcagcgtttagctatattcgttctcgtgcagaagagcttcagattgatccgaatttccatgagaaaaatgatattcatattcatgttccagaaggagcagttccaaaagatggaccgtcagcaggtattacgatggcaacggcacttatttctgcgttaacaggtattcctgtaagtaaagaagtggggatgacaggtgaaattacacttcgtggtcgtgtattaccgattggtggtttaaaagaaaaaacattaagtgctcaccgcgcaggtttaacaaaaattattttaccggcggaaaatgagaaagatttagatgatattccagagagcgtaaaagaaaaccttacgtttgtgcttgcatctcatttagatgaagtattggagcacgcattagtaggagtgaaacaa

SEQ ID NO: 9583 - DNA, 1207 bp, Bacillus anthracis
atgacacttgctgctcctatcatcttcctttttttatttacaggcggtgctattgcgattctttgaaaaaaccggtgctcttgacggtttaatctatcatgttattaacaaatttcgtaaccagcaattactttttatatgcattgtcgccgcactcttttctattctcggaacgactggtattatccgtaacttcggttatcggctttatccccatcggcatcatcgttgcacgcacataaaaatgggacgctatcgtcggcgtagcaattatttatttgggcacttatgctggttttaatgctactatattatctccttcacctttaggcatttcacaaaatatcgcggaactcccaatgttttcaggaattggtttacgcacagcaatttatatctcttttttacttgctaccattctatatattaattggtacgtaaaacgcttaaaaaaatcgaataaaggaagcatactcggagataactggtttccaagtaatgctctttcaagcggaaaagaggcgcaaaaaacagaagttccttggacaatacgtcataaattaattttactcgtttcagctttatcattaattgcatttttaatcggcgcttttcgtctacattggacagacgcggaaatgactgctacttttagtttcatagcaattacagccggaataataggtggaatgaaagcaaacgatatcgcttctacttttctagcaggctgccaaaatctcatatacggtgctttgatcgtcggaatggctcgttgtatttcagtcattttggagcaagggaaattacttgatacaatcgttaaccaactcgcacagtctctcgaaggacaaagcccagtatttggcgttatcggtatgtatgtaagtagtgccgcattacatttcctcatttcatccgggacaggtgaatctgtgattttcattccgatattagctccattagctgatttcatgcacattacacgccaagttacagtacaagctgttatgctcggcgaaggtgtagtgaactgcctcaaatcaacttctggtgttttaatgggagtactcgcggcgaagcggatttcttacgggaaatggaatttcgattatgggctccacttgcattcatttgggtttattatttggacttattttttcttaattgttgggggtgaaatattgagtggggaccgtattaaaagggc

SEQ ID NO: 9584 - DNA, 836 bp, Bacillus anthracis
ccaaatgtacttcgtgaagcgatggcatattctttggaagcgggtgaaaagcgtctcccgcccgttacttttatttgcaacattacaaggcgtttgataaagaagaaaatcttggagtaggtgcagcttgtgctctgaaaatgatacatacatactcgttagttcatgatgatttaccttgtatggatgatgatgatttaaagaagaggaaaagcccacaaaatcataaagtatttggtgaagcgatggcagttttagcaggtgatggtttattaacgtatgcttttcaagttattatggcatatggacaaaaggaaatctctgctgagaaaaaagtaagacttgtaccttgagcttgcaaaagcggcagggcccagagggaatggttggcggacaagtggcagatatggaagcggaagggaaacagcttacgatcgatgagctagagtatatttcataagcataagactgggaaactacttgaattcgctgtacttgcaggatcgatactttctgatgccacagaagaacaagaagaaaaattacttgagtttgcaaaatatatcggctttagctttcaaaattcgagatggatattttagatgtggaaggaaccgaagaagaaattggaaaaccgattggtagtgatggttccaacgaaaagaacacatataccacgttggttactggaaatagaaccaaggatattttaaaataaactattggcaaaagcaaaagatgctattggttccttgcaattacaagatgaatatttactatctatttgcgatttgattgcaaaacgtaataactaatataacagcgttttcatttgt

SEQ ID NO: 9585 - DNA, 685 bp, Bacillus anthracis
ttatatgttacaagacatggtaaaacaatattaaatacgaaccatcgcgcgcaaggttgggcagactctccgttagtggaaaaaggtgtggaagttgccacaaatttaggaacggggattaaaagaaattcattttatgaatgcctatagtagtggaaagtggccccccgcatgaaactgcaaatttagtattaaaatatagtgagcaatcaaaattgaaacttgagcaaagaaaaaaatttacgagaattaaattttggtattttttgaaggtgaaaaacttgataatatgtgggatgcggttggaaaagctgcgggcgttacatcaccagaagaacttttgaagttttctattcaagaagatatttgatcttattagagcagcagaccctacaaaacaagcgggaagattgggaattattttctactcctataaaagcagagattggtaaaattaatggaaaaacacctaaaagatgccggcgggaacgttttaattgtcccttcaaggggcttttgattaactaccttaatagaaatgctagacagtagtaaaaccaaacttggcgtggaaaatgctagtgtgaccaagattgtatatcaagatggaatataatacgttgagtcagctggaaatatgaactatgttgcaaaagggaaagacaatgtggaaatataaaaatat

SEQ ID NO: 9586 - DNA, 1312 bp, Bacillus anthracis
atgttttcagtagtagttgtaggaccacaatggggggacgaaggaaaaggtaaaattactgattttctttctgagcatgcggaagtagttgcaagatatcaaggtggaaataacgcaggacatacaatcgtttttggtggagttaaatataaattacacttaattccatctggtattttctataaagagaaaatttgtgtaatcggaaacggtttagtagtagatccgaaagcattactttgaagagttaaaatacttacacgatcgtggtgtaagtactgataatttacgcgtaagtaaccgtgcgcacgttattttaccttatcacttaaaacaggacgagttagaagaagcaagtaaaggtgataacaaaatcggtacaacgaaaaaaggtatcggtcctgcatatatggacaaagctgctcgtatcggtattcgtatggctgatcttttagaccgtgaagcatttaaagagaagcttgagcaaaatttagcacaaaaaaatcgtttatttgaaaaaatgtacgatacagaaggtttcagtgtagacgaaatcttcgaagagtacttcgagtacggacagcaaatcgcacaatatgtatgtgatacgtctgttgtgttaaatgatgcattagataacaatcaccgtgtattatttgaaggtgcacaaggtgttatgctccgatatcgaccacggtacgtacccgttcgttacatcttctaacccaattgctggggggggtaacagttggaactggagttggtcctgcgaaagttactcgcgttgtaggtgtatgtaaagcatatacaagccgcgttggtgatggtccattccctactgagcttcatgacgaaattggtcatcaaattcgtgaagttggtcgtgagtatggaacgacaactggtcgtccacgccgcggaggggggccgaatagcggggggggaagacaggcacggcggggaaggggggaaacagaaaaatcaaaaaaccccaacgacggccaaacggggaacccaacaccaaaaaatgggggggccaaccaaggcgaggggaaaggaaacgaagaagtgcccagcaaacttaaacattttagcgaaatgtgagcctgtatacgaagagcttccaggttgggaccgaagaaataactgggtggagaccattaaaaggacttcctgaaaatgcacgaaaatacgtagaacgtgtttctgagttaacaggaattcaattacctatgttcctcagtgggaccggatcgtaaccaaacaaatatccgctcgaaacgtataccgaaccttaatggatatcttttga

SEQ ID NO: 9587 - DNA, 903 bp, Bacillus anthracis
atgatgaagcgagcaagaattatttataatcctacttctgggcgtgagctatttaagaagagtttaccagaagtattacaaaaattagaacaagctggatatgaggcatcttgtcatgcgacaacgggtcctggcgacgcaactgtggcggcgaggcaagctgcggatcgtaaatttgatgttgttatcgctgctggtggtgacggcacgttaaatgaagtggtgaacggtttagtagggcatgaacatcgtccgaagttcggaattattccggttggaacgactaatgactttgcacgtgcaatcggtgtacctcgttctattgaagaggcagcagatattatttgtgaaggaaaaactgtgccattagaccttggtagagcaaacgatacatattttattaacatcgctggtggcggtcgcattacagaattaacatatgaagtaccgagtaagctaaagactgtattaggacaacttgcttattatttaaaaggtatcgaaatgctaccatcactacacccaacatatgttgaaattgagtatgatggaaaattactacaagaagaaattacgatgtttttaattacgaatactcgttcagtgggcggctttgaaaaggtagcaccatatgcatcaattaacgatggcttatttgatttattagtgctgaaaaaaggttcgattgctgacttaattaaagcagcaacacaagcgcagcgtggtgaacatattaacaatccaaaagtactgtacacacaagctaaccgaattaaagtgcattcaccagacaaactaatgattaatttagatggtgaatacggtggagatgcaccgatggaattcgaaaatatatatcattgtctggaactatttgttcctgaacatcaagaggatgccctg

SEQ ID NO: 9588 - DNA, 825 bp, Bacillus anthracis
atgctaaagattggatctcatgtttccatgagcgggaagaaaatgttattagcagcaagtgaagaggctgtttcatacggtgcaacaacgtttatgatttatacaggtgcaccgcaaaatacaagaagaaaaccaattgaagaattgaacatagaagcaggaagaaaacatatggaacaaaacggtattgaagagattatcgtacatgcgccatatattattaatgtcggaaatacgacgaagccagaaacattccaattaggtgtagatttccttcgtatggaaattgagagaacatcagcattaggtgtggcgaaacaaatcgttcttcacccaggtgcgcacgttggtgcaggagcggatgctggtattcaacagattattaaaggacttaatgaagtgttaacgccagatcagactgttaacattgcgttagaaacgatggcaggaaaaggaacagaatgcggccgtagtttcgaggaaattgcaaaaattattgatggcgtaaaatataatgaaaaactatcagtatgctttgatacatgtcatacgcacgatgcaggatatgacatggtaaataactttgacggtgtattaaacgaatttgataagattgttggtatcgatcgtttacaagtacttcatattaatgatagtaaaaatgtacgcggcgcaggaaaagaccgtcatgaaaatattggtttcggtcatatcggttataaagcattgcatcatattgtacatcatccacagttaacgcacgtaccaaaaattcttgaaacgccatatgtaggtgaagataaaaaagataagaagccgccaata

SEQ ID NO: 9589 - DNA, 2433 bp, Bacillus anthracis
atgatgtttggaagatttacagaaagagcacagaaagtattagctttatctcaagaggaagcaattcgtattgggcataacaatattggaacagaacatattttacttgggcttgtacgcgaaggtgaaggaattgcagcaaaagcgttgattgctcttggattaagtccagagaaggttcaaaaagaagtagaagcgttaatcggacgtggaacagaagcttctcaaactgtacattatacaccgcgtgctaaaaaggttattgagctgtctatggatgaagctcgtaaattaggtcattcttacgttggaacagaacatattttacttggtttaatccgcgaaggtgaaggggtagcggcacgcgttttaaataacttaggtgttagcctaaataaggcaagacaacaagtattgcaacttcttggaagtaatgaagcaagttcaggtcaccaaggtggttcttcaacaaatgcaaatacaccaacacttgatagcttagcgcgtgatttaacagttgttgcacgtgaaaatcgtttagaccctgttattggacgtggtaaagaaattcaacgtgtaattgaagttttaagccgtagaacaaaaaacaatcctgtattaatcggggagcctggtgtaggtaaaacggcaattgcggaaggattagcacaacaaatcgtaaataatgaagttcctgaaactttacgagataagcgtgttatgacactagatatgggtacagtggtagctggaacgaaataccgtggtgaatttgaagaccgtttgaagaaagtaatggatgaaattcgccaagcgggaaatatcattctatttattgatgaacttcatacattaatcggtgcaggtggagcagaaggtgctattgacgcatcgaatattttaaaaccatctttagctcgtggggaattacaatgtatcggggcgacaacgttagatgaatatcgcaaatatattgaaaaagacgcagctttagagagacgtttccaaccaattcacgttgatgagccaagtttagatgaatcaactcaaattttgaaaggtttacgcgatcgttatgaggcacatcaccgcgtatctattacagatgatgcaattgatgcagctgtaaagctttcagatcgttatattacagatcgtttcttaccagataaagcaattgatttaattgatgaagctgcttcaaaggttcgcttacgctcttatacaacaccaccaaatctaaaagagcttgaagtgaagcttgaggaaattagaaaagaaaaagatgcagctgtacaaagtcaagagtttgaaaaagctgcttccttacgtgatatggaacaacgtttacgcgagaagttagaagatacgaagcgtcaatggaaagaacaacaaggaaaagaaaactcagaagtgacagtagaagatattgcaaatgttgtttctacatggactcgtatcccggtttctaaacttgcacaaacagagactgataaattattaaacttagaatccatccttcacgatcgtgttattggtcaagatgaagcggtagtagctgtagcgaaagctgttcgccgtgctagagcaggattgaaagatccgaaacgtccaattgggtcatttattttcttagggccaacaggtgtaggtaaaacggagctagcaagagcgttagcagaatctatgttcggtgatgaagatgcaatgattcgcatcgatatgtctgagtacatggagaagcattctacttctcgtttagttgggtctcctccagggtatgttggatatgaagaaggtggacaattaacagaaaaggttcgccgtaagccatattcagttgtcctattagacgaagtagagaaagctcatcctgatgtgtttaacattttactacaagtattagaagatggtcgcttaacagattcgaaagggcgtacggttgatttccgcaatacaattgttattatgacatctaacgttggtgcagaggcgttaaaacgtaataagcatcttggatttaacgtacaagatgagagccgcgattattcggatatgaaaggtaaagtaatggatgagctgaaaaaagccttccgtccagaattcttaaaccgtattgatgaaattatcgtgttccatatgcttgagaaaaaacatattcaagagattgtaacacttatggtaaatcagttagtaaatcgcttaaaagagcaagaaattgaattgcatttaacagaaggagcaatttcggctattgctgataaagggtttgaccgagagtacggtgctcgcccgcttcgtagagcgattcagaaacatgtagaagatagactatccgaagaactgttaaaaggtgctattgagaaagggcagaaagttatctttgatgttgaaggagaatcatttgtcattcatagtgccgaaaaggtaaaa

SEQ ID NO: 9590 - DNA, 506 bp, Bacillus anthracis
ccttttgggccctttttggttttttttttgaaaatatgttttgctactatgtttccaacagcagttttttggaaagacagtatagcagcacctcatttctttatcattgtgttatgttttgttactgtgtactatagtccggtccaagggatttattatcggactattatttggtttcttatttgataccgtatacacagaacttgtcggcatataatattttcgcatatccgattgtagcttatttagtatatagcgcgatcaacatattacaattgaatttatttattgttgtctctatcgtactagctagcattgcagcactagagtattatgtgtatggatttttaactttgttaggacgtactcatatgtcggcgtatgtctttttcacagatcgtctcctttctactttattgctaaatgcaattttcttattcatagtttgtttcccactgagacgatatttagtgcgtctttcaaaagcgatggaagaaaaagaaaaa

SEQ ID NO: 9591 - DNA, 1006 bp, Bacillus anthracis
aaagtttattatgaaaaagatgtaacggtaaatttattaaaggaaaaggaaattgccatccattggattggcctcgcaaggtccatgcacatgcgcaaaatttaacgtgataaacggatttgatgtagtagtaggtttaagaaaagggaagtctgggaataaagcgaaagaaagatggattttctgtatatacagtagcggaagcagcaaaacaggctgatgtagtaatgattttgctaccggatgaactgcaaccagaagtatatgaagaggaaattgcgccaaatttacaggcaggaaattctctcgtttttgcacacggatttaatgttcactttgatcaagtgaaaccaccagtgaatgtagatgtatttctagtagcaccaaaaggtccaggacatcttgtgcgtcgtacgtttagtgagggcggagctgttcctgcattatttgcagtatatcaagatgcaacaggagttgcgactgaaaaggcactttcttatgctgatggaattggagcgacgagagctggtgtattagaaacgacatttaaagaagaaacggaaacagatttatttggagagcaagcagtactttgcggcggagtaactgcgctagtccaagctggatttgaaacgttagttgatgccggatatcagccggaacttgcatattttgaatgtttacatgaaactgaacttattggtgaccttatgtatgagggtggacttggaaatatggagatatcagttttcagatacagcgcagtgggggcgacttcgtatcaggaccacgtgtggtatcagcagatgcgaagatagctatgggtacagtgctagcagaaattcaagatggtacatcagcatgaggctggattgcagagcataaagcaggaagaccaaatttttatgcgactaatgagaaagcgaatgatcatgaaatcgcagtagttggacgtaaattacgtggaatgatgcctttcgtacagccgcgagtaaaggcaggggtc

SEQ ID NO: 9592 - DNA, 1115 bp, Bacillus anthracis
aggcgaacgccagaggaatatttagaatatattcgtcagcaaaatcgtgggaagttaaagctatatgtaggggctgctccaggagtagggaaaagttataaaatgctctatgatgctagagagatgaaaaaggacggtatggatattgtaattggtttaattgaaacgcacggggagaaaagagacggaagaagcaattgctgatttagaaaaagttcctttgaaagaaatacagtataaaggaaaagtattttatgagcttgatgtggaaggcattataaaacgtgcaccgcaagttgttgtggtggatgaacttgcgcatagtaatgttcctctgctctaaaaataagaaacgctatatggatgtacaggaattgatagatgccggtatatccgtattatcagcgtttaacatccaacatttagaaagcgttcatgacattgtagctcaaattacaaatgtaaaagtaagagaacgcattccagattttattttacaaaaagcaaatgaaattcagcttgtcgatgcaacgcccggaagtattaaggaagagactattaggcgggaaagatatataaagaagaaaaaattcccccaaagcttacaaaatttctttacgcttaataatttaggggcacctagaaagaattatcactcccgagaagttgccgatgatatggacgagaaaaaatagcccaaacagtgatagagccgattggcgtgaaagaaaaaattctcgtttgtgtacaatacagttcaacagcagagaaattaataagacggggatggcgcatggcggatcggctaaacgccgaattgtatgtattaaatgttgaaagggaaaagatagattctctttcagcggggaaaaagcaaacgattgaagagtggaagtcgctaacgaatcaatttgatgcgagttttgtattagaagaagcgaacggaagaaagcccagcggatgttattattgaagtggcgaaaagactgcaagtaacgccaattttacttggacagtccgcgagaaacaagtgggatgaaattcgaaaaaggtcgattggtaattgaatttatgagagaaacgaaagtatattgatattcatatcgttgcggatc

SEQ ID NO: 9593 - DNA, 3045 bp, Bacillus anthracis
ggtgtttattccgcttctaaattacctagggaattttttccctagcatcgataatcccgcagtcaccgtcacaactttatctccaggactcgacgctgaagcaatgacaaaagaagtaaccgatccccttgaaaaacaatttcgcaacttaaaacaccttggaaacatcaactctttcacgcaccaaggaacttcgccgtttcgatttcccgataccttccaagccaatattgaagaaggccccccgggaggttgaaaaggccttaataacatttaatttccctaaaaaggcacctaacccgtaggttagccatttaataccaccatggattcccctccgccaattggcatcccaaaggcaaaagggtttttccaaagccaaggaaaaccaaatccaaaaggaaatggacccccaccccaaaaccttttttggggcttgccaccgctatggttttttggaaaatcaacttctgaattatctattatactagatccaaaccaattaaaggataaaaacgtaacaacggaacaaatattaaaggttttacaaggaaaagaaacttccactccagctggagctgttaccgttaataaagaagaatatagccttggggtcgtcggggatataaaaaaggtagaggacattaaagacatcactgttgcacctcgcgttaaattgcaagatgttgctcaaagtgaacttaagcaacagtacgatacaatctcacatataaacggtgaagaaggcactgggattaatcatcatgagaagagccaagtaaaaatgcagttgcaatctggaaaagaaatcgataagaaaattaaagatataagtaaacaatataaagatcagttttctattaaacttttagcatcaactcatgagcaagttgaaaatgcagttactagtatggggaaagaaagtatcctttggagcaattgctgcaactctaattatcttaatctttttacgtaacttccgaacgacactcatcgctgttgtcagtattccattatctattttattaacactctttttactacaccaatctaacatcacacttaacactctaacacttggtggtttagccgttgcagttggacgtctcgtcgatgatagcatcgttgtcattgagaatattttccgccgtttacaaaaagaatatttctctaaagatattattctcgatgcaacgaaagaaggtcgccgtcgcaattactttcttctactttaacaacggtcgctgtttttttacctatcggcctcgtatcaggagtaatcggaaaatttagtgttacctatggttattagcgggtgtatattctatactatcatcctttatcggcgcactaacagttggtccacttatgggcttttttactactccaaaaaattaaaccccaaaaggcccggttcttcacaccgatatggtcgttaaattaaaaggggggtctttcccctaaattccattattcaaccttacctcctttttaattaattcccaggaatcaatggccgccttatgtcctactacccgaaagcgaatataaaatctgaagacgacacaatgttatctattaacatgactttcccagctgattacgctcttgaaacaccaaaacaaaaagcctttgatttccaaaagaagctactttcttattccgaaggaaccgatggtatttttaccaatgggatctagcgcagaagatgcacaatggggacaaacgacgaaaaataatcttgccagtatatttgtagtcttcaagaaaggctctgatattgatcaatatattaaagagttaaaaaaagaacataacgctttttgaacccgctgaacttgattatataaaaaacgagttatttcagctcctggggggggcaataattttgcaattcacggtaacagcccctaacgaaaacgatttttaaaaaggctgcttctattcttcgaaacaaaactaaaaaacatggaatgatctttctaaagtaaaaacgaatttagagacttctaagaaagaatgcaaaatccatgtgaatcaagcaaaaggccgaacactaggggattacccccagaattagcagctcaacaagtggcattccttatgaagaaatcacctattggtgaagtgtcaatcaataatgaaaaaactactattatgatagaacataaaaaagaaagcattactaaacaagaagacattttaaacacaaacatactatcacctattaatggaccaatccctttaaaagacattgcaactatttcagaaaaacaactccaaacagaagtcttccaataaagatggaaaaggaaaccgtttcaaaattccaggcagaagccttcaaatgaaagttttaagtaaagtagggcgcagaagtgaacaaaggcgatacccgattagattttacttagcggagcccaaagtaaattttcgcagggggcccactggaatttaatccagaggaactttcccggattttattcaagattaatggggattgcaatcgggaattgtatattttaattatggttaattactttcggacaggcgcgtgtttccttttgcaatcttgttctccttgccattagctgctgtcggcggtattttaggattaattacttcaggaacaccagttgatgtaaattccttgatcggcgcattaatgttaatcgggattgtcgttacaaacgctatcgtattaatagaaagagtgcaacaaaatcgggaacatggtatggaaacaagagaagccttactagaagcaggatccactagattacccccattttttatgccaggtttaccaccattcgtgggtatgctcccatccctatttggccaattcccagccaggaagtatggtatcaaaaagtctagccgttgttgttatcggtggtttggcagtttcaactgttcttacattagtagtcgttcccagttatgtatgaactattagataaaatcgggagaaaaagacgcttctcgtagaaaaataaccacttttacagaaaccacctgatatttaaatgaaaaaagcgttat

SEQ ID NO: 9594 - DNA, 1359 bp, Bacillus anthracis
atgagtgatgtaatggctgatcgtacccctccgcataatatagaagccgagcaggcagtcctaggtgctatattgattgatcaggatgcattaacttcagcatcggaactattggtacctgactcattttatcgaacaaaacatcaaaagatttttgaagttatgcttggattatcggataagggggaaccaatcgacttagtaatgatgacgtcagcgatggctgatcagggattactagaagaagttggtggggtttcttacttagcagaattagcagaagttgttccgactgctgctaacgtagaatattatgcacgaatcatagctgaaaaagcactgttacgtcgtttaattcgaacggcaactcatatcgtgtctgatggatatgagagagaagatgatgtggatggccttttaaatgaggctgagaaaaaaatattagaagtatctcatcagacgaatgcgaaagcatttcaaaatattaaagacgttcttgtagatgcttatgataaaatcgaacttttgcataatcaaaaaggtgaagttaccgggataccaactgggtttactgaattagataagatgacggcagggttccagcgaaatgatttaatcatcgtggcggcacgtccatcggtagggaaaacggcattttcattaaatatcgcacaaaacgtagcgacgaaaacagatgaaaatgtagcgatttttagtctagagatgggtgctgatcagcttgttatgcgtatgctatgtgcagaaggaaatattgatgcgcaaagacttcgtactggatcattaacttctgatgattgggcgaaattaacgatggcaatgggtagcctttctaatgctggaatctatattgatgatacgccggggattaaagtaaatgagattcgagcaaaatgtcgtagattaaaacaagaacagggtcttggtatgatcttgattgactacttgcagcttattcaaggaagtgggaaatcaggagagaaccgtcagcaggaagtatctgagatttctcgtacactaaaagggattgcgcgtgaattacaagtgcctgttattgccttgtcacagttatctcgtggtgtagaatctcgtcaagataaacgtccgatgatgtctgatattcgtgaatcgggaagtatcgagcaggatgctgatattgtagcctttctatatcgtgaggattactatgaccgagaaacggaaaataaaaatacgattgaaattattattgcaaagcagcgtaatggtccagtaggctcagtagagcttgcattcgttaaggagttcaataagttcgttaacttagaacgtcgcttcgaagatgggcatgcaccgccggca

SEQ ID NO: 9595 - DNA, 840 bp, Bacillus anthracis
atgtcagcatttttaggagagttaatagggactgcgttgttaatcgtacttggtggcggttgtttgtgctggtgtaagtttaaagaagtcgtttgcgaaagattctggttggattgttattacaatgggctggggcttagcggtagcggttgcagcgtacgtggttggatcaattagtggggcacatttgaatccagctttgacgataggattagcatttaagggagcgttcccatggggtgacgtacctggttatatcgcagcacaaatgattggggcaattatcggggcagttatcgtatatttacattacttaccacactgggaaagaaacagaatacccaggaacaaagttaggtgtatttgctaccggtccagcaattccgaacacatttgcaaaccttttaagtgaaatgattgggacattcgttttagtatttctctatattagcaattggtgcaaataaatttgcagatggattaaatccatttatcgtaggtttcttaattgtaagtattggtttatcattaggtggaacgacaggatacgcaatcaacccagcacgtgatttaggtccgcgtatcgcgcacttcttccttccgattgcaggaaaaggcggttcaaactgggaagtatgcatggattccagtagtatctattcatattaggtggatcacttgcaggatttttctcctcaagttgtatttgaaggaaaacaaaatgcagcacttatttatgtgattattgcaactgtgattgtattagcaatctcttatatgacaagcaaaaaaagtggaagcaatacaaatagtagaaaagtagcataagggggaaaccct

SEQ ID NO: 9596 - DNA, 1470 bp, Bacillus anthracis
atggagcaattagtagagtggttagtagggcaagtgtggagtattggtttagttgttttcgcgttaggagcaggtgtgtattttacaattgcaactcgttttcttcaaattcgttattttaaagagatgattaaactattatttgaagggaagagctcagaaacgggaatatcatcctttcaagcattttgtttagctttatcaggcagggttggaataggtaatattgcaggggtcgcgacagctatcgcttttggcgggcctggagctgtattttggatgtgggtaatggctcttttaggagcagctagtgcctttgtcgaatcaacattatctcaaatatataaaagtaaagttgaaaatgaatatcgcggtggtacaccgtatttcattgaaaaaggcttaaacatgaaatggtttgcagtcattgtagcggtcgttgtaacactttcatatggtgttttattaccaggtattcaatctagtagtatcgcagttggattcgaaaactctaatgggattagcaaatatataactggtatcttgttagttgtattattagcagcaattattttttggtggcgtaaagagaattgctggcgtttctcaaatgctcgttccatttatggcaattggttatgtaattgttacatgtatcgtattaattgccaaatgtaaaagaaatcccaagtatgttcgctttaattttctcaagtgctttttggggtgaatgaaatagttgggtgggaatcgtcgggtgcagccaatcgcgtggggcgtaaagtgcgctgtatttttctaaagttgcctggcgcttggagaagcgacgtataattccgccgccggcttgaatatctcatccagccaaacaaaggggtatgtccagcgtttttctgatacaatgatacaattgtcgtatgtacagcgacagctcttatgatcttaataacaggtatgtataatgttatacctgaagggaaaagcgctatcgtaaagaatatagggaatgttgatgcgggtccaatttatacacaacaagcagttgaaactgttatgacagggtttggtccattattcatttcaatcgcaattttcttcttcgcatttacaacattacttgcatactactatatcgctgaaacgacacttacttatttagaccgtgaacttaagcatagttggttaaaaccagttttgaaaattggatttttaattatggtttacatcggtagtgtagaatcagcatcgcttttatggaatcttggagatttaggaatcggtagtatggcatggttaaacttaatcgcgattctactattaagtaaaatcgcattaaaagtgttaaaagattatgaaacgcagaaaaaagaagggaaagatcccgtgtttgatcctaaaaatgtgggaattgaaggtttaacattttgggaagaaagaagtaaagaggttgcaagaaaaaactcaaaagaa

SEQ ID NO: 9597 - DNA, 243 bp, Bacillus anthracis
atgaaagcaggaattcacccagattacaagaaagttgtattcatggacacaaacacaggcttcaaattcttaagcggatctactaaaggatctaacgaaactgttgagtgggaagatggtaacacttatccattactaaaagttgagatcagttctgattctcacccattctacactggacgtcagaagtttgctactgcagacggacgcgttgaccgcttcaataagaaatacggtcttaag

SEQ ID NO: 9598 - DNA, 342 bp, Bacillus anthracis
ttgcagaaggctggtatattagatgcggcgattagtttacttgctgcgaaggaagatgtttcaaagatcgctgtggagcaattaaatcgtgaaccagttaaaaatgcactcaacaatatgatgggggcaggagaagcattatcttcagttgatccggaagtaacgaaacaaattacatccagcttagttacgggattacaatttgcaacagatgaattaaatagtggtaaaaaaacaaaagtgatggatttctttaaagtgttaaaagatccagatatcaatagagccattacatttggttttagtttcttgaaagcatttggacaagggttagagaaaaaa

SEQ ID NO: 9599 - DNA, 1352 bp, Bacillus anthracis
atgaatggaaaaagaaatatttttacatgtatttctattgtaggaatcggactagctagtttttctaattctagtttcgcagcaagagtaacggacaattcaatacaaaattggaatcctgtagttaatcaaccaagtagctgctgcaaaggaaatgaaaccatttccccagcaagttaattatgcaggtgttataaaaccgaatcatgttacacaagaaagtttaaatgcttctgtaagaagttactacgataattggaaaaagaaatattttgaaaaatgatttatcttctttacctggtggttattacgtaaaaggagagattacaggtgatgcggatgggtttaagccacttggaacttcagaaggtcaagggtatgggatgataattacagtattaatggctggttatgattcgaatgctcaaaaaatctatgacggtttatttaaaacagcaagaacttttaaaagctctcaaaatcctaatttaatgggatgggttgtcgcagatagtaaaaaagcacaaggtcattttgattctgctactgatggggatttagatattgcgtattctcttcttcttgctcacaagcagtggggatcaaatggagcagttaattatttaaaagaagcacaagacatgattacaaaaggtattaaagctagtaatgttacaaataatagccgactaaatttaggagattgggattctaaaagttcacttgatacgagaccatctgattggatgatgtcacaccttagagcattttatgaatttacaggtgaataaaacttggctcactgttattaataatttgtacgatgtttatacgcaatttagtaataagtactctccaaatacaggacttatttcagattttgttgtaaaaaacccaccacaacccgcacctaaaggcttcttaaatgagtcagagataaacaaatgttatattattataatgctagtcgagtacctttaagaattgtaatggactatgcgatgtacggcgagaagcgaagtaaagtcatttctgataaagtatcttcgtggattctaaataatacgaatggaaatccttctaaaattgtggatgggtatcaattaaacggatccaatattggtaattatccaactgctgtattcgtttcgccatttattgctgcaagtataacgaatagcaataatcagaagtgggtaaatagcggttgggattggatgaagaataagagagagagctattttagtgatagttataatttattaactatgttatttattacaggaaattggtggaaacctatacctgataatatgaagacactaaatcaaatagatgatgcaatttatgaa

SEQ ID NO: 9600 - DNA, 1295 bp, Bacillus anthracis
actaccgtaaaaaatgagaaatatctagaccctaaaaagtggcataaacaggatactacctgtgcattgagtctatttgtgacagcaattggagcacgagtacttttcttacctattaatgcacggtcaaggggtttattatccggtgctggtaattaccatactgggcatatcctggtatggattactcacataaggcgcctgcgtaaatgatatacgccttcaatttctgccgacgaggggacttacaggtacaataagagaatattttcggaaataaagcaagtatcatttttaacatcgtatatttcgtctcaatttatacgatcgtgctgatgtattcggttgcacttacaaatactgcaaagaggtttattgtacacaaatgcacatggccgaagcctcaaagggcgattttatcccttgtattaaaaatcgggcttaatcccataactaaattttggggcaggaattacctgtaagaaaaaagaccatggcaaaaaaccctttccttggctccctaactttttattggaaaacaccttaattccacaatggaatacttcaatgctaagtttttcaagtgtttctactgcttcaactggaacagggtatttcggaacgatttggatgatactaccaatcatcgtattctcgtttaatcattcacctatgatttcgtcattcgttatgaaacagagagctacgtatggaatagatgctactgatgccaagtgtgctcaaatacaaaaagtctgttatatcatgacattcgctggtggtatggtccttgtttggagcagtaccttaagtttgactcccgaagatctttaagtgggcgaaagaccaaaatttggcaattctatcaaatcttggcctaagggccttaattccccaggtaatccctaattgcgggctcctattatttgcgtttgtgggtatttaaaaaggcctttcccttgggcctttatataggagcgtatgaggtaatgcgtgacatgattatcaagtccggtaaaaaacgtgggaaagatataggagaaaaaacagttaagacaatgattcttacttttgttgtactaacaaggttgtatgtggttaatacaaatccaaggtatccttggaatcattgatgcccttagcggtccgttagtcgctgccatcttatgtctattaccgatgtatgcgatttgtaaagtaccagtgctagcaaattacagaggggaaaatgagcaaatgtatttgtaattattatagggatacttactgttctagcaagtattaagtcattattc

SEQ ID NO: 9601 - DNA, 525 bp, Bacillus anthracis
attagcaaggatatgatgattaacgagcaaattcgtgcacgtgaagtacgtttagttggcgcaaaatggcgatcaacttggaatcaagtctcgtaatgacgctttagacttagctgcaaatcttaatcttgatttagtattagttgctcccaaatgcgaaaccgccagtatgccgcattatggactacggtaaattccgctttgagcaacagaagaaagaaaaagaacagcgcaaaaatcaaaaagtaattagcatgaaagaagttcgtttaagtccaacaatcttctgaacacgactttaacacaaaacttcttaatgctatcaagtttttagagaaaggcgacaaggttaaagcgtcaattcgctttaaaggacgtgccattactcataaagaaatcggtcaacgtgttttagatcgcttctcagaagcttgtgctgaagttagtacaatcgaatctaagcctaaaatggaaggacgcagtatgttcttagttttagcaccgaaaaacgataagtaatagata

SEQ ID NO: 9602 - DNA, 1614 bp, Bacillus anthracis
atgttaacaggttatacaaaatggccaaaagaatttgccgatcgctatcgagaggaagggtgttggcttggggaaacatttggcggagtgttaagagagcgtgctgaaaaatatggagatcaaattgcggttgtaagtggtaatacgtatataacatatagtgagcttgataaaaaagtagatcgcttagcgtcaggtttactgaatttaggaataaagccagaagatcgagttgtaatccaactacctaatgttatcgagttttttgaaatgtgttttgcactatttcgaattggagcacttcctgtttttgcattaccttcacatcgcagtagtgaaattagttatttttgtgagtttggtgaggcaagtgcgtacgttatttcagataaggctcttggttttgattatcgaaaactagcaagagaagtgaaagagaaagtaccaactttacaacatgtaattgtagtgggagaaaaagaagagtttgtgaacataagtgatttatatatagatcccgttctattgccagaagttcagccaagtgatgttgcgtttctccaattatcaggagggacaacaggactttctaaattaattcctagaacgcatgatgactatatttatagtttacgtgttagcgctgaaatttgtaatttaagtgcagagagcgtctatatggcagttcttccagtagcacataattacccaatgagttctcctggaacatttggaaccttttatgcgggtggaaaagttgtgctggcaactgggggtagtccggatgaggcatttgcacttatcgaaaaagaaaaagttacgattactgctctcgtaccgccattagcaatgatatggcttgacgctgcatcttcacgtaataacgatttatcaagcctagaagtgattcaagtaggtggtgcaaaatttagtgctgaagttgcaaaacggatacgtcctacatttggatgtacattacagcaagtgttcggtatggcagaaggattagtgaactatacaagattagatgatccggaagaaattataattcatacacaaggtagaccaatgtctgcacttgatgaagtacgagttgttgacgaatatgataacgatgtaaaacctggtgaagtaggtagtttattaacacggggtccatatacaattcgtggttattataaagcagaagagcataatgcacgatcatttacaaatgatggattttatcgcacaggagatcttgtaaaagtaaatgaacaaggttacatcattgtagaaggaagagataaagatcaaattaatcgtggtggtgagaaagtcgctgcggaagaagttgaaaatcatctattagcacatgatgcagtacatgatgtagcgattgtatctatgcctgacgattatttaggagagcgtacttgtgcatttgtaatagctcgcggacaagctccggcagtaagtgaattaaaaaggttcttaagagaacgcggtatagcagcttataagattccagatcgaattgaatttattgaatcattcccgcaaacaggtgttggaaaggtaagcaaaaaagaattacgtaaagtcattgcggaaaaacttgttacggtaaaaaga

SEQ ID NO: 9603 - DNA, 404 bp, Bacillus anthracis
caagttattatggatcattacaaaaatcctcgtaaccatggcgtgttagaagatagtgtcactgttaacttgaacaatccaacttgcggcgatcgtattcaacttacgatgaaagtagaagaaggtattgtgcaagaagcgaagtttgaaggagaaggatgttctatctcaatgtcttcagcttcaatgatgacacagccagtaaaaggtaagaaaattgaagagggcacttgcagctttctaaaattttctctgacatgatgctaggaaaagagtactatgacagcatcgatttaggagatattgaagcattacaaggcgtatgcaagttccctgcacgtattaaatgtgcaacattagcgtggaaagcgttagaaaagggcttaaacgaagataagtaatgt

SEQ ID NO: 9604 - DNA, 733 bp, Bacillus anthracis
atgggtcgtaaatggaatattataaaagataaaaaagcatcaaaagatgcaaattctagccgtatatacgcgaaatttggacgtgaaatttatgtagcggcaaaacaaggcgagccagatccggaatcaaaccaagcgcttagagtggtattagaacgtgcgaaaacatacaatgttccaagaacaattatcgatcgtgcagttgaaaaagcaaaaggtggttcagaagaaaattatgacgagcttcgttatgaaggatttggaccaaatggagctatggtaattgtagatacacttacaaacaacgtaaaccgtactgcagctgatgtacgagctgcatttagcaaaaacagtggtaacatgggtgtaaacggttctgtagcttacatgtttgatgcgacagctgttatcggccttgaagggaaaacatcagatgaagttcttgagattttaatggaagcagatgttgatgcacgtgatattcttgaagaagaagatgctgttatcgtgtatgctgaaccagatcaatttccatgcagtacaatttgcttttaaaggatgccggggttgaagaatttacaagttgctgaattaacaaatgctggcacaaaatgatgtaacacttcctgaagatgcacaagcacaatttgaaaaaatggttgatgcattagaagatttagaagatgtgcaacaagttttccacaacgtagactagggagaataatactgatag

SEQ ID NO: 9605 - DNA, 1362 bp, Bacillus anthracis
atgaagaaagaagagagaatggcgaaagaaatttcagagcaacttgggggagtaaaaaatattcgtggcattgctcattgtatgacgagattacgattaacgcttcatgatgaaagtaaagtaaacatggaccttttgaaaaaggtagaaggggttatgggcgttattgaagatgagacgcttcaagttgttgttggtccaggaacggtaaataaagtagcagctgagatggaaggtttaacgggactccgaattggtgaggtggcagattatcaccttgaagatcttgggcaagagatgaagtcagagattaagaagaaaaataatacaccagtgaaaaactttttaagaaaaataggaagtatctttattccattaattccgggtcttgttgcatcaggtattataaacggggttgctaactttgcgaaaaacgcaggtgctgatccgaatgcaacttggctacaaatgttactacttattggtggcggtatctttacattcttaggcattttagtcggctggaatacagcgaaagagtttggcgggacgccagttcttggggcaattgctggtattttaattttcaacccggcaatggcgaatgtaaaattatttggtgaagcgctcgtacccggacggggcggattatttgcagttatttttgcagcatggcttatggttgtagtggaaagacaagttcgaaaagctgtaccaaatgcagttgatattattataacgccgcttattactgtgttagtcgtaagtatcgtaacgatgttagcaattcagccggtagcaggtttcttatctgaaggaattacaaacggaattaatggcattttaaatattggcggagcgtttgcgggagcagtacttgcaggaacatttttaccgctcgttatggtcggattacatcacggtttaacaccgattcatatggagtttattaatcaaacgcacgtaacgcctttattaccagtactcgcaatggctggagctggtcaagtaggtgcagcgattgctatttttgtaaaaacaaaaaacaaacgacttcgtaacgtaattaaaggggcattaccagttggatttttagggattggtgaaccgttattatacggggttacattaccactgggaaaaccgtttcttacagcttgtttaggagcagcagttggcggtgcgttccaagcagttatgaaaacagctgcactcggaatcggtgtatctggattatcattaattccgttaattgctgataataaatatttattatatttccttggattagtagtggcatatacgttcggattcatctttacgtacttcttcggatttaaagaagaaatggcagaaaacata

SEQ ID NO: 9606 - DNA, 933 bp, Bacillus anthracis
atgaagcgcatgctaaaaatacacgaaatgtctatcataacgttactactaatttatatagctattgtcggaatgataaaccctagttttattcaatttaactcgttatctttaatggtgaaatcaagcgttattttagtcgtgctagcaatcggccaatcgttcgtcttatttacgaaaaatatagatgtatcagttggttcaagcatggggttaagtgcagcagtttgcggaatgttgctaacgaatgaatatagtgcatccttgtcgatatttgctgctattacacttggcgctattatcggtttcgtaaagcaggatgggcgttgcgaagtttcgagtaccagccattattatgacattaggcatgttaggaattattagaggtgcgatgttgattttcacaggcgggaagtggattgaagatattccaaacgattttaagcagctgtcatctatcgtcattcttggtttacctataactgtatggttcgttcttattattttactactactatacttctttttaaggaaagtgccatttggaagatacttttatgcggtaggtgataatgaagatggcgcgagacttattggtatacctgttaataaagtgaagatatgtgcgtttataatttcaggcataagtgctgcactcgctatgttgactatttgttatgaatatcgggttcattccgaatcaaactggtacaggattataattacaagtaatcgcagccgctgtactaggaggcattcatttaaaaggaggaacaggatctttatttggagctgcattaggagcattatttttagaaagccataagcagttcactcgtctttttaaaaataccagcattttggaataatgctatttcaggttttttattattacttatcatcatactggatagtgttatgaaaaagtggaag

SEQ ID NO: 9607 - DNA, 819 bp, Bacillus anthracis
atgacttataaaatgattgttttagatttagatgatacgttattacgtgatgaccatactatttcacctcgtacgaaagaagctctaatgactgcgcaagagcaaggagtaaaagtggtacttgcttccggacgtccaacattcggtatgcgcaatgtagcgaaagaacttcgtttagaagaatacggtagtttcattctatcttttaatggcgcaaaaattattaactgtaaaacaaatgaagaaatctttagtagtacgctttctcctgaaatcgttcacaatctatttgaaattagtaaaactgaaggtgtatggattcacacttatattggcgatgatatcgtaacagaagaaaataatccttatactgaaattgagggcgatattactggtatgccaattgttgtagtagatgactttaaagctgctgttaaagagcctgtagtaaaagtattaatgaataaagaagctgaacgccttgttgaagtagaaaagaaactacaaaaacaactagaaggacaattaagcgttatgcgttctaaaccattcttcttagaatttactgaagctggtgttacaaaaggaacgagcttaaaccaattaatccaaaagcttggcattaagcgtgaagaagttatcgcaatgggcgatagctataacgatcaggcgatgattgaatttgctggtcttggtgttgcaatgggcaatgcacctgatgatattaaggaaattgcaaactatgtaacagatacaaatatgaacgatggcgttgcaaaagttgtagagaagtttgtactaaaaagagaagcgcttgtt

SEQ ID NO: 9608 - DNA, 456 bp, Bacillus anthracis
atgtttaaacaatttaaaatgattattgccgtatttgctgttttatttacgtttattgcaacactaggtttacaagatgcaaaggctgctacaaaactagctgatggaaaatataatattgcttttactgtatggaaaggcgataaagatgaatcgtctagaatgaataggtattttgaaagcccagcaacattaacagttaaaaatggaaaacaatatgtttcatttaaagtgaaagatagtacttctattaaaagtttccaagtagaaaaagatggtcaatttgtagaaacaaccgtgttaagtgaaaacaaaaaagataatactagagtagtagaatttgaagttgctgacttgtcaaaaaaactaaatggcaaggtgaaaattaatattccaattattaattataatgcttcatatgatattcgctttgtatttgatgggaacagtattaaa

SEQ ID NO: 9609 - DNA, 569 bp, Bacillus anthracis
atgttattaatcggcacagaagtaaaaccgtttaaagctaatgcttaccataatggagaatttatccaagttactgacgaaagtttaaaaggaaaatggagtgtagtttgtttctacccagctgacttcacattcgtttgcccaactgaacttgaagacttacaaaaccaatatgcaactcttaaagagttaggcgttgaagtatactctgtatctacagacactcacttcactcacaaagcatggcatgatagctcagaaactatcggtaaaatcgagtacatcatgattggtgacccaactcgcacaatcactacaaacttcaacgttttaatggaagaagaaggtcttgctgctcgtggtacattcatcatcgatccagacggtgttatccaatctatggaaatcaatgctgacggtatcggccgtgacgcaagcattcttgttaacaaaaattaagcaagctcaatacgtacgtaacaacccaggtgaagtttgcccagctaaatggcaagagggttctgttacactaaaacccagccctggactttgtagcaaaaatctaagga

SEQ ID NO: 9610 - DNA, 1021 bp, Bacillus anthracis
aaacacctggagcatcaagtttcgttacaaacggctcttgctgctattaaagcattaaatcaagataaatttcgagattcttccaatttatattacagaacaaggtcaatggatacgcggtgaacgtattgaaggtgaagtagcaaatgttgaagttctaaaaatgagcggtgcagaaaatgcgatttctccgttatctttaagcacagaaatcattccatctgcaaatgctgaggaaaatgctatcgacgttattttcccattactacatggcaccaaatggtgaagatggaacggttcaaggtttattagaatttaatgaacattcccttatgtagggaaatggtgtttctagcatctggttgggctggtatggataaagttgtttatgaaaaaacatttttcgcagaaagctggggattaaaaacaagcgaaaatattgccatcattcattcgtagccggatggggaaaaagatcgtggaaacagcatatgaaaaaagtagaaagaagtattaagggatacccttgggcttcgtaaaacccagcaaacccttggtttcaaggtgttggggaaattaataagtggtaaaaatccgtgaagaagcttgagaaatggcatttgaaagaggcattcccaatttttgaccgtaaaattatttgtagaagaagaaatatcattggacgtggaagtagaaagttgggtgtactagggtaatgatgaaaccgaaatggtccagttgtagggtgaaatcgtacctaaaaaagacttctatgattataagtcgaaatacatcgatggtgatacagccataaatatccccagctgaaatgacagagaaagagtctaatgttattaagcgagatgcgattgttgccttccaatcgttagatggtgctggcttaacgcgagctgatttcttcttaacgaaagatggagaagtatatattaacgaagtgaatacgatgccaggatttacgccgtttagtaagttccctttaccgggggcaaacatacgggat

SEQ ID NO: 9611 - DNA, 2172 bp, Bacillus anthracis
gatgtggagagtagtatcgctcttgctggagcagtgttcacattacaagacgcaaacggtacagaaattgcgaaagatttaaaaacagatgagcacggagtactagttattcctgacttagcaccaggagattaccaatttattgaaacagccgctcctgaacattataaattagatcaaacacctattaagttcacaatcgaaagaagtcaaacgaaacatgtcttcgttacagctactaacagcttaacgaaaggtagtgtggagttaattaaagttgatgatgttgaagaaaacacaacactcgagggtgctgtatttaaaattgttaataaggatggacacgatgtccgtactgatttaactactgataaaaacggccgtttagttgttgatgaattaccacctggagactatgagtttatcgaaacaaaagctcctactcattatgacttaaacgaaacacctattaagttcacagttaaaaaaggacaagaaaaaatcgcttccgttactgctacgaatagcttaacgaaaggcgctgtggaactttctaaagtagatgacattgacggttccactcttaaagatgcagtatttaaaatcgtggatatgaacggcaatgacgttcgcactgatttaactactaataaagatggcaaaatctctgtttctgatttacggccgggtgactatcagttcgttgaaacgaaagctcctactcattacgacttaaatcaaactcctatcaactttactgttgaaaagagtcaaaccgctacagcttctgttaccgctaagaatagcttaacgaaaggcgctgtggaattaacgaaagttgatgacatcgacgggactactcttgaaggagctatctttaaaattgttgatcaaaatggcaatgatgttcgcactgatttaactactgataaagatggcaaaatctctgtttctgatttacggccgggtgactatcagttcgttgaaacgaaagctcctactcattacgacttaaatcaaactcctatcaactttactgttgaaaagagtcaaaccgctacagcttctgttactgctacaaatagcttaacgaagggcgctgtggaattaacgaaagttgatgacatcgacggggctactcttgaaggagcagtatttaaaatcgtggatatgaacggcaatgacgttcgcactgatttaactactgataaagatggcaaaatctctgtttctgatttacgtccgggtgactatcagttcatcgaaacgaaagctcctaagcattatgacttaaatcaaaaccctatcaactttactgttgaaaagagtcaaaccgctacagcttctgttactgctacaaatagcttaacgaaaggtgctgtagaattaatgaaagtcgatgatattgacggaactactcttgaaggggctatctttaaaattgttgattctaacggacatgatgttcgcgctgatttaactactgataaagatggcaaaatttctgtttctgatttacgtccaggagactatcagtttattgaaacaaaagctcctactggatacgatttaaacgctaagccaattcctttcactattacgaaaggacaatctcaagttacttctgtgactgctttaaatagtttaacaacaggttcgatggagttaactaaagttgatattgatcataacggaacacttgaaggtgccattttcaatattttagatcaagatggaaaagtagtacgagaaggcttaaaaacagatgggcatggtaaattaatcgtaaatgatttgaaacctggtaattatcaactagtggaaacaaaggctcctgaaggctatcaattagatgcatcaccaataagctttactattgaaaaagcccaagcttcaccactacaaattacagtttcaaataaaaaggttgagtcttcatcaggcggggataataaaccaattactcctccgaataaagaagaaaaaccaggtaaggaaacttccgaagaactagaaaacggaaatcctaaaacacagacaaacaaacagcaagatgaccgaaatacaggtaaagaacttccaaatacaggtcacaaaaatgattctacccaaacagtcggtatcattcttctattagctggattgttaagtgttttagctacaaaacgaaaa

SEQ ID NO: 9612 - DNA, 1397 bp, Bacillus anthracis
attaattggacagaagaagttgcaaaacgaaaagatgatttaattcgtgatacacaacaatttttacaaattaaaagtgtatgggaagaagagtcggcaaaagagggcgcaccgttcggtgaaggtgtagaaaaagcgctatctttcatgttacataaaggagaaacggaaggttttacttctaaaaatttagaagggtatgcaggtcatcttgaaatgggacaaggagaagaattagtaggtattctttgtcacgttgacgttgtaccagaaggagatggttggacgactcctgcatatagtgcagatattcgcgatggaaagatttttgcacgtggtgcaattgacgataaaggcccaacgatggcagcttattatgcgatgaaaattgtgaaagaattaggtttacctctttcaaaacgcgttcgtatgattttaggaacagatgaggaaagcaattggaaatgtgtagatcactactttaaaaatgaagaaatgccaacaatcggttttgcaccagacgcggacttcccaattattaatgcagaaaaaggaatttctgatatacaagttgtgcaaaatggtagtgaagagaagaaaggtgcatatgaacttgtttcatttgagtcaggtcgccgtttaaatatggttcctgattttgcagaagcggttgttacaggagaagatgtaaatgcacttacagtagcatatgaagagtatttacaaactgctaaaaaaataggtgaagcaattgtagaaggtaatacggtgacattgcaaattaaagggatttcagctcacggatctactcctgaaaaaggagaaaatgcaggtttattactggcaaacttcttaacgacagttgctcttgatgggaaagcaaatgcatttgcaacgtttgcaacagaaacatttactggtgatatttttggagaaaaggctacgattgcttataaagatgaagttagcggtccattgacagtgaatgttggacgcctttcttatacgaaaagaatggtggcaatttaggattaaacgtacgttatccagttacgactaactttgaagaaatgattgcaaagttaaaagaatatgtaggtactcatggatttgcagtagcggattattcgaactctcgcccgcatcacgttgataaagatcacgtattaattcgtacgttgcagcgtgtatacgaagagcaaacaggtgaaaaagcagaactattagcaatcggcggcggtacttacgctcgttcattaaaagctggtgttgcattttgcccattgttccctggaaaagaagaacttgcacatcaaaaagacgagtatattgaaattgaagacttattaaaagcaacagcaatttatgcgcaagcaattcatgaattagcgaaataa

SEQ ID NO: 9613 - DNA, 600 bp, Bacillus anthracis
atgattcgaattattattgcagaagatcagcggatgcttcgtggtgcattaggggccctgcttgatttagaagatgatattgaagtaattgggcaagctgcgaacggggaagaagcactaaaactaattgaatcgttaaagcctgatgtaagcattatggatattgaaatgccaattcaaagcgggttagatgttgcggaaacgttaaagaaagaaaagtcagcgtgcaaagtaatgattttaacgacatttgcgcgccctggatactttgaacgtgcgatgaaagctggtgtgcacggatatttattaaaagatagcccaagtgaagatttagctgcatcgattcgtaatgtaatgaaaggaaaacgagagatctctcaagatttaatgttcggcttatggcaggagcaaaatccgttatcagatcgtgaaaaagaagtattgctacttgcgaaagagggaaagacggcaaatgaaatcgccaaggcactttatctttcacctggtacagtgcgtaattatatttctgaagtattaacgaagcttgatgcgaaaaatagaattgaggcaattacaattgcggaagaaaagggatggata

SEQ ID NO: 9614 - DNA, 365 bp, Bacillus anthracis
atgccaagagtaaaaggtgggacagttactcgtcaacgtcgtaaaaaagtaattaaattagcaaaaggttactaccgttcaaaaaatacattattccaaggtgctaaccaacagggtatggaatctctaatgtatgcattcccgtgaccgccgctcaaagaaacgtgacttccggtaattatggattacacctattcaccccacagctccaatgaatgggctttccttacagccgcttaatgcacgggtcttaaaatgctggcatccaaattaacccccagaaagcttctgacttaacttgtcatgacaaaaaaactttccctgaattaacaacacgttgcaaaaacacctttactaatttattt

SEQ ID NO: 9615 - DNA, 3682 bp, Bacillus anthracis
tattacaatgatttacaacacccacttatcgcttcaactatgacactaggacacaatcgctattctactaatacattatctaatttttttcgtgttacacccatttagtattctcggacataatggtgaaattaacacaattgcaaaattacgcgatcaagctgaaatgattcacgttccccttactgctgggggccagtgactcccaagatttaaacggcaccttaaaaactctacttgttcaatacggctaccgtttatttgaagcaatgggatattcttattccccccaatttattaatgaaattaaactttatgaaacacatttacaagatttatatacgtatatacgtgaagcatggggccattttgcgcaaggtccagctggcattatttcacgttataaagatgaagctgttttcagcgtggattcccttggacttcgaccagtatggaaggttgaaatagaaagctcttatattttctctttctgaacctggagttgtattcaccactgaaatatgtagcagaacccaaccctctcgctccagaagaaaaagtcgccataaagtggaatgaccaagatgaacttgtactctacgaacatgacgactaccaaactcaagtatataacgcgttttaaaaagaaagtggatgttaccaattatcattttacatttatctattcctaaaacgaaagaaatcccagatgcatgtgattctatgcaagttgaaacgaaacaatatgttgctttcggatgggaccgagaacatattcagcttcttgaacagatggcaacaaaagggggtggagcccatcccgttcacttggggcatgattcaccactttgccgcactggatactgatagacgaaatatcgctgacttcattaaggaaagtgtagctgttgttacaaaccccgcaatcgatcgcgatcgagaggtcgaacacttctccacacggaacgatacttggagagcgaccaaagtttattaagcggatgcgaaaaaacccatttgtagttgagatgcttttccccccatattttagaaggaaagcgtggccccaatcttatttgcccgggaataccccccatttacctatgaaccacttttagaaacatttcaacaccccttagctctatcgctcaccattttgggtaacattcagtcagggcagaaaactttacaaagcccctttaagtcgaattagttcggaaagcgataacagccggtgaaacaatggagcttcccctactattaatagacgatgccgatgctcatctaaatgaacggttatggattgatccacatttagttactgctaaagtacatcaagtattaagcgaaaataaattacgtcgaaactggctctctcgttatacgctcgggtggcccttcgctccttacacgatatcgtcacactgcatggattaggagcagatagtattaatccctatttattatttgcaaccgtaaatgatgggacaaaaacaccaattacgaatttatacaatgcacttaataaaggactggagaaagacatttcaacaattggaattcatgaattgcgtggttacggtcgcctctattcttctattggattacatgaggaaatcgcaaatatattgcaaattacaaatttcttaggttcaaatgatttagccttttctcttgaatcacttgctgaagatgcacaaatgcgagcggatgattataacgatccgaagttttagaatacgaaaatcttttcatatattcccgcgaatttggaaagatccaggtgatgtcgcaaaaggaaactcttatgatgattaccgtgacaagttaagtgaattagaagaaaataatccaattgcgattagacaccttattcaaacgaaagaaacaaaacatgtcattccaactgaagaggtatctatcagtattcaaaatcatgatttaccatttattattagttccatgtcatttggctctcaaaatgaaattgcctttcgtgcatatgcagaagcggccgaccagctaaattatgattagctgaacggtggaagggcggcgaaattaaagatatgattggaaaaatatccacatacacgtggacaacaagttgcatctgggcgatttggcgtaaacgccgaactattaaattcatcaaacttaattgaaataaaaatggggcaaggcgcaaagcctggtgaaggtggacatttgccaggttcaaaagtaacagccaaaatcgctgaagcacgcaatgcaacaattggtctcagatttaatttccaccttctaacaaccatgatatttattccattgaagatttagctcaaatgattacagaaattaaaacggctaatcaacttgcgaaagtagctgtaaaggttcctgttgtccctaatattggaacaattgctgttggcatcgcaaaagctggtgctgattttattaatattagcggatttgaagggtggttcacgggctcccaggattccacgcattggcaacaagtaggccttccttgtagaaaatgggtgggaaagccggttcacaatgctttattagaagcaaaatatgagacatacggtagaaattttgggctgatggtgggtattcaaagtgttaatgatgccttgaaaaatcaagctcctggaagccaatcgcaattggatttggtacattatccatgattgcaatcggctgtacaacttgccgcggatgtcatctagatacttgtcacgttggaattgccaccacaaattgaatctgaagctcaggcaaaagaacacggattccgccgtttcgtcccacggcgaactagaaagtgccgtgggctggattattacatttattcactacttttggtgaagaactaaaacgattaccaggaaaatcttggctatacaaacttacaagaaattgtcgggcgttctgatttattagaacaagttcgaggcaaaaattttattaaccttatgggatttactacaaacgatagaacatccatctgttataaaaacagaacacgtactagaaaaacaatttgaacccattcattcccctcattcaaaagaatttagtaggcgttggtgtagagcaacgcgttatgggcggtctagaatcttgctatcgcgtgcgtagtaaattatatgaagatacaaaactttgaacactgacataaaagtatacgaaatggctcgatttcttggaaatggaattaggtgccttaccatagtgaaaaatttatttatacatggaaaattggcggtgcgcacaaaaagggatttggtaaaaccctcctttggggggggggattttttttaaccaaagcccaaagggaaaaagatggcctatattataacggttctgtcggaaaagggtattggatacggtgcacaaaaaggagcgttatacgttcaaggtaacgctgatgctcgcgctggcattcgtctctctggagcagacatgataattggagggcgcatgacaaagccactccgtgaaaaagagcaagggaatataggagcatactctaatattaaaggttttgcttttgaatatatgacaaatgggcgagcgcttgttttaggggattcctggttcatggatctgtgctggtatgactggcggcgtttgtttatttacgttcattgattcaagcttagggtttacccagaaccaggcctta

SEQ ID NO: 9616 - DNA, 897 bp, Bacillus anthracis
atggaagttcgtctttctaaagaagaaaacacttctttacaaacgattcaaacgaagaacacatcgaaatggattatgagctatcgaaaactgaaaagaaataaaatggcatttatcggaggtattatcgttcttttctatattgttatagctatatttgccccattgttagcaccctataatccatttgacattcagttagtcaacaaattacaaccaccatctatggaacattggatggggacagatgataaaggtagagatattttaagccgccttttacacgggacacgactttcattacttgttggattttcttctgtatttataggagcattgttcggcattattctcggtatcatttctggttattacggtggatggtttgacacggttattatgcgaatcatcgatatcatgctagctttccctggtattttacttgctcttgctattgtaggcgcactaggaccaagtcttgtgaacgtaattatcgctattggctttttctcaatccctatgttcgctcgtatcgttagagcttctacattaacagtaaaaaaattagagtatatcgatgctataagagcactaggggcaaatgactttactattattatgaaacacatattccctaacatcttatcacctattattgtccaagccactttacgcttagctacagcaattttatctgcagctggattatcatttttaggacttggagcgcaaccaccttcacctgaatggggtgccatgttaagtaatggacgcgactttttatttaccgcaccacatattgcaatgtttcctggaattgcaatgtctacactcgtaatcggtttaaacatgtttggtgatggattacgtgatgcactagatccgagacttaaaaaa

SEQ ID NO: 9617 - DNA, 994 bp, Bacillus anthracis
gatatgctagttataagcgcgaaagaacaaagagacttagtaaatatgaacgaagtcattgcatacgcggcgcttgctttacaagagttttccgcagaaagaacgatcacaccaatacgtacttcactgccatttgcgaatgagaaaaatactgcattaattatgccttccgtagcggagggacttgaagtacttggcttaaaagtagtaacagtagtcccgcataacaaaaagataggaaagaaaacgataaacgggattgtgatgctatccgactttcaaacgggagaaccgctcgcacttttagaaggatcgtacttaacgatgattcgaacaggcgccttatcgggagtagcaacaaaatatttagctcgtcataacgcaaaaactttatgtattatcgggacaggagaacaagcgaaagggattgccgaagcagtatttgcggttagagatattgaaagagtcatgttatacaaccgaacagaagaaaaagcacattgcattctcgcaatatatacaaaagagattcaatacacctacttatgttcacaaaaacgcaaatgaagcaataagcgaagcagacatcatcgttacaactacgagcgcatccacacccagtcttctcagaaaaactacaaaagggcgtccacataaacgccgtcggctcatttaggccgaacatgcaagaattaccatctcacgccatcgctaatgcaaataaagtagtagtcgaatcaaagagggcagcactagaagaaaacaggtgaccttcaagttccagtgcgagaagggctatttgaagggagcgacatccatggcgaacttggacaaaattataacgggggaaaaacacgccgccgaaagggatgaaaagattactgtttttaaatcggttggtttggcagtagtggatattatcgttgcgaagtatttgtatgagaaagcggtggagcgcgggggtgggagtaggattgagttttgagggagactg

SEQ ID NO: 9618 - DNA, 1920 bp, Bacillus anthracis
ttgattttattacaagtaaacgcgctttcgaaattatacggtgcagaaacgattcttgcaaacataaaattggaagttcaaacgaaagatcgtatcgcattagtcggacgaaatggagccggaaaatctacattattaaaaataatagcgggtgagctatctcatgatggtggcgaaattataaaaccgaaagatgtctcaatgggatatttagctcaaaataccggtttagaaacatctttaacaatttgggatgaaatgctaaccgtctttacacacttgcagcaaatggagacaaaacttcgaaggctagagcaagagatgggaaaagaagaaaacttttcaaacgaggctacatatgaaagattattagctgattatgaccaattacaattagattataaagatcaaggtggctatcagtacgaagcagatatccgttcgattttaagtggtcttggcttcccagttgaaacgcaccagacgacgatttcgacattaagcggtggacaaaaaacacgattagctctcggtaaattattattaacgaaaccagacctacttattttggacgagcctacaaaccatttagacatcgaaacattaacatggcttgaacaatatttacaaggttatcctggggcaatactaatcgtttcccatgaccgttatttcttagataaacttgttacacaagtatatgaaatttcgaataaagaaagtagacgatttgttggtaactacagtaaatatttagacttaaaatcagcactatacgaacaagaaatgaaacgttatgaaaaacaacaagatgaaatcgctaagctggaggacttcgttcaaaagaatatagctcgtgcatctacgacaaaacgtgcacaaagtcgccggaaacaattagaccgaatggaattattaacaagaccattaggggattctaagtcagcttccttccactttgatatcgaaaaacaaagtggcaatgatgttttacaagtaaaggatgcaactatcggctatgataaggatccaattattgaacatgtaacaatgcgcttaactcgcggagatagcgttgctttagttggtccaaatggaattgggaaatccacattgttaaaatccattgtgaataagttaccactattacatggtgatgtttctttcggatccaatgtatccgttggttattatgatcaggaacaagctaatttaacatcttccaagcgagttttaaatgaattatgggatgaatatccactgcaacctgaaaaagaaattcgcacgatattaggtaacttcttattcacaggagatgatgtattaaagccagtatcttctcttagtggtggacaaaaagctcggttagctcttgcaaaacttatgatgcaaaaatcaaatttattaattctcgacgagcctacaaaccatcttgatttaaatagtaaagaaatcttggaaaatgctttaattgattatcctggtacccttctatttgtttcacatgaccgctactttattaatcgtgtaacgacaactgttattgagttatcaacagaaggtgcacaggaatacttaggggattacgattactacgttgaaaagaaaaatgagatgatcgaacgtgcggaattagaacaagaagatgaaactccggttcaaaagacagttgcacaagaaaaattaaattacctggaagaaaaagagcgcaaaaagttggagcgtcaacgtactcgaaaaattgaggaactagaacaaaacattgtacaatttgaagaagaaattgctacgttagaagatcaactttgcttaccagaaatatatgcagattatgaaaaggctagtgaaattacaacgaaaaagcaaacactacaagagcaactggatgcttgtatggcagaatgggaagagctgcatgta

SEQ ID NO: 9619 - DNA, 1302 bp, Bacillus anthracis
ttggaaaagatcatcgtccgtggcggaaagcggttaaacggcacagtgcgtgttgagggcgcaaaaaatgctgtattacctataatcgctgcagccctattagcgagtgatggaaagaatgtactatctgaagtaccagttttgtctgatgtatacacaattaatgaggtattacgtcatttaaatgctgaagtcgtatttgaaaataaccaagtaacaatcgatgcttctaaagagctaaacattgaagcaccatttgaatatgtacgtaaaatgcgtgcatctgttcaagtaatgggaccattattagcacgtaacggtcgtgctcgtattgcacttcctggtggatgtgcaattggttcacgtccaattgaccaacatttaaaaggcttcgaagcaatgggagcaaaagtacaggttggtaacggttttgttgaggcatacgttgagggagaactaaaaggagctaaaatttatttagacttcccaagcgtgggcgcaacagaaaatattatgtctgcagctacattagcaaaagggacaacaatccttgaaaacgcagcgaaagaaccagaaatcgttgacttagctaacttcttaaatgcgatgggagcgaaagtacgcggagctggaactggaacgattcgtatcgaaggcgttgataaattatatggtgcaaaccactctattattcctgaccgtattgaagcgggaacattcatggttgcagcagcaattactggtggagacatcttaattgaaaatgctgtacctgaacatttacgctcaattacagcgaaaatggaagaaatgggtgttaaaattatcgaagaaaatgaaggtgtacgtgttatcggcccagataagttaaaagcggttgatattaaaactatgcctcacccaggtttcccaacagacatgcaatcacaaatgatggcattattactacaagctgatggcacaagtatgattacagaaacggtatttgaaaaccgctttatgcacgttgaagaattccgtcgtatgaatgctgatattaaaatcgaaggtcgttctgttattatgaacggtccaaacagcttacaaggtgctgaagtaggcgcaactgatttacgtgctgcagctgcattaatcttagctggtttagtatcagaaggttacactcgtgtaactgagttaaagcatcttgaccgtggttatgtagatttccataagaaattagctgcattaggtgcaactattgaacgtgtaaacgaaaaagtagaagaagtgaaagaacaagaagtttctgatcttcacgct

SEQ ID NO: 9620 - DNA, 1614 bp, Bacillus anthracis
atgaattataaagttaagtttgagcacgttacaaaaaagtataagctgtacaacaagccttttgataagcttaaggatttattttttaggagcaaagatggagaatatcattatgctttgaataatatttcttttgaagttccagagggtgaaattgttggaattgtaggtttaaatggttctgggaagagtacattgtcgaatttaattgctggtgttacgatgcctaataaaggaacagtggatattaaaggttcagctgcattgatagcaatttcttcagggcttaatggtcaattaacagggattgaaaatatcgaattaaaaggtttaatgatgggaattacaaaagagaagattaaggaaattattcctgaaatcattgactttgctgatattggaaagtttatgtatcaacctgttaaaacttattcaagtggaatgaaatctagactaggatttgcgatatcagttcatattaatcctgatattttagtgatagatgaggcactttctgttggtgatcaaacgtttacgaaaaagtgcctagataagatgaatgaatttaaagagcaagggaaaacaatcttctttattagtcattcactttctcaagtgaaaagtttctgtacaaaagcgttatggcttcattatggtcaagtaaaagaatacggggatataaaagagattgtcgatcattatgatgaatttctgaagaaatataatcaaatgagtgttgaggaaagaaaagacttaagaaaagaacaaatatctcaatttcaacatggcttactacaagaggatcaaaccggtagggagagaaaacgtaaaaaaggaaaaaaaacaagccgaaagtttaaaaagaagagggttctgattacaggagtttgtatagctctattaacaggtataatttcaacaggctattattataaaaatttactaccattcaacagtgaaaataaatatgccgaaaaagttgcttcaaaagagaatgtgactgaatctaagcaaatggtaaagaaggaaaaaggagcagcaaagtatattgtaaatagtaatggaatcagtattcgtgaagaagcagatgcaagcagtaaacgattagctatagcaaacttcggggatatttttactatatctgatagcaataaaaatgagaaaaaagatgttgaatggatacaaattacattatcaaatggtgaaattggatggataagcacaaagtttattgaaccgtttaaatcgaataataacataatcgaggatgctaagttagcagatgtaactgcgttgttaaaacgtgtatatggagggaatatggtaagtgctcctacttattttggtaaaacactaaatgagttagagacaacttatcctcaacctttaaatccattaccaagtatgacgggaaaaacgattgttaaagatggcaatattcaatttgggatttcacaagataaggtagtggaggttgtattccaagatatttcaatgtcgattgcaaagttacatgaattattaggaaaagaaagcttaagtaatgatgcagagaaaaactacttctatgaaacaaaaagttactatattgcagcccgttcagatcagacgcat

SEQ ID NO: 9621 - DNA, 423 bp, Bacillus anthracis
ttgttaaaaggaatcaatcatctttgtttttcagtatctaatttagaagattctattacattttacgaaaaagtattggaaggagaattattagttagaggaagaaaacttgcatattttaatatatgtggagtatggatagcgcttaatgaagaaatacatattccaagaaaagagattcatcaatcttatacacatattgcgttttctgttgaacagaaagactttgaacgtctactgcagcgattagaagaaaacgatgttcatattttacaaagaagagaacgggatgtaaaggattgtgaatctatatattttgttgatccagacgggcataagtttgaatttctttccaggaacattgcaagaaagggtttatttactataggggaaataaaacctcatatgacgtttttataaaaa

SEQ ID NO: 9622 - DNA, 1386 bp, Bacillus anthracis
gtgcttcaattagggtggcaccacgggtataatactctcgtccctactgttcaaacagtagaggcgggagtttttttatttttattaagattaaaacaatttgaggaggaactgaatatgtctattcaaatcccacgcggaacgcaagatattcttccaggcactgttgagttatggcagtatatcgaagggcaagcacgcgaaatttgccgtcgttacaattataaagaaattcgtacaccgatctttgaacacactgagttatttttacgtggtgttggtgatacgacagatatcgtgcaaaaagaaatgtactcattccaagatcgtggagagcgtagtttaacattacgtccagaaggcactgcacctgttgtacgttcttacgttgaaaacaaaatgttcggtgacgcaacacaaccaacgaaattatattatatcggtcaaatgttccgttatgaaagaccacaagcaggtcgctatcgtcaattcgtacaattcggtattgaagcaatcggtagtaacgatcctgcaattgatgcggaagtaattgcacttgctgtagagttttaccgcggcatgggcttaaaaaatattaaagttgtattaaacagcttaggtgatgcggcgagccgtcaagcgcaccgtgatgcgttaattgcacactttgagccacgtatcggtgagttctgttctgactgtcaatctcgtttagaaaagaaccctcttcgtattttagattgtaagaaggaccgtaaccatgaattaatgggaacagcaccatctattacagaatacttaaacgaagattcagcagtatactacgacaaagttcaagaactattaacgatgatggatgttccatttgaaaaagatccgaacttagtacgtggtttagactactaccagcacactgtttttgaaattatgagtgaagcagaaggtttcggtgcgatcactacactaagcggtggtggccgttataacggacttgtacaagaaatcggtggaccagaaatgccaggtatcggttttgcgatgagtattgaacgtttaattatggcgctaaaagctgaaaacatcgaattaccaattgaacatagtatcgattgttacgttgtagcgcttggtgaaaaagcgaaagaccatgctgcaaaagttgcgtttgatcttcgtaaagctggattagcagttgaaaaagattatttagatcgcaaaatgaaagcacaatttaaatcagcagatcgtctaaaagcgaaattcgtagctgtactaggggaagatgagttagataaaggcatcattaacttaaaagatatggcaacaggcgaacaagaagaagtagcattagatgtgtttgcttcatacgtagcagagaaattaata

SEQ ID NO: 9623 - DNA, 1934 bp, Bacillus anthracis
ttgaaattaatttttccagatggtagcgtgaaagaatttgtaaaaggaattactttagaagaaattgctggatccattagcagtagcttaaaaaagaaagcagttgctgggaacgtaaatgatgagttatatgatttacgccgtaatattgaagaaaatgcggaagtagaaatcattactatagattcaaatgaaggagtagaaattgcaagacactccgggggcacatttttagcgcaagctgtaaaaagattgtatggtgaatataaatcttggagtaggggcttgttattgaaaatggattttattatgatatggatccttccgagtagtgtaaacgtagaagatttacgaaaattcgaaaaagaaatgaaaaagattataaatgaaaatataaaggtagaacgagttgaggtttctcgagaagaagcagctaaactgtttcaagaaatgaacgatcgattgaaattagaacttttagaagcaattcctagtggggaaagtgtaacattatataaacaaggtgaatttgtagatttatgtagaggtccacatttaccgtcaacaggttatttgaaagtatttcaattaactcacgtttccggtgcatattggcgaggagatagtaataatcaagtgcttcagcgtatatatggtgttgcattctcttctcagaaagaattagaagagtatttacatttcgttgaagaagcagccaaaagaaaccatcgtaagttaggcaatgaactggagctatttatgttttctgaagaggctccgggaatgccgttttatttaccgaaaggccaaattattcgtaatgaattagaagcttttttaagagaaattcaaaaagaatataattatcaagaagtacgcactccatttcatgatgaaccaagaagtatgggaaagatcagggcactggggacattataaagataatatgtatttctcagaagtggataataaaagttttgcattaaaaaccgaggactgccccagggcatattgctaatgttcaaaaataaattgcattctttttggcgaattaccgattcgtatgtgtgagtttggtcaagtacatcgccatgaatttagtggggcgttaaccggattattaagagtacgtactttctgccaagatgatgcacatttatttgtaactccagaacaaattgaagatgaaatcaaatctgtaatggcgcaaatcgattatgtatataaaacttttggattcgaatatgaggtagatctttctactcgtccagaagattcaatgggggatgatgagttatgggagcaagcagaagcgtcattagaaaatgtattacaatcgctaaattataaatatagcctaaatgaaggtgatggtgcatttagcggaccgaaaatgactttccatattaaagatgctttaaatagaagtcatcagtgtgggacaatccagctagatttccaaatgccagagaagtttgatttaaattatatagatgagaagaatgaaaagagaagaccagttgtcattcatagggcagtattaggatctttagatcgtttcttagcaatattaattgagcactttggaggtgcattcccagcatgggtggcaccagttcaagtgaaagtcattccagtttcaaatgcagtccatgtacaatacgcagatgaggttgcagataaattagcacaagctggtgttcgtgtcgaacgagatatgcgagatgaaaaattaggatataaaataagagaagcacaaatgcaaaaagttccttatgttcttgttattggtgataaggaaatggaaaacggagctgtaaatgtgcgtaaatatggggaagaaaaatcaggtgtaattgaactagatatgtttcgcggaaagtatgaaagaggaaataaataatcgaaaatagatttaaaaaagaaaacacacc

SEQ ID NO: 9624 - DNA, 1035 bp, Bacillus anthracis
atgaaagcagtagtagttaataaaaatagtaaagccaatattgaggttgttgaaaaggaattacgtccgctacactcaggtgaagcactagtagatgtagagtattgtggggtttgtcatactgatttacacgttgcaaatcatgattttggaaacacagatggccgtattcttggtcatgagggtgtaggtattgtgacgaaaatcgctgatgatgttacttcactaaaggtaggtgatcgtgtaagtattgcatggatgttccaatcttgtggacgttgtgaatattgcgtgactggtagagaaacattttgccgtgaagttaagaatgctggttattcagtagatggtggtatggctgaacaatgtattgttacagctgattatgcagtgaaagtaccagaaggattagatcctgctcaagcatcatcgatcacatgtgcgggcgttactacatataaagctataaaagtatctgatattaaacctggtcaaccgatcgtaatctatggttgtggtggattaggtaacttagctatccaatatgctaaaaatgtatttggtgcaaaggtaattgcagtagatattaatgacgataaactagccttagcaaaagaggttggtgctgatatgacaatcaatccaatttctcaaggtcctgctgataagattattcaagaggagtttggtggtgcttatgctgctgtagtaacagctgtttcaaaggtagcattcaactcagcagttgacgcagtacgtgcttgtggtaaagtcgttgcagtaggtttaccagtagaaactatggatttgaacattccgcgccttgtactagatggaattgaagtagttggttctttagtcggtactcgtaaggatctagaagaggcgtttatgttcggggcagaaggaaaagtagtgccagttgttcaaacttgttctttagataaagtacaaaatgtattcgaagaaatggaacaaggtagaattcaagggcgtatggtaatcgattttaaacagaacaattgtgattgcaaa

SEQ ID NO: 9625 - DNA, 504 bp, Bacillus anthracis
gtgccgttaacaccattagatattcataacaaagaatttggtcgcggattccgtggctatgatgaggatcaagtaaatgagtttcttgatcaaattatcaaagattatgaattagtcattcgtgagaaaaaagctttagaagaaaaagttgcgcaattagaatggaaattagatcatttctctaatattgaagatacgttaaacaaatctatcgttgttgcacaagaagcagcggaagaagtaaaacgtaatgcgcaaaaagaagcaaaattaatcgtacgtgaagctgaaaagaatgcagaccgtattattaatgaagcgttagtaaaatcaagaaaagttgctttcgatattgaagagctaaagaaacaagcgaaagtattccgcactcgtttccgtatgttattagaaacacagcttgaaatgttaaacaacgatgattgggataaactaattgagttagaagacgaagtagatgagctgttgaaaaaagaagaaacagtg

SEQ ID NO: 9626 - DNA, 1146 bp, Bacillus anthracis
atgagaagaggttggaaatcaatggagtattctttattacttcctcctgctatcatatgcggggctgggagttataatggtatatagttctagttccattggtgcgatttcatcgaaatataactgggcgggcagatcacttttttaaaaaacaattagtttctcttgctattggaacggtaatgctagtgattgtcgctatagtaccttacaaattttggaggaagaaaatagttcttgcagctatggggttagggggtattggcttactaacagcagccttccttttcggtaaggtaatcaatggtgcaaaaggatggatactaggtatacaaccagctgagtttgtaaaaatagcagtaattattacgttagcaagtttttttgctaagaaacaagagaggcaaaccccttttttacaagggataatcccccccctatttgtggtgggtggatcgatggtattaattttattacaaaatgacttagggactgacatattaataggtggaacagtgttaattatgttcttctgttcaggagttaatgttaacctgtggataaaaaggtttatattaacatctatcgtatgggttcctgtattgtattttattgggaaatataaattgaataattaccaaaaagcccgattttcagtttttcttgacccgtttaacgatcctcaaaatgatggattccaattagttaattcatttattggaattgcctcaggtggggtaaatggtagaggattagggaatagtatacaaaagtatggctacttaccagagccgcaaacagattttattatggcaattatatctggagaactagggttttataggggtagctattattttaatctgtttattacttattattattattcgttcgtttagagtagcacaaaaatgtaaagatccatttggaagtttaattgcaatcggaattgcaagtttaattggaatacaaacttttgttaatgtcggtggtatgtctggattaataccgcttacaggggtacctttaccgtttattagttatggtggtagttctttattggctaatttaattgcgatgggtatattgttaaatatagccagcaatgtaaaacgacaagagaaagagcaaaatgagataatgaaa

SEQ ID NO: 9627 - DNA, 459 bp, Bacillus anthracis
atggtattcgaaggtcatttagttggtacaggattaaaagttggggttgttgttggacgttttaatgaatttattacaagtaagttactaggcggagctttagatgggttaaagcgtcacggtgtagaagaaaacgatattgatgttgcttgggttcctggcgcattcgaaattcctttaatcgctaaaaagatggcaaatagcgggaagtatgatgctgttattacgttaggtacagtaattcgaggtgctacaacacattacgattatgtttgtaatgaagtagcaaaaggtgttgcatctttatcacttcaaacagacatcccagttattttcggtgtattaacgacagaaacgattgagcaagcgattgaacgcgcgggcacgaaagctggtaataaaggctatgaatctgcagttgctgcaattgaaatggctcacttatcaaaacactgggca

SEQ ID NO: 9628 - DNA, 897 bp, Bacillus anthracis
ttgcgtttggtaacggcgaaaaaagaagaaaaggtatttgtaggtattgtggatgaagaggaagaaaaggtattgcacttaagagaagcgcaaaggcaaaagggagaaaaggttacaatccccattacaatgttagagtgtattgaaagaggaaccgaatgttttgaaaaaatatgtgatattgtaaattgggcgaaggaaaatggagggacggcgtactatccgttaactgaagtaaaaatattagctccaattccaaggccaagaaaaaatattttgtgcgttggaaaaaactatcgtgagcatgcgatagaaatgggcggagtagagtcaattccagaaaatataatgatctttacgaaagcgccaacgacagttattggaatggatgaaaaaattaatagtcatccccacgcaacaaatgaattagactatgaaggagaattagctatcgttattggtaagcgagggaaacaaataaaaaaagaaaaagcgcttgagcatgtttttggttataccattataaatgatataactgctcgcgacattcaaaggaagcataaacaatttttccttggaaaaagtttcgatacattttgtccgatgggaccgtatttaattcataaatcgatgattagtacgccaaatgcgttacacattgaaacgatagtaaatggggaagtaaggcaaacttcaaatacaaataaaatgattttttcaatagaagaaatcatttcaacgataagtaaaggaatgacattagaacctggggatattatcgcaacgggaaccccggctggtgtcggaaaaggtttcacgccaccgaagtttttacatgcgggtgatgaagtggtcattacagtagaaggaattggtactttgcgaaatgtagtgaag

SEQ ID NO: 9629 - DNA, 2753 bp, Bacillus anthracis
atgattaatcaaaaaaaatacgtacactttgtcacgatgtacataattatattttctctttggatatttcttatccctaaggacttaaatataaaagaaattggaattctcttcttattttgtgttcgctacactcttttcttgctattgcctatataaagcaattaagaaaatgaagcgcggtgacaaattattttgggttttagtacttaggcacttgcctatgtgattggccaatggagataactctatttcttcattcactttctatatatgaccaagtcatattctcatataaggccatggcctttttttatcgtacaataaattttgctctttttctggcttggctataaagttcataaaccattcctctattagaggactagctcaattttcatccgatagcatctttatcgttattatgaatatttattttaccttaacttttattttggacatttcaagctttcgtatgttaacaacggatactggggtttttaattggatattttattgcacaatcattagtaatttacgccgtaattagtctatatagaagagaagaatattcttctagcagaatttcattaattatcggctttactattatactcgtgtacggatatatacacctgtttcaattaaacgcagggataaaaccttcttctgaagtctcttacttaatacatactgcttcaattttattaatcggtttgtcgtccatactatatattttagataaaccaatacagcacgaaacgaaaacaaagtattatcgatttgattatgtgcgcttcatattaccctattttagtataatcattactttttcttttattatctttcaaccttgggatgataagttcatgttaatcggtctagtattatcactcatcttattattcttacgacaactttatatgtggaaagataatcaggcactaatcgatacatacgaacagctgactacacaactagaaggcaaagtagaagaaggggcatctgcgttatcaaagagtgaacaacgttataaatctttaggcagaagatcacccggatgctgttttctctttaaatatgtatggtattttccaacaatacaaatacagcttgtgaaagcttaattactggcctactattgtgaagtagaaagctattctcttttacactttattgacccaaaagaccatgatttactacagaaagctttacaactaacgaaagaaggtagcccacaaactttagaagttcgtacaaaagaaaaagaaggttattactattaccttcacattacactcatccctactttcataaacaaagaagttgtcgggatgttcggtatagcacgtgatattacaactttatatgaaaaacaaaaacaagtagaacatttagcctttcatgatgcacttaccggattaccaaattcgccgcaagtttgaaaaagatttaaaaaatattttaaatacagctcaggctagcgcaaatgatgttgccgtcatgttccttgatttagatcgattcaaaaaaattaacgatagactcggtcatggcatcggagacttattattaattgaagtcgcaaaaaggttacgtggttgcttacgttcaaaggatgtcgttgctcgtcaaggcggagatgagtttacaattctattaccagatatgtactcagaaaaaagtgcggcttttatagctgaacagattttaaatattttaaacaagcctttcttctctaaaggaggagaactggtctattacaccaagaatccggaatggcgatgcacccggactggggaaccggaggtgcacagaattaatgaaaaatgctgatatggctatgtatcgcgcgaaagcaaatggaaaaaaccgatttgttttcttctcaaaagaaatgagtatcgctcaaaatgagagtaacttcttagaaggagaactttcaaaagcattacaacaaaatgaatttttccttgaataccagccgcaagtaggcacaaaaacaaaacaaattatcggttttgaagcattaattcgttggaagcatccaaaactcggcatcgtatctcctggcccaattcattcctctagcagaggaaactggatttattattgaacttggaaattggattttacgtactgcttgcttagaagcaaaaagatggcataatcaaggtttctctcacttaaaagtcggtgtgaatttatctgttgttcaatttaaccatgcagatttaatcccaactatttcaaaggttttagaaggaaacagaggttaaaacccagaaagccctagattattgaaaattcaggaaagtttcgcccattatctaaatcaaatccgtagttgcaaaactagacagctttcaaacccctcggtattcaaatttcaaatgatgactttggaaccggttatagttctttagcttatttaacaaaatatccaatcaacacattaaaaattgctcgagaatttattttgcggaattacaactagccctttagaggaagcgattatttcttccattattacactatcaaaagaactaaatttagaggttattgcagaaggtgtagagaccgaagaacaatggaagtttttatatgaacaaaaactgtgaccacatttcaaggattctttattagcaagcccgttttctagtaaagacgtttgggaggttactcccacaaaaaaacaccggcctaagtaaaacggttgttttttttaatattcaaaaggtacatctgaagct

SEQ ID NO: 9630 - DNA, 180 bp, Bacillus anthracis
atggcgaaaaagttagaaattaccctcactcgtagtgtaattggtcgtccacaagatcaacgtgcgacggtagaagctttaggtcttaaaaagttgaattcaactgtagttaaggaagaaactcctgctattcttggtatgatcaacaaagtttctcaccttgtaactgtaaaagaagct

SEQ ID NO: 9631 - DNA, 903 bp, Bacillus anthracis
atgaatagaaaaggttataaatcaggttttgtctctattattggcagaccgaatgttgggaaatctacatttttaaatcgtattattggtcaaaaaattgctattatgagtgacaagccacaaacaactcgtaataaaattcaaggcgtatatacagaaaatgattcacaagtaattttcattgatacaccaggaatacataaacctaaacataaactaggcgacttcatggtgaagatggcgcaaacgacattaaaagaagttgatatcgttctgtttatggttaatgctgtcgaaggctttggtcgtggtgaagaattcatcattgagaagttaaaagaaacgaaacaaccagtatttctagttattaataaaattgaccaagttcacccagaacaattattagagttaattgatcaatatcgcaaattacatgactttgcagaaatcgtaccaatttctgcattagacggtaataatgcggaagctctaattggaacaattaaaaagtatttaccggaaggaccacaatactacccagataatcaagtaacggatcatccggagagatttattattgcagagcttattcgtgagaaagtactacatttaacacgtgaagaagtgccgcattctgtagctgttgttatcgatgcaattcaaaaacgcgagggcggagcggtttatatcaatgcaacgattgttgttgaacgtccgtcgcaaaaagggattattatcggaaaacaagggaagatgttaaaagaagtcggtaagcgagctcgttttgatattgaagcattacttggttctaaagtatttttagaagtatgggtaaaagtgcaaaaagattggcgtaataaaatgtctcagcttcgtgaccttggtttccgcgaagacgagtat

SEQ ID NO: 9632 - DNA, 891 bp, Bacillus anthracis
atgaaatgcagagagagaaattgtggagcagaaatgaattgcgaagaggagatgtgtagtttgaagtgggattatgatttgcgctgcggcgaatatacattgaacttaaatgaaaaaacattaattatggggattttaaatgtaacaccagattcgttttctgatggtgggagttataatgaggtagatgctgcagtgcgccatgcgaaagaaatgcgagatgaaggtgctcatattattgatattggtggcgaatctactcgtccgggttttgctaaagtatcggtggaagaagaaataaaacgagttgttccgatgattcaggctgtttcaaaagaggtaaaattgcctatttctatcgacacgtataaagctgaagttgcaaaacaagcaattgaagctggtgctcatattattaatgatatttggggagcgaaggcagaaccaaaaatcgctgaagttgcagctcattacgatgtacctattatcttaatgcacaatcgcgataacatgaattatcgcaatttaatggctgatatgattgctgacttatatgacagtattaaaattgctaaagatgctggtgtgcgagatgagaatatcattttagacccgggtatcggttttgctaaaacacctgaacaaaatttagaagcgatgcgtaatttagaacagttaaacgtactaggttatccagttctcttaggtacttcaagaaagtcctttattgggcatgtgctagatttaccggtagaagaacgtcttgagggaacgggagctaccgtttgtcttggtattgaaaagggttgtgagtttgttcgcgttcatgatgtgaaggaaatgtcgcgtatggctaagatgatggatgcgatgattggtaagggggtaaag

SEQ ID NO: 9633 - DNA, 1095 bp, Bacillus anthracis
aagaaaacgcctgattttattctcatcatcgttacacttgcgttgttaacaatcggaatgattatggtttatagtgcgagtgcggtttgggcttcttataaaatgggggattcattcttttttgcaaaaaggcaattgctattcgcagttcttggtgtagtggctatgttttttattatgaaaattgattattgggtgtggcgtacgtattcaaaagtaattttgctagttggcttcattcttcttattctcgttcttattcctggagtaggtcttgttcgaggaggagcgcgaagttggattggaatcggggcattttccattcaaccgtccgaatttatgaagtttgcgatgattattttcttagcgaaatttttagcggaacgacaaaaattaattacctcttttaaacgtggtttactaccagctctaggttttgtatttcttgctttcggaatgattatgttacagccagatcttggtacaggaacggtaattgtcggggacatgtatcattatgatatttatctccggagacaaagggtcttccacttgccaaggtttggtttgcctggtgaaacaagaattgtagggctaattgcatcagcaccgtatcggatgaaacgtattacatcatatttagatccgtggtcagatccgcttggaagtggatttcaaattattcaatcgttactcgcaattggaccgggtggattattcgggcttggacttggacaaagtcgacaaaagtttctttatttacctgaaccccaaacagactttatatttgcaatcttatccgaggaattaggttttattggtggttcatttgtgttattattatttagtctattattatggcgtgggattcgtatagctttaggagcgccagatttatatggtacgtttttagcagtaggtattgtggcgatgattgcgattcaagtaatgattaatgttggtgttgtaacaggattgatgcctgttacgggtattactttaccgtttttaagttatggtggatcaagtttgacattaatgttaatggcagtaggtgtattattaaatataagtcgccattctcgctactaaacc

SEQ ID NO: 9634 - DNA, 3567 bp, Bacillus anthracis
gtgtttttaaaaagattagaaatagcaggatttaagtcttttgctgaacgtgtatctgtcgatttcgtcccaggtgtaacgtctgtagtaggacctaatggaagcgggaaaagtaatattacggatgccattcgctgggtacttggtgaacaatcggcaaaatcattacgtggtgcaaagatggaagatattatttttgcaggtagtgatacgagaagagcggttaatgttgctgaagtaacaataactttaaataatgaagatcaacgtttaccaattgaatataatgaggtgtgtgtaacgcgtcgtgtatctcgttctggtgatagtgatttttatattaataaacaatcatgcaggttgaaagatattatcgatttatttatggactctggtatgggaagagaagctttttcgattattagccaggggaaagttgaagagattttaagtagtaaatcagaagaacgtcgtggtgtatttgaagaagcggcgggagtgctgaaatacaaacttcgtaaaaagaaagctgaaagtaaattagcagacacacaagaaaacttaaatcgtgtacaagatataattcacgaattaagtagtcaagtagaacctttagaaagacaagcttctattgcaaaggattatcttgagaaaaaagaagaattagagaaagtagaagcagcgcttattgtacatgaaattgaagaattgcatgagaaatgggaagcgcttcgaaatcagtttgggcataataaaaacgaagaagctaaaatgtcaacgcatttacaaaaaggtgaagaagagttagaggaattacgaggccaattacaagcggtagatgagtcggtagattccctgcaagaagtacttttactttctagtaaagagctagaaaagttagaagggcagcgtgagctattaaaagagagaaagcaaaatgcaacgacgcattgtgcgcaacttgaacagttaattgttgaattaacagagaaagctacaagttatgatggtgaaatcgaatcgagtacagaagtgttgatgcaatttgtaaatcatgtaaaagagttggagatgaaattgcatgataatgagcaattgcttgcaacgtttgctgataatttagaggaacaaattgagaatttaaaaggtgattatattgaacttttaaatcaacaagctagtcatcgtaatgagttatctatgattgaagaacaatctaaacaacaaaattcaaaaaatgaacgccttgatgaagaaaatgcgaaatatgtagaaatgcgtatggaaattacagcgaaaaagacaaaacttgtggaaagttatgaacaagtaaaagaaaaagtagctggaatcctttcgaatatacaaaagacagaagcggcacttgggaaatgcaaggcgcagtatagtgaaaatgaaacaaaactataccaagcgtatcaatttgtacaacaggcacgttctcgaaaagaaatgctagaagagatgcaagaagattactctggtttctatcaaggggtacgtgaagtattaaaagctagagaaaataggttgcaaggtatcgagggggctgttgcagaattgctaacggtaccgaaagaatatgaaattgcaatggaaattgctctaggtgcagcgatgcagcatatcgttgtacaaaaagaagaacatgctcgtaatgcaattgcgtttttaaaacaaaataaacatggacgagcaacgtttttaccgcaggctgttatgaaaggtagatcgttatcatttgagcaattacgtattgtaaatcaacatccatcgtttgtaggtgtggcagcagaacttgtgcaatataacaataaatatgaaaatgtagtttccaatttattaggtactgttattgttgcaaaagatttacgcggggcgaatgagttggcgaaacaattgcaataccgctatcgcattgtaacaatcgaaggtgatgtagtgaaccctggcggttctatgacaggtggcgcagtaaaacaggcgaaatcttctttattaggacgtcaacgtgagctagaagagtggacgaacaagttaactgatatggaagaaaaaacgacgaagttagaaaactttgttaaagcagtaaaacaagagattcaagaaaaagaagtgcaaatacgcgaactaaggaaaagtgtagaagcagagcgtgtagatgaacagaaattaagagaagaaattaatcgtttagaattagaagaacatcgtatcaatgatcgtttatctatttacgatttagagattgaaggattcttacaagatcaagtgaagatacaagggcgtaaagaagagctagaaaagattttagcgacccttcaagcggagattacgggattagatagcaaaattgtcgctttaacacaacaaaaaagtgagcaacatacgtcgaaagaaaaagttcaaaaagaaatgactgagttaaaagtgttggcggctgaaaagcaacaacgcttatctaatcaaaaagaaaaagttgaacgattgacgaaggaaaaagaagaaacggatgcaacgcttgtcaaaacaaaagaggatttagcattcttaaaacaagaaatgacatcgaattcaagtggagaagagcaaattacgaatatgattgagaagaaagcgtatgatcgtaatcaaacttcggagttaattcgctctcgtcgagaacaacgtgtatcgttacaagagagagtagaacagttagagcgtaatctgaaagaaacaacgggtaaacataaatacattcttgagatgttgaaagatcaagaagtaaaaataaaccgacttgatgtagagttagaaaatagattacaacatttacgtgaaacatatacgatttcatttgaagcggcaaaactgaagtatacaatgatgatgcctgctgaggatgcacgtaaaaaagtgaaactaattaaactatccatcgaagagctaggcacagtaaacttaggggcaattgatgagtatgagcgtgtagcggagcgtcatacattcttacttgagcaaaaagatgatctagaagaagcaaaaacgacattgcaccaacttattactgaaatggatgaagaaatgaaaaaacgcttttctactacgtttgaagggattcgaatggagtttcaatcggtgttctctgaattgtttggaggcggtagagcggatttagtcatgacgaatccagaggatttattaaatacgggtattgatattgtagcgcaaccgccagggaagaaactgcaaaacttaggtttactttcaggtggagagcgtgctttaacggcaattgcgctattatttggtattttaaaagtgcgcccagtcccattctgtgtattagatgaggtcgaggccgctcttgatgaggcaaacgttgcccgttttgcccagtatttaaagaaatttagtgatgagacacagtttattgtaattacacatagaaaaggtacaatggaagagtctgacgtattgtacggtgtaacaatgcaagagtcaggggtatctaaacttgtctcggttcgtttagatgatggagaagaactagtcgcaagcaaa

SEQ ID NO: 9635 - DNA, 717 bp, Bacillus anthracis
atgggtcgtaaatggaataatattaaagataaaaaagcatcaaaagatgcaaatactagccgtatatacgcgaaatttggacgtgaaatttatgtagcggcaaaacaaggcgagccagatccggaatcaaaccaagcgcttagagtggtattagaacgtgcgaaaacatacaatgttccaagaacaattatcgatcgtgcagttgaaaaagcaaaaggtggttcagaagaaaattatgacgagcttcgttatgaaggatttggaccaaatggagctatggtaattgtagatacacttacaaacaacgtaaaccgtactgcagctgatgtacgagctgcatttagcaaaaacagtggtaacatgggtgtaaacggttctgtagcttacatgtttgatgcgacagctgttatcggccttgaagggaaaacatcagatgaagttcttgagattttaatggaagcagatgttgatgcacgtgatattcttgaagaagaagatgctgttatcgtgtatgctgaaccagatcaattccatgcagtacaatctgctcttaaagatgcgggtgttgaagaatttacagttgctgaattaacaatgcttgcacaaaatgatgtaacacttcctgaagatgcacaagcacaatttgaaaaaatggttgatgcattagaagatttagaagatgtgcaacaagtttaccacaacgtagacttaggagaa

SEQ ID NO: 9636 - DNA, 1152 bp, Bacillus anthracis
gtgtgtgtgttgtatgcggatgactataaaccgacgtttcaaaggcgaacgccagaggaatatttagaatatattcgtcagcaaaatcgtgggaagttaaagctatatgtaggggctgctccaggagtagggaaaagttataaaatgctctatgatgctagagagatgaaaaaggacggtatggatattgtaattggtttaattgaaacgcacgggagaaaagagacggaagaagcaattgctgatttagaaaaagttcctttgaaagaaatacagtataaaggaaaagtattttatgagcttgatgtggaaggcattataaaacgtgcaccgcaagttgttgtggtggatgaacttgcgcatagtaatgttcctggatctaaaaataagaaacgctatatggatgtacaggaattgatagatgccggtatatccgtattatcagcgtttaacatccaacatttagaaagcgttcatgacattgtagctcaaattacaaatgtaaaagtaagagaacgcattccagattttattttacaaaaagcaaatgaaattcagcttgtcgatgcaacgccggaagtattaaggaagagactaatagacggaaagatatataaagaagaaaaaattcagcaaagcttacaaaatttctttacgcttaataatttaggggcactaagagaattatcactccgagaagttgccgatgatatggacgagaaaattagccaaacagtgatagagccgattggcgtgaaagaaaaaattctcgtttgtgtacaatacagttcaacagcagagaaattaataagacggggatggcgcatggcggatcggctaaacgccgaattgtatgtattaaatgttgaaagggaaaagatagattctctttcagcggggaaaaagcaaacgattgaagagtggaagtcgctaacgaatcaatttgatgcgagttttgtattagaagaagcgaacggaagaaagccagcggatgttattattgaagtggcgaaaagactgcaagtaacgcaaattttacttggacagtcggcgagaacaaggtgggatgaaattcgaaaaggttcgattgtaaatgaaattatgagagaaacgaagtatattgatattcatatcgttgcggatcaaagagct

SEQ ID NO: 9637 - DNA, 923 bp, Bacillus anthracis
ttgcaaaaggcaggactacatatttcaaagttggggttaggaacaaatgctgtaggggggcataatttatatgctgatgtgaatgaggaagaaggaaaacaattaatagaagaagctatggggcaagggattacattttttgatacagcagattcatacggtttcggtagatcagaggaatttagtaaggagaagtattgaaaggaaaacgccacgaaattgtacttgctacaaaaggtggaatacagccgctattaaatggagaggtgtatataaataatgaacgaagctatttaagaaatgctgtggaaaatagcttacgaagattacaaactgattatattgatttatattatttacattttacaaatccagaaacaagttatatagattcaattggagaacttactcgcctaaaagaagaagggaaaattcgttcaattggaatatctaacgtaaacgtagagcaattaaaagaagcgaatcagcacggacacatagatgttgtacaatcaccgtataatatgttggatcgtactgcaggggaagaacttttgccatattgtatagaatcaggtatttcatttatcccttacgggcctcttgcttttgggatattaggtggtaaatatacagaagattttaaattgaacgaaggagactggcgtcaaagtgtaaatctatttgaagaaaatacatataagagtaactttaaaaaagttgagaagttaaaaggcgtagctaaagaagaggctgtcgaagtatcgcatttagcattagcatggctattaaataaaaaaggaattgatactgttattcctggtgggaaaagagcggagcaaataagagaaagtgtaagagctgtggaagtttcattgaatgaaaatgtcatgaaagagattgaatctattttagaagattag

SEQ ID NO: 9638 - DNA, 377 bp, Bacillus anthracis
atgcaaatcactattacgaacacttcaaaaggaacctatttatgaacaaattagtgcccaaataaaaaagcttattttactaggtgatttaaaacaaggagatgctcttccttcaatgcgtcagttagcaaaagatttacgagtaagtattattacaacgaaaagagcatatgaagaactggaaaaagacggttttattaattcaattgtcggaagagggtcctttgtagcagaacaaaacattgaaactatgaaagaagaaaaattaaaaacagttgaagaaaagttatgtgaagcgattcaaaattggtaagcaaatggatgtcttttaaaatgagctaaaagaaatgtttccatttttatccgaggaggaaaac

SEQ ID NO: 9639 - DNA, 1332 bp, Bacillus anthracis
atggctaggtacacaaaagaagatattttccgtttggcgaaagaagagaatgtaaagtatatccgattacaatttacggaccttttaggagtaattaaaaacgtagaaattccagtgagccaattaacaaaagctcttgataacaaaatgatgtttgatggatcttctattgaaggtttcgtacgtattgaagaatctgatatgtacttatatccagatttagatacttgggtaattttcccttggacagctgaaaaaggtaaagtagctcgattaatctgtgatatttacaatgcagatggcactccatttgaaggagatccacgtaacaatttaaaacgtgtattaaaagaaatggaagctttaggattctcagatttcaatcttggaccagagccagaattcttcctattcaaagtagatgaaaaaggaaatccgacattagaattaaacgataacggtggatacttcgaccttgcgccgatggatctaggggaaaactgtcgtcgtgatatcgttcttgaacttgaagaaatgggctttgaaattgaagcgtctcaccatgaggttgctccagggcaacacgaaattgactttaaatatgcaaatgcaattcgttcatgtgatgacattcaaacatttaaacttgttgtaaaaacaattgctcgtaaacacggtttacacgcaacatttatgccaaaaccattatacggtgtgaacggttcaggtatgcactgtaacttatcattattcaaaaatggcgagaacgtattcttcgatcaaaacggtgacttacaattaagtgatgatgctcgtcacttcatcgcaggtatcttaaaacacgcgccagcatttacagcggtagcaaacccaactgtaaactcttacaagcgtttagtacctggatacgaagctccttgttacgtagcatggtctgcacaaaaccgtagtccattagtacgtatccctgcatctcgtggtattagtacacgcgtagaagtacgtagtgttgacccagctgcaaacccatatttagtaatggctacattattagctgcaggtcttgatggaattaaaaacaaattaactccaccagctgcagtagaccgtaacatctacgtaatgacaaaagaagagcgcgaagaagcaggtatcgttgacttaccagcaacattagcgcaagctttagttacattacaatctaacgaagtaattagtaacgcattaggagatcacttacttgagcacttcattgaagcgaaggaaattgagtgggatatcttccgcacacaagttcaccaatgggaacgcgatcaatatatgtctctttac

SEQ ID NO: 9640 - DNA, 2181 bp, Bacillus anthracis
atggcaaatgagcaggtactaacagctgaacaggtactcgagaaagcaagtcaatatttagtggatgaagatattgagctagtagcacgtgcctatgaatatgcacgcgatgcacatagcgaacaatacagaaaatcgggtgaaccgtacattattcatccaattcaagttgcaggtgttttagttgatttacacatggatccagctacagtatcagcaggtttcttacatgatgtagtagaagatacagagattacattagaagatattgaacgggaatttaataaagaaattgctatgcttgtcgatggtgtgacaaagctcggaaagattaaatataaatctcatgagcaacaacaagcagaaaaccatcgcaaaatgtttattgcaatggctcaagatattcgagttattttaattaaactagctgatcgtcttcataacatgcgtacattgaaacatttgcctcaagagaagcagcgtcgcattgcgaatgaaacgttagaaatctttgcacctttggcacatagactcggaattagtactattaaatgggagctagaggatacgtcacttcgctatttaaatccacagcaatattatcgtattgtaaatttaatgaagcgtaaacgtgcagaacgtgaagagtatttagacgaagtaatgactggtattcgtgagaaattagacgaagttgcaattcaaccagagatttctggaagaccaaaacatatttacagtatttatcgtaaaatggcactgcaaaataaacagttcaatgaaatttacgatttattagctgtacgtgtcgttgtaaatagtattaaagattgttatgcagtacttggaattattcatacgtgctggaagccgatgccaggtcgttttaaggattatattgcaatgccgaaagcaaatctatatcaatctcttcatacgactgtaattggaccgaaaggtgatccgcttgaagtgcaaattcgtacgaaagaaatgcatgagattgcagaattcgggatcgcggcacactgggcgtataaagaaggaaaaacagcagaaacaacaggtacattagagaagaaacttacatggttccgtcaaatattagaatggcaaaatgaagcttctaatgcagaagagtttatggagtcgttaaaaattgatttattctctgacatggtattcgtctttacaccgaaaggcgatgtaatggaattgccacttggatctgttccaattgactttgcatatcgtgtgtattcagagattgggaataaaacaattggtgcaaaagtaaacgggaaaatggtgacacttgactataaattaaaaacaggtgacatcattgaaattttaacatcgaaacattcgtatggaccaagtcaagattgggtgaaactagctcaaacatctcatgcaaaaaacaaaatacgtcaattctttaagaagcaacgtagagatgaaaatattgaaaaaggccgtgaacttgttgagaaagaagtgcggagcctagagtatgagatgaaagaagtgttagctcctgacaatttaaaacgtgttgctgaaaaattcaactttgcaaatgaagaagatatgtttgcagcagttggatataatggcatcactgcatcacaaattgttacgcgactaacggacaagttccgtaagcaacgtgaagaagaagagattgttgaagttaaagaagttcgtaaaccgatgaaaattcgaaaatgggattctggcgttaaagtgagcggtgcggataatttattaattcgtttatcaaaatgctgtaacccagtacctggtgatgatatcgttggatatattacgaaaggccgaggcgtatcaattcaccgccgtgattgtgtaaatgttcatacagaagaagcgatagaacgtttattagaagtagagtgggaaggtagtcctgaaaaagaaattgagtataacgttgatattgaaatttcaggttacgatcgccgtggtttattaaacgaagtattacaagctgttacagagacgaaaacgtacatttcagcagtttctggtagaagtgaccgtaataagatggcgacaattaatatgtcaatctctattcgtaacttacagcacttgaaaaaagtagtagaacgcattaaacgtgttccagaaatttatgcagtacgacgcatgatgcat

SEQ ID NO: 9641 - DNA, 358 bp, Bacillus anthracis
caccttgttgaatatatttgaaatccaataaaaaagagcttgtgtcaaaacataaactctctttaagttgaaacgaatattgcacacccctttagataaggacacggtagaacgacttagaatatggctagatttaatatttaaaaatgaacttcatcaggtggtcgactggaataaaattgataaagaagattatttactggcaatggaacgcagcccaattaaagatattgaaattaagcatttactccaaaatgcactagtagatgaaataaatagtcgtgaaatattcatgaaaggtattaatatgagttactattatgagggatataccgaatatgatatagaggatttataa

SEQ ID NO: 9642 - DNA, 147 bp, Bacillus anthracis
atgcgtgtaaatattacactagcttgtacggagtgcggtgatcgtaattatatttctaaaaaaaataaacgaaacaatccagagcgcatcgaactaaaaaaatattgtccacgattaaagagagtatcgttacatcgtgacacgaag

SEQ ID NO: 9643 - DNA, 249 bp, Bacillus anthracis
atgggtattttaaaaagtaaaagtgctacattcgtttgggagtttatgttcacaaaagcgatgtatgaaactggcgatatgattacgcagcacgaattattaaataaagtaagtgaactattagatgaaggtattttaaagactacattaaatgaaacattcacaccaattaacgctcaaaatgtaaaaaaagcacatgctctgcttgaaagcggaagtacaattgggaaaatcgttttagaaaagttt

SEQ ID NO: 9644 - DNA, 1587 bp, Bacillus anthracis
ttagcatttaagtacaggttattttttactagagggaattccctgtggccctcagcccccagccaagtacaggaacccaaacgcttacataggatggtacaaatgctcggtattaacgattttcacgggcaactagacacagtaaaaaaaattaacaataaagatgcagggggaatcgagtacttaggggcttatttacgtgatcgtgaaaaacaaaatccgaatacattaaaagtacatggctggcgatgttgttggaagcagtactcctgtttcagcattattaccagacgaacctactatttgatttctaaaatggatttgaattcgatggtggaactataggaaatcatgaatttgatgaaggtgtgaaagaaatgaaccgcccttatttatggtggataccatgagaaaacagggaaatttaaaggtgcaaaattcccatatgttgccgcaaatttctataataaatctactggtcgtttatttttaccaccattcactataaaaaaggtacaaggagttcctgttggatttatcggagtcgtaacaacggatgtgcctaaccttgttatgcctactatgctaaagaatgtagaaattacagatgaagttgaagctattaacaaatccgtaaagcaattaaaaaaactaggtgttaaatctatcgttgttcttgcacataacggtgggacaacagatgggaacggcgtaacaaatggtgatatcgtccgattagcaaatgagactgatccagaagtcgatgttattttttggtgggcatagccacacttatgtaaatggaactgttaataataaacttgtcgtacaagcaaattcttacggtatggcttttgctgatgttgatgtaaagattgatcgtaaaacacaagatattgttgagaaaaaagcagaaattgttacaacttaccatgaagggcatggagcctgataaaaaaataaagaagaagatgggggaatattcaggccaaaatcccccctccttgttatgaagttgtaggtaagtctattgctccgctagatcgcaaactaaatacggctggtgaatctactcttggaaatttagttgctgatgcccagcgtgcaacaatgcaatctcaaattgcacttatgaatcctggtggtattcgtaatgacttagatgctggtgatattacatggggagagatatatggtattcaaccattcggaaatcaattaataaaagtaaatttaacgggtcaagatattcgtgatattttaaatcaacaatggcaaaaagacataacaagaatgcttcaaatttcagggatccaatacacttgggatgcaaacaaacctaatggagaaaaagtaacaagtattcgcctaacaaatggagaagaaattattccttctaaaacttacagcgtcgttgcgaacgcatttctagcttcaggtggagatggatttgtatcctttaaaaacggtaaagatgctgaaacaggaccaactgattttgaagcattagtagattacataaaaaaatcaaaagaaccaattcagtctattattgatggaagaattcaaaaaataaattaggttttt

SEQ ID NO: 9645 - DNA, 2994 bp, Bacillus anthracis
gttcatattacaattgacggaaaaaagtatacagcggagcccagttcaacgatattgggtgtgataaatgagaacgggattgaacatccgcaaatttgttacgtgccagaagtagatcctattcaaacatgtgacacttgtattgtagaagttgacgggaagttaatgcgctcttgttcgacagtagtgacagaaggtatgaacattgaacgtaattctactcgtgcgaaagaagcacaaacagaggcgatggatcggttattagaaaatcatttattatactgtactgtatgtgacaacaataatgggaactgtaagctgcataatacagcagaattaatggaaatcgaacatcaaaaatatccatatgaaccgaaagtggatgtaagtgaagtggatatgacacatccgttttatcgttatgatcctaaccaatgtattgcatgtggtcaatgtgttgaggtatgtcaaaacttacaagtaaatgaaacgttataaatagactgggaagcggaacgcccgcgagtgatttgggatgaaggagtaagtattaatgattcttcatgcgtgagctgtggtcaatgtgtaacgatttgtccttgtaacgctttaatggagaaaaaccatgctccgtgaagctggatttatgaaccggattaaaccagatattctttgaaccgatggtagactttatttaagaagttgaacctgggatataccgggattttttgccgtatcacaaatggaaacggccatgcctgatactcctcccaaaaaaaccaaaacagtatgtactttttgtggtgtaggggggtcatttgaaaagtgggaccaaagggggtaaaatccttaaagtacagccctcttctgatgcgccagttaacgcaatttcttcttttgttaaaaggaaaatttggctgggatttcgtaaattctaaagaacgaattacgaaacctttaattcgtaaaaatggaacgtttgttgaatctacatggggaagaagcgttgaatgtagttgcaaataaattaggatcgattaaagaagagtacggtaaagatgctatcggttttatttcttcttctaaaattacgaatgaagacaattatgtaattctataaattatgctcagacagagtatttgaaacgtaataatattgataactgctcacgttattgtcaatcgccagcaacagacggatttattccgtacgattgggtatggggcggaaatgctgggaacaattaaagatttcgccgccaatcgtggccaagtttttaattggtaggttgtaatccaacagacgtctctatcgtgtaatagctacacgtattaaacgtgcacataaattacacggacaaaaattaattgtagctgatcttcgtaaaacagaaatggcagagcgttcagacgtctttattagtccaaaacaaggaacagatcaagtctggttaatggcagttacgaaatatatgattgatcaaggctggcacgatcaacaatttattgatgagaatgtaaacttctttgaagatttcaaagagagtcttacggaatatacacttgaatatgctgaagaagtgactggtatttcaaaagaaacgcttattcaaatggctgaaatgattcgtgatgcagatggtacatgtatcctttggggcatggggtgtaacgcaaaatacaggtggatctgatacttctgctgcgatttcaaacttacttcttgctacaggtaattatcgtcgtccaggtgctggtgcatatccgcttcgaggtcataataacgtacaaggtgcttgtgatatgggtactttaccaggatggctcccaggatatcagcacgttacgaatgatatggaacgtgcgaaatttgaaatggcttatggagtgaaaattaatagtgaaccaggtcttaataatattgaaatgctgcacgcaattgacgaagggggaaatgaaagctatgtatcttgtcggagaggatatggctcttgtagactcgaatgcgaaccatgtacatgaggtgttatcgagccttgatttcttcgttgtgcaagatgttttcttatctaaaacggctcaatatgcagatgttgtattaccagcagcgccgtctcttgagaaagaaggtacgttcacaaatacagagcgtcgtgttcaaagactgtatcaagtgcttcctacgctgggagatgcgaaaccagactggtggattgtgcaggcgattgcgaataaattaggtgcaaactggaattatagtcatccaagtgaaatttttgctgaaatggcaagtttatcaccactattttcacaagcaaactatgaagtgcttgaaggatggaatagtttccattggggaagttttgatggaacgaatacaccgctccttttccaagatggatttaacttcccagataaaaaagctcgttttgcgattgctgactgggtacgcccagctgaattcccagcggaagtttgatcttcacattaataaagggtcgtatgcttgagcattttcctgaaagggaatatgaccaattaattcaacaggtatttccaacgaaaagtggctgggcgtttttcgttgaaagtttctcccagcacttgcaaaagaacgtggagtggaaaactggttcattagtcccgtctggttcctccgttgggagcgttaaaaatacttgtacttgtaacagaccgggtaaaagcaaatggagtatatttaccgatgaattctacagatattgaaacagcgattaatttcttaacaggtcctgcggttgatacgcgtacgaacacactagccttataaacagacgaaagtacgtatggaagtactagaagttgatggcgaaaatccgatgccaaaagcgaacccgcgtaataaaaaacgtcatcctcaatccgggtattgaggtacatcgtaagtgggcacgtccagggtatgtgcatttaacggataagtaggaggaaaaaatatggctgcacctataaaaa

SEQ ID NO: 9646 - DNA, 1308 bp, Bacillus anthracis
atgacacaacaaacttttacacagtatgattttaaaccatttttaatagatgcagttcgtgaactacgctttacagagccgacaggaattcaacagaaaattttcccagtcgtaaaaaaaggtgtaagtgtaattggacaatcccaaacaggttctgggaaaacacatgcatacttacttcctacattgaacagaattaacccaggtcgtgaagaagtacaacttgttattacagcgcctactcgtgagttagcacaacaaatttacgaagaaatcgtgaaattaacaaagttctgtgcggaagatcaaatgattacagcacgttgtttaattggtggaactgataaacaacgatcaattgaaaagttgaaaaaacaacctcatattgtagttggaacaccaggacgtattaaagacttagtggaagaacaagcattatttgttcataaagcaaatacgattattgtcgatgaagcagacttaatgcttgatatgggattcattcatgatgtagacaaaattgcagcacgcatgcctaaaaacttgcaaatgctagttttctctgcaacaattcctcaaaaactaaaaccgtttctgaagaaatatatggagaatccagagcatattcatatcaatccaaaacaagttgcggctggaaatattgagcattatttagttccgtctaaacatcgtaacaaaatcgatttagtgaataaaatgttgctacaatttaaaccgtatttagcagttgttttcacgaatacgaagaagatggcggatcaggttgctgacggattaatggagcgcggcttaaaagttggacgaattcacggagatttatcaccgcgtgatcgtaaaaaaatgatgaaacaaattcgtgacctagaattccaatatattgttgcaactgatttagcggcacgtggtatcgatattgaaggaattagtcatgttattaactatgagcttccatcagatttagatttcttcgttcaccgcgttggaagaacagcacgtgcagggcattcaggtattgcagtgacgatttatgatccagcaaacgaagaagcgctagatagtttagaaaaacaacgtcatattgagttcaaacatgtagatttacgaggagatgagtgggcggatttaggtgaacgccgtcgtcgtaagagccgtaaaaaaccaaatgatgaacttgacgttatggcaacgaaagttattaaaaagccgaaaaaagtaaaaccaaactataaacgcaaacttgcaactgaacgtgacaaagtgaagagaaaatatagcaataaaaaaaga

SEQ ID NO: 9647 - DNA, 1857 bp, Bacillus anthracis
atgttatttaaactttccatgtcaggattaaaaagtaagctgaaagattatatcgtcttacttgttggtcttgtcatgtcgatttcaattttttatatgttccaaacgttagcgttaaacgaagccttccttaaggaaaattctacgattggccaaattggatttgtattccaagcaggttcatttttactggctattataacgttcttctatattctatatgcgaactctttcttactatctcttcgtcaaaaagagtttggtatgtatatgatgttaggagcgaaaaaacataaagttacattacttatgtttattgaaacaatcgtattaggcgctgcgtctcttgcgatcggtattatagttggtgtaggacttgcagaaggtatcggacagctattaatgaaacaattagaatttgctggtaaaggctataaagcattttacctgccatctatgactgttacgtgcatcttcttctttgcactatttgtattatcagcaattatgaacagtattaaattatcacgtatttctgtactgcaacttgtacatgcagacgcacaaacagaacgtgttgcggtaaaaggaaaaatgacaggtttaatagcattccttgcggttattttattaggcattggctatgcatcaatgatttacatggcaaaactaagagaaatgggaatccttattgcattaattacaacaacagctggtacttacatgctatttggatcacttcttcccgttattattaaaaagttaaaaggtaataaaaagcgtagtgaaaaaggacttaacgcttttacatttgcacaattaaacttccgtattaatagtttaacgaaagtgcttgcaacggtagcaatgttagttgcgcttggagcaggtgcaatttcaggtggtatggcgtttaaaaataacgctatcaaactgtctgatggtttagtaatttatgattcagttgttcataatcctacagctgaagaaaagaaaattttagacggtattacatttaaagaaaaaaatgaatatcgctacaaagttgatgataaatacgtttattatgtaaaagaagatctagaaaaaaatcgtcctttcgtaaaagatatgacaaatatgaagtcgatgaaggatttagtgaatacaaagaaggtttcacaagaactaccagtaggcgcagtttctagagaaatgaatgaaaaagatgcgaacgctaaagaaatgccagaagaatggaacgaggcttttagaacaatccagccattctacgtacatgaagatcatgcaattaaaattgtagatcaaaaattatacgatactgtaaatggtaaagaaggtatagcatttatcggaaaagcagatgatttcttagcatatacaaaagaatggaaaaaacttgacgagttgcagctagataaatataaaaatgtaaaagctgaaagattagatagtaaatatcaaacttacgacatgttatacggcgttgcaagcggaacagtgtttatgggattcttccttggaattgctttcttagcaatgatggcaagctgtctcatgtttaaaattctttctggtgcatcaaaagatattacgcgttatcaaatgcttcgtaaaatcggtgtgcgccgtgaattattaacgaaatccatttataaagagttattcttagtattcttattcccagcaattgtaggtattgctcacgtattagttggtatgaatatttttggatttattttaatcgatccgtacttccgtatttgggtaccaattgtaattttcgtagttatttacacgatttattacttcattaccgttcaattatataaaggaattgttcttccgaaagaagat

SEQ ID NO: 9648 - DNA, 1374 bp, Bacillus anthracis
atggaatttgatacaattgccgcgatttccacagcgcttggagagggtgcaattgccattgttcgagtaagtggagatgatgcggttgaaaaagttaatcgtatttttaaagggaaggatttaacagaggttccttctcacacgattcattatggtcatattgtggatttagatacaaatcaggttattgaagaagtgatggtatctattatgcgtgcaccaaggacttttacacgtgaaaatatagtagaaattaactgtcacggtggacttgtttcggtaaataaagtattgcagcttattttagcgcaaggggtacgattagcagagcctggtgaatttacaaaacgtgcttttttaaatggccgtattgatttatcacaagcagaagctgttatggacttaatccgtgcaaaaacagatcgtgcaatgaacgtagcgattaatcaaatggaaggacgattatctaaattaattggtcgtctgcgccaagatatattagaaacgttagctcatgttgaggtaaacatagattacccagaatatgatgatgtggaagaaatgacacataatattttaattgagaaagctacacatgttcgtgctgaaattgcaaagatattagaaacatcgaagcaaggaaagattttacgtgaaggtattgctactgcaatcatcggtagacctaatgttgggaagtcatcgctattaaatagtctcgttcaggagaaaaaggcaattgtaactgatattgcaggaacaactcgtgatgttattgaagagtacgttaatgtgcgtggtgtaccacttaaacttatagatacagcggggattcgtgaaacggaagatgttgttgaacgaattggcgtagagcgttcaaaagaaatgatgagtcaagctgatttagtgttagttgtcgttaattatagtgaaactttaacgaatgaggatgaagagctattccgtgccgtacaaggaaaagatttcattgttattgtaaataagacagatttaccgcaagcaattgatatggaacgtgttatagaattggcagcgggaaatcgtgttattacaacatcgttaattgaagaacaaggaatagatgaacttgaaaaggcaatagctgatttattctttgaaggaacaattgattctgcagatgtaacatatgtttctaatgcgagacatattggattattaacacaagcaggaaaaacaattggagatgcaatcgaggcgatagaaaatggtgttccaattgatatggtgcaaattgatttaacaagaacgtgggaaatacttggtgaaattactggtgataccgttcatgaaagcctaattgaccagttgttctctcaattttgtttaggaaaa

SEQ ID NO: 9649 - DNA, 996 bp, Bacillus anthracis
atgaaacaagtacaaacaaaaagggattggaaaaaacttgcatatgacgtagtagaagaaaaaatgattacgaaagaggatgcaatagcgatattagaagctgatgatacagaagttttagagattatgaatgctgcttacattattcgccatcattactttggtaagaaagtaaaattaaatatgattattaatacgaaatctggattatgtcctgaagattgcggatattgttcacagtcgattatttcagaagcaccaatcgataaatatgcatggctaacgcaggaaaagattgtagaaggagcacacgaagcaatacgccgtaaagctggtacatattgtattgtagcatctggtcgtcgcccgacggataaagaggtgaatcacgtaattggagcagttaaggagattcgtgaaacgacagatttgaagatttgttgttgtttaggtttcttaaacgaagatcaagcaggacgtttagctgaagctggtgtacatcgttataaccacaacttaaatacacatgcgaataattacgaaagcatttgctccactcatacgtatgatgatcgtgttgatacagttcaaaaagcgaaacaagcgggtatttcaccatgttctggggcaatctttggaatgggagagacaatagaagagcgcgctgaaattgcattcgaattacaacgtatagatgcagattcaattccatgtaatttccttgttgctgtaaagggtacgccgcttgaaggacaaaaggagttaacgccagtagaatgtttaaaagtgttggcaatgatgcgttttgtaaacccaacaaaagaaattcgtatttcaggagggcgtgaaatcaatttacgttctgtacagccaatcggtttatttgcagcaaactctatttttgttggagactacttaacgacagctggacaagaaccgactgcagactggggtatgattgaagatttaggatttgagattgaagaatgtgcgtta

SEQ ID NO: 9650 - DNA, 522 bp, Bacillus anthracis
ttgaaagagtacatgttaaaacaggtggattaccatgcttgggctaatatacgattattcgatcgaataaaagaattaccaaactatgaggcgatttttactgaacagatacagagcgtattcccttcaatcaaggatacttttgcgcatatttatattacagatcaagtgtggttacacatattgcatggtaaaagtatgaatgaagcaatacaagaccgagaaaatttacgaaaacaaatcgaaactaaatcgttatatgaattagaaaaattatttgaaaacatggcaaatcaatataaagactttttaagtacgatacaagacgtgaatgctgtatttgttattgagaacccatatgcaggggcattagaaacttcaattttagagttagtacaacatgtcgtaaatcatggtacatatcatagaggaaatataacagcaatgattcgtcaacttggtcattcgtcgacaatgatggattttgtactgtatttacatatggttaaaaagcagggagag

SEQ ID NO: 9651 - DNA, 2362 bp, Bacillus anthracis
ttccccctcttaccattaagaggcgttctcgtatatccaacgatggttctgcatcttgatgtaggacgtgataaatcgatacaagcactagagcaggcggcaatggatgaaaatatcatctttttagcaatgcaaaaagaaatgaatatcgatgatccgaaagaagatgacatatatagtgtaggtacagtggcgaaagtgaagcaaatgttaaaattgccgaacggtacgcttcgtgtccttgtagaaggtttacatagagcagaagtagtagagtttatcgaagaagaaaatgtagtgcaagtttctattaaaacggtaactgaaagaagtggaagctgatttagaaagagaaagcacttatgcgtacattactggagcatttcgaacaatatattaaagttatcgaaaaaagtttcaaatgaaacatttgcaacggtagctgatgtagaagagccaggaagattagtggatttaattgcttctcacttgccaattaaaacgaagcagaaacaagagattttagaaatcatatctgtgaaagaacgattacatacacttatttcaattattcaagatgaacaagaattacttagtttagaaaagaaaattggacaaaaagtgaaacgttcaatggagcgcacgcaaaaagaatatttcttgcgtgagcaaatgaaggcgattcaaactgaacttggcgataaagaaggcaagggcggggaagttgaagaacttcgtgagaaaattgaacagtccaggaatgcctgaagaaacaatgaaggctgcgctgaaagaattagatcgttatgaaaagttaccagcaagttctgcggagagcggtgttattcgcaattatatggattggttattagcactttccgtgaacagacgcaacggaagatatgattgatcttgctcattcggaagagattttaaacaaagatcattacgggtcttgagaaagtgaaagaagcgcgtttcctgggaatatttaggcggtacaagaaagttagcgaattcattaaaaagggccttttctcttggtttagtagggcccacccggggtcggaaaaaacttcgtttagcgcgttctattgccgacatcatataattcgtaattttgtccgcgtatcccctggggggggggcgtgatgaatctgaaattcgctggtcaccggcgtacgtacgttggagcaatgccaggacgcattattcaaggtatgaaaaaggcaaaatcagttaatccagtcttcttattagatgagattgataaaatgtctaacgatttccgtggagatccttcagcagcattacttgaagtgttagatccagaacaaaaccataacttcagtgatcattatattgaagaaccatatgatctatcgaaagttatgtttgtagcaactgcgaatacactttcaaagtattccaggtccattacttgaccgtatggaaattatttcgattgctggctatacagaacttgaaaaagttcatattgctcgtgaacatttattgccgaaacaattacaagagcatggcttacgaaaaggtaatttacaagtacgtgatgaagcgcttcttgaaattattcgctattatacacgtgaggctggtgttcgtacactagagcgccaaattgcaaaggtttgtcgtaaagtagcaaaaattatcgttacagcagaacgtaagcgtattgtagtaacagagaaaaacgttgttgatttacttggtaagcacatattccgttatgggcaagctgaaaaaacagaccaagttggtatggcgacgggtttagcgtatacggcagcaggcggcgatacactggcgattgaagtgtccgtagcgccaggtaaagggaaattaattttaacagggaaacttggggatgttatgaaagaatccgcacaagcagcgtttaagctatattcgttctcgtgcagaagaccttcagattgatccgaatttccatgagaaaaatgatattcatattcatgttccagaaggagcagttccaaaagatgggaccgtcagcaggtattacgatggcaacggcacttatttctgcgttaacaggtattcctgtaagtaaagaagtggggatgacaggtgaaattacacttcgtggtcgtgtattactgcttggatggtttaaaagaaaaaacattaagtgctcaccgcgcaggtttaacaaaaattattttaccggcggaaaatgagaaagatttagatgatattccagagagcgtaaaagaaaacccttacgtttgtgcttgcatctcatttagatgaagtattggagcacgcattagtaggagtgaaacaatgaaagtaacaaaagcagacattgtaattagtgctg

SEQ ID NO: 9652 - DNA, 366 bp, Bacillus anthracis; identical to SEQ ID NO: 9131

SEQ ID NO: 9653 - DNA, 609 bp, Bacillus anthracis
atggtgaaaattggtgtactaggtcttcaaggtgcagttcgtgaacatgtaaaatcagttgaagcaagtggtgcagaagctgttgttgtaaagcgtatagaacaacttgaagagattgatggtcttattttaccaggcggtgaaagtacaactatgcgccgtcttattgataagtatgatttcatggaaccacttcgtacattcgcgaagtctggtaaaccaatgtttggtacatgtgcaggaatgattcttcttgctaaaacacttattggctatgacgaagcacatattggtgcgatggatattacagttgagcgcaatgcgtttggacgtcaaaaagatagctttgaagctgcactttctattaaaggtgtgggagaagattttgttggcgtatttattcgtgccccgtatgttgtagatgtagcggatgatgttgaggtactttctacacatggcgatcgaatggtagcggtaaagcaagggccgtttttagctgcttctttccatccagaattaacggatgatcatcgtgtaacagcatactttgtagaaatggtaaaagaaagcgaaaatgaaaaaagttgtataagtaacttgcaacttgta

SEQ ID NO: 9654 - DNA, 915 bp, Bacillus anthracis
atgaatatgcaagaggtttatgaatatttaagtacggtattgcctgaaggtcatgtgaaacaagatgaaatgttaaagaatcatacgcatattaaagttggtggaaaagcagatgtgttcgttgcgccgacaaattatgatgaaattcaagaagttattaaatatgctaacaaatataatattccagttacgtttttaggaaacggatcgaatgtcattattaaagacggtggaattcgcgggattacagtaagtttaattcatattacaggtgttactgtaacaggaacgacaattgtagcacagtgcggtgcagcaattattgacgtatcacgtattgcgttagaccataacttaacgggtcttgagttcgcttgtggtattccaggttcagttggcggagcattatatatgaatgcaggtgcatacggcggtgaaatttcgtttgtattaacagaagctgtcgtaatgacaggtgatggagagctacgtactttgacgaaagaagcatttgaatttggatatcgtaagagtgtatttgcgaacaatcattacattattcttgaagcgagatttgaacttgaagaaggtgtatatgaagaaattaaagcaaaaatggatgatttaacgtttaaacgtgagtcaaaacaacctctagaatatccttcatgtggtagcgtatttaaacgcccaccaaataactttgctggtaaattgattcaagaatcagggttacaaggtaagcgaattggtggagtggaagtttctttaaaacacgctggatttatggtaaatgttgataacggaacagcacaagattacatcgatttaattcacttcgtacaaaaaacagttgaagagaaatttggcgtgaagttagagcgtgaagtaaggattattggagaagataaagaa

SEQ ID NO: 9655 - DNA, 411 bp, Bacillus anthracis
atgcggatattaggtttagatgtaggtacaaaaacagtcggagttgcaattagtgacgaaatgggctggacagcgcaagggcttgaaacaatcaagattaacgaagaacgaggtcaatttggatttgatcgcatttctgagttagtaaaacagtatgatgtggacaagatagtagtaggtttacctaaaaatatgaatggtacaattggcccgcgtggtgaagcatgccaacaatttgcagaaaacctacgagagctgatacaattagacgttgtaatgtgggacgagcgtttgtcaacgatggcagaggaacgtctactcatttcagcggatgaaaaccgtaagaagcgaaagcaagtaattgataagatggctgcagtcgtaatcttacaaggatttttagatagtaaa

SEQ ID NO: 9656 - DNA, 1173 bp, Bacillus anthracis
atgggtgaagaaaaccaaccaaattatacgatttcacaggaaaactggtccctccatcgcaaaggatatgacgaccaacaacgccatcaagaaaaagtacaagaggcaattaagaataatttacccgatcttgtaacagaagaaagcattgttatgtctaatggtaaggatgttgtaaaaataccgattcgttctttagatgaatataagattaggtacaattatgataaaaacaaacacgttgggcaaggaaatggtgacagcaaagttggtgatgtcgttgcgagagatggatcaggtggtcaaaagcaaaaaggaccaggaaaagggcaaggagcaggagatgcggctggggaagattattatgaagctgaagtctctattttagaattagagcaagcatttttcaaagaattagaattacctaatttaaagagaaaagaaatggatgaaaaccggattgaacatgttgaatttaatgatattagaaaaacaggattatggggtaacatcgataagaaaagaacgatgatatctgcatataaacgaaatgcgatgcgtggtaaagcatctttccacccaattcatcaagaagatttaaagttccgcacttggaatgaagtattaaagccagattcaaaagctgttgtattagcgatgatggatacaagtggatcgatgggaatatgggagaaatatatggcacggagcttctttttctggatgacgagatttctacgcacaaagtatgaaacagtagatattgaatttattgcccatcatacggaggcaaaagtagttccggaggaagagtttttctcaaaaggagaaagtggcggaacaatttgttcttctgtatacaaaaaagcactcgagctaattgataataaatactcaccagaccgctataatatttatccattccatttttcagacggtgataatttaacatcagataatgctagatgtgtaaaacttgttgaagagttaatgaagaagtgtaacatgtttggatatggggaagtgaatcagtacaaccgccatagtacacttatgtcagcctataaaaatattaaagatgagaatttcagatattatattttaaagcaaaaagcagatgtattccatgcgatgaagagcttctttagagaagaatcaggagagaaaatggca

SEQ ID NO: 9657 - DNA, 1425 bp, Bacillus anthracis
aggcggatagcggaaattacggaaaatgcgggtggatttgggcttgatttttatccggatgcgttatgaaatatgtccagcggaaattatttatacatttggtgcatatgggatgccgacgcgtttttcacattggagttttggaaaacagtttttcagaatgaaattacaatacgatttaggtcttagcaaaatatacgaactcgttattaactctgactccatgttatgccctttttattagatacgaactcgttaattcaaaataaattaatcgtagcacacgtgttagcgcactgtgatttctttaaaaataacattcgtttttcaaatacgaagcgagatatggtagaaagtatgtcagcaacagctgaatgggtgaaagcatatgagcataagtacggaaaaagaggaggtagaaacatttttagatgccgtacttgctattcaagagcatattgatccgtcgcttatgcgtccgaaactggcgtggagtattgatgatttagaagaggaagaagtagagaagaaaaaggcatcgcaatatgatgacctatggaatttagataatcgaaataaaaagcaggaacgctccaatgtacgtaaaaagaagaaaatcccaccgcaaccagaaaaagatttactcctctttattgaagaatatagccgtgagttagaagattggcagcgagacatattaacgatgatgcgtgaagaaatgttatatttctggccgcagctttgaaccaagatcatgaacgaaggctgggcgtccttctggcatcaacgtatacttcgtgaaatggacttaacatctgatgaagcaattgaatttgcgaaattaaatgcaggcggtgtacagccatccaaaaacgagcatttaattcctactaacttcggaattaaaatgtttgaagataattgaagaaaggttaccaccaccccgaccgaaaaaaatgaagccgaccaaggtggcaaaaccagggatctggggcgagaacaaaatcttttggaagtacgcgaaatcgaatgggacgtatcgttttttaagaacctacttaaataaaagatctcgtaaggagagaagatatgtacttattccagcgccagggaaaagaatataaagtaatagataaagagtgggaacatgtacgtgatcagctcgtaaatatgcgtacaaatggtggcttcccgtacttagtagtagaagacggagactacttaaagaacggagaattgtatattaaacatagttacgaaggaatcgagctcgatttaaaatacttagaaaaggtattaccatatctgcatcaactgtggggaagaacagtgcatatggagtcgattgtggagagtaagggtgttgtgttttcttatgatgggaagatggtgcatcggaagtatgtgtgatggaaagaacggaca

SEQ ID NO: 9658 - DNA, 1752 bp, Bacillus anthracis
ttgggacaaaatcagttcagatggagtaacgagcaattacgagaacatgttgaaataatagacggtacaagaagtcctcataaattattaaagaacgcaacatacttaaattcctatatacgtgaatggatgcaagcaaatatttggatctatgatgacagaattatatatgtaggagaaaaactaccagagcaattacatgaatgtgaagtcattgattgtgatggaaagtatgtagttcctagttacatagagccacatgcacatccgtatcaattatataatccagagacattagcgaatcatgcgatgcaatttgggacaacaacttttattaatgataatttaactttatttttcacattaaagcgtgaagaatcatttcatttattagatgaatttacaaagattccagctagtatgtattggtggtgtcgttttgatggacaaactgaattgcaaaacggggaatctttatttaatagtgaagaaataataaagtggctacagcatgaagcagttctgcaaggcggcgagttaacagcatggccaaaattattacatggcgatgatgaaatgttaacttgggtgcaggaaacaaagcgattacagaaaaaagtggaaggacatttcccaggagcatctgaagcaacgttagcgaaattaaaactgttaggtacggattgcgatcatgaagcgatgacagggcaagaagcgttagctcgtcttatgcaaggttacaccgtttctcttaggaattcttccatacgcccagatttagaagttttattgaaggaattgttggaattaggtgttaagcagtttgatagattcatttttacaacagacggttcacatccgtccttttatgaaaatggaatgacgaatatcatgattgctaccgctataaagaaaggtattccagtaattgatgcgtatcaaatggcaagttataatattgctcgttattataatatggagcatatacatggtgcgattgcgacaggtagaattgctaatatcaatattttagaaagtaaagagaacccagtgccaacgagcgtaattgcaaagggacaatgggtaaagcgcgacggtgtaaatacacacgaagcattacatatagactggagtaaatgtaaagtaactccattatcattagagtggtcgatagaaaaagaggatatgcttttttctaataaaacgggtatccacttattaaataacgttataacaaaaccatatactagtgaaattaacatagactgtgatgaattgtccatagattatgatgaatgtttccttatgatgattgctcgtgatggtacttggcgagtgaatacagttgtaaaaggttttgcgaaagaaataggaggccttgctagctcttattctggtacgggtgatatcattcttgtcgggaagagaaaagaagatatgcttacagcttttcacaggataaaagaacttggcgggggaatggttatagctgaaaagaatgaagtattacacgaaatagcattaccattgcttgggattatgtctgaattaaaaatgagcgagttaatacagaaagagaaaaagatggtgaatttactgcaagagcgaggttacgtatataacgatccagcatttacgattttattcttttctgcgacgcacttgccgtttatacgggtaacgtttatagggctatatgacgtaaaaagtggaaaggtagttgcttcgccggtgaatttgataaagcaatat

SEQ ID NO: 9659 - DNA, 711 bp, Bacillus anthracis
atgaaaaaggtttctgtattacccgcttttattataacgttcgtatgtatgctagcttttcttgtaatgccatacgggaatgcttcagcaaaactagctgatggtacttacgatattaattacgtaattcaaaaagcggaaaatgattcagcttcaatggcaaatgactattttgaaaagccagcaaaattaatagtgaaaaacggtgagatgagagtacaagttccgatgaatcatagtgcttggattacagaatttaaagcaccagagaacgggaattttgttgatgcgaaagttgttagtaaagatgaatcggcagataaaagaacagtagagtttaaagtagatgatttatccaaaccggcagctgtaaaaattcatgttgttgtaccaaatgcaaactatgaccaccactacacaattcgttttgcttttgatgcaaatgtaaaagctgtaggtggcgataacggcgtagctgctacaacaaaaaataatgatcaagcgaaaacagatacacaagtaaaagaagagaaaacaaaagtagagagtaaggaaacagctaaagaagtgaacaaagaaacaaaaaatgaaaatggaaaagctgaaaaaacagataatccaaaaacaggcgatgaagcacgtattggattgtttgcagcgttaattcttatttcaggtgttttcttaattcgtaaagtgaaattgagtaaa

SEQ ID NO: 9660 - DNA, 1239 bp, Bacillus anthracis
atgaaaaaaattttaatggtaacacaaaatttttatccagaaatcggtagtgcctctaataggatgaaaaatatatacttggaattaaatgaacgaggttatgatgtcaagatattaacttctgatcctagttatccaaatcgtaatttatacaaagattcgagttattggtatgatgaaaatatagaaaaagatatagtacgtatccatccaaaaacacgaaaatatacaagaaatctttttcgaaggttaattttgtacatagaagttgcctttaggttaattttggcaatatgtaaagataaagagaaatatgattatatatttgtttccacaccatccatctttatacctgtagcagggatgtttgcgaaacgaaaaatgaaggcgaaattaattgtagatgtaagggatttatggccggagtccttaataggcataggtttttttaataaaaattggatactaaaatttgcttataaattagagtataaaatatatcatgctgccgataacattattattaatagtaaaggtttttattcttatatttcctctacaggtattgcccctaatcgcatttcatttatgcctaattctttaacggaaaaagaattatctactgttccaaagaagaacattagtgatcaattaacagtgatttatacagggaatataggattagcgcaagatatagaaaaattaattttgattgcagagcatttgaaagagtataagaatatttcatttaagattattggatatggttatcaaaagaaagagcttggagagagtattgaagcaaagcaacttccaaatatgcaattgattgagcccaaaaatcgtgaagataccctcgctgaaattgttgatgcagatatagcatatgtgagtttagtagaaaaagatgtatttaaaaaggttctcccaaggaaagtaatggattatatgagtatgagaaaaccgattgttgcagatgttgctggttatgcaaaagaggttattgaagacgctcagtgtggttttgtcactgaagatagaacggttgctgaactaagcgattacattatcaagttagcacaggataagcagttacgaaatcgactaggggagaatggatatcaatatgcatttcgaacattacgctggaaaacaaatattgaaactttattgaaaatattggaggaaagagatgtcacagaagaaagtgtgcatgtttgtatggaatcacttcacaaa

SEQ ID NO: 9661 - DNA, 633 bp, Bacillus anthracis
atgcgtaacattcaaattgcgttaacgaaagggagattagaaaaacatgtgattccgctctttgagcagattggaattgattgttcagagctcaaaaataaaggaagaaaacttgtctttcaaagtaaaaatacggatatctcatttattttagtgaaagcagtagatgttgctacttatgtagaacatggagtagcagatatcggagtcgttggaaaagatattttaatggaaaacgagaaagatatttatgaaatgttagatttaggagtaggcgtgtgtaagttttgtgtcgcttctattcctacgtataatccgaagagctaccggaagaaatgcattgcgacgaaatatccacatattacttctaactattttcataataaaggagaggatgtagaaattattaaaatagaaggttctgtagaaattgctcctattcttggattggcagatgcgattgttgatattgttgaaacaggaaaaacattacaagaaaatggactcattgtatttgaggaaatgtattctatatctgctcgaatgattgtaaataaggctgccttaaaaactaaaaaagacgaaatattcagtattataaatatgatggagcaagaaattttgtcaggaaaa

SEQ ID NO: 9662 - DNA, 3652 bp, Bacillus anthracis
aaaaatgaagagatccaatcggtcattaatggactagaagatggtttaaaagagcaacttgtatcaggggtatggcaacatcttctcgttcgttttaaatggcggccctaatataaaaaaacaaaaaaaatcacaacttattgtgacgcataatttatattcagcacaaaaagtacatgaaagatttagtggcgttacttgggtgaaaagagatgtaggcgagtgtaccagtaaatgaattgatagcatcagaaacttggtgttgcaagcccagaattgaaggcacaacgtattgaagtgttaaatcgcttagctgcaggagagcacgggattattgtagcaccagttgcaggactacgcagatttttaccaatgaaagagttgtggaagcaaaggcaaatcgaaatcagtctagggcaagagattgatttagatacatttttgcatactttacatcatattggctatgagcgtaagtctatggtagaagctcctggagaatttagtttgcgcgggggaatattagatatttatccactaactgaggagctaccatttcgtattgaatttttcgatacagaagttgattctattcggttatttgatgtggatgaacagcgctctcaagataaaaaagaaagtgttagattcggtcccacctccagatttttttttttcccgggaagaactccaatcggcgattaatgctttttgaagaagttttacctaaggcgtatgcaaaacctttcggatgataagttaaaggctccagtgcttgagacgctaagtcatcaaattgagatgtaaaaaaacgggcaaaagtatagaacagatgtttaaatatttatctattttctataacgaacctgctagtctgatagattatgtaacagaagaatggtgttgtgattttagatgaaatttcacgtattcaagaaacagcatctcatcttgaatcagaagaggcggaaatggtatatatcccttcttggtgagggaaacaattattcaagatttatctttctctcattcgtttgaagaatttttttcatcataaaaaaggaagtttttgtatattagccgtttttctaaggtcatatagcgcatccacatccgcaaaaccattgtgatggtgacatgtaaaccaatgcaagatttccatgggcagatgcagttgtgaaaacctgaaattgatagatggaccgaaggccattttacgcccgttgtgctaggtacagatgatgagcgtgtgaaaaaactccaccatattttaagtgattatgatattgatgcagatattgtagagggcacagatatattattgcctggaaggttacaaattgctgtaggtgatttacatgcagggtttgaaatgccgatgcaaaagcttgttgtcattactgaaaaagagctttttcataagaaagttaaaaaatcacaacgtaagcaaaagttatcgaatgctgacgccataaaaagttattcggaattaaaagttgggggattatgtagttcatgtaaatcatggtataggtaaattcttaggtattgagacattagagattaacggtgttcataaagattttttggaatattaaatttcaaggtaatgataagttatacgttcccaattgaacaaattgaccagagtgacaaaaatatgtagggatctgaaggtaaggatccgaaaagttataaattggggcggaaacgattgcgaaaaaggtcaaaaccaaaagttgaaaaatctgtacaaaacattgcggatgacctcatttaactccatgctgagcgcgaaaccttcaaagggttatgcctattcaccaaaaacggcgagaacaacaaaaaattgaagtcttctttcccgtatcaagagacagaggatcaattacgttctattgaagagattaaaaagggatatggaacgcggacgtccgatggataggcttttcttgtggtgatgtaggatatggaaagacggaagtagctattcgtgcggcgttttaaagcaattatggatgaaaaacaagttgcaattttagtgccgacaacgatccttgcacaacaacactatgaaacaattcgagagcgttttcaagattatccaatcaatatagggtttattaagtagattccgtacgagaagccagcaaaatgaaacaattaaagggttaaaaagatggcacggtagatattgtaatcggaacgcatcgtattttatctaaagatgttacttataaagatttaggtcttcttattattgatgaagaacaaagatttggcgtaacacataaagaaaaaattaaacaattaaaagcaaatgttgacgtattaacattaacggcaaaccccgatcccgcgtacgcttcatatgtctatgcttggtgtacgtgatttatctgttattgagacgccgccggaaaatcgtttcccagttcaaacatatgtagttgagtataatccagcgttaatgcgagaggcgatagaacgcgagcttgcaagaggtgggcaagtttacttcctatataatcgggtggacgatatcgaacgaaaagcagatgaaatttcgatgttagttccagatgcacgtgtcacttatgcacatgggaaaatgaacgaaagtgaattataagactggtatgctatcgtttttagaagggcagcatgatgttcttgtaagtacaacgattattgagacaggtgtagatattccgaatggtaaatacattaattgtatttgatgcagatcgtatgggattatcgcagttgtatcagcttcgtgggcgtgttggacgttctaatcgtgttgcatatgcttactttgcatacaaacgagataaagtgttatcagaagttgcggagaagcgtctgcaagccattaaggagttcacagagcttgggtctgggttcaaaattgcgatgcgagatttatcaattcctggtgcagggtaacttgttagggagctggacccaccaggggttttattgattttgttggggattgattttatattctccaaatgttaaaaagaggcaattgaaacagcgtagaggaaccagccgggagttggaaaatccagttaatgttgaaattgatttagaagttagatgcatatttacccagatgcttatattttgggatagtaaacaaaaaattatgatgtataaacaatttagaggtgtttctgcgatgaaagatattgaagagttgcaggaaagagatgatagatagatttggtgattacccgcaagaagttggttacttattacaaattgcaaatattaaagtattggcaatgaaagaacaaattgaattaattaagcaaaataaatttgaagtaacaattctgttctcagaacaagcgagtcaaaatattgatggtggaaaattattcatgctcggaaatagttttggacgtatgatcggtttaggaatggaaggatcacaattgaaaatcttcatgaaaacaaattgcttagagacatcgaaagtggttaacaattgcttgaaatttattaaaagggctgcccagatgtaaaaaaagaagtcataaatgcccctatataagataaaaaatacaattcggcgtgcatagaagaaactatgtgtaaaatactatgtctaacagttgggtgatttttacatgaacag

SEQ ID NO: 9663 - DNA, 1251 bp, Bacillus anthracis
gtcatcgcagaagtaaagcgagcatcaccatcaaaaggagatattaatttacacgttgatgtacgaaaacaagtgaagacatatgaagaatgcggcgctggtgcagtttctgttttaacagacggtcaattttttaaagggtcattttatgatttacaaacggcaagagaagaaagtagcattccgctttttatgtaaagatttcataatcgataagattcaaattgatagagcgtatgaagctggtgcagatattattttactaatcgtagcggcgttaacgaaagagaaattaaaagagttgtatagctacgtactagaaaaaggattagaagcggatggttgaagttcatgatgaacagggattagaaattgcaattttcattaatcccgcacggtatcgggattaaccaaccgtaatttaaacacattcgaagtcgatttaagtcaaccagaaaagctgggaaagcgattaaatgaggagaaattcctttggattagtgagagcgggattcattcaaaagaagacataatccgcgttaaacgagctggggcaaaaggtgtattagttggagaagcgcttatgacatcgtcttctattcataccttttttgaagattgtaaggtgaacatatgaaagtgaaaatttgcggtatcactgatatggaaacgagtaaaacgtgcttgcgaatacggagctgatgcacttggatttgtttttgcagaaagtaagcggaaaattactccagggctagcgaaagaaatcattcaggaacttccagccaacgtgttaaaaatcggtgttttcgtaaatgaatcagtagaagtaatccagaaaattacaggtgcaattgcggattaacacatgtacaactacatggggggtgaagaccatcattcaatcagaagattgaatattccgtctattaagtcgctcggagtaacttcagagagtgatatgaaaaacgctccaggggtatgaacggactatatattatttgatagcccgaaggaaaagtttcatggaggaaatggaaagacatttccttgggagttacttgcgcatatgcccaaaagaattacgagagaaaacgatattagctggtggattaaacactcttaatatagaagaagcaattcggaactgttcgcccatatatggttgatgtgagcagcggagtagagacagaaggaaaagaaagatgtagagaaaataaaccaatttattataaaagcgaaggagtgttctaa

SEQ ID NO: 9664 - DNA, 850 bp, Bacillus anthracis
agcgataaaggtcgaaataaaactattaaagttggattctctgtttcaactttaaacaatccattttttgtaactttgaaaaaaggggcagaaaagaaagcgaaagaaagcggcattgaattgattgctgttgatgcacaaaatgatgcagcaaagcaaacaaatgatgttgaagatttaattcaaaaaggtgtcgatggtagttgttattaatccacccgattcagatgctgttgcttcagcagtaagtgcagcaaatgcagcgattgtccctgttattacagtagaccgcgttgcgaattcaggtaaagttgtttctcccattgcctcctaataatattgaaggtggtcaaatggctagtgattacattcgtgaattagtcggcgagggagcaaacgtgcttgagtaagagggaatccctgggtcttttggcccttccgaaacgtggaaaaggattccataacgtagccgataagtcttaaaaagtagttgctaaccaagcggctgattttgatagagcgaaagggattatctgttatggaaaaacattttgcaagcaaatgggtggatattaagcggtatttgcgcataacgacgagatggcattaggggcacttgaagcattgaagtctgctggaaaaacagatgtagtggtggttggatttgatgcaactgaagatgctgtgaaagcggttaacgatgggcgtatggctgcaacagttgctcaaaaaccggaattaatcggagagaaggcgatgcaaacagcaaaagagatcacgccaaggtaaaaaagtggacaaatctattccgattgaattagagcttattaagaaaaacaaataaatataa

SEQ ID NO: 9665 - DNA, 793 bp, Bacillus anthracis
atgggaaaaatcattgctattgccaatcaaaaaggtggcgttgggaaaacaacaacatctgttaatttagggggctggatgggcacaagtaggtaaaaaggtctttcttgtagatattgacgctcaaggaaatgcaacgactggtgtgggaattgaaaaatccgaattagatcaatgtatttacaatgttcttgtggaagatgcagatgttcaaggggttatacagaaaaccgcaactgaaaacttagatgttctacccgctacaattcaattagcaggtgctgaaattgaattggtaccgactatttcccgggaagtacgtttgccaaaggggcattacagcccagttcgtgatgaattatgatttatattattattcgactgtccccccgtccttaggggttattaacgatttaatgcattaactgcagcgggattctgtatattttcctgttcaatgcgaatattacgcactagaaagggttaagtcagctattaaataccagttcgacttgtgcaaaaacactaaaataaaaatctagcaattcaagggtgattgctaaccatgttgggatgcccgtaccaatttaggcattcaagttattaattgagtggaaaaaatactttagggaataaagaatatccgttcaatttcccccccaaaaggttcgtttgaggtgaagcaccaagtcatgggaaaccaattatgcagtatgacgctaaatcaagaggggcagaagtatatatagatttagcagaggaagtgattgcagcgtggctaaatgattaggaa

SEQ ID NO: 9666 - DNA, 999 bp, Bacillus anthracis
atgatcaaattaagtgtattagaccaatcccctatttcagatggtagtacagcaacccaagctttttcacatacagttacgcttgcgcaagaagttgaaaaactcggatatacacgcttttgggtatcagagcatcacaattctgtaagccttgctggttcaagtccagaaatacttatttctcatattgcagcaaaaacggagcgtatgagagttggttcgggtggtgttatgttacctcactatagcccgtataaagttgctgagaatttccgtgttttagaagcgctttatccaaatcgtattgaccttggtgtcggcagagcacctggcggtatgccaattgcaactcgcgcacttcaagaaggaaaaatggtctcacttgatcaatatccagaacaaattgcagatgttgcaatgtatttacatgatcaagtaccagaaaaccatcattatgcgaatttaaaagctactcctgtgattccaacatctcccgacatgtggttgcttggctctagtggagagagtgcaaagatcgctgcacagcaaggtgcttcttttgcattcgcacagttcataaacggatacggtggacccgaggtaatggaggcctatcaaaaacaattccaaccttcctatttaggagataaaccaaaatcaatcgtcgctatttttgttatttgcggagaaacaaatgaagaggcggaaaaaattgcttcaagtttagatttatcaatcttattactagaacaaggaaagcgtacaactggtactccttctatcgaaactgctcaaaattattcatatagcacgtatgatttattccgtataaaagaaaatcgtcaacgtatgatagtaggcgacccgtcttctgtaaaagaaaaaatcataaacttaagcaaagcgtacaatactgaagaatttatgattgtcacaattactcatcgatttgaagataaattaaattcttatcgcttattggcaaatgcttttaattta

SEQ ID NO: 9667 - DNA, 1042 bp, Bacillus anthracis
gtaaaagatttacaagtctctctttgatacacatgcaggtgaagtacaagctgtccggggcgttacttttgatttgaaaaaagggaggaaccattagcgattgtaggagaattcggtttcggggaaatcagttacttctaaagcgttaatgggattaattccgaatcctcctggacgcattaaaaatggtgaaatcgtatttgaagggttgggccttaacgaaattaacagaaaaagaaatgcagcaagtacgtggtaaagatatcccgatgattttcccagaaccaatgacctcttttaaacccaccgaggaacaatggaaaatcaaatttatggaagggctgattaaaccccccggggataattaagcccattgcccccaaagtggcttttaaattaatccatccttggaggtattccaaatccagaagctcgcttaaagcaatatccgcaccaattctctggtggtatgagacagcgtgtagttattgcgatggcattagcttgtacaccgaaaattattgattgccgatgagccgacaaccgcgctagacgttacaattcaggcgcaaattttagagcttatgaaggacattcagcaaaaaacagaagcagcaatcattttcattacgcatgacttaggtgtagtggcaaacgttgcggaccgcgtagcagttatgtacgctggtaaagttgttgaaatcggaactgtagatgaaattttctacaatccgaaacatccgtatacttggggcttaatcgcatctatgccaagtttagatggttcagaggaagagttattcgcaatttcctggaacggctcccagatttattgaaagccgccaaaagggagatgcttttgcaccacgtaacccgcgcagggcactgaaaattgattttgaaattggacccacttttaattaaaagttaagtgattaccccctatgcgggaaacttggttacttcttgaacaagccccctaaaaaaaaacgccgggcattctttgaaaacacctttcttcaaatgaaagcaggtgaacaac

SEQ ID NO: 9668 - DNA, 1287 bp, Bacillus anthracis
atgttagcaaaacgtataccaattccagtggcggaagcagttgcacgagtaatgaaatatgcttatcaaggtgaaacagaagaggtttctcttatagaaagttacggaagaacgcttggagaagatgttattgcagatcatgatgtcccgcattttgatcgctctccgtacgacggatttgcgattcgagcggaagatacaaaagaagcaagtagcagtaagcccattcagtttgaagtgattggtgaaattggagcaggggttgtttttacagaagaagtgaaagcatttcaagctgtccgtattatgacaggagccgcaattccgagagggtgtaatgcggttgttatgttagaactaacggaaggatttgaaaaaagtgaaaagacttatatgacattaaaacgctgtttcgcagccggtgataacatttcttttaaaggtgaagatgtaaaacaaaatactatccttgtgaaagaagggactgttattaacccgggagttgcagcacttcttgctacgtttggttatagttccgtacacgttgtaaaacggccgattattggcattgtaacgacgggtagtgaactacttgaagtacatgaacaattaaaaccaggaaagattcgaaatagtaattcctatatgattgctgctcaaattgaacgagcgggcggagttgtacagtattatgggaaattcgctgacgattttgagacttgttttaacactgtaaaaaaagcaataaaagaagtcgatattttaattacaactggtggtgtttcgataggagactatgactatttacctgctatttatgagagattacaagcaaatgtacttttcaataaaattgcgatgcgaccaggaagtgtgacaactgtagctgagatagagggaaaactattatttggtctatctggtaatccttcagcttgttatgtcggatgtgagttatatgttcgaccagtcattggaacatatttgcataggaaagatccacatatttatcgtgcagaagcaattttacagaaagacttttcgaaagcaaatccgtttactcgttttgtaagagggagagtggaatttgcagatggtcaattacaagttacaccagttggtttagataaatctagcgcaatttcttcacttgcagaagcgaatgcatttattgttttgccagggggaacgagaggatttaaagctggaattactgtttcggtactgttactagaatcaaccagcggaagtgaatggccatggaaagaatcgcttcgttcatacaaa

SEQ ID NO: 9669 - DNA, 1359 bp, Bacillus anthracis
atgaaatcatctttaaagttttctgagatgtttgcaataaagttaatggtatttgcactatttttcggtgcaggtaatatgattttcccaccagcgttaggacaaggcgctttccacagatgtatggattgcgttatttggttttatcgtaacagggcgtggactacctttattaagagtaattgttatagcctttaaggggagatattaatgagctagcaggacgtgtacatcctatattcgcacttgtttttatcactgcaatttatttatgtttaggcgtatttgtaagtgtgccacgtacaggaactgttgcttatgtaatgagtgtcgcacccgtttttacccagtgagatagctggtcaatcgtattcacttgttatctttacattcattttctttgctgtcactttcttatttagctcaaatcccatggaaattagtgggtcgtattggtaaagtgctatctccaatatcattagctgtacttgcaattattgttaggtaaagcattttattacaccaatcggaaaatttggggcacgcacaaaagcgaatatggcccctcttttttaaggaatttattgatggatatttaactttagatggacttgcagcactggtattcggaaaatgttgtaattcatgcgttaaaagaaaaaaggcattacaaataaaaacagcattgcaaaagtaacaatctttgcaggatttattgcagcgcttggtctactacttgtgtatttagccacttgcttatcttggagcttctagtgtgtcacttggaatgggcgcaaacgggaggaattattttaacaaatgtcgtgaataaatttatttggtagctacggaactttattactagggatcgcaattacagcagcatgtttaacaacttctgtaggtattgttgcagcttgtggtgattacttctcttctttattaccaaagcttttttatcaaaaaagtgtttttcattttcctgcgtataaccatttatgctaacaaaccttgggttaactcagttaaatgcattaccattaccaatcttaatcgcaaatttattccaattgaaatcggaatttatcgtattatccacttgttggaaactacgttcggtctttccattaacccatgtatgtgggcgggattgtaggagcatttggcataagtttcttttgatgggttacacaatgcaaaaccttcaaaattgcagcgctaagcactaattttagatagaattcattatataatggtaggaaattgggtgggttatttccaggcataatcggtataggatttggttatatagtttctaagtttcaaaagcaagaagttgctgtagaaaaatagagaaaa

SEQ ID NO: 9670 - DNA, 657 bp, Bacillus anthracis
atgtcacgtatttcaaaggcagaaatgtctaagttattatcagtatattttattatgggaagtaacaattgtacgaaggatccactgcaagtattgagagaggcacttgaaggttttataacaatttttcaatttcgtgaaaagggagaaggtgctttaacgggagaagagcgtatttgtttcgcaaaagaattacaagcaatttgtaaggaatacggtgtaccattcatcgtaaatgatgatgtggaactagccctcgagttagatgcagatggcgtgcatgttggacaagatgatgaaggaattacttctgttcgtgaaaaaatgggtgataaaattgttggtgtatctacccatacaattgaagaagcacgctgggtaattgaaaacggagctgattatttaggagttggcccaatttttccgacgagtacgaaaaaggatacgaaagcggtgcaaggaacgaaaggtttagctcattttagagagcaaggaattacaataccgattgttgggattggtggcatttcaattgaaaatacagcttcggttatagaagcaggtgcggatggtgtttccgttatttctgcgattagtttagcggaatctgcctatgaaagtacgaagaaattagtagaggaagtaagtaggagtttg

SEQ ID NO: 9671 - DNA, 577 bp, Bacillus anthracis
atgactacatatacttccatcgcaaatgtaattaaagaaagacgttctgttcgtacatttacagataaagcagtagacaaagagttattaattgaactattaaacgacgcaacatgggcaccgaaatcataaacaccgtttcaccatggaagttgtagtatattacacattggagaaggccgtcagaaattagtagacgcagtattaaattctttcacagaagaagaaagagcaaaacgcggtaaaattttatcggatcgtttcttaagcacacctgcacaaattgttgtatatataaatgaagatccacgtcaatttacttgtagatgaggattacgctgcaacatgtgcatttatgcaaaacttccaacttcttgcttgggaacgtggattaggttgtgtttggaaatcaggcggattaaactacaatccactatttatagaaggactcggtttaactagaggtcaacgcatagttggaattcttcatcttggctattttgataaatcaccagaaggaaaagctcgtacgccaattacggagaagatggagattattgaaggttaatagatgaga

SEQ ID NO: 9672 - DNA, 729 bp, Bacillus anthracis
atggtaaaaggaagaattcattctgtagagtcttgtggtactgttgatggcccaggaattcgttatgtcatatttacacaagggtgtttattacgttgtcaatattgtcataatgctgatacgtgggagatcggtaaaggaaaagaaataacagtcgaagaagtaatgcaggatgtgacatgttaccttccttttattgaagcttccggaggcggtataacagttagtggtggggagccattattacagctagatttcttaattgaattatttaagaaatgtaaggaaattggaattcatacaacaattgattcttcgggtgggtgttattctgaagaaacagaattccaaaataagctagacattttaatggagtacacagatttagttttattggatttgaaacatattgattcaaagaaacatcgtaaattaacaggaaaaccaaatgaacatattttacaatttgctcgttatttatcggataaaaataaaccgatttgggtacgacatgtattagttcctggtgttactgataatgaagaggatctacaaaagttatctagctttattcaaagtctgtctaatgttcaaaaaattgaagtgttaccatatcataagcttggtgtatataaatgggaggcacttggacataagtatccacttgcgaatgtagaaccacctactgaaaaaaatgtagaacaagcaagacatattttacaagcagtc

SEQ ID NO: 9673 - DNA, 1098 bp, Bacillus anthracis
atgagcactgagttgttagatgccttgctcgtattagagtcagaaaaaggaattagcaaagatattattattgatgcgattgaagcagcgttattttttgcttattaaacgcaattttaacccaagcacaaaacgtttcgtgggagcttaaccccacaagtgggaaccaatccaggtttttagcacgtaaagacgtttgttgataatgtgtttgatccacgtctttgaattttctgttgaagaagcaagacaaattaatccaaactatcaagatggtgacgtactagaaattgaagtaacaccaaaagatttcggtcgtattgcagcacaaactgcaaaacaagttgtaacacaacgagtgcgtgaagctgagcgtggtgttatttactctgagtttagtgaccgtgaagaagatatcatggttggtatcgtacaacgtcaagatgctcgtttcatctatgtaagcttagggaaagtagaagctttattacctgtaagtgagcaaatgccaaacgaacaatacaaaccacatgatcgtattcgcgtattcattacgaaagtagaaaaaacaacaaaaggaccacaaatttacgtatcacgtacacatcctggtcttttaaaacgtttatttcgaaatgggagttccctgaatccattgatggaacgggttgaaaattcgttcttgtacacggtgaagcaggagatcggtctaaaatctctgtacatgcagagaacattgatgttgatccagtaggttcttgtgtagggaccgaaaggacaacgtgtacaacgcattgtagacgaactaaaaggtgaaaagattgacatcgttcgctggtcaaatgatccagtagaatatgttgccaatgctttaagcccatcacaagttgtgaaagtacttgtagatgaagaagaaaaaagcaacaactgttgttgttccagaccaccaactgtcattagctatcggtaaacgtggacaaaatgcacgtcttgcagctaaattaacagggtgggaaaaatgatattaagagtgagtctgatgcgaaacaacttggtattgtaacagaagaagatagcgtagtcgcattcggattcgat

SEQ ID NO: 9674 - DNA, 396 bp, Bacillus anthracis
atgagcaagcacccgatgacaccattgaaagcaatgggcggtgaacaatgcattgaaatattagtagacacatttatttcctatgtcagtaagcaccctgacctatctcctcatcttcccggatgattttacagaaaccgctaggaagcagaaactattttttaacacaatatttaggtggtcctaatttgtacactggaagaacacggtcatccctatgttaagagcacgcccatctcccgtttgagattacttcaaaaacgagcagaggcttggctatcatgcatggagcaagcaatggatgacacaggagtgcacggtcatataagagagttcgtttttgaacgtttagcattaactgctcagcatatggttaatactccaaatgaaacaggt

SEQ ID NO: 9675 - DNA, 2414 bp, Bacillus anthracis
gtgttacaaccgaagacgcgttggaaagaaaaagaatataatggcgagcgagtgagtgaattagcaagtaaattacaattatcaccactttgtcgtttcggttattccctcggtaaaggattaaattccgaaggataagatttttagattttttaaatacagaaaatcaagaatttcatgatccatttttattagaaggaatggatagaacggtagaacgtgtaaataaggcgattcaaaatgggagagcaaatatcaatatattggtgactacgatgcggacggactaagtagtacgactgtgttatatcttgccctgcagaaaattaggtgcagacgtagaattttatatcccaaaccgttttacagaaggttatggaccaaacgaagaagcatttcgttgggcgcataggggccaggatttcccataaattataccggtcgaaacctgtattgcacgccgtacatggaagggaaagtagcggagggaacctgggatgattctaattattcaggatccccagtgagcgcgcaccaggaatggcagaaagcactggcgattattcatccgaaattagatggcggggtgtatccgtttcactatttagcggggcggtggtgttgcgtttaaagttgcgcatgcactactgggccgtgtaccagaacatttattagaaattgcagtaattggtacagtagccgatttagtatcacttcgcggtgcaaatagattgctagtgaagcgcggtttaaaacatatgcgcatgacgaacaatattggactaaaggcgctatttagagtagctaatgtttcgccaagtgtaattccagaagagagtattggcttctcaatcgcacctccctattaatgcagctgggaccgttagaaaatgctaccctggctgtacatctttttattttcaggaggatccggaagaaaggaaaagagcttggctgaagaaatttgatgaattggaccaaactggaaaaaagatattgtaaaagcaaaatacagaaagaagcttatcgctgaggttgaaaaattttttccccgcctgaagaaaataaaggtatagttgctggcaaaagaagggctggaatccagggtgtaattggaattgtcgctttctaaattagttgaaacgttttaaacgtccaacgaattgtattatgcattgatcctgtaaaagaaactgcaaaaggttcagcgcgtagtattgcaggattcgatttgtttgcaaacttgtcagattgtagagagttattgccacacttcgggggacatccgatggcagcgggaatgacgctacatatgaatgatgtagatgaattacgccgccgtttaaatgagcaagcagaggaaattttaacggaagaagattttatcccaattacagctgtcgatgctttttgtaaagtggaggacgtaacacttgcagcaatcgaggatatgcaaaagttggcaccatttggtgttggaaatccaaagccacgtattgcggtgaaggatgcagagttagaaagtattcgtgcaatcggatcagacggttctcatttaaaaatggctcttcgtgatggacaggcaacactggatacaatcgggtttggatttggagcgtatgcgaaagaaatttctccagttgcaaaagtatctgtaatcggggaagcgtctattaatgaatggaataattttaagaagccgcaattaaatggggaaagatattgctgtagaggcatggcaaatatttgattggcgtagtatgcgtaacgtagaggcaaatgtagcagaacttccgaaagaaaaaataacgatggtgtatttttctaaagaggtattgcataaattttctttagaagactataaagagcatatgatgcatgcatcagaagtaaccgagttagatgagcaatacatcgtgttacttgatttaccaaaaggaacagatgaattacgagatctatgtaaagttgggttcccgtcgcgaatttatacgctattttatcaagagaataatcatttatttagtactgttccaacgagggatcactttaaatggtactattcattcttgagccaaaaatcaccattttctttaagacaatatggagaacaactatgtcaacataaaggttggtcaaaagatacagtaaatttcatgacacaggtgttttttgagttagaatttgttacaataaaagatggcgtcatttttatggcagacaaaaaacaaaagcgtgatttaattgaatcgaacacatatcgtgagaaaatgaaccacttacaattagaaaaagagttggtttatagcacatatcagcaactatatacatggtttgaaacgattcgtaatcataaagaagtagaacagctagggtaaaggatttgtatttacaaaccttttagatctgaggag

SEQ ID NO: 9676 - DNA, 828 bp, Bacillus anthracis
atgcctgaattaccagaggttgaaaacgtcagacggacacttgaaaatcttgtaacaggaaaaacaattgaagacgtcattgttacctatcccaaaatagtaaaacgcccagatgatgcagaaatctttaaagaaatgctaaaaggcgagacgattgaaaatataaagcgaagaggaaagtttttgcttttatatgtaacgaattatgttattgtttcacatttgcgtatggaaggtaagtttttactgcatcaagaggatgaaccaattgataagcatacgcacgtccgtttcttgtttacagatggaactgaattacattataaagatgtgagaaagttcggtacgatgcatctctttaaaaaaggtgaggaaatgaatcaaatgcctctagctgacttaggtccagagccatttgatgctgaattgacaccacagtatttacatgagagattgcaaaagacaaatcggaaaataaaagttgtattgttagaccagcgtcttttagtaggacttggaaatatatatgtagatgaagttttattccgttctcaaattcacccagaacgagaagcgtcttctttaacagcggaagaaattgagcggatttatgaggcgactgttacaacgttaggcgaagccgtgaaacgtggcggaagtacgattcgaacgtatatcaactcacaagggcaaattggctcattccaagaacttctaaatgtatatggaaaaaaaggagaaccgtgtgtgacttgcggtacgatattagaaaaaacagttgttggcggaagaggaacgcattactgcccgatttgtcagcctagaata

SEQ ID NO: 9677 - DNA, 726 bp, Bacillus anthracis
gtgagattagataaattattagcaaatatgggatatggtagtagaaaagaagtaaagaaattattgaaagacggcgttgtgaaaattgatggaatatcggtgaaagatgcaaaggttcatgtaaatgtagaagaacaagaagttatgattcacggtgaagttgtggaatataaagagtttgtttacttaatgatgcataaaccacaaggcgttatttcagcgacagaagatgataatcatgaaacggtaatagatttattagagttagaggatgcaatttttaatccgttcccagttggaagacttgatattgatacagaaggtttcttattaataacaaatgacgggaagttatcacatcaattgttatctccgaaaaagcatgtgccgaaaaaatattatgcacacgttgcaggagtagtaacagaagaggatgtaaaagagtttgctaaaggtgttattttagatgatggctatgaaacaaagccaggtgcacttacaatattaaaaagcgatgatatttctgaaatcgagcttgtcattacagaaggaaagttccatcaagtgaagcgtatgtttgaagcggtagggaaaaaagtagtctacttaaagagaacagagatgggaccgttagtgttagatgaagagctagaacttggacaataccgagagttaacagatgaagaagtagagatgttaaaaacatatcaagtagacaatgagaaa

SEQ ID NO: 9678 - DNA, 1933 bp, Bacillus anthracis
tttagtgacaaaaaaattgatgcgtcgctgtttctacaaatggaaaacttaatgtatgctcttctcaaagaagacgatgcctaccttgagtatggctataaagcatactacgacgaaattgaaaaaaaggttttccattagtcccttgtggggaagattggaaaataaaggggatccagtaatcggattaaaaaggcgaaagtgttttttaaaacccctttgttaataaacattacttgggcaaggactttaatttgttccttatgcaattgaattacaagaatcaccctttaaaaaagtttttaacacaatttatttgttctattagaagatttacgtggttgaggaaatcgttaaaaaacttacgccccgggcacaaagcatggtttttaaaagaaaaaaagaaatggatcgcaataactttagctccacaaatgaaatcaatcgcggtcggaactattcacggggaacggccaattttggccatggcatctttccattaacgagcgaaaaatatgaaatgtgtaataatggatatttcgaggcaattgaaagctattctgcatgaaacattccaagcttcgtaatacagaagatattatgtatatcgttgagaaaattcgctatcgtttagaggagcttctgaaaaggtgatatgcttaacaattatttcgggacatgctccgctctacttatctgttattgcagatgagaagcacagccgtcctgaaaaattaacaaatgatgatacgcaaatcgttgatgatgaaaataaaataaaaatgaatgaaagcttctcgacatggcatcgtgaaaataaaaacaatgaaaacgagaactttttacgctttgaattagaaagcggtacaaaaacaaatatgatgggtgacactgctcgcgaatcagaagatggtgaccaagcacttggttctgtacaaggtacttctcaaaaaagtacacaatctaactttgatggtgctgatacagaagaagcaagagcttcactctgcttctagtcaaaatgatggtgcatacggtaagtataacgttggtgcttctcatacatttaaagaagctcgcaaatcaactcctgacgagaaaaaggattaccaagccatcaaatcagtggttaataaagatgtaaaagaattaaagaaaattatcgaaaaaacgattgaaaataagacgaatgcaaatagtgataaatattacggaagacttcgtaagaaattccttcgtatttatactgaaaagcagccgcgcatgttttataaaaaaggacaagaatcgcaagagcttgacgttgcattccaactgttagtggactgttctggttctatgtataacaagatggaagaaacgaaaaagagtgtggttctattccatgaagctttaaaatctttaaaaatcccgcacgctattagcggattttgggaagatgcttctagtgcgaaacctgaagataaaccgaacgttatccatgaagttgtaacgtataaaaactcaacgttaccaaacgttggtcccgaaattatgcagcttcgtgaagaagaggataaccgcgatggatatattattcggatcgtttctgaaaagcttgcaaaaagaccagaaaagcataaattcttacttgtcttcacaggacggtgacctttctgctttagattatcaaacaagccggttttttagattccgcatgaagccgttaaactccgcgcgtaaaaagcggaaatggaagttaatccggtatcttcatcgaagaaggcgaaggcgaaagaagcaactttatcaattaattgaagaccttttattaccatccctttccttagttgcaaatcacccctgaagaattatacgtttgaagattaaaccactattgaaaaagttattactgaagacgattgaatagaaaaaacaggagcaacaacgctcc

SEQ ID NO: 9679 - DNA, 1361 bp, Bacillus anthracis
attattgatgtttatgctcgcgaagtccttgactctcgtggtaacccaactgtagaagtagaagtttacacagaaagcggcgctttcggacgcgctatcgtaccaagtggtgcatctactggtgagcacgaagcagtagaattacgtgacggtgacaaatctcgttaccttggtaaaggtgttatgaacgcagtaaacaacgttaatgaagcaatcgctccagaaatcgttggtttcgacgtaactgaccaagctggtatcgaccgtgctatgatcgaattagatggcactccaaacaaaggtaaactaggcgctaacgctatccttggtgtatctatggcagtagctcacgcagcagctgacttcgtaggtcttccattatatcgttacctttggtggattcaatgggcaaacattacccactccaatgatgaacatcatcaacggtggggtctcacgctgataacaacgttgatttccaagggagttcaagatttttgccaagggggtgctcccacatttcaaagaatcaattccgttatgggtgctgaagtattccatgcacttaaagctgtattacatgacaaaagtcttaacactgcagtaggtgacgaaagggggattcgctcccaaacctctggttctaaccgtagaagcattagaagtaatcatccgagctatcgaaaaaagctggttacaaagctggccgagaccgtattcttaggaaatggacgttgcttcctcctgagttctacaaccaaagaaactgggaaaatattgaccttgcaggtgaaaggccgtactgggcttaccttctgccagaatgggtggaattcttacaaagagcctttgcaaagactttcccaatcttctcctatccgaaaatgggtttagaacgaaaacgactgggaatgtccacaaattaattaactgaccgtatccggggataaagaacaattaagttggggacgatttattcgtacctaaccccccaaaacttgctggaaggatccaaaaaggggtattcctaacctcatccttaattaaagtaaccacaaccgggacttttaactgggaattttcgaaccttccgaaatgggctaaaacgtgcctggttacacagcagttgtatctcaccgttctggtgatactcgagatgctacaattgctgacatcgtaacacacaactaagcgctggccaaatcaaaactggttctatgagccgtactgaccgtattgctaagtacaaccaattattacgcatcgaagacgaactaggcgaaatcgctgtttacgatggtatcaaatctttttataacatcaatcgataattataaagagaaaaaaatcgactgaacttt

SEQ ID NO: 9680 - DNA, 3528 bp, Bacillus anthracis
atgataggtttattagagcaattttataaaaatgaagagatccaatcggtcattaatggactagaagatggtttaaaagagcaacttgtatcaggtatggcaacatcttctcgttcgtttttaatggcggccttatataaaaaaacaaaaaaatcacaacttattgtgacgcataatttatatcaagcacaaaaagtacatgaagatttagtggcgttacttggtgaaaaagatgtatggctatatccagtaaatgaattgatagcatcagaacttggtgttgcaagcccagaattgaaggcacaacgtattgaagtgttaaatcgcttagctgcaggagagcacgggattattgtagcaccagttgcaggactacgcagatttttaccaatgaaagagttgtggaagcaaaggcaaatcgaaatcagtctagggcaagagattgatttagatacatttttgcatactttacatcatattggctatgagcgtaagtctatggtagaagctcctggagaatttagtttgcgcgggggaatattagatatttatccactaactgaggagctaccatttcgtattgaatttttcgatacagaagttgattctattcggttatttgatgtggatgaacagcgctctcaagataaaaaagaaagtgttagattcggtccagcaacagagtttctattttcacaggaagaattgaaatcgggaataaagcatcttgaagaaggtctgactaagacgatgcaaaaactttccgatgataagttgaagactacagtgcttgagacggtaagtcatgaaattgagatgttaaaaaacgggcaaagtatagaacagatgtttaaatatttatctattttctataacgaacctgctagtctgatagattatttaccagaagatggtgttgtgattttagatgaaatttcacgtattcaagaaacagcatctcatcttgaatcagaagaggcggaatggtatatatcccttcttggtgagggaacaattattcaagatttatctttctctcattcgtttgaagaatttcttcatcataaaaaaagaagttttgtatatttaacgttattcttacgtcatatagcgcatacacatccgcaaaacattgtgaatgtgacatgtaaaacaatgcaagatttccatgggcagatgcagttgttgaaaactgaaattgatagatggaacgaagggcattttacgaccgttgtgctaggtacagatgatgagcgtgtgaaaaaactacaacatattttaagtgattatgatattgatgcagatattgtagagggcacagatatattattgcctggaaggttacaaattgctgtaggtgatttacatgcagggtttgaaatgccgatgcaaaagcttgttgtcattactgaaaaagagctttttcataagaaagttaaaaaatcacaacgtaagcaaaagttatcgaatgctgaacgcattaaaagttattcggaattaaaagttggggattatgtagttcatgtaaatcatggtataggtaaattcttaggtattgagacattagagattaacggtgttcataaagattatttgaatattaaatatcaaggtaatgataagttatacgttccaattgaacaaattgaccaagtgcaaaaatatgtaggatctgaaggtaaggatccgaaagtttataaattgggcggaaacgattggaaaaaggtcaaaacaaaagttgaaaaatctgtacaagacattgcggatgacctcattaaactctatgctgagcgcgaagcttcaaagggttatgcatatacaccagatacggcagaacaacaagaatttgagtcttctttcccgtatcaagagacagaggatcaattacgttctattgaagagattaaaaaggatatggaacgcggacgtccgatggataggcttctttgtggtgatgtaggatatggaaagacggaagtagctattcgtgcggcgtttaaagcaattatggatgaaaaacaagttgcaattttagtgccgacaacgatccttgcacaacaacactatgaaacaattcgagagcgttttcaagattatccaatcaatataggattattaagtagattccgtacgagaaagcagcaaaatgaaacaattaaaggtttaaaagatggcacggtagatattgtaatcggaacgcatcgtattttatctaaagatgttacttataaagatttaggtcttcttattattgatgaagaacaaagatttggcgtaacacataaagaaaaaattaaacaattaaaagcaaatgttgacgtattaacattaacggcaaccccgatcccgcgtacgcttcatatgtctatgcttggtgtacgtgatttatctgttattgagacgccgccggaaaatcgtttcccagttcaaacatatgtagttgagtataatccagcgttaatgcgagaggcgatagaacgcgagcttgcaagaggtgggcaagtttacttcctatataatcgtgtggaggatatcgaacgaaaagcagatgaaatttcgatgttagttccagatgcacgtgtcacttatgcacatgggaaaatgaacgaaagtgaattagagtctgttatgctatcgtttttagaagggcagcatgatgttcttgtaagtacaacgattattgagacaggtgtagatattccgaatgtaaatacattaattgtatttgatgcagatcgtatgggattatcgcagttgtatcagcttcgtgggcgtgttggacgttctaatcgtgttgcatatgcttactttgcatacaaacgagataaagtgttatcagaagttgcggagaagcgtctgcaagccattaaggagttcacagagcttgggtctggtttcaaaattgcgatgcgagatttatcaattcgtggtgcaggtaacttgttaggagctgaacaacatggatttattgattctgtcggatttgatttatattctcaaatgttaaaagacgcaattgaacagcgtagaggaacagacggagttgaaaatacagttaatgttgaaattgatttagaagtagatgcatatttaccagatgcttatatttcggatagtaaacaaaaaattatgatgtataaacaatttagaggtgtttctgcgattgaagatattgaagagttgcaggaagagatgatagatagatttggtgattacccgcaagaagttggttacttattacaaattgcaaatattaaagtattggcaatgaaagaacaaattgaattaattaagcaaaataaatttgaagtaacaattctgttctcagaacaagcgagtcaaaatattgatggtggaaaattattcatgctcggaaatagttttggacgtatgatcggtttaggaatggaaggatcacaattgaaaatcgtcatgaaaacaaatggcttagagacatcgaagtggttaacaattgctgaaaatttattaaaaggcttgccagatgtaaaaaaagaagtcataaatgcc

SEQ ID NO: 9681 - DNA, 480 bp, Bacillus anthracis
atggctgcacctataaaaatgattcaaaaacaagaattaactgaggaagaagtaaaacagcaaaaattagatgatgtaaaagagcttctagctaataatgaagacgctctaaatcaaatgtttaatatagtaggggaattgaatgatattggcatgctagaagcagcaaattctatgctaaaggcgaaagaaccaatcgcaaagattgttcttggccaagtgactcgtgagcctgttacaaatttaattaataatatgatgggggctgcgggtgctttaacagaacttgatccggagcttacgaaaaagcttataggtagcttattagtagggctagaaaaaggtaatgaacatttagagagtaataaaaaagtaggggtattcgatcttatgaaagtattgaaagacccagatattaaccgtgctatcgggtttgggcttcatttcttaaaaggtatgggaaaaggattaaaagaagaa

SEQ ID NO: 9682 - DNA, 287 bp, Bacillus anthracis
ttggcgtctgagacagtatcaaatcttctggaaaaggcactaccccttctacaacgggatgcggaaaaaaattttaaaacttattaaggtgcaaatggaccatcttacaatgccgcaatgtccattatatgaacaagtgttagacacacaaatgtttggagctatcccgcgaagtcgattttgcagttcgccttggtcttattgcagaataacaagggaaagtaatgttaggagagcttgaacgtgagttatctgcacttcatgaagcatttacaaacaaacaacaa

SEQ ID NO: 9683 - DNA, 1650 bp, Bacillus anthracis
atgtccgattcgaaatttctgcgcggaacgctcatcgttacgttagggacatttttagtgaagttcttaggcatgatttacgtctttccgtttcatgcattagtagggacagaaggcggaacgctctatacatatggatacattccatatacgatctttttaagtattgcaacggcaggggtgccgcttgctgtttcaaaattcgtttccaaatataatgcgcttggcgattataaaacgagccggagaatgttccgctcgggaatggttatgatgatagtaacaggagttctttcattcctagtactgtacatgacggcgccgttgtttgcagaagcaatgcttggtaaacaaagtgtacacagtaatataggagaagttacgacgattattcgtcttgtaagttttgcgcttattgttgtgccggcagcaagtttaattcgtggttatttccaaggtcaccaatcgatgggaccaactactgtttcgcaaattattgaacaaattattcgtatcgtctttttattagcgggtagttttatcgttattaaagtacttggcggtacagttgcaacagcagttggggtagcgacatttgctgcattcgtttcagcagttggagcgctcggtgtactcatttggtactggctaaaacgtaaaaaacatttggatcaatatttaattgaacaaactgtaccagaatcgacagtgagtactgttcaattatttaaagaattatttgcatatgcgattccttacgttgtaattgggctaacaattcctttatatcaacaaattgatacattgacatttaactcaattatgcaagcgattggccaaggtgatattgcagagcgagcgctcggtattttcacaatgtggacgcataaattaattatgattcctgtatcacttgcgacagcgtttagtttgacgctcgtaccagcgattacaaaatcatttactgaaaagcaataccgttatttaaagttacaaattacacaaacattccaggcaaatatgttcttaacattgccagcagttgtcggtatttcatcacttgcatatccgatttatactgcgttttacgattcagacccattaggtggacaagtattaatgtggtatgcaccggttgcgttgttatttgctttatttacggtaacagcggcaatcttgcaaggtattaaccaacaaaagcatgcgattatcgcacttataatgggtgttattttgaaatttgtatgtaacgtaatctttattcgttatttcggtacagtaggggcaattctagcaacagctgttggtttcttagcttctgtttggtacacaaatcaacaaattaaaaaatacgcacactattcattcggtgttgtatataagagaacattccaaattgcagtattaacacttgtaatggtcgttacggtgaaattatcacaatggattctgtccttcatgatttcgcctgatagccgaattggtgctcttattacagttgcgatttgtgcaggtcttggcggccttgtttacggattgttagcgattcgcacaggagtacttgaaagagtatttggcggagaagcgttagagaagatccaacgtaaacttggcaatagattcaaaataaagttgaaatcaaaaggggcg

SEQ ID NO: 9684 - DNA, 1899 bp, Bacillus anthracis
atgaatcgtatcttccgtaataccatcttttatttactgatattcctagtagtaattggaatcgtgagctattttaatggttcgacacaaaaaacgacatcagttagctacgataaattcattactaaactagaaaaaggtgaagtgcgtaatgtgcaacttcaaccgaaaaatggtgtgtttgaagtaaaaggacaatttaataactctagccagggagaacaatttgttacttatgcaccaaatactgaggaattacaaaagaaaattaatgataaagcgcaaggtgctgaagttaagtatcaaccagcagaagaaacaagtgcttgggtaaccttctttacttctatcatcccgtttgtcattatcttcattttattcttcttcttattaaaccaagctcaaggcggcggtagccgtgttatgaactttgggaaaagtaaggcgaagttatataatgacgaaaagaaaaaagttcgtttcagagatgttgctggagcggatgaagagaaacaagagcttgttgaggtagttgaattcttgaaagatcctcgcaagtttgctgaagttggtgcccgtattccgaagggtgttctattagtgggacctccaggtacaggtaaaactttactagcacgtgccgttgcaggtgaggcaggcgttccgttcttctctatcagtggttctgatttcgtagagatgttcgtcggtgtcggtgcatcacgtgtacgtgatttatttgaaaacgcaaagaaaaatgctccttgtatcattttcattgatgaaattgatgcggtagggcgtcaacgtggcgcaggtcttggtggtggccatgatgagcgtgagcaaacgttaaaccaattacttgttgaaatggatggattcggtgcaaacgaaggtattattatcatcgctgcgacaaaccgtcctgatattcttgacccagcattattacgtccaggtcgttttgaccgtcaaattacagtagatcgtccagatgtaaatggccgtgaagctgtactgaaagtacatgctcgtaataaaccgcttgatgagaatattaacttaagagcaattgcaactcgtacaccgggattctctggtgccgatcttgaaaacttattaaacgaagctgctttagtagctgcgcgtcaagataagaagaaaattgatatgagtgacattgatgaggcgacggatcgtgttattgcaggtccagctaagaaaagtcgtgttatctctgaaaaagaacgtaatatcgttgctttccatgaagcgggccacactgtaattggtgttgttcttgatgaagctgatgtcgttcataaagtaacaatcgtccctcgtggtcaagctggtggatatgcagtaatgcttccgaaagaagatcgttacttcatgacaaaaccagagttacttgataaaatcactggtttacttggtggtcgagtagctgaagaaattgtatttggtgaagtgagtacaggtgctcataatgacttccaacgtgcgactggtattgcaagacgtatggttacggaatttggtatgagtgataagcttggaccaatgcaatttggtagctcacaaggtggtcaagtgttcttaggaagagacttccattcagaacaaaactatagtgatgcgattgcacacgaaatcgatatggaaatgcaaacgattatgaaagaatgttatgctcgtgcaaaacaaattcttactgacaatcgtgataaactagatcttattgcgaaaacgttacttgaagtagaaacgttagatgcagagcaaatcaatcatttatgtgattatggcagattgccagaacgtccaacatcttcagctgatgtgaaagtaaacatcaacatgaagaaggacgatgaagaatcagaagataag

SEQ ID NO: 9685 - DNA, 5749 bp, Bacillus anthracis
tcaatcgacttccaaaatgagaaaaaagaaaaagtttttacattaccgaaaccgtatatgaacgattcaaatgtggatcaacaatcaggtgaggctgaaacgtcagatgcagttcgctacgatattgagaaagaagatgagggaaacatatacatttaactgttactgcagacccgcagtggttaccagcaccagagcgaaaatatccggtatatgtagaccccttcgattcagttgaaagattttgataatgcatatgcttctagtgcatatccaactggtaactaattcacgaagaaaagctttgggaatgcttggccaaaatgcttatacatttaaaagtcggatattatttcatggcgcatcatgggacaaactttgcatttattaaaccagacgtttcaaattttaaaggggcaaatattgaaagtgcaacattcaatgcacataccatttggcattattatacaaatcaaccaaatggtgtttggttagacgaagtgacgggtgcctggaatgaaggtagtttaaattggaataataagcctggttcaaataatattgcgcatgctgatgtaacaagagggcaatggggcgagatttaacgtaactaacacagtaaaagcatgggtggaaggcacaaagcaaaataatgggctttaagctacatgcaaacggaaatggtcaaaaccattgggaagaaatttattgcagccgaaaatggaacaaatgcaccctactttagaagtaaagtattctttacgcaaaaccgaataaaccaagagtacaaacttattcaaatgggagtggtagtagttcaggccacttcaatgtacaatgggatgcagttccaggagcgaacggctataaagtagcaatatttaatgggcatgaatatgaagaaatcgaagttgggaatgtaacaaattggacaacaaaagataaaaaaatattccccacgcccagaagagattgcacaaggcccgttatgtggtgcatgatgaccgaaaaaggtgcagaagcacccagccaatccagggtccaatttttaaaaatgcatttttatataaaaaccccccatgggaaattaataataatgcccgcgggaaattgggattcttatcatagcaacatacccaaactgttgagaatagtccgctttctgatgaagcaattgtctatattccattggaacaagtgaaaaagcccagatggctcagcgtatatcaatgcgacagatcaaacaactggttatgtaacattgaaatgggatgcagtaccagaagcagcagggtataaagtttggatttataacggaaaagattatgaagcgttcgatgtaggaaataaaacaaattggacaacgcaaaatgagaaaatttggccaacgaaagatgaaatgcaaaaaaggccaatattacttcattcatgacaaaaaaaggtgtagaattagcaggtgactcccatcacctgtgtataaaaattctggtggaatctatgcaggtgcgaaaaaatatgtggttccggtggtaacgggcatatagtaaagttggacaatgctggaaagtggaaatttccacatgagtttgtacctagatttctcccaagattctggatttataggaatgtttgatactggggcatcaaattctggtgttaaatgtaaaagtaaatgctacaaaatgtaacttttatcatgagtgagaaaagatattacgttatcagggcgcggcccggatgtatcagtagaaagaacgtataataagccaaagtaaaaaggtaggtttatttggtacgggttggtctagtggattagaggaaagagtttgggccgatggaaatggaaatttacttctaatttctactgacggtgcgaatattacctttactagaacaggagataataagtaccaagctcctttcactatatatgtgagtgattaagcaagtatctggccgatatgaaataaaagataaagatcaaactgttactttctataaatctggagatgcacaaggacgtattgagtatacaaaagataaatacggaaattacggcgggggaagagtataatgggccatcccgttttacaaaaattaaagaatgttcctgttaaagagtttgttcttactaatttgccggtaatataaaacaagcagcaagagtgatcgggccagaaatacaggacgattccctttaattaggatggagatttacgtgtttcttctacaacaccagagggaaaagtatataaatatggatatgataatgggggtactgacatctatttatgatccacaacatacagatgccaaaccatataaaacatcgtatgcatatgagaatgatagattagtaaaagtaacggacccattaggtaaagctacaacattagcatataatacaggttcgaaggaagtttacttaaacgacccttaaaggacgtaagactgtttatacgtataacgatgctgggatcccagtgaaaccagttgaagatgtgggacgtctgaatttaacgacatcgtatgaatataatgcgaataatttagtgaaaacaacaactcctaaaaaccaaacagaaacagcgacttatgacggtaatggggaatggttactatagatggtgatgaaattgggaactggataactttgagtataataaagataatgggattataaaagcgacagataacgaagatcgtaaaacaactgttgcttatgtaggagcaaatacagaagtatctcaaacagaccaaggagcaaatacatcttctgttattcaccatgatcaatacggtaatccgattgaaacaagtaaagaattaagcgccggagggaacttaattcaaaatcctagttttgaaatgaatggtacggaaaaatgggtgaaagtagatacgaataatagcggatctatctcaaaagatgcaacaccagcaccaggtggtctgggcggggaatcatcactcaaaattacaacaaaagcaacgaataatgactggggctatattgctgccatccaagaagtaacgttagaaccaaatacaacgtatacgttaagtggtatggtgaaaacggatttagtcaatggtgctgccttctttaatgtacagtcattaaatgaaaatggtgctgggataaaatggtgggttggcatgatactcgtcccataaaattcaagggaacgagtgattggggttaatcgtcaaggttacccttaaaaacaccgaagccaacaagaaaagttaaattcctttttccaagtaaaaatgggcggttctgcctacaaacgggttctgcatgttttgataaaatccaaattgaaaaaaggagaagtttcttcaaagttttagtgccagttctaaatagttcctcttgaagaaaactggctggatggatttgtaccacagtgggtaagaagttgttctcaacattgtgatcgtaccgatgtatcggatgatagtttcacaggccactcgtctattgtaatggagagaagtgaatatggcccaaatgatattggataccgtaatcgtgtcattttaaaccagaaaaaggcagaaacagtaacactttacatcgcaagtacagatctgaaaatgtagtcaatgtcgcaccagataaactttcctaaagattatgcagttttagctgaaacctactatcaagatggaactgtagtaaattattatacaagtttcccaagcgggacaaatgattggaaccgtagtgcagctgttattccagcaaagaaaccaatccaaaagattgaaatattccttctctttagaaagaataacaaaggaaaagtatggttcgatgatattaatttactagaaggaaacgctcttataagtgacgagtacgacaacgatggaaatgttgttgcgacgtatgatgaagaaggacagaagaatacattcacatatgatgcatcaggaaataaaaagagcgaaaacagatgaaaggggaaatacaaaactatatgattacaacaaaagataatctattaacaagaggttacatttaaaaaatggtacttctgtaaattatcgttatgatcataatggaaacacaacagagaaatctgtcatgtttggtgggaaaacacaaacacacaaatatgaatttggtgtggaataataaaaaatccagtgttatttcggatgcattaaccccgttggtattgaaaaccatgttcgatggaaattccaaccaggataaaaacaaaaatgccaaatgggttctatcttagagtctgtatatgatacagctgatcgcgttgttgggaaaaagcgcaacgggaaaagattcatttacattcgaacgtgatcaaaatggacaagttacgaaagtgaaagatcttgtcaacggtgtagaacgtacgaaaacatatgataaggctgaccgcgtcacaagcgcaacagatagccgaggcggaaaaattgactgggcatatcacgataaagcaaacagtaagacagaaaaattaaaagaacaaacggtaacgcaaggtggatatacaaataaagtatcgtatgactacaacacgttagatcaaaacatacgtgtgacagacggttcgcaaacgtatcgatttgattatgacgatcaaggaaatttttgtagggtatacagcgggtaaaggttcagggtttaccttccaactaagccagggtgaacaaaataaaggttttgtagtaggttcttcaaacaattttcttctgtcgcaacgatatgaatatgaccaatcgggtaaccgtacgaagattaaacatgaaggtgcgggcggaaaagtaacggaaacaaactttgtatatgacccgatcaaccaactattaaatgaggtattaccaaacggaacaactaaatcatacacatacgatggatttggaaaccgtacaagtgtgaaagttatagagaatggaaaagaaacaaagtctataacggccacatttcaatgaaggaaatcaacttgtcaaattcggaaatgaatcattaacgtatgatgtaaatggaaatcgtacattcctgatggaaagtacaaatatacatggaacgaagatgatcaaattgtagctatcacaaaacaaggtgagaacaatgcatttgcaacttacaagtatgatgaagataatcgtcgtattgaaaagaatgtgaatggtcaagtaacacgttatttctatgatggagatagcattaatccgttatatgagacagatggaaatggaactgtacttcgtcaatatgtatattctgcggatggcgcacgtttggcaatgaaagcacaaggtcaaacgttatactatcactataaccctcgtggtgatgtagttgcgatgacgaatcaggataaagaagttgtagcaacgtatgaatatgatgcatggggtaatgtattaacgagtgataggaaacggtatcgcagcagacaatccatttggatatgcgggatacatgtatgataaagagattggcatgtattatctgattgcgcgttattataatccagaacatggtgtgttcttatcggtggatcctgatccaggtgatgaagatgatccggttacgatgaacgggtacacgtatgcggataataatccggttatgatgacagatccagatggtaagtgggcatggttagtaccggttgtaattgcaggtgcaatggtagcagctaggtttgggtgcgaaatatgcaatcgcgctatggtgcgaaatatggtaaaaaagcggttaaatctg

SEQ ID NO: 9686 - DNA, 1506 bp, Bacillus anthracis
atgagcatcagagctgaagaaattagcgcactgataaagcaacaaatcgagaactatcagtctgaaatcgaagttagtgatgttggtacagttatccaagttggtgacggtatcgcgcgtgctcatggtcttgataacgttatggctggtgaacttgtagagttctctaacggcgttatggggctagcacaaaatttagaggaaaacaacgtaggtattatcattttaggaccttacacagaaatccgtgaaggcgatgaagttcgtcgtactggtcgcatcatgcaagtaccagtaggaaaagaattaattggtcgtgttgtaaacccattaggtcaaccagttgatggtttaggcccaatcaatacaacaaacactcgtccaatcgaaagtccagcaccgggtgtaatggatcgtaaatctgttcatgagccgcttcaaacaggtattaaagcgatcgacgctcttgtaccaattggccgtggtcaacgtgagttaatcatcggtgaccgtcaaacaggtaaaacagcagttgcacttgatacaatcattaaccaaaaagatgaagatatgatttgtatctacgtagcaatcggacaaaaagaatcaactgtacgtaacgtagtagaaacactacgtaagcatggtgcattagagtacacaatcgttgtaactgcatctgcttctcaaccagctccattattatacctagctccttatgctggtgtaacaatgggtgaagagttcatgtacaatggtaaacacgtattagtagtatatgatgacttatcaaaacaagcagcagcttaccgtgagctgtcattactattacgtcgtcctccaggtcgtgaagcttatccaggggatgtattctacttacattctcgcttattagagcgtgcagcaaaattaagtgatgcaaaaggcggcggttctttaacggcactacctttcatcgaaacacaagcaggggacgtatcagcttacatcccaacaaacgtaatctcgattacggatggacaaatcttcttacaatctgacctattcttctctggcgtacgtccagcgatcgatgcgggtacttctgtatctcgtgtaggtggatctgctcagattaaagcaatgagtaaagtatcaggtacacttcgtcttgaccttgcatcttaccgtgagttagaagcgttcgctcagttcggttctgacttagataaagcaactcaagcgaaactaaaccgtggtgctcgtactgttgaggtattaaaacaaggattacacaaaccgttacgtgtagagaaacaagttatcattctttacgctttaacacgtggattcctagatgatatcccagtagtagatatcactcgtttcgaagaagaattccatgcttggttagattctaatgcgactgacttattagaagaaatccgcacaactaagaaacttgcggatgacgacaaatttgcagcagcaattaacggatttaaaaaagtattcgtagcttctgaa

SEQ ID NO: 9687 - DNA, 988 bp, Bacillus anthracis
atgggacacgtatcccactatgaagatattcaattaattcctgcaaaatgtattggtaaatacccctctgaaatgtgataccacctgtcactctagggaaaccttaattttaaattccctgtcgtacctgcaaatatgcaaacgattattgatgaaagaattgcaacttatttagctgaaaataattacttctatatcatgcatcgtttccaaccagagaaacgaatctcattcattagagatatgcaatcacgtgggttaattgcttctattagcgttggtgtaaaagaagacgagtatgaattcgtgcaacaattagctgctgagcatcttacgcctgaatacatcacaattgatatcgcgcatggacattctaatgctgtaatcaacatgattcaacatattaaaaagcatttaccagaaagcttcgttatcgctggaaacgttggaactccagaagcggtaagagaattagaaaacgctggtgctgatgcaacaaaagttggtattggacctggtaaagtttgtattactaaaattaaaacaggatttggaactggcggttggcaactagctgcacttcgctggtgtgcaaaagctgcaagtaaaccaattatcgctgacggtggtattcgtacagataatgacgtagctaaatctattcgatttgaaaagactatgggttatgatcggttctctatttgctggtcatgaagagtctccaggggaaacaatcgaaaaagatggtaaactttataaagagtacttcggttcagcttctgaattccaaaaaggtgagaagaaaaacgttgaaggtaaaaaaatgttcgttgagcataaaggttctttagaagacactttaatcgaaatggaacaagatcttcaatcttctatctcttacgctggtggaacaaaattagactcaattcgtactgtagattatgtagtcgtaaaaaactctattttcaacggtgataaagtatattaa

SEQ ID NO: 9688 - DNA, 561 bp, Bacillus anthracis
atgaagaaaactttgaaaaaagaaggcatagagtggatacgaacaattttaattggtgtattattagctgtattttttcgaacgtttttcttttcaacgtacgttgtagaggggaaatcaatgatgccgacattgcaagatggcaatatgctcgttgtaaataaggtgagttatcatgtgggggacttgaatagatttgacgttgttgtgtttcatgcgaacaaaaaagaggattacgtaaaacgaattatcggtttacctggggatcatattgaatataagcatgataagctatatgtaaatggacaattcgtagatgaaccttatttagagacgtataagaaagagatagatggacgacaactaacaggtgattttaaactagaagagttaacgaaggaaaaatcggtgccacctggatatatttttgtagtgggtgataaccgtctcggaagctgggatagtagacactttgggtttgtaaaagctgatacagttgtcggtaaagttgatttacgatattggccaattcaagatgtgcaaacgaatttttcaaaaggt

SEQ ID NO: 9689 - DNA, 450 bp, Bacillus anthracis
atgtaccaagcttattatgaaagtgaattaggcttgctagaaattacagcgaacgataaaggaattacgtctgttatatttgttgatgagagacaagaagaacatacaaatgaaatgatagatcaatgtataaatgagctcgatgaatattttaaggggaatagaaaagagttcacagtcccgttgtctcctgagggaacagcatttcaaaaaaatgtatgggatgcgctctatacgattccttatggcgtaagtgcttcatatttagatattgcagagaaagtcggaaatacgaaagctgtacgagcaataggaggagcaaatagtcgcaatccgatttcaataatcgttccgtgtcatcgtgtaataggaaagagcgggaaacttgttgggtatgcgggcggtttatggaggaaagagtggttattaaaacacgaaggtattttgaaa

SEQ ID NO: 9690 - DNA, 600 bp, Bacillus anthracis
atgcatatggagccctatgcagggtattttccagcatctttaaagcaagggataaagcactttttaacggatactatcgggggacatttatggttcttatacatgattgtagggatatatttaattacacctctattaaaagtctttgtgaagaacgctaaaaaaagagagatagaatactttttaattttatggctatacgcgtctgttgtagtcaatttagttaaatattattatcctatcaactttaatattgaattattttacgttacaaattatgtagggtatttcctacttggttattacttatctaattttgatatttcgaaaaagtggagaaatatttcttacattggaggatttgtaggatttattagtacattctttattacgtatttctatacagtaaaagcaaatggacagttagagcagttttggtatggatattttgcgcccaggtgtcgtactgatggcgattggattgtttatatttttcaaatatgcattccaaaaatcggagcggggaatttcccattgttatcccgttttataaatcaagcaaagccttggaatctatattcttcacttcttcttattaaa

SEQ ID NO: 9691 - DNA, 763 bp, Bacillus anthracis
gaatggtattttgaatatgaaatacataaaaacccgccctggcttgcttggtgacgtttcttcgttaatcggtatgctcggcattaatattgtcacaattaatggtgtagataatgcacgacgtggattactccttatgtgtgataatcaagagcaaatctctagacttgaatcaattttaaatacgatggataatataacggtaacgaaatatcgtccgccaaagctaagagataagctagcggttagacatggtaggtacatacaacgagatgcagatgataagaagcctatttcgttttggggcgtgatgaattaggaattattgtgagcctttagggctgaaataatgaaaaaaggaagttcataaattaatcggtatccgagggatgccttcgtgtgagaaaaacagaatccatttgttgctgcaagtgttggcgcaaataaaagatgggttattggtatcatctactcttattggaaaaaactgttcgtagtcaattgattgaagacgagtatagcgacgacaatattttcatcttagatggaatcgtgtcaccaaagcgtgctaacgaaaggcattggcagcttgttcgtgaaattatgaggttgcctgcaacgaaagttgtggaacatcctgacgtatttgtgagtcagtcagaatacacattggatgattttgattatattatcgagttgcgtaacgattatgatggagaaaatccaatataatttagtagatgaaattgagcaagtaccgcaa

SEQ ID NO: 9692 - DNA, 1179 bp, Bacillus anthracis
atgagtaaaacagttattttaagtgctgcaagaacaccggtggggaaatttggaggatctttaaaagatgtaaaagcaacagaacttggaggaatcgcaattaaagcagcgcttgaaagagcgaatgtttcagctagtgatgttgaggaagttatattcggaacggttattcaaggtggacagggacaaattccatcacgccaagctgcaagggctgctggaatcccttgggaagtgcagacggaaactgtcaataaagtttgtgcatcagggcttcgtgcggtgactttagcggatcaaattattcgtactggcgatcaatcactaattgtagctggtggtatggagtcgatgagtaacagtccttacattttacgaggagcaagatggggatacagaatgggtaacaacgaagtcattgatttaaacgttgctgacggtttaacatgcgcattttcaggtatacacatgggtgtttatggcggagaagttgcgaaggaggatggaatttctcgcgaagcgcaagatgaatgggcatatcgtagccatcagcgtgcagtttcagcgcataaagaaggacgttttgaagaggaaatcgtgccagtaacgattccacaaagaaaaggcgatcctattgtcgttgcaaaggatgaggcgccgcgtgaagatacaacaattgaaaaactagcaaaattaaaacctgtatttgataagacagcgacggtgacagctggtaatgcaccagggctaaacgatggtggcgctgcacttgtattaatgagcgaagacagagcgaagcaagaaggaagaaagccgttagcgacaattttggcacatacagcaattgcagtggagtctaaagatttcccgaggacgccaggttatgcaattaacgcattgcttgaaaaaacaggaaagaaaattgaagacatcgatttatttgagattaatgaagcatttgcagcggtagcaattgcaagtacagaaatcgcaggaattgacccagaaaaattgaatgtaaatggcggcgcagtggcgatgggacatccgattggagcaagcggagcgcgcattatcgttacactaatccatgcacttaagcaacgcggcggtggaattggaattgcttcgatttgtagtggtggcggtcaaggcgatgcagtgatgattgaagttcac

SEQ ID NO: 9693 - DNA, 369 bp, Bacillus anthracis
gtggatgtgtttttgaatattgctgaagaaaaaattcgacaagcaatacggaatggtgatctcgataatattccgggaaaaggaaaaccactacaattagaagatctttcaatggtacctccagaacttagaatgagttataaaattttaaaaaatgcgggaatgatccccccagaaatggaactacaaaaagatatattaaaaatagaggatttaattgcttgctgttatgatgaagaagagagaaaaaaattacaacaagagttaacggcaaaaacactacgttttcagcaagtaatggaaaaaagaaagattaaagatagttcagcatttcgtatgtatcaagataaagtatttcataaactacgt

SEQ ID NO: 9694 - DNA, 1529 bp, Bacillus anthracis
atgagcaacatgcagcaaaaaacagacgttatcttaattggtgcaggaattatgagtgcaacgttaggctcattactaaaagaattagcacctgaatgggaaattaaagtttttgaaaaactcgcaagtgccggggaagaaagctctaacgaatggaataatgcaggtacagggcattctgcgctatgcgaactgaactatacttccgaaaaatctgacggatctatagatattagtaaggctgtaaaagtgaatgagcaattccagctgtcaagacaattttgggcatattttgtaaaaagcaaattaattcgtaatccacaagattttattatgcctctacctcatatgagtttagtacaaggtgaaaaaaatgttgagtttctaaaaaaccgttttgaagcgctttcaaaaaatccactgtttcaaggaatggaattttctgatgctcctgaaacattaaaaaaatggcttccactcattatggaaggtcgtacatctaatgaaccgatggctgcaacgaagattgactctggaacagatgttaacttcggtgcattaacacgtatgctgtttgattacttaaaaacgaaagatgtcgagctaaactacaaacatagtgtcgaaaacattaaacgtacgaagaatggtccatcgggaagtgaaagtacacgatatgaatattggtaaaatcgaacatcatactgcaaaattcgtctttatcggcggtggtggaggttgcctacctctcctacaaaagactggtattcccgaatcaaaacatattggtggattcccagtaagtggactatttatggtatgtaagaaccaaaaagttgtagagcaacatcatgcgaaagtatacggtaaagctaaagttggcgctccgccaatgtctgtacctcaccttgatacgagatatatagacaataaaaaagctttactattctgaccgttcgcagggttttctcctaagttcttaaaaactggctcaaaccttgacttaatcggttctgtaaaaccgaataacgtcttaacgatgttagctgctggtgtaaaagaaatgggattaacaaaatacttaattcagcaagttatgttatcacatgaaaaaacgtatggagagaattacgcgaattcatttccgaacgccaaaaagggaagattgggatattgtagtttgctgggcagcgtggtcaacgaatttaaaaatactgatgctgggcgggaaaagaacaacttcatttcggtacagaagttgttagtgcggctgatgggatcatcgcagcattactagggtgcttcaccgggtgcttctactgccgttcacgttatgcttgaagtattagaaaaatgtttcccaagtcgaatggtagaatgggaaggaaaaataaaaggaaatgattctttcttacggcatttcattaacagaatatccaggattattccaagacttccacacttctacaggtggtaccctgggattaaatgaaaaagaagcggtttcataattaatgaagaaataaaaa

SEQ ID NO: 9695 - DNA, 183 bp, Bacillus anthracis; identical to SEQ ID NO: 9126

SEQ ID NO: 9696 - DNA, 619 bp, Bacillus anthracis
catacagcttctgtttcaaaagatgagagaagagtgacagaatgggcatcatagttttgtaatttggtttactggttatccagcttcgggtaaatttaccagaagggaaccggtgttgtttttaaatcttttggaaaggaattatgggaaatttatttccttgatggagcatagtatacgccacggtttaaaataaagacttagggttctctgaaagtgatcgtatgggaaatataagacggatttggcgaaggggccgaagctatttgtagatcaaggaagcgttgttccttacagcgtttatttcaccgtttcgagtcgaccgaaaacaagttagggatctattacctgtagatgaatttatagaagtggtttgtaaaatgtccaattgaagaagtgtgagaaacgtgatccgaaaagggctttataaaaaagccagaaaaaggtgaatattaaagaggttacaggtaatcgatttccccgtatgagggaacccgagaaagcgggaattatttggtaaaaacccattaagtattctattgaagaatgtgcagaacaattcggtgaagtacttacaaagagccgtagtttgatatagggggataaaaaatgagttatg

SEQ ID NO: 9697 - DNA, 1156 bp, Bacillus anthracis
aaattaaaaataggtattacatgttatccttctgtaggtggttctggagttgttgacacagaattaggaaagcaattagcggaacgcgggcatgaaattcattttattccatgcgggtttaccctttccggtaaaataaagggtgtccccaacattttttttcatggaagggcggtaaaatccattctttgtatttcaatatcccccattacgattaggcgttagcgagtaaaatggcagaggttgtcacaaagagaaaacctagacattttacaatgtgcattacgcaataccacatgccattttgtgcttatttagcaaaacaaatgattcggagagcgtattaaaattgttacaaccttgcatggaacagatattactgtgttaggatccgacccattcgctaaataatttaattcggttttggtattgagcaatctgatgttgtgacggctgtctcccattcatttaattaacaaaacgcatgaccttgtaaaacccaattaaagacctttcaacgggtattacacttttatagaccaaaagtggtttaatttcaaaacgtggtattgaaccccaatataaagaaaagaatatggtataagtgagagtgaaaagatactcattcacatttcaaacttccgtaaagtgaaacgtgtgcaagatgttgtgcagccatttgctaaaattgttacagaagtagatgcgaagttgcttcttgttggagatggaccagaattttgcacgattttacagttagtgaaaaatttacatattgaagatcgcgtcttattcttagggaagcaagataatgttgcagaactacttgcgatgagtgatttaatgttgcttttatcagagaaggagagttttggtcttgttttattagaagcgatggcgtgtggtgtaccttgtatcggaacaagggttggaggtattccagaagtcattcaacatggtgatacaggatatttatgtgaagttggcgatacaacaggagtggcagatcaagccattcagctattaaaggatgtaagaacttcaccgtaatatgggagagcgagcaagagaaagtgtttacgagcagtttcgctctgaaaaaatcgtctcacaatatgaaacgattttactatgatgtactaagggatgacaaaaa

SEQ ID NO: 9698 - DNA, 570 bp, Bacillus anthracis
atgaaagcaattggtttacatgaatatttacctattgaagaagaaaacagtttaattgatatggaaattgaaagacctgttgctacaggaagagatatactcgttaaaattaacgctatttccgttaatccagttgatacaaaagttcgctctccgaaagataaaaaagaagaagtagcgaaaatacttggctgggatgcgagtggtgttgttgtacaaaccggcgaaagttgtacgttatttaaagaaggcgatgaagtgttttacgctggaagcattacgaaacaaggtacatatagtgaataccacctagttgatgaaagaattgttggtaaaaaaccaaaaacgttaagtaatgctgaatcagcagcacttccgttaacagctattacagcttgggaaggtttatttgaacgtttaggtattgattataataagaaagatacgaactcctttaaaaacattttaattataggcggtgctggtggtgtaggttcaattgccattcaacttgcgaaatgggctggactaaatgttatcacaactgcatcccgcaatgaaacgatacac

SEQ ID NO: 9699 - DNA, 566 bp, Bacillus anthracis
atgaaaattaaagagattatcgttgtagaaggtaaagatgatacagttgcgattaagcgtgctgttgatgcggatacaattgaaacgaacggttcagcaatcggtgatcatgttatggaccaagttaaataggcgctacaaaaagcgagcggtttatatttttcacagatccggatttatcctggagagcgtattcgaaaaattatttctagataaggtgcttgggatgaaaacatgcttttttgcggaagatagaagcacttgctaagaggcataaaggtgtcgggattgagcatgcttctaatgaatcaattcgcccgtgctttagagaatatacatgaagaaatggaagcttacacaagtgaaatcagttggagcgatctagtcgatgcaggtttagtggggcggagaaatggcaaaagagtcgcagagaaagaatgggggtagctattaaagattggttatacaaacgcaaaacagttacataaacgtttacaaatgtttcaagtctcaaaagaatcatttgcagaagcttataagcaagtcatacaggaggaaagaaaatg

SEQ ID NO: 9700 - DNA, 832 bp, Bacillus anthracis
atgaaagaaaaagagcgcttaattatagagatggctatgaagttatttgcgactaagggtgtaaatgcgacatcagtgcaggaaattgtgacagcttgtggcatatctaagggagccttttatttatactttaaatcgaaagaggaacttttattagcaacactccgatattactatgacaagattcaaaacaaaatgatggatattgaaaaagagtcgttattgccacgtgaaaaatttgcaaaacaactgcattgccagtttaacgatatacaaaagcataaagaattcattattatgcatgccagagaaaatgctattcccctttaataaagaagtagaagaattgagtgaagcggatgaagttagagtctcacgccttttatcgaaatagtttactgtctatttatggtgataaaggtatgccatatttattagaatttaatcatatgggagaaagcaatatgccgtggaatatttagaattaaataattttacaagcgcccaaaaatcgacttatccttacgtctcctgcgtttatttttgaaaagagtagacgatttagtagatggattggtaaaatcttcggaagaacctgtgttacatgaagaaaagcttggagaatttctttgtaaatcagagcttattaaggagcaggttaaggaacactttttaaaagaaattattgtgtttaaacgtacattagctgatcaattagaagatgaggaattgcttgttacgttagatgttttagaggcagaaatgaggttgccaaatccaagggattccggttatacaaggaatgctgtcctatttagaagtatatccaaat

SEQ ID NO: 9701 - DNA, 309 bp, Bacillus anthracis
atgcatgtaaaaaaaggtgataaagtacaggtaatcactggtaaagacaaaggaaaacaaggcgttatccttgtggctttcccaaagcaaaaccgtgttatcgttgagggtgtcaatatcgttaagaagcactctaagccatctcaattaaatccacaaggtggaattattactaaagaagcacctattcacgtttctaacgttatgattttagatccgaaaacaggtgaacctactcgtgtaggcttcaaagtagaagatggtaaaaaagttcgtattgcaaaaaaatctggtgaattattagataaa

SEQ ID NO: 9702 - DNA, 1188 bp, Bacillus anthracis
atgattcaaactaaggatatcatcgaacttacagacacatacggggcaaataactatcacccacttccaatcgttatttctaaagcagaaggcgtttgggtagaagatcctgaaggaaaccgctatatggacttattaagtgcatattcggcagtaaaccaaggtcatcgtcacccaaaaattattaacgctttaattgaccaagctaatcgtgttacgttaacttctcgtgctttccatagcgatcaattaggtccttggtacgaaaaagttgcgaaactaactaataaagaaatggtacttccaatgaatacaggtgcagaagctgttgaaactgcaattaaaacagctcgccgctgggcttatgatgtgaagaaagtagaagcaaatcgtgctgagattatcgtttgtgaagataacttccacggacgtacgatgggtgctgtttctatgtcttcaaacgaagagtacaagcgtggattcggtccaatgcttcctggcattatcgtaattccttacggtgatttagaagcgttaaaagctgctattacaccaaacacagctgcattcattttagagccaatccaaggtgaagcaggaattaacatcccaccagctggtttcttaaaagaagctcttgaagtatgtaaaaaagaaaacgttttattcgtagcagatgaaatccaaactggcttaggccgtactggtaaagtatttgcttgtgattgggacaatgtaactcctgacatgtacatacttggtaaagcacttggcggcggcgtattcccaatctcttgcgcagcagcaaaccgcgacattttaggcgtattcgagccaggttctcacggttctacattcggtggtaacccacttgcatgtgctgtttctatcgcagctcttgaagtgttagaagaagaaaaattaacagagcgttctcttcaattaggtgaaaaattagttgggcaattaaaagagattgataacccaatgatcactgaagttcgcggtaaaggtttattcatcggtatcgaattaaacgagccagctcgtccttactgtgaacaactaaaagcagctggtctattatgtaaagaaacacacgaaaatgtaattcgtatcgcaccaccactagtaatctctgaagaagatttagagtgggcgttccaaaaaattaaagcggtattatcg

SEQ ID NO: 9703 - DNA, 588 bp, Bacillus anthracis
atggtgaaaattggtgtactaggtcttcaaggtgcagttcgtgaacatgtaaaatcagttgaagcaagtggtgcagaagctgttgttgtaaagcgtatagaacaacttgaagagattgatggtcttattttaccaggcggtgaaagtacaactatgcgccgtcttattgataagtatgatttcatggaaccacttcgtacattcgcgaagtctggtaaaccaatgtttggtacatgtgcaggaatgattcttcttgctaaaacacttattggctatgacgaagcacatattggtgcgatggatattacagttgagcgcaatgcgtttggacgtcaaaaagatagctttgaagctgcactttctattaaaggtgtgggagaagattttgttggcgtatttattcgtgccccgtatgttgtagatgtagcggatgatgttgaggtactttctacacatggcgatcgaatggtagcggtaaagcaagggccgtttttagctgcttctttccatccagaattaacggatgatcatcgtgtaacagcatactttgtagaaatggtaaaagaagcgaaaatgaaaaaagttgta

SEQ ID NO: 9704 - DNA, 778 bp, Bacillus anthracis
atgttgtttgatacacattcacatttgaatgcagagcaatttgaagaagacttgcaagaagttattgcccgaatgaaagaagcgggggttacttatacagttgttgttggttttgatggagccacgaataaaaaaggccgattgaattagctcgagcctatgattttatttacgctgccgctggatggcatccagttgatgcgatcgacatgacagaaaagcatttaactttggtagaagaacatgcttctcatccctaaggcgttgcactttgaagaaatgggcttagattatcacctgggataagtcgccaaaagaaatacagaaagaagtattccgtaaacaaattacgttggcgaaaaaggtaaagttgccgattattatacataaccgcgatgcaacgcaagatattgttgatattctagaagaagagaatgcagctgaagtaggaggtattatgcattgctttagcggcagtgtagaagtagcagagcgatgtgttgatatgaactttttaatttcattaggtggaccagttacatttaaaaacgctaagaagccgaaagaagttgctacggagattccattagagaaattgttaatagagaccgattgtccgtatttaacaccacatccatttcgaggaaaacgaaatgaaccgagttatgtaaaactcgtagcagaagaaattgcgaacttaaaaggaatttcttatgaagaagtagcggaaataacaacaaaaaatgcaaaagctttatttggtgttgaataaaagagt

SEQ ID NO: 9705 - DNA, 507 bp, Bacillus anthracis
atgagcgtaaccgaacataaaaaacaagcgccaaaagaagtgcgctgcaagatcgtaacaatttccgatacacgtacagaagagacggataagagtggacaactattacatgaattgttaaaagaagcaggccatacagtgacctcttatgaaattgtgaaagatgataaagaaagtattcagcaagcagtgttagctggttatcatagggaagatgtcgatgttgtattaacaaatggcggaactggtattacgaagcgtgatgtcacaattgaagcagtatcagcgttattacataaagaaattgttggatttggtgagttgttccgcatgattagttatttagaagatatcggaagcagcgcaatgctaagtagagcgattggtggtacaattgggcgcaaagttgtcttctcgatgccaggatctagcggcgcagttcgtcttgcaatgaataaattgattttaccggaattaggtcatattacatttgagctgcatcgccaa

SEQ ID NO: 9706 - DNA, 2601 bp, Bacillus anthracis
atggtagtcaaagagaaagttgtaaatgaaatgcaggaagtaaaagagatgattgatacgttagtgaataacggtcggaaggctttacaagcattagaaagttttacacaagagcaaattgacaacattgttcatgaaatggcattagcaggtgttgatcaacatatgcctcttgcgaagttggctgttgaagaaacaggtcgtggtgtatacgaagataaatgcattaaaaatatttttgctactgaatatatttggcatagcataaagaaagataaaacagtagggattattcacgaagaccctcatgaagaaataatagaaattgcggagcccgtcggtgtagtagctggggtaacaccagtaacgaatccaacatcgacaacaatgtttaaagcattaatagcgataaaaacgagaaatccaattattttcgcatttcatccttcagcacaaaactgttctgttgcagccgcgaaaacagtatacgatgcagcggtgaaggcgggggcaccaaaacattgtattcagtggattgaaaagccttctgtcgaagcaacgaaacaattaatgaaccatgaaggtgttgcgcttgttttagcaactggaggggctggtatggtgaaatcagcttattctactggaaaaccagcgctaggtgtaggtcctggtaatgtaccatgttatatagagaaatcagcgcatataaaacgagcggttaatgatttgattttatcaaaaacgtttgataacgggatgatttgtgcatcagaacaagcaatcattgtagacaaggaaatttatgatgatgtgaaaacagaaatgattacaaatgattgttactttgtaacagaggaagagagaagaaaattagaaaagcttgttattaatgaaaatacatgtgcagtaaatagtgatattgtagggaaatctgcacagtatattgccgaattagttggaattactgtacctaaaaatacaaaaatgcttgtagctgaaatacaaggcatcggagccgcatatccactatctcgtgagaagttaagtccagtattagcttgtgtaaaagcaaattcattagaagaaggatttacatattgtgaagaaatgttaaacctcggtggcttagggcattcagcagttatccattctgtaaataaagaagtgcaaaagcaatttggattacgtatgaaagcttgccgccttattgtaaatgctccttcatcacaaggtggaatcggtgacatatataatggatttattccatcacttacgcttggctgcggttcctacgggaaaaactcggtttctcaaaacgtaacagcgacgcacttattaaatataaaaaggttggcaaatagaaaaaagaatatgcagtggttcaaattaccaccaaaaatttattttgaaaaacatgcgacagcatatttagcaaatatgcctaacatttcacgtgcgtttattgtaacggatccaggaatggttgagcatggatatgtagatacggtcgcgcattatttacgtaaacatgcaaatgatgtgaaagtagaagttttctttgaggttgagccagatccatcagatgaaactgtttttaaaggtgcggaaatgatgagaagttttcagcctgatgtcatcatcgcacttggtggtggttcagcgatggatgcagcgaaagggatgtggcttttctatgagtacccagaaacaacattctatggaattaaacagaagtttttagatataagaaaacgtacatgtaaatatccggaattaggaagtaaggcgcagtttgttgccattccaacaacatctggaacaggatcagaagtgacaccatttgcggttattacagataagaaaaataatataaagtatccacttgccgattatgaattaacgccagatgtagcaattgttgatccgcaatttgtaatgacagtaccaccacatgtaacagcagatactgggatggacgtattaacgcatgcaatcgaggcatatgtgtctgttttagcaaatgattatacagatggattagcattaaaggccattgatctcgtatttaaatatttaccaagagcatttaaagatggacatgatgaagaagcacgagaaaaaatgcataatgcttctgcaattgcagggatggcatttgcaaatgcattcctaggtattaatcacagtttagcgcataaaattggaccagaattccatattccgcatggacgtgcgaatgcaattcttatgccgcacgtaattcgttataatgctattaagccaagaaaacatgcattgttcccaaaatatgagcactttgtggctgatgaacgctatgcacatattgcgagaatgctcgggctaccagcaagttcggtggcagaaggtgtagaatcactcgacaaagcaattattgatctcggaaaaagtttaaatataaatatgagtattgcgggacaaggagttgctaaagaccaatttgaagaggttgttggattattagcagaaagagcttttgaagatcaatgtacaacagctaatccgaaattacctctcatttcagagctgaaagaaatttatatgaaagcatataaaggtgag

SEQ ID NO: 9707 - DNA, 285 bp, Bacillus anthracis
gtgaccaaaatggaagaaaatcaaattacaattgtagacgaaaaaggtaacgaacatttatgtgaaattattttcacttttgacgctgaaaaatttggcaaaaaatcatacgtagtcttctctccaatcggtgaagtagacgaagatggagaccaaatttatgatgcaatggcctatgagcaaaatgaagaagagggcggaactttacttccaatcgaatctgaagaagagtgggaaatggtacaagaaatgttcaacactctagctgatgagcaagaagctgaa

SEQ ID NO: 9708 - DNA, 2676 bp, Bacillus anthracis
atgacgcaatatacccctatgatacagcaatatttaaaagttaaggcagactatcaagatgcctttttatttttccgcttaggtgatttttatgaaatgttctttgaggatgctgttaaagcagcccacgaacttgaaattacattaacgagccgagacggtggtagtagtgaacgtataccgatgtgcggtgtaccgtatcatgcggctaaaaactatattgaacaacttgttgaaaaaggatataaagtagcggtttgtgagcaagtagaagatccaaaaacagctaaaggtgtagtgcgccgtgaagtcgtacaattaattacgccaggaacgatgatggaagggcgtacgattgatgagaaagaaaataacttcttagccgcattaacacattttgaagatgggtcatatgcgttagcttgtaacgatttaacgactggacaaaatacagtaacgttattgactggttcagtagaagatattttattagaagtgtatgcaactggttcgaaagaaattgttgtagattcttccttttcaaaagatgaattaaacaagttaacggaaacgttaaagatgacgatttcatatgaagatgcaacggcaatcccagaagggttagaacatcttgtgaaaaacgtttcacaagcaaagctaattaaagcagttgggcgcttatttaactatgtaataagaacgcaaaaacgttcattagatcatttacagcctgtggaaatttattatacgaatcaatttatgaaaattgatgtgcattcaaagcgaaatttagagctaacagaaacacttcgaacgaaagaaaaaacaggatctttactatggctattagataagacgaaaacggctatgggtggtcgtatgttaaaacagtggatggaacgtccacttatacagaaagaacgaattgaagagcgtttagaaatggttgaaacgtttgtaaatgattacttcctacgtgaagatttaaaagaaaagttaaaagaagtatatgatttggaacgtttagcagggaaagttgcatttggtaatgtcaatgcaagggacttattacagttaagacgatctttactgcaagtaccagctattttagaagcgattagtttgttagataatgcgtatgcagcgagattaattcaaggtgcagatccgtgtgagagtctaacagaattactaggaagaagtattcaagaaaatccaccgctttcgattaaagatggagatattattaaagatggttataatgacaagcttgatcaatatcgctatgtgagtaaaaacggaaaaacgtggatcgctgagcttgaaaaacgagagcgtgatattacaggaattaaatcgttgaaaattggatacaaccgtattttcggttactacattgaagtaacgaaagcgaaccttggagcattaccagaaggacgctatgagcgtaaacaaacgcttgctaatgcggaacgtttcattacagatgaactaaaagaaaaagaaacattaatcttagaagcagaagaaaaaattgtacaactagaatacgatttatttacagcgcttcgtgaagaagtaaaagtattcattccgaaattacagcatttagcgaaagtaattagtgaattagacgtactgcaaagttttgcgacagttagtgaagaagaacagtttgtaaaacctgtactaacaacgaagcgcgaaatctttattaaagatggtcgtcatcctgtcgttgaaaaagtattgaacgggaaattgtatgtaccaaatgattgtattatgccagagaatatggatgtctttttaattacaggaccgaacatgtctggtaaaagtacgtatatgagacaattagcacttgtaacagttatgtcgcaaatcggttgtttcgtaccagcaacagaagcagtattacctgtatttgaccaaatctttacgagaattggtgcagcggatgatttaatttcaggtcaaagtacatttatggttgaaatgttagaagcaaaaaacgcaattgcaaacgcatcagaaagaagtttaattttattcgatgaaattggacgcggtacatctacgtatgatggtatggcacttgcacaagcaatcattgaacatattcatgaccaaattggtgcgaaaacgttattctctacgcattatcatgaattgactgtgctagaagacagtttagatcaactgaaaaatgtacacgtttcagctattgaagagaacggaaaagtagtattccttcataaaattcaagacggggcagcagataaaagttacggaattcacgttgcgcaacttgcggagcttccagatagcttaatcgctcgagcgaaagaagtgttagcgcaattagaaggacaggaagaaattgttattccaaagcgtgtagaagtgaaagcgcaagagcaagaagtaattccagaacctatagttgtaaaagaggaaccgatagaaatagaagaaacgaaggtagacaatgaagaagaatcacaactatcattctttggcgcagagcagtcttcgaaaaaacaagacaagccagctctagatgcaaaagaaacggcagtgctgacgcaaattaaaaaaattgatttacttgatatgacacctttagaagcgatgaacgaactgtatcgcttacaaaaaaagttaaagaaagga

SEQ ID NO: 9709 - DNA, 261 bp, Bacillus anthracis
gtgagcgaacgtaaccaacgcaaagtttatactggtcgtgtagtgtctgacaaaatggacaaaacgattacagttttagttgaaacttacaaaactcattccttgtacggaaaacgtgttaagtattctaagaagtacaaagcccatgatgagcaaaaccaagcgaaacttggcgatatcgttaaaatcatggaaactcgcccgctttctgctactaagcgtttccgtttagttgaaatcgttgaagaagcggttattatc

SEQ ID NO: 9710 - DNA, 1287 bp, Bacillus anthracis
ttgtttaaaaatggtcgttatatgaatgaagaaggaaaaatcgtagcaacggatcttctagtacaagacggtaaaatcgctaaagtagcagaaaatattacggcagaatatgctgaagtgatcgatgtgaacggaaaagtaatcgcacctggattagtagatgtacacgtacaccttcgtgaaccaggtggtgaacataaagaaacaatttgaacaggtacattagcagcggcaaagggtggaattcctttcaatttggccaatggcaaataccaagccccatttcccgatttgcagagacctattggaagactgccaaattcgtattaaagaaaaagccccatttttactgtattcccttatgggagcaattacagtacgctcaggccggttctgaaatgacgaatttccaaaacctttaaagaacttggaaccatttgctttcactgatgacggtgtaggcgtacaagatgctagcatgatgttagctgctatgaagcgtgcagcgaaattaaatatggcagtaattgcgcactgtgaagagaaaactcttattaataaaagttgtgtacatgaaaggaagttttcttgagaaaccggattaaaacgggatcccctcaacatgggaatctgtacatatttgccaagggatatactgcttgctgaagcagcagattgtcactatcacgtatgtcacgtaagtacgaaaggctctgtacgcgtaattcgtgatgcaaagcgcgctggaattaaagtaacagcagaggtaacgcctcatcacttagtgttatgtgaagatgatatcccatcagctgatcctaattttaaaatgaacccaccgcttcgtggaaaagaagaccacgaagcattaattgaaggtttattagatggaacaatcgatatgatcgcaactgaccatgcaccgcatacagcagaagagaaagcgcaaggaattgaaagagcaccattcggggattactggggttttgaactgcattcccactttctatacacaaaccttgttgaaaaagggatttattccactagagcagttaattcaattcttaacagaaaaagcagctgatacattcggcttagaagcacgtcgccctgaaagaaggtagaacagctgatattacaatcattgatttagcccaaagaggaagggattgcccccaacaccattgttatcaaaaggaaaaaattcccccattcccaggttggaaatgccaaggatggccggtaatgacaatcgttggtggtaagatcgcatggcaaaaggagagt

SEQ ID NO: 9711 - DNA, 789 bp, Bacillus anthracis
gtgaaacagagaattattactggagtggttgctgccgcgctattcattcccatcgtaatttacggtggcgtgccttttacggttttagtgtatgcacttgcttctataggtttatatgaattaattcgtatgaataagcttacgcttatttcagtaccaacagttttagctgcattattattatggattattttaattccaagtagtgcatcggaactgtttacttggattggattaggtaaattagaaatcacatttgtgattgttttattacttttatcatatacagtcctttctaagaatacatttacttttgacaatgcttcatttttactaatggcaacaacatatgttgcaatgggattcttatatctgaatgaaacgaggatattaggaattaaatacgtattttgtgcattatttgttatatgggctactgattcaggcgcatatttcgtaggaaaagcattaggaaaaagaaaattatggccagaaattagtccaaacaaaacgattgaaggttcattaggtggtatcgtttgtggaattattgtggcacttgtttacaacatgttcttcccagttgaatcgaatgtattgattttaattgcgctgacaattatcatttctatttttggacaaattggcgatttagtacaatctgcttttaagcgtcattatggcgtaaaagattcaggtacaattttacctgggcatggtggtatattagatcgaacagatagttggttattcgttttaccaattctctacttcttattacaatataat

SEQ ID NO: 9712 - DNA, 1113 bp, Bacillus anthracis
atgctttttcctgatttagcgaataaaattgtacgagaagtacgcagactaattaaagaaaatattattatcattaatatacaaggcgttattatcgcaagtacagatatagaaagaatcggtcaatttcatgaaggcgcactccgctgtgcgaaacaaaagaaaactgtcattattacaaaagaagatgaacgacgtttgcatggcgtaaaggcgggtatgaatctccctttactattccatgacgaagtaattggtgtcattggaattacaggtgaacctgaaaacatttcccaatacggagaaatattacgtaaaatgaccgaactactcattcacgaaaactactttttagaacagctagaacttgaacaccgttcttatgaagcatttgtctttgattggctccaaaatacagactggtctccaagctttctcgatcgtgccaaaacacttggtattgatttatataagaagaaacaacttattttgttctctatcgatcaaaatgacacgatgcttcagcgtaagatttggcaacacgtacgcaatctattaacaaaggagcatctatttgttcgctggggaaatgatcgattcattttatttacagcgatgagctctaaagagcaaacatatcaatttttaaaacgattaaaacaagactgtgaaactttattttctattcctttatatatcgggattggacaatccgttacgccaagcaatatgaatttatcgtacgaacaagcattacaagctctttccgtatcacttgcaacgaaaaagattgtatttaatgacgatttacgtttagaaatgtgcttacaagatatttctgcggaaacgagagaacagtttctaaagcgcaccatcaaaaacttactatcatcgcctgagcttatgcacactttacgtttatttatcgattataaccaatcctataaacaaacagcggagcaattacatatacacattaacacattgcattacagacttaaaaagattgaggagtatacaggacttgatccgaaacaattcaaagacttaaacattttatacttctcgctcctcttattagataatcacacaaaaaagaatgataaaatagat

SEQ ID NO: 9713 - DNA, 1203 bp, Bacillus anthracis
atgggagcgacaggagtagcgtcacaaagaaaaacaattgaagagagtatcgaaagaaataaggaaaagtacatagaaacaagtcatgatattcatgcgaatccggagattggtaatcaagaattttacgcatctagaacgttaagtttattactaggtagtgcaggatttcagttgcagcacaatatagctggacacgaaacaggatttatcgcgcgaaaaagttcaggaaaacaaggaccagcaatcgcatttttagctgagtatgacgctttaccaggactcggtcatgcgtgtggtcacaatttaatcggcacaattagcgttgcagcagcgattgcattatcagaaacactcgaagaaattggtggagaagttgtcgtattcggaacaccagcagaagaaggcgggccaaatggtagcgcaaaatcgagttatgtaaaagcaggtttatttaaaaatattgatgcggcgcttatgattcatccgagcggaaaaacagcgacaacgagcccttcactagcagtcgatccacttgattttcatttttacggaaaaacagctcacgcggcagcgtcacctgaagaaggaattaatgcattagatgcggtgattcagctgtacaacagcattaacgcacttcgccaacaacttccgtcagacgtgaaaattcatggcgttattacagaaggcggaaaagcacctaacattattcctgactacgccgcagcaagattcttcatccgtgcagcaacgcgaaaaagatgtgcagaagtaacagaaaaagtaaaaaatattgcacagggagcagcgttagcaacagacacaaaagtaaaaatccatcaattccaaaatgaaatcgatgaactgctcgtaacaaaaacatataacgacgtcgtagctgaagaactagaattactcggggaagacgtaaatcgtaaagaaagatttggtattggttcaaccgatgcaggaaacgttagccaagttgtaccgacaatccacccgtacattaaaatcggcccagatgatttaattgcacatacgaatgaatttagagaagcagcacgttcagaattaggagacaaagctctaattacatcagcaaaagcactagcaaataccgcgtatcgattaattacagaagaagggttgttagagaaggtgaaggaagagtttagagaggcgcagagaaatcagggg

SEQ ID NO: 9714 - DNA, 398 bp, Bacillus anthracis
atgaaacgtaggacggctagagaaagagcgatgcaagcattataccaaatggatattacaggtgagttagaaccgaaagtagcggtggaaaacacgctagatgaaggtgaagaaacaaatgagtttctagaatcacttgtagtaggttttgtagaaaataaagaagtaattgatgaagcgattcgtcaaaacttaaaaaaatggaagcttgagcgtattagtattgttgatcgcagtattttacgtgtagctgtgtatgaaatgaaatacatggaaggaattcccccacaacgtaacaattaaggaggcaaatggaaatgcgtaaaacatttggggatgaggaatctcgtcgttttattaacggcgttttatctaatataaaagatacactgtaattt

SEQ ID NO: 9715 - DNA, 864 bp, Bacillus anthracis
tatgaagccctgaaatgggcttcctcttttttacaggagaatgggcgagatgaaaatgcgggagaaattgtcctttgtcatgtattaaagacgaatagaacaggattattgatgaacatgcgtgaagaaataactgcggaacaagaaacaagttttacagagtttatccacaagcatgtagaagggtattcccgattcaatatatgattggtcatgaaatgttttatggaagatcgttctttgtgaatgaaagaagatttaataccaagaccggaaaaccgaaaagcttatagtgggagtggtaaaaaaaaatcaagcgccattttggtgatgaaaaactacatgtagcggatatcggtacgggtagcggggcgatttcgattacgcttgctttagaaaataaaaatcttcatgtatatacggtagatattgcacaggagtcaattgaagttgcaaaagaaaatgcgaaaactttgggcgcagaagtaacgttctatcatgggtgatttattatcaccattttatgaaacgggtcaaaagttagatggtggtgtttcaaatcctccatatataccggaagaagattggcgtggtctttctcctgtggtgaaagagcatgagccaaagagagcgcttgttggtggtgaagacagattatatttctatcgccgctttatggaagaattgccgaatgtgctgcagaagaaagcaattgtagcatttgaaataggagtagggcaaggtgaggacgtgaaagggctgttacaacaagcttttccacatgctcatggtgaggttgtttttgatattaatggaaaagatcgtatggtatttgccgaaatagaggaaggattacaccttact

SEQ ID NO: 9716 - DNA, 1273 bp, Bacillus anthracis
atgaatgaagtgttagcaaagggaaagaaggcgaaagaaatcgctagagagctagtgcttaaatctacagagcaaaaaaacgaagcactttccgcaatagctgatcagttaatattagaaacagcttatattttagaagaaaataagaaggatattgaagaaggtaaggcaaaagggttttctgattctctccttgatcgccttatgctgaatgaacagcgtattgttgatatgacagaagggattaagcagctaattgaattacgtgatcctgtaggagaatgtgtaagtgcatggggaaaggccaaatggactatctattcaggaaatgcgcgtaccacttggtgttgttgggatgatttacgaggcaagaccgaatgtaacagtggatgctgctacaatttgtttgaagacaggaaacgcagtcatattacgtggtagttcttctgctattcattctaataaagccatcgttgccgttattcacagagcgctcaaacaaacaagcttacctcaagaaaagtgtacagcttatagaagatacaacgcgagatagcgcaaagcagttgtttacaatgaatgattatctagacgttcttattccaagaggtggcaagcaattaatcgatactgttgtgagggaagcgtctgtcccagtacttgaaacaggtgcgggaaattgtcatgttttcattgatgaaacagcggataaacaaatggcatttgatattataaatgcaaaaacgcagcgtccatctgtatgtaatgcaattgaaacgattgtacttcatgagaagtgggcagagcaatatggtagcgagttgttttcttctttgaagaaaagaggcgtggagctacgtggtgatcaaaaagcattggcaatggattcaacaattgtacttgcttcagaagaagactgggggacagaatttttatctctcacgccagcagttaaattagtttcttctatagaagaagcgattcatcacataaatacgtatggatctatgcattcctgaagcgattatttcagaaaacgaggaaaaagtcagcaaatttttcgtatcctgtgatgcgggtgcactgtatcataatgcatcaactcggtttactgatggatctgaattccggatctgggagcagaaatttggtatcagttacacaaaagctacacgtaagaggaaccatgggggttccctgcattaactttctacaaaatacgtcattccgtggaaatgggacaatttcgaaaataaaaataaaaaacactcca

SEQ ID NO: 9717 - DNA, 771 bp, Bacillus anthracis
atgtttaaaaactttcctttttttaaaggtaaaaaggacacatcgtttgatcatctcgttgaagaagtaaaaaaaggatatatcccagaacatattgcgatcattatggatggtaatggaagatgggcgaagaggagagcaatgcctcgtattgcgggacatcatgaaggtatgcaagttgtaaagaaaattacaaaatttgcaagtaaacttaatgtgaaagtgttaactctctatgctttttcgactgagaactggaaaagaccgaaaaaggaagttgattatttaatgcagcttccagaagaatttttaggtacatttttaccagaattgattgaagaaaacgtacaagtccgagtaatagggcaacaagatcgtcttcctacgcatacacgcagagcgatggagaaggccatggaagaaacgaaagagaatacgggattaattcttaatttcgcgttaaactatggaagtcgagatgaaatcgtttctgctgtgcaacatatgatgaaagatagtgaggaaggaaaagttcgtgttgaagatgtaagtgaagaaatgctttcttcctacttaatgacgagttctttacctgacccagagttgttaatccgtacgagcggagagctacgtattagtaatttcatgttatggcaaattgcatattcggaattttggtttacagatgtgtattggccagattttaccgaggaacatttgctaaatgcgattacagactttcaacatagagggcgcagattcggaggcgtg

SEQ ID NO: 9718 - DNA, 576 bp, Bacillus anthracis
gtgagagaagagaagctacgtttacgtaaacaaataatagagcacatgaattctttatcaaaagaacggtatacaactttatcagagcaaatagtattttcgttgtatgagcaaaaagagtgggctgaagctaaaacaattggaatcactctctcgatggaaaatgaagtgaatacatatcctattatcgaaaaagcttggaaagaaggaaagagagttgttgttccgaagtgtaataaagaaacaagaacgatgtcctttaggcaaattagtaattttgatcaattagaaacagtgtatatgaatttacgtgagccaattccagcacttacggaagaagtgaatgcagatgaaattgaccttcaaatcgtaccaggcgtagcttatacagagcgaggagaacggattggatatggcggtggctattatgatcgttatctcgtgcattataaagggaaaacgctatcattagcttatagttttcaaatggtagaacatattccagtagagccgtttgataaaaatgtagaaaaaattattacagaaaaaggaacaatggttaaaaatgggcttgta

SEQ ID NO: 9719 - DNA, 1329 bp, Bacillus anthracis
aatttgtcaattgcagcattagaaaacatgaaattaaaagagttatacgagcttgcgaaagaatttaggatttcgttttatagccaatttacggaaaaaagaggtaattctccgccattttaaaagctcgagcagaaaaagaaggtttcttcttcatggaaggcgtattagaaattattcaatcaggaaggattgggttttcctacgtccttatcaacttctctccaagcttcagaaggatatttatatttcagttcggaaatttcgtcgtttggatttaggtaagggagataaagttttctggtaaagtacgacctccgaaagaaaatgaacgctactttggattattacaagttgaagctgtaaacgggggggttccgggtctcgccaaagggcgtgtggcattttcctgccataacccccattatccccagatcgccaaatgaaattggaaacggaaccgaaaaagttaccgacacgcatcatggatttaattgcaccagttggatttggacaacgtggtttaattgtcgcgcctccaaaggctggtaaaacaagtctattaaaagaaatcgcgcacagtgttacaacaaatcatccggaagctgaattaattgtacttttaaattgatgagcgttcagaggaaagtaccagcccatgaacgtttctgtaaaaggagattttgtaagctctacttttgatgaagtaccagaaaatcatataaatgtagcggaacttgtgttagaacgtgcaatgcgtctgtaggagcacaaaaaaagatgttactcattttaatggatagtattacccgtttagcgcgagcttacaaccttgttattccgccaagtggtagaacattatcgggtggtatcgacccagctgccttccatagaccgaagcgcttctttggagctgcacgtaatattgaagaaggcggtagcttaactattttagcaacagcgcttgttgatacaggatcccgtatggatgatgtaatttacgaagaatttaaaggaactggaaatatggaacttcacttagatcgttcattagctgagcgtcgtatcttcccggcaattgatattcgccgttctggtacacgtaaagaggatctattaattccgaaagaacatttagacaagctgtggggtattcgtaaaacaatgcgtgatacaccagactttgttgaaagtttcttacgtaaacttcgtcaaacaaagacaaatgaagaatttttacaaaacattgttgcagattcaaaaagatatgtaacaactaagtaaagggaaaagattgggactcgcttattttgtggtaagcgagttttt

SEQ ID NO: 9720 - DNA, 1332 bp, Bacillus anthracis
gtgcatattcttgttgttagtgtaaattatcgaacagcccctgtagaatttcgtgagaaactcacatttcaggcagcagagctagagcgagcaatgacgacattacaaaatcaaaagagcgtgttagagaatgtcattgtatcaacttgtaatcgtactgagatttacgctgttgtcgatcaattacacacgggacggtattatattaagaaatttttagctgattggtttcagcttgaaatagaagaagtcgcaccatatttaactatttttgaacaagatggtgcaatagatcatttattccgcgtaacgtgcggtttagattctatggtagttggagagacgcaaattttaggtcaaataaaagatagctttttagaagcacaacaagtaaaagcaacaggaacaatttttaatgaattgtttaagcaagtcattacattagcaaaacgcgcgcactcagaaacgacaattggtgaaagtgcgatgtctgttagttatgctgctgttgagttagggaagaaaatattcggcgagttaacagattgtcacgtgcttattctcggtgctggtaaaatgggtgaacttgcactgcagaacttatatggaagcggtgctcgtaaagtaacagttatgaataggacgctttcaaaagcagaaataatggctgagaaatatatgggacatgcaaaacctttaagtgaattacaatgtgcattattagaagctgatattttaattagttcaacgggtgcatcggattatgttattacgaaagagatgatgacaaaggtagagaaaatgcgctctggccgtccattatttatggttgatattgcagtgccgcgtgatattgatccagcgattgatgagctagaaggttctttcttatatgacattgatgatttgcaaggagtagtggaagcaaaccgtgctgaacgtttgaaagaagcagagaaaattcaatttatgattgaagaggaaattgttttatttaaaacgtggttaagtacacttggtgtcgttccgttaatatcagctcttcgtgataaggcacttgctatccaaagtgaaacgatggaaagtctggaacgaaaaataccgaatcttagtgatcgtgagagaaaagtaattagtaagcatacgaaaagtattattaatcaattattaaaagacccaattttagtagcgaaagaaatagctgctgaagagggagcagacgaaaaattagcgttatttgcaaagattttcgatttagaaatggaagacgtagagagtcgtgcggaagaagtagaacataaaagagtgtggacaccatccgttccatcttta

SEQ ID NO: 9721 - DNA, 746 bp, Bacillus anthracis
gtgatggaaaagcaaaaaacttttcatgtcgctgtagttggagcaaccggcgcagttggtgaacaaatgttaaatactttagagaaacgagaatttccaatcgggaagttaacgttactttcatctaaacgatctgcaggtaagaaacttgtatttaaaggcgaagaatttacagttcaagaggcaactcctgaaagttttgaaggagtagatatcgcactatttagtgcaggtggatctgtatcaaaacaattagcgccagaagcagcaaagcgcggtgcgattgttgttgataatacaagtgcattccgtatgacagaaaacgtgccacttgttgtacctgaagtaaatgaaaacgacttaaaagaacataatggtattattgcaaatccaaactgttctacaattcaaatggtagtagctcttgagccagttcgtcagcaatatggtttaaaacgagtaatcgtttccacatatcaagctgtatcaggtgctggtgcggcagcgattgaagaacttcatgaacaatcacaagcaatcttaaatggcgaagaagtgaaggcgaatgttttacctgtatcaggtgataagaaacattttccaattgctttcaacgcgattccacagattgataagttccaagataatggatttacgtttgaagaaatgaaaatgattaatgaaacgaaaaaaattatgcatatgcctgaattagaagtagcggcaacatggtcttccagcacccg

SEQ ID NO: 9722 - DNA, 1899 bp, Bacillus anthracis
aatttctttactagagtaaaagaaacgcaatctactttattagatggccttgaacatcgtcattacgatggagttaactttattcgagatttcactcgatatcatcaaatgacgccaaaagcagttatgccaatcgttttcacctcgatgttagcaggtgcaggtgctttctcttgggaacaacttggttctcttcgctatattcatgctcggactccacaagtatatttggataatgtagtaattgaaaaaaatggagagttattaattagctggaactatgttgaagagctgtttgatgttgatgtaatagaagcaatgttttcccaatttgttgacttattggaacaattggtgaaacaaagcgatataacatctttgcagatgaaagaatcggatcaaactttaattaagcaatacaatgaaacaacagaaaaaataccttcaactactctgtatcaattatttacagaccaagtaaaacgtacaccggatgaagtagcagtggtatttgaacaagaatggttaacatactcggaacttcataaacgctccaatcaaattgcccacttcttaaaagagcaaggcattggtctaggtgataaagtggggcttttagcaaaaaggcgagttgacacaattgttaatatgttaggtattttaaaagcaggtgccgcttatgttccgattgattccgatcatcctttagatcgccaaacatatattttaaaaaatagctcatgcaaacttttattagaacctagcctttatgaagaaaatgatttgtcattttatacaacagaagatatgcctgctattgctggtccagaagatattgcctatattatatacacttcaggaagtacaggaaaaccaaaaggagtaattattactcaccaagcggttacaaatactattcaagacataaatcaaaaatatgaggtaaatgaagatgatcgtattattggtatctcttccatgtgttttgacctatctgtatacgatattttcggagctttaagcacaggtgcaatgttggtgatgattcgtgatccaagagacatgcaagaattaatccgcactgtcgaacgtagagggattacaatttggaatacagtgcctgcaatcatggatttagcattggatcaagtaggttctcattttgaacattcttctttacgtttagttttacatagtggagattggattccgctttctttaccagaaaaaataaaacgacattttccgattgcagaagtagtttcactaggaggggcaacagaagcatcgatttggtcaatttattatccggtcaaacaagtgaaatcacattggaatagtattccatacgggatgcccttggcaaaccaaacgtattatgtgttgaactatgaaaagaaaatgtgccctgttggtgtaattggagatttatatatcgggggagtgggccttgctaaaggatatttaaatgctgaaaagaaaacaaatgaagcgtttgtgtcacatcctgattttggtcttatatacaaaaccggagattgtggaaaaatgcattctgagggatatattgaatttttaggccgccaagattaccaagtgaaaattcaaggatatcgagtagagttagaagaaatctctcattgtcttctaacttataaacaagtcgaacacgctgtcgtaattgatcaaacagatgagaacggaataaaatttttagttgcatatgtggtaactgagcaaaatattagtacaacagaactacgaaagcatttgcgagatcacttgccagattacatgattccttcttattttgtttatttggaccaattacccttgactccaaacggtaaattagatagaacatatttacccgttagcacctttccaagaagttattta

SEQ ID NO: 9723 - DNA, 2253 bp, Bacillus anthracis
gtgcaggcgtatatgagtatgacagataggttattaaatggtttaaacccgcaacaacaaaaagcagtacaaacaacgaacggaccacttctattaatggcaggcgcaggtagtggtaaaacacgtgtgttaacacatcgtattgcgtatttacttggtgaaaaaggagtagcaccgtggaatgtactagctattacctttacaaataaagccgctcgtgaaatgcgcgagcgtattgatacacttgtcggaccagaagccgaagatatttggatttctacgttccactctatgtgtgtacgtattttacgacgtgatatcgatcacattggtattaatcgtaactttacaattttagattcgggtgatcagttaactgtggtcaaaaaaattatgaaagagcgcaatattgatccgaagaaatttgagccgcgctctattttggctggtattagtaatgcgaaaaatgaactgttatctgcggataagtatgcaaagaaaattacaattgctgatccatatgaaaaattaacgagcgatgtatatacagaatatcaaaaacgtcttttgaaaaataactcattagactttgatgatttaattatgacgacgattcaactatttgaacgtgttccagaagtactagagttttatcagcgcaaattccagtatattcacgtggatgagtatcaagatacgaacaaagcgcagtaccttcttgttaaacatttggcagcacgttttaaaaatttatgcgttgtaggtgactcagatcagtcaatttatcgctggcgtggtgcggacatttccaacattttgtcattcgaaaaagactatgagaatgcgcaagttattctgttagaacaaaattatcgttcgtcacaaaatattttaaatgcagcgaatgctgttattgaaagaaatacgaatcgtaaaccgaagaagttatggacagataatgaagttggaagcaaaatctcgtactatcgtgctgcaacggaaaaggacgaggcgtactttgttgcgaaaaaaattcgcgacgatattcaaatgggaaaacgaaaatatactgattttgcagtgctatatcgtacaaatgcgcagtctcgtatggtcgaggagattttcctgaaatctaatattccttacaaaattgtcggcggtacgaagttctacgaccgtaaagagattaaagacattttggcgtatttacgtttaattgggaatccagatgatgagattagttttgcgcgtattattaacgtgccaaagcgcggaattggtgcgacttctatcgacaaaattattaattatggtgtacaaaatggaatttctttaactgctgtattcgatgagattgagcatgttggagtaagtgcaaaggttacaaaggcagtaaaagaattcgcaggtttattacacaattgggtaaatatgcaagagtatttatctgttacagaattggtagaagaagtgattgaaaaaacaggctatcgcgatatgttgaaaaatgagcgtacgttagaagcagaaggtcgtctggaaaacttagatgagtttttatctgttacgcaaacatttgaatctcaaagcgaggataagagccttgttgcattcttaacagacttagcacttgttgcagatattgatcgtgtagatgaagacccaactgctggtgaggaagttattttaatgacgatgcactcagcgaaggggttagaattcccagttgtctttattgttggtttagaggaaggaatattcccacatactcgttctctaatggaagaagatgaaatgcaagaagagcgtcgtcttgcttatgtaggtattactcgtgcggaagaagagttgtatttatcaaatgcacaaatgcgtactttatttggtagaacaagtatgaatgccgcatcgcgatttattacagaaatcccgacagaactagtagaatcattaaatgaaacagcaccgaagcgtgaaacttcgtttggtgcaaaaggaagagtggcaagtagcagtaaaacgacaactacaacacgttctcgctcagctttcgcacgtcctgcagctaagacgacaggcggcgaacaaattggctgggcagtaggtgataaagcttcccaccaaaaatggggagtcggtacagttataagtgtaaaaggtgaaggtgatgcaaaagaattagatattgcgttcccaagcccaattggtgttaaacgtttgttagcaaaatttgcacctgtgacgaaacaa

SEQ ID NO: 9724 - DNA, 1149 bp, Bacillus anthracis
atgtatatagaaataaatacgactgaaataagaaaaagagaagcggaggagttagtagtgcgtgtattagtaagtggtgggggcactggaggtcatatttatccggctcttgctttaataagagaaataaaaaaattaaatccggaagcaaggtttttatatattggtacggaaaatggattagagagtacaatcgttccaaaagcaggtataccgtttcaatctattgttataagtggatttaagcgtaaaatatcgttagataacgtgaaaacggtgatgcgtttcctaaaaggtgtacaagacagtaagcgatatattcgtcgtttcaatccagatattgtaattggaacgggtggatatgtatgtggacctgttgtatatgctgcggcaaaattaggtattccaacgattgtacatgaacaaaatagtgtacctggtgtaacgaataaatttttaagccgctatgttgataaagttgcagtttgttttgaagcggctgcagaacattttccacagtcaaaagtggtcatgacaggaaatccacgagcgtcagaagtaatggatcaaaatggaatgaaaggaaaacgttcagtaggtttatcccttcctaaaaaatccgtgcttatttttggtggaagccgtggggctagaccaattaacgatgctttcgtagaggcgattgaacagtttggaaataaaagttacgaaatattgtatgtaacaggtgaagttcattatgacaaagtgatggaagcagtgaagcaaaaagggaatccgaataatgttattattaaacctttcattcataatatgccagaagtacttacaggtgtagatcttgttgtttcaagagctggggcaacaacacttgcagaattaacagcgttaggtaagccgagtgtgttaattccgagtccgtatgtaacaaataaccatcaggaaaaaaatgcacgttctgttgtcgataaaggagcagcaaaaatgttgcttgaaaaagatttaacagctgaaacacttattcgtgatattgatgagattttattagatgcacaaacattacaaaatatgaagcttgctgctgggcaattaggtattccagatgcagcaaataagctgtatgaagtcatgaataagcttgtaaaaaaa

SEQ ID NO: 9725 - DNA, 3955 bp, Bacillus anthracis
atgcctaatagtcaaaaagtttcgtcattcgttatcatctgcgcagtctggtatgtggttggcgcaacaattagatccgcttaatcggatttatatatatgggggaatagtgtagaaataagcggaaatattaatcaagaaatttttgaattagcagtacgtaaagttgtaatggaagcagaggcacttcatgttcgtttggaagaagatgaaattggtccatggcaagttattgaggaattacagtttcatatgcattttattgacgttcgtaaagaagaaaatcgtgaagaggctgttaaagtatggatgaaaaatgatttatctatgccagttgattagaaaaaagatacattatttactgaagcacttattcaagttgaaaataatcgtttcttttggtatcagcgcatccatcacattgtgatggatggctatggattttcacttcttagccaaaaggtagcgaaagagtatacatcattaatagaagaaccaaataagaatgaaaagccatttggctctcttgcaaaaattgtacaagaagatatggagtatggtgagtctaaacaattccaggaagatcgtgctttttggttagaacaagtatggagatgaaccagaagttgtaagtttggcagaacgagcaccgagaacatcaaatggatttttacgtgaaacagcgtatttatctagttctagtacgaaaactttactagaagatatcaatgtttcgttagcaagttggccggaatttattatagctgtaaccagtatttatatgcataagttaacaggagcaaatgatattgttttaggtttaccgatgatggggcgtctaggttctgcatctattcatacaccgagtatggtaatgaatttagtaccacttcgtctcactgttactccaaatataacacttgcggaattattacagcaggtttctaaagaaatccaagacgtacgccgtcatcataaataccgccatgaggaattaagaagagacttaaagttattaggtgaaaatcaaaggttatttggaccgttagtgaatgttatgccttttgattacgggcttaactttgctggaaatcgtggtattacacataatttatcagcaggacctgtcgatgatttatcgataaatgtatataaacgtttcgatgaaaatgagttaatgatccaattttgatgcgaacccagaaaagatataatggcgcggagctagcattgcataaagaaagatttatggatggattagaattagtgattaatggattatgaaaaagatgcgtcgattggaagcataaacattactcttcctgaagaaaatcaaaaagttttattcgaatggaatgaaactttttccgctgaagagttaatttctctacctatattatttgaaaaacaagtacaaaaaaatcccaataaaatagcaggtacttggtacggaataaaaacttacgtataaagagttaaatgaacgagcgaatgaactagcacactatttagtagaagaaaggataggggccaaatcagtttgtagctttagtatttccaagatcaacggaaatggtagttagtatgctagcagtttttaaagctggtgcagcgtatttaccgatagatcctgaatatccagctggagcgatcaattatattgtaaatgatgccaaacccagtgtggatcatccccccattcctctgaatcgtctattttagtcatagaagatgatataaaagaaatcgaattagatagtgaagaaatgacaatagcgttaaacacatattcttatatgaatataccattaaaaaatgatgaatcacttttaaacccagcttatacaatttacacttcaggctcaaccggcaatccaaaaggtgtaattgttcctatgaaagctttaagtaattttttattggctatggacgatatattttcactaaatgaaaacgatcatttattagcagttactacatttgcgtttgatatttcagctctcgaaatttatttacctcttattagtggggcaggttaaccaatcgcccaaaaagaagtaattcaaagacccttctgcggttaacggcattgttacaagaagaaagagtgacaattatgcaagctacaccgaagcctttggcaggcgttagtaacggaatatccagagaagctacaaggactaaatgtactcgtaggtggtgaagacacttccagcccatttagcaaaaacattaaaagaattaggttgtactattacaaacttatatggaccaactgaaacgacgatttggtctactgtcatgaacatcgatgaaagagaaagtggtatgcctcctatcgggaaaccgatttggagtacagctgtatatgtattagacgcaggattacaaccagtaccacctggagtaattggtgaattgtatattgcgggggggagggcttgcgaacggatatttaggaaaaccagagttaacggctgaacggtttgttgcaatcccttatgggaaaaccaggggcaacgcatgtaccgtacaggcgatctagtaaaatggcgcaaagatggcgttctagagtacatgagccgcgcagatcatcaaattaaaattcgtggtttccggaattgaactagctgaaattgaaatggtagtacaacgacatgaaaatattaagcaagcagtggttatggtacgagaagaccgtccaaatgataaacgaatcattgcgtatatcgttgccgaagagaaggaaacgattcatcttgcagaaattcgttcttatgtttcagaaagtttacccaattaaatggtgccagcaacatttgatttgctagaaaaatttacattaaccgccaattaaaaaggttgattaaaagaaatttacctgctcccagattataatggaatgaccaaggagaggagttgttagaaatccggaagaaagaaatatttatgtgatttatttgcagaagtacttggtgtttctcgcattagcattgatgataatttctttgaaatgggaggacattcgcttcttgcatctcgtttaatgggcagaaattcgtgaaacattaagtgtcgaactaagaattgggaaactatttggattcgcaactggtgctgaattagcgaaaacattgggatcaagcaaaaaatgcacgaccagcaattaagaaagtaagtagaccaaatgaagttccactttcatttgcgcagcgtagattatggttcttaaattgtttagaagggccaagtccctacttataatattccgttagttattcgtttgtctggaaagttgaacgaggaagcattacaaggtgccattcatgatgtagttgagaaacatgaaacacttagaacaattttccctaacgtattaggtagttcttatcagaaaattttagatatggaaaatttaaatctagaaataattaaaacaaaaacatgtaaagatgaattagaaaatgtgcttacacaggcggtaagatatttctcttaacctcgatggtgaaccagcagttcgtgtgcaactttttacaatgagtgaaaaccgaacatggaatactcattttaattccaccattttttagggggatggctggtcattaccaccgttaacgagagatcttacagcggcgtataaagcacgatgtcagggaaccagagtacacctggagacacttccggttcaatacgcagattatgcacttgtgcaacaacaattgttaggggatgaaactaccccagagagtctcatttcaacacaattagattttttgaaaaaaagattaagaaggttacccgatcaattggagttaccctccgattatcaccggtccaatggaaacgaagttaccgggaagaaacaattccttttcttatatatgcccagatgcttaataaggttataaaaccttgcccggaaaaatggagttagtttgtttatggtattgca

SEQ ID NO: 9726 - DNA, 3531 bp, Bacillus anthracis
ttgacaggtcaactagttcaatacggacgccaccgccaacgaagaagttatgcccgtattagtgaagtattagagttaccaaatcttatcgaaattcaaacctcttcttatcagtggtttcttgatgagggtttgcgagaaatgttccaagacatttctccgattgaagactttacgggaaatctatcgcttgaatttatcgactacagcttaggtgaacctaaatactctgtagacgaatgcaaagagcgtgatgtgacgtatgcagcaccacttcgtgtaaaagtgcgtctaatcaacaaggaaactggtgaagtaaaagaacaagatgtgttcatgggagatttcccactcatgacagagactggaacattcgtaattaacggtgcagaacgtgttatcgtttcccagttagttcgctctccaagcgtatactatagtggcaaagtggataaaaacggaaaacgtggttttactgctactgtaattccaaaccgcggagcttggttagagtatgagacagatgctaaggatgttgtatatgtgcgtattgaccgtacgcgtaaacttcctgtaactgttttgttacgcgcattagggtttggctctgatcaagaaatcaccgagcttttaggtgataacgaatacttaagcaacacattagaaaaagacaacacagatagcacagaaaaagcattgcttgaaatttatgagcgtctacgtcctggtgaaccaccaacagtagaaaatgccaagagcttacttgtgtctcgtttcttcgatccaaagcgctatgatttagcaaatgtaggtcgctacaagatcaacaagaagttacacattaaaaacagattgtttaaccaacgtttagctgaaacattagtagatccagaaactggtgaaattttagcggcagaaggaacaatcttagatcgtcgtacacttgatcgcattttaccttacttagagaaaaacattggattcaaaacagcgaaaccaatgggtggagtggtagaaggtgatgttgagctgcaatctattaagatttatgctcctgagtcagaaggcgagcgcgtaattaatgtaattggtaatgcaaacattactcgtgatgtaaaacacatcacaccaggtgatatccttgcttctatcagttacttcttcaacttactatacaaagtaggggatacagatgatatcgaccacttaggaaaccgtcgtctgcgttctgttggagaactattacaaaatcaattccgtatcggtctttctcgtatggaacgtgttgttcgtgagagaatgtcgatccaagatacaaatgcaattacaccacaggcattaattaatattcgtcctgttattgcagctattaaagagttcttcggaagttctcagttatctcagttcatggaccaaacaaatccattagcagagttaactcacaaacgaagattatctgcattaggacctggtggtttaacgcgtgagcgcgcaggctttgaagtacgtgacgttcactactctcactatggtcgtatgtgtccgattgaaacaccagagggaccaaacatcggtttgattaactcattatcttcgttcgcgaaagtaaatgagtttggtttcattgaaacaccataccgtcgtgttgacccagaaactggtcttgtaacagggcatgttgattatttaacagcagatgaagaagataattatgttgtagcccaagcgaatatgaaattatctgaagaaggagaattccttgatgaagatatcgtagctcgtttccgtggtgaaaacattgtcacaaataaagaacgcatcgactacatggatgtatcaccaaaacaagtagtgtcggcagcgacagcttgtattccgttcttagaaaacgatgactctaaccgcgcacttatgggagcgaacatgcaacgtcaggcggttccgttaatgaatccggaatcaccgattgtaggtacaggtatggagtacgtatcagcaaaagactcaggtgctgcagtaatctgtaaacaccctggtattgttgagcgcgtagaagcacgtgaagtttgggtacgtcgctatgtagaagttgacggtcaaacagtaaaaggcgacttagatcgctacaaaatgcaaaaattcattcgttctaaccaaggaacttgctacaaccaacgtccaatcgtaagtgttggaaatgaagttgtaaaaggtgaaatccttgcggatggtccttctatggaattaggtgaactagcacttggacgtaacgtgcttgttggcttcatgacttgggacggttataactacgaggatgcgatcattatgagtgagcgccttgtaaaagatgatgtgtacacttctattcatattgaagaatatgagtcagaagctcgtgatacgaagcttggaccagaagaaattacacgtgacattccaaacgttggggaagatgcattacgcaaccttgacgagcgcggtatcattcgcgttggtgcggaagtaaaagatggagatttacttgttggtaaagtaacgcctaaaggtgtaacagaattaacagctgaagaacgtctattacatgctatctttggagaaaaagcgcgtgaagtacgtgatacatcactacgtgtaccacacggtggtggcggtattatcttagacgtaaaagtattcaaccgtgaagatggcgatgaattgccaccaggcgtgaatcaacttgtacgtgcatatatcgttcaaaaacgtaaaatttctgaaggtgacaagatggccggacgtcacggtaacaaaggtgttatctctcgtattttaccagaagaagatatgccttacttaccagacggtacgccaatcgatatcatgttaaacccattaggggtaccatctcgtatgaatatcggtcaggtattagagcttcatcttggtatggcagcaagataccttggtattcacattgcaacaccagtattcgatggtgctcgtgaggaagatgtttggggcacaattgaagaagctggtatggcgaatgacgcgaaaacaatcctgtatgacggacgtactggtgaaccattcgataaccgtgtatctgttggtgtcatgtatatgatcaaacttgcgcacatggttgacgataaacttcatgctcgttctactggaccatactcacttgtaacgcagcagcctcttggaggtaaagctcagttcggtggacagcgtttcggtgagatggaggtttgggcacttgaagcttacggtgctgcttatactcttcaagaaatcttaacagtgaagtctgatgatgttattggacgtgttaagacgtatgaagcaattgttaaaggcgaaaatgttccagaaccaggcgttcctgaatcattcaaagtattgattaaagagctgcaaagtttaggtatggacgttaaaatgatgtctagcgacgatacagaaattgaaatgcgtgatacggaagatgacgatgatcatcaatcagcagataaattgaatgtcgaagttgagacaactaaggaa

SEQ ID NO: 9727 - DNA, 628 bp, Bacillus anthracis
tctacttatcccacactcttaaaggctactattgtcacattacaattaacattaacttcccgtagtactcggttcattaattggattactattcgctttctttcgaatctcaaacaataaagtttttaaatagtatcgctcatgtctacatgcccattattcgtggtacaccattaattgttcaaattgcaattctctattttggtattacatcggttggttgttttcacccctttttgggcaggagcaattgctctagcaatccataacggtgcatatattactgaaatttttcgtgggtccatccaatctgtcgaccgtggacaaatggaagctgctcgctctctaggtatgccgtatcctttagcgatgcgccgtatcgtattaccgcaagcatttcgtcaatctcttcctcctttaggaaatcagtttattattggattaaaagattcttcgcttgttgcttacgtaggaatggccgaattatggggatcaggtttatctattgctgcaagtaactttcaacaattagatacatatataatcgtctggtttatattacctcgtacttgctctcctatttacttaccttgataaccttttggaaaaacgactacgagcgaaaaaa

SEQ ID NO: 9728 - DNA, 500 bp, Bacillus anthracis
atgaaagctattatttcatacgaaacacctctagaacaagcacatttcactgcaaaaaataatgaaaaagatatgttttataaagaaaatacagaagaatctgtagaaggttctcttaagtatgacgtactagacgctgttaggagaatttaaaggtcaacctcggctatatcgtcttgtaataatattctctgtcgcagacgaaggtcgccgtgtagttgaaaaccgttgtaaaaaccgcgcaggccttatcgaaaacgaaccaggattccaagcaatccgcgttctacgcccattaaggaacgatacatatgtcatcttaacgatgtgggaaacagagctaaactttaaagactggacagaatcacgttcattcgaaaacgctcataaaaaacgtcctgcccaagcagaaaggaccagctccatctcaagcgcatccacatgcagacagctaaaagagtattttctctcgtccgtcatttgtgactacttttgacggt

SEQ ID NO: 9729 - DNA, 951 bp, Bacillus anthracis
gtgaatatacttgaaacaactaatggctggtataaagtatctgttaataataaagtaggttacgtacaaaaagattctatcctactaaaaaacaaacttcaatctaataatcaatatatcgtcaatgccaatgcattaaacgttcgttctgaacctaatttagaatcttcaattttagatgtattaccaaatgggaaattcgttaccattcaagaagaacaaggcgagtggtataaaattttacataatggcaaagcaggttacgtacaaaaagcattcgtatccaatgattcacagcctttagtaaaaggcatcacagtacaaaataatacgaaatacacagttgcaacacctaaacttaacgtacgtagcaacgctagtacaagtagcgcactacttggttcattacaaaatggtacacaattacaagtagtggaaactgtaggaacttggtataaaattcgttttggcacaggatacggatatgtggcaaagcattatgtggtgcaaaatcaaacgcaatcacaaactcaaacagctcaacctacttccattccagcagttttcaaattccctactcaaggaagaattagctcaacctttgatatgcgctgggaacaaatgcattatggtatagatatcgcagctcagggtaatgtctctatccaggcagcggctgcaggtaaagtcgtgaaatcatattattcagctagctatggcaatgttgtgttcatcgcccatcaaataaacgggaaattatatacaacagtctatgctcacatgaaagatcgcactgtacaagctggtgatcaagtacaagctggacaattagtaggtcatatgggaaacacaggtcattcatacgggcaacatcttcattttgaattgcacaatggagaatggaattttgaaaagacaaatgcagtaaacccactgccatatttagttagg

SEQ ID NO: 9730 - DNA, 1225 bp, Bacillus anthracis
ccaaaaatcgtagttttaggtgcaggttatggcgggatgattacgactgttcgtctgcaaaaagcattatctgtaaatgaagctgaaattacgttagtaaacaaccaccagctatccactaccaagcgacttggttacatgagagcgcagctggtacattacaagatgaaaaaatctgtctagatatccaagacgttattgatcacaaataaaggggactttgttccaagcccccgttgttgaaattaaaggctggtgaaaaaccgttttatctaaaaagatggcgagttagagtaggactccttagtaatcggtcttggtttcgaatcagaaacgttcggaattacaggactaaaagagcatgcattctcaatcgctaacattaatgcaactcgtcaaattcgtgagcatatggaagctagtttcgctaaatatgcaactgaaaaacgcgcgatgagttagtaacaatcgttgttggtggtgctggattttactggtatcgagtacgtaggtgagcttgcaaaccgtgttcctgaactttgcgagagagtaccaatgtacccacgtgaaaaagcacggaacaccgggggtagaagcggccccaacagcacttccaggtttcgatccagcgttagtggaatatgctgtaaaacatctctgagaaaaaaggtgtagaaatccggcatcggtccagcaattaaagagccaactgaagaaggcattatcgttgcaaacggtgatgatactgaattaattaagtctgaaacagtaagtttgggctgcaggtgttccgtggtaaatggtattggggaagagtctgggctttgaagcaatgcgcggacgtgtaaaagttgatgagtacatgcacgctccaggatacgaagatgtattcatggttggtgacgcagcgttaatcattaacgaagaaattaaccgtccatacccaccaacagcacaaatcgcaattcaacaaggttacaacattgcacacaacttaactgtgttagttcgtggtaaaggcgaaatgaagaaattcgtatttgataataaaggctctgtatgttctttaggtcatgacgatgcaatgggcgttgttatgggtaaaaagttaacaggttggaaagcttctttcatgaagaaagttatcgataaccgttacctattcttattaggtggacctttattagttcttaaaaaatggtaaattgaaagttcttttaatata

SEQ ID NO: 9731 - DNA, 748 bp, Bacillus anthracis
atgaaaaacattgattcagtacaaaatccgcgtgtgaagcagtggaaaaagctgcaaacgaaaaaagaacgcgataaaaaaggtttattttttgtagaaggattccatttagtggaggaagctttaaaagcaggagttgtaacagaacttatcgtttcagatcagacagaccttccgaaagattggacagttaatgttgtagaaatgtatatcgtaccggaagcaatcgtaaaagtacttcgtgaaacagaaacgacgcaaggtgtatttgctgtttgtgagaaacacgagagtgaagtagctcttactgatgggaagtttcttttattagatggcttgcaagaacccaggtaacttagggacaattattcgcacagctgatgcagctggtattcatgccgttgtgcttggagaaggttgtgttgatgcatataatagtaaagtactccgctctacacaaggctctattttccacttaccaattgtaaaaggaaacttaaaagaatgggtagacaaactaaaagaaaataacgttcctgtatatggaacagctcttgaaaatggagttccttacggtgaagtaacaccagcaggaagttttgcattaattgtaggaattgaaggaaacggcgtacgccaagtaattcttgcaaaaacagatcaaaacttgtatattccgatttatggcggggcagaatcattaaatgttgcagttgcagcagggattttattgtattatttacaaagc

SEQ ID NO: 9732 - DNA, 1656 bp, Bacillus anthracis
atggaaaaagttaaacaaacaattcgcgcgccaagaggtactgagttacaaacgaaagggtgggtgcaagaagctgcacttcgtatgttaatgaacaatttagatcctgaagttgctgaaaaaccagaagaattagttgtatatggcggaattggccgtgcagctcgtaactgggaaagctatcaggcgattgtagattcattaaaaacgttagaaagcgatgaaactttacttgttcaatcaggaaaaccagttgctatttttaaatcacatgaagatgcgcctcgcgttcttttagcgaactcaaacttagtaccgaagtgggcgaactgggatcacttccgtgaactagagaaaaaaggtcttatgatgtacggacaaatgacggcaggtagctggatttacatcggaacacaaggtattttacaaggaacttatgaaacgtttggtgaagcggcgcgtcaacatttcggtggttcattaaaaggcacattaacacttactgctggtttaggtggtatgggtggtgcacaacctcttgctgtaacgatgaacggcggtgttgttattgctattgatgttgataagcgcagcatcgatcgtcgtattgaaaagagatactgtgatatgtatacagaatcattagaagaagcgttagcggttgcgaacgagtataaagagaagaaagaaccgatttctattggtttattaggaaatgcggcagaaattttaccagaactagtgaagcgcaatattacgccagacttggttacagatcaaacatctgctcatgatccattaaacggttatattccagtaggctacacgttagaagaagcagcaaaacttcgtgaagaagatccagaacgctacgtacaattatcaaaagaaagcatgacaaaacatgtggaagcaatgcttgctatgcaagaaaaaggcgcaattacatttgattacggaaataacattcgccaagttgcttttgatgaaggtttgaaaaatgcattcgatttcccaggattcgttccagcatttatccgtccattattctgcgaaggaaaaggaccattccgctgggtagcactttctggtgacccagaagatatttataaaacagacgaagtaattttacgtgagttcgcggataatgagcatttatgtaactggattcgtatggctcgtcagcaagttgaattccaaggccttccatcacgtatttgttggcttggttacggtgagcgtgcgaaatttggccgcatcattaatgaaatggttgcaaatggtgaattatcagcaccaatcgttatcggtcgtgaccatttagattgcggatcagtagcatctccaaaccgtgaaacagaagcgatgaaagacggtagtgattcagtagctgactggccaatcttaaatgcattaattaatagtgtaaacggtgcaagctgggtatctgttcaccacggtggtggcgttggtatgggttattcacttcatgcaggaatggttatcgttgcagatggaacagaagcagcagcaaaacgtattgagcgcgtattaacttctgaccctggtatgggtgttgttcgtcacgttgatgcaggatatgacttagctgtggaaactgcgaaagaaaaaggcgttaacattccaatgatgaaa

SEQ ID NO: 9733 - DNA, 481 bp, Bacillus anthracis
ctaattgaatcgttaaagcctgatgtaagcattatggatattgaaatgccaattcaaagcgggttagatgttgcggaaacgttaaagaaagaaaagtcagcgtgcaaagtaatgattttaacgacatttgcgcgccctggatactttgaacgtgcgatgaaagctggtgtgcacggatatttattaaaagatagcccaagtgaagatttagctgcatcgattcgtaatgtaatgaaaggaaaacgagagatctctcaagatttaatggtcggcttatggcaggagcaaaatccgttatcagatcgtgaaaaagaagtattgctacttgcgaaagagggaaagacggcaaatgaaatcgccaaggcactttatctttcacctggtacagtgcgtaattatatttcctgagtattaacgaagcttgatgcgaaaaatagaattgaggccattaccattgcggaaagaaaagggatggatatga

SEQ ID NO: 9734 - DNA, 612 bp, Bacillus anthracis
atgaaagttttaaaatgcggtgtcatgttattgagtatactgtttgtatctcaattacatgtttatgcagaagaaaatcgatggacatggcctgttgaaggtcagataagtgattattttgggacaaggcatggaaaacactatggtattgatgtagctgcgccgattggaacgcctgtggtagctatccaagatggtaaggtaacgaggtcttattattcaagtagttatggaaatgttgtatttattaaacacggagaatatgaggctgtatatgcacatttaaataagagatatgtgaatcaaggagattatatttccaaaggagaaaaaattggagaagtagggaacacgggagaatcgcgaggtgcgcacttacatctagaacttcatcaaggaagatggacgatggcgaaaaagaatgcgatgaacccattgcttgttttaagtgaacaaagaaatgaagttgtttcttcgtcattatatgtcgtacaaaaaggagatactttagttagtattgcacggaaatttagtatgacacttaaggaaattaaagaaaaaaatggattgcagcaagagctaatttatcctaatcaacaattatatgttaag

SEQ ID NO: 9735 - DNA, 713 bp, Bacillus anthracis
gcattagtaactggagggagcggagggattggctctgctatttcgaaacaattaattcaagatggatatacagtatatgttcattataataacagtgaagagaaagtgaatgagttgcagaaagaatggggtgaagtgattcctgttcaagcgaatttagcttctagtgatggagcagagcaattgtgggaacaaattgaacatcctcttgatgctatcatatatgcagctgggaagagtatctttggactcgtaacagatgtaacgaacgatgaattgaatgatatggtagaacttcaagtgaagagtatctataaattattatcgatggcattgccatctatgattcaacggagaagcggtaaatattgtacttgtttcgtctatacggggacaaattggcgcgtcatgtgaagtgctttactcgatggtaaaaggtgcgcaaaattcatatgtgaaagctttagcaaaagaggtttcattaagtggaataagagtaaacgcggtggcgccaggtgcaattgaaacggaaaatgttaaacgttttttcagaaagagattaggaatgaattggcgaaagagttcccgtagggccgattaggattcccggaaagaagtagcaaaaaccgtgtcatttctggtatcaccaggtgcatcttatatacctggacaaatttatcggagtaaatggcgggtggcattgctaaaatttt

SEQ ID NO: 9736 - DNA, 3087 bp, Bacillus anthracis
atgagaccgatccagcttattatgacggcatttggcccatataaacagaaagaagtaattgattttgacgatctgggagagcatcgtattttcgccatttctgggaacacgggcgctggaaagacaacgatttttgatgcgatttgttatgtgttatatggtgaggcaagcggagaagaacgaagtgatacgagcatgctccgcagtcaatttgctgatgataatgtgtatacaagcgtagaactaacttttcagttaaaagggaaacgttatgaaataaaacgacaacttgggcataaaaaacaagggaataagacgattacgggacatgcggtagaattatatgaagtaattgatgaagagaaggttccggctgttgatcgttttcatgtaacggatgtaaataaaaaagtagaagatttaattggtttaagtaaacatcaatttagccaaattgttatgttaccccaaggggaattccgaaaactattaacatctgagacagaaaataaagaagagattttacgtcgtatttttaaaacagatcgttataagttaatgcgtgagttacttgatcaaaaacgaaaacaatggaaagacgtcttacaagaaaagcagaaagagcgagagttatacttccgtaatgtttttaaattaccaatccgtgatggagcgatattagagactttagtggaacaagagcatgtaaatacgcatcaagtagtagaagcattagaacaagaaacagctgtgtataaggcagaggttgagcaattacaagtagaacaagatgttcaaacgaagcaattaaaggatgctgaaacacgttttcacgcggcgaagtctgtaaatgagaaatttatagatttacaacaaaagaatgagaaatataatactttacaagaaaatcgtacagttattgaaatgaaagaaacatcttttaagcgtgcggaacaagcaaagcgcttattaccatttgaacaatggcacgaagaagcgatgcaaaatgagcagaaagctgaaagtttgttaaaacaaattatcgccaaaaaagaaaatataatgaataattttgaacttgctcaggagaaatatgaagtagtaaagaataaagaatctgagagagaaaatgtcaaaaaacttgttcaaagattagaagaattacaaccgattattgcatcattagctgagaaacagctgaatttacaaaatgcagaaattcaaatcggaaaattaaaagaaagtatgcaaaacttagatcgacaattagaagagcatacaaatcaaaaacagctaatgactggtgaattacagcaattagagcaagcgcttgaacaatatgtagataaagtagaagaactaacgaatatgcgagaagatgcaaaagttttaaagcaagcatatgatgtatggcaagaaaaacaaaaattcgagaaagaaaaagaagcagcatatagtaagatgcaattggcagttaacgcatatgaaaatatggaacgccgctggttaagtgaacaagctggtatattggctcttcatctacatgatggtgaatcttgtccagtatgtggtagtacgacccatccgaaaaaagctacagagcaaagtggtgcgatcgatgaaaacgagttaaatggtttaagagataagaagaatattgctgaaaaattacatgttcagttagaggagaaatggaatttctatcatcatcaatatgaacaagtaatagaagaggttaagaagcgaggctaccaatcggaagaattagttgaaacatatagtgcgcttgttcaaaaaggaaaacaattagcaactgaagtgaatacgttaaaagctagtgaagaaacgcgtaagcaaatagctgtgaaaataaaaagcgtagaagaaaaagtagatgcacttcagaaacaaaaacgtgaagtagaaacagagcagcaccgtatcgaaatggattgtatgcagctgcgtacgtcatatgaacatgataagaaaaacattcctgaaaacttacaaacagtacaagcttggaaagttcaatttgaccaagctatgcatgaactcaaattaatggaggacgaatggaagaaagtgcaggaagcatatcaacattggcaaaacgaaaatatacgtattcaagcagaacaggaaggtgctactaatcaatttgaaagtgcaaaattgaagaaagaagagactttcacgcgctttatgaaagaacttgagcagagcggatttacagatcaatctacgtataaagaagctaaattaagtgatgctgagatggaattaatacaaaaagaaattcaaagctattattcatttctcgaagtacttgcgaaacaaattgaagagttacatgttgaattaaaagataaagagtatatggatattacagcgttaggtgaacacattaaagaactagaaattaaccttgatatcataaaagaaaaacgtcaacgtgcgcaaaatgcggtaacatatatttccgatctccatgaaaatattagacgtattgatgagcaaattcatgaggaagaaaaagcgttccaagaacttgttgacttatatgaagtaatgaaaggtgataacgaaagccgtatatcatttgaacgttacatcttaattgagtatttagaacaaattgttcaaattgcaaacgaacgattacgtaaattatcaaatggacaattttatttaaaacgaagtgaacgagttgaaaaaagaaatcgtcaaagtggattaggtctagatgtatacgacgcatacacaggccaaacacgcgatgtaaaaacattatctggcggcgagaaatttaatgcatcactttgcttagcgcttggaatggcagatgtcattcaagcgtatgaaggtggtatttccatcgaaacgatgtttattgatgaaggattcggttcattagatgaggagtcattaacaaaagcagtagacaccttaattgacttacaaaaatcaggccgatttatcggtgtcatttcacacgttcaagagctgaaaaacgcaatgccagctgttttagaagtaacgaagcagaaggatggttgtagtcagacgaggtttgtggtaaag

SEQ ID NO: 9737 - DNA, 824 bp, Bacillus anthracis
tataaaatgattgttttagatttagatgatacgttattacgtgatgaccatactatttcacctcgtacgaaagaagctctaatgactgcgcaagagcaagggagtaaaagtggtactgctttccggacgtccaacattcggtatgcgcaatgtagcgaaagactttcgtttagaagaatacggtagtttcattctatcttttaatggcgcaaaaattattaactgtaaaacaaatgaagaaatctttagtagtacgctttctcctgaaatcgttcacaatctatttgaaattagtaaaactgaaggtgtatggattcacacttatattggcgatgatatcgtaacagaagaaaataatccttatactgaaattgagggcgatattactggtatgccaattgttgtagtagatgactttaaagctgctgttaaagagcctgtagtaaaagtattaatgaataaagaagctgaacgccttgttgaagtagaaaagaaactacaaaaacaactagaaggacaattaagcgttatgcgttctaaaccattcttcttagaatttttacttgaagctgggtgtttccaaaagaaacggagcttaaacccaaattattcaaaaaggcttgtcattaaagcgtgaaagaagttattcgcaattggcgcatagctataacgatcaggcgatgaattgaatttagctgttcttagtgttgcaatgggcaatgccccctgatgatattaaggaaattgcaaactatgtaacagatacaaatatgaacgatggcgttgcaaaagttgtagagaagtttgtactaaaaagagaagcg

SEQ ID NO: 9738 - DNA, 1050 bp, Bacillus anthracis
atggatattaatctgtttgattttcatttaccagaagaacttattgcacaagtcccattagaagagcgtgaaacatcaagattaatggtgttagaccgcgaaacaggggatattgagcataaacattttacggacattctttcttacttacatgagggggattgcttagttttaaatgaaacgaaagtaatgccagctcgtttgcacggtgtgaaagaagatacaggcgcacacattgaagtacttcttttaaaacaggaagaaggcgataagtgggagacgcttgttaagccagcgaaacgtgtaaaagaaggaactgttatctcttttggcgaagggaaattaaaagcaacttgcacaggaactgcagatcaaggtggacgtcagcttgaattttcatatgacggcatcttctatgaaattttagatgaacttggagaaatgccacttcctccatatattaaagagacgctagaagatcgcgatcgctatcaaacagtatatgcgaaagaaatcggttcagcagcagcgccaactgcaggacttcactttacagaagagttactggagaagttaaaacaaaaaggcgttgagttagcatttattacacttcacgtagggcttggaacatttagaccagtttctgctgatacgattgaagagcaccatatgcatgcagaatattaccatatgtctgaagagacagcggcattattaaaccgtgtaaaagagaatggtggacgtattattacggtaggtacgacttcaactcgtacgttagaaacaattgcgacagatcatgacggcaagctttgtgctgcttctggctggacagacatttttatgtacccaggttatgaatttaaagcaattgatggtttaattacaaacttccatttaccgaaatcaacattaattatgcttgtaagtgcatttgcaaacagagataatgtacttcatgcttataatgaagcagtaaaagaaaaatatcgtttctttagcttcggtgatgcaatgttcgttgcatctcacgctaaaatgggaaacaaa

SEQ ID NO: 9739 - DNA, 968 bp, Bacillus anthracis
gtgtcatttgcatcagaaacaaagaaagagttgacgaatctagagatgaaggaatgctgtgagaaagcagaattatcagcgttgcttcgcatgaacggatcactttctttttcaaaccgtcgtctatcaatcgatattcaaacggaaaatgcggcaattgcagtaaggatatatacgctttgcaaaaaacggatacgacgtgacggtagaattacttgttcgtaaaaaaatgcgattgaagaaaaataatgtatatatcgtaaggcttgttgagaagtctcgcgaaatattagctgatcttcatatcgtacgagatgacttttcatttattcgaaatatatcacaagaatttatttgagaagaaatgttgtaaacgatcgtatttacgcggtgcatttttagcaggtggttcagtaaataacccagaaacatcatcttatcaatttaaaaatcttttcgttatattaaggaacataatgatgctatatgtgaactgatgaacggatttgatttaaatagtaagacgttggaaagaagaaaagggtacattacgtatttgaaagaagcagaaaagattacagagtttttaaatattataggtgcacataatgcacttttgagatttgaagacattcgaatcgtacgtgatatgcgtaattctgtaaatcgtttagtgaattgcgaaacagctaatttaaataaaacaattggtgcagcgctaaggcagattgaaaatatccgctatattgatgagacggttggtcttgatatattgccggataaactacgcgaaattgcgcaactacgaagagattatcaagatgtaacattcgaaagagttaggtgagatggtatccggggggaaaataagtaaatcgggtattaatcatcgtttgcgtaaaatcgatgatattgcagagaaattacgcgcgggggaaacggtagcaaaaaaaataagaggttaaagg

SEQ ID NO: 9740 - DNA, 1303 bp, Bacillus anthracis
aagagggttgaacagaagacagctgacttacaaattactaaattagaattagaagaaaaagcaagcgagttgttacggtatttcaaaatacaaatcagagttcctagcaaatatgtcacatgaattacgcacaccgttaaatagtattttagtattatccgaaatgttaaaagaaaatcatgataatcatttatcggatgatgaaattgaattagcaaccgtcattcattcatcagggaaagatttgcttactttaattaatgacatactagatttatctaaagtagaagccggaaaactagatgttatttttgaagcaacaaatataagtgatatggcagcaagtatgcatcaaaactttttacatatcgctgcacaaaaaaatgttgaatttactgttgaagacagtgatacgattcctgatttgttttatacagatgcaaaacggattgaacaaattattaaaaacttattatccaatgcatttaaattcacggaaaaaggatccgtctctttacatttcgattcaatcgaaacaagcaatttaagtcatgatatgcagtctataagtaaagactggattacaatttcagtaaaagaatcctggtattggtattgctaaagaaccagcatcaacttattttcgaagcctttcaacaggctgatggcgcaacgattcggaagtatggtggtacaggattaggtttatctatttgtaaagagtttgctagattattaggtggttggattacgttagagagtcatgtaggagaaggcagtactttcaccgtaatatattcccaaccttccaaatggattacatgatgtacagttatccaatttagaagtcgcagcaacggtagatgaagttattcctgctgaagttattgaagaaactatcgttctcccagaagcaaataatgtcttccaagagaaaactattatgattgtcgatgatgatcatcgaaatatatttgcattacaaaatgcattaaaaaaacaacatgccaacatcattactgcacaaaacggcctagagtgtttagaaatactaaaaaacaatacaaatatcgaccttattttaatggatattatgatgccaaatatggacggttatgaaacgatggaacatatccgaatgaacttagggttacatgaaatacctattattgcattaactgctaaagcaatgccaaatgataaggaaaaatgtttatctgctggcgcttcagattatataagtaaaccattaaatttacatcaactctattcggtaatgagtgtatggttaaaaaaatagggg

SEQ ID NO: 9741 - DNA, 429 bp, Bacillus anthracis
atgtcatttaataatttagatacgttatatcgtcaagttattatggatcattacaaaaatcctcgtaaccatggcgtgttagaagatagtgtcactgttaacttgaacaatccaacttgcggcgatcgtattcaacttacgatgaaagtagaagaaggtattgtgcaagaagcgaagtttgaaggagaaggatgttctatctcaatgtcttcagcttcaatgatgacacaagcagtaaaaggtaagaaaattgaagaggcacttcagctttctaaaattttctctgacatgatgctaggaaaagagtacgatgacagcatcgatttaggagatattgaagcattacaaggcgtatgcaagttccctgcacgtattaaatgtgcaacattagcgtggaaagcgttagaaaagggcttaaacgaagataag

SEQ ID NO: 9742 - DNA, 1277 bp, Bacillus anthracis
ctcgaatcacctagaaagattttattaatggttaatgcgggggaaattacagataaagcgatgatttctctagtccctcaccctcgataaaaggtgatattttttattgatggtggtaatacatactttgtcgatacaattcgccgaaacaaacgtcttccagaagaaggaatcaatttcattcgggccagttgtgtcaggcggcgaagagggtgcattgaagggaccatctattatgccccggcggacagaaggatgcatacgaaaaagtaaaggatatgctttgaaacatctctgcaaaagtgaataacgaagccttgctgttctattatcggacctaatgggggcaggacactatgtaaagatggttcacaatggttttggggtatgagatatgccaattaatttgtgaagcatatttctggaaaaaaacaaacactagatttgactgcagaagaagtccatgaaatatttgctggatggaataaaggtgaactgaacagctatctcattgagattacagccgatattttccagaaaaaaaatgaaagaaactggggaaccattaaggggatgttattccttgaaactgccggacaaaagggtacagggaaatggacaagtcaaagcgcacttgatttaggtatctctctgcctattatcacggaatctgtatttgcacgttgcatttctgctttaaaaagaagagcgtgtgaacgcaagcaaagtttttatctgcccctaaagataaaacagcaaatgggagtgaaaaaagccgaattaattgaagcggtgcgccaagctttatatatgagtaaaatttgttcttatgcacaaggattcacgcaattgaaggcagcttctgaggaatataattggaaccttgattttggcagcatttctatgctttggagaggcggatgtattatccgtgctgcctttttacagaacattaaagaggcttatgagactaacactgacctaccgaaccttttacttgatccatactttaaagaaattgtagagtcatatcaaggtggattacgccaaattatctcaatggcggtacaacagggcattccgatacctgcattttcagcagcaatttcttattatgacagctatcgtactgccaaactacctgcaaacttattgcaagcgcaggcgggattatttggaagcgcatacgtttaacggagtagataaagagaggtacattccatacaaaatggatataaaataaataatgggactagatttaattcttagtccatttt

SEQ ID NO: 9743 - DNA, 972 bp, Bacillus anthracis
atgaatatgcaagaggtttatgaatatttaagtacggtattgcctgaaggtcatgtgaaacaagatgaaatgttaaagaatcatacgcatattaaagtgtatagaaaagcagatgtgtttcgttgcgctttacaaattatgatgaaattcaagaagttattaaatatgctaacaaatataatattccagttacgtttttaggaaacggatcgaatgtcatttattaagaccgtgggaattcgcggggattacaagtaagttttatttcatatttaccaggttttactgttaacaaggaacgacaatttgtaagcacaagtgccggtgcagcaaattatttgaaccgtatcacgtattgcgttagaccataacttaacgggtcttgagttggagtagtggtattccaaggttcagcttgttgagtttgtatatatatgaatgcaggtgcatacggcggtgaaatttcgtttgtattaacagaagctgtcgtaatgacaggtgatggagagctacgtactttgacgaaagaagcatttgaatttgggatttcgataagggtgtttttgcggaccattcctttccttatttcttgaaaggaggatttgaacttgaagaagggggttttatgaggaatttaaggcaaaaattggatgatttaacgtttaaaagggagtcaaaacaaccctctagaatatccttcatgtggaagcgtatttaaccgcccacccaaataactttgctggtaaaatggattcaagaatcagggttacaaagttaagcgaattggttggagtggaagtttctttaaaaccacgctggatttatggtaaatgttgataacggaacagcacaagattacatcgatttaattcacttcgtacaaaaaacagttgaagagaaaatttggcggtgaagttagagcgggaagttaaggattatttgggagtataaagaaataccatattcgtatga

SEQ ID NO: 9744 - DNA, 924 bp, Bacillus anthracis
atgaagaaatggttacttatactcgttgcatgtatgatggtcattactgctggttgttcaatggaaccaccagaatgggcaaaggattctagcgataaaggtcgaaataaaactattaaagttggattctctgtttcaactttaaacaatccattttttgtaactttgaaaaaaggggcagaaaagaaagcgaaagaaagcggcattgaattgattgctgttgatgcacaaaatgatgcagcaaagcaaacaaatgatgttgaagatttaattcaaaaaggtgtcgatgtagttgttattaatccaaccgattcagatgctgttgcttcagcagtaagtgcagcaaatgcagcgaatgtccctgttattacagtagaccgcgttgcgaattcaggtaaagttgtttctcacattgcctctaataatattgaaggtggtcaaatggctagtgattacattcgtgaattagtcggcgaaggagcaaacgttgctgagttagaaggaatccctggttcttctgcagctcgtgaacgtgggaaaggattccataacgtagccgataagtctttaaaagtagttgctaaacaagcggctgattttgatagagcgaaaggattatctgttatggaaaacattttgcaagcaaatggtgatattaaagcggtatttgcgcataacgacgagatggcattaggggcacttgaagcattgaagtctgctggaaaaacagatgtagtggtggttggatttgatgcaactgaagatgctgtgaaagcggttaacgatgggcgtatggctgcaacagttgctcaaaaaccggaattaatcggagagaaggcgatgcaaacagcaaaagagatcacgcaaggtaaaaaagtggacaaatctattccgattgaattagagcttattaagaaaaacaaa

SEQ ID NO: 9745 - DNA, 526 bp, Bacillus anthracis
aagaaaacgatgggaactattaaggagcttgtctctattccgagtcccgtctggaaatacagagaaaatcattcgttttattgaaaactatgtaagtgagtggaatgtagaaacgaagcgtaacaataaaggcgctcttattttaacggtaaaagggaaaaatgatgcacagcaaccgcttattaacagcgcaacgttgatacgttaggtgccgatggtaaaagaaattaagcctgacggtcgtctgagtctttctatgattggcggatttcgctggaactctgtagaaggggaatattgtgaaattgaaacatcaagtggtaagacgtatacaggaacgattttaatgcatcaaacgtctgtacatgtatataaagatgcaggtgaagcgaaacgcgatgagaaaaatattgaggttcgcattgatgagcgcgtattttcagctgatgaagtacgtgaattaggaattgaagtaggagacttcgtttcatttgaaccacgcgttcaaattacagagatcttccag

SEQ ID NO: 9746 - DNA, 1053 bp, Bacillus anthracis
atgacagttacaattaaagatgtggcgaagaaggcgaatgtagcaccatctaccgtttctcgtgtaattgctgataatccaagtataagtgaaaaaacaaagcgtcgtgttcggaaagtgatgagtgaactagggtatcatccaaattttaacgcaagaaacctagctaaccaaacaacaaaaacacttggccttgttatgccaagttctgcaagtaaagtttttcaaaaacccttttctcccagaaagttataggaggaattagttcatttccccaatgggaaagggtatgcgctttatatgtcgacagggtgaaacggaaagatgaaatttttaaccggtgttgtaaagatggtgcaggggcgccaaattggtggcattattcttttatattcaagagagaatgatcggattattcaatatttacataaacgaaattttccgttcgtattaattgggaaaccatatgatcgtacagaagaaattacatatgtagataatgacaattatacagctgcaagagaagtggcagaatatttgatttcattaagtcatatacaaatcgcattccttcggctgcggatcagattttacttgtaacgagagatcgtttggctggtatgagtgatgctttaaaattagcagacattgtattgccaaaagaatatattttacattttgatttttcaagagaaagtggtcaaccagccgttgtaggaattatgggggctaaagcaaccaccgacagcaattatggcaacggatgacttgattggtcctggtgtggtaaagtgcactttctaaaaaaggatttgttgtaccccaaaggatgttttcatttgtaagttttcaccaaggttttatttatccggaaattggggagtccgccattcttgacagtttgatgtgaatatataccagctaggatatgaagctgcaaaagctttagttgataaagtagagaatgcggagtctactgcaaagtgtattattattccgcataaattactgaagcgtcaaacttgcgatcattatgcaacaaaaagctaagag

SEQ ID NO: 9747 - DNA, 882 bp, Bacillus anthracis
atgaaagaatatattgcatttgatattggtggtacacaaattaaatatggaattgtttcagaaacaggaatagtactaaagcacaaaacagttccaacagaaattcatttgggcggggaacaaattattcaaaaactcattcttttatcaaaaaaattaatgagtgaacatacgatttcgggaattggtattagtactgcgggaattgttgacgttaataaaggggttgtgacgggaggggcggatcatattccgggctatagtacgattcctattattaatagattgccagagggattaaaagttcccgcatctattgaaaatgatgtgaattgtgctgcgctgggcagaaagtggaatggtattggtagaaaaaaaaaaaaattcattatgctctcccttggaactggtattggaggagcgagttttttatatagaagagtatattataggcgttcctatatttgctggtggaatgggggaacatgtttaattaaaagagaaaaatttttgagagggcgccttcacttttcgggggaattcttcttgtgcgaaattataaagaaaaaggtaatttggaatggaaaaacgattttcgaactgtatgataaaggcgacagggaaagttacgcaagccagttgaggtttttctttaaacatttagcgattggaattagtaaccttgcttatatttttaatccagaaacaattattattggtggaggaattactgatagaggaaatcagtttttaaaagaagtaaaagaagaggtaggaagatacttaaataaagagatttatagtgattgtgagattgaacttgcgcaaaacggtaatcgtgcaggattgattgggtgttattacccatttctcacctcatca

SEQ ID NO: 9748 - DNA, 366 bp, Bacillus anthracis
atgctttcagcacttatcccttccgcacatagctacccagctatgcccttggcagaacaactggtacaccagsggtgcgtccatcccggtcctctcgtactaaggacagctcctctcaaatttcctacgcccacgacggatagggaccgaactgtctcacgacgttttgaacccagctcgcgtaccgctttaatgggcgaacagcccaacccttgggaccgactacagccccaggatgcgatgagccgacatcgaggtgccaaacctccccgtcgatgtggactcttgggggagataagcctgttatccccggggtagcttttatccgttgagcgatggcccttccatgcggaaccaccggatcac

SEQ ID NO: 9749 - DNA, 965 bp, Bacillus anthracis
cgatgaagaaagtaatcgtttttaggtgaaagattttggtaaaaaaggtgggcgtatttaaaggcgccacaggggattatatgatcatttgggagaggatgggggcgatagatacccccctttgcagaatctgcattcggtgggggtcgcaattggtgcagcaaagtatggaaatgcgtccaaatcgatgaaaatgcagtttgcggatttcattcatgccagccagtaaaccaaatttgtttcggaggcagcaaaaaattcgttaccgttttaataatgatgggacttgtccaattacagttcgtgcgccatttgggcggcgggtgttcacggagggtgtatccttccccaatcgttggaggcgattttgccaaacccaccttggttaaaaaatcgttatccctttttcccccatatgatccaaaagggctttttaaagctgccaatcggtgatgaagatccagtatttttctttgagcataaacgtgcatatcgctttatttaaaggtgaagtgccagaagatgattacgtattaccaatcggaaaagcggatgtaaaacgtgaaggtgaatgatatttcggttatcacatacggattatgtgttcattttgctcttcaagcagctgaaaagttagcacaagtattgatcctctgcacacattcttgatttacgtactgtatatccattagataaagaagcaatcattgaagcagcttctaaaacaggtaaagttcttcttgtaacagaagacaataaagaaggaagtattatgagtgaagtggcagcaattattgctgaaaactgtctgtttgatttagatgcaccaatcgcacgtcttgcgggtccagacgttccagcaatgccatatgcaccaacaaaaaaaaaaattctttatggtaaatccagataaagttgaaaaagcaatgcgtgaacttgcggaattttaatcggggggactatac

SEQ ID NO: 9750 - DNA, 1197 bp, Bacillus anthracis
atggatacgttaatttttgaagttggtacagcgttagtattagttgcaattgcggcagtaattgctggaaagtttaaattctcagtaattccgtttctaattgttcttgggatgttagtaggaccacatgcgccgacaataggtgttatcgatttcaagtttattgaaagtgcaagtgtcatttccttccttggacggattggggttctgttccttctgttctatctaggactagaattttcaatgaaaaaactaattaaatctggacgttctattgcaattggcggaacgatctatattttaattaacttttcacttggactattatacggatttataatgggcttccctttactagaaatcttaattattgcgggtattattacgatttcttctagcgctatcgttgcaaaggtgttagtggatttaagaagaactggtaataatgagaccgaattaattttaggaatcatcatgtttgaagatatattccttgctgtatatttatcagtcgtttcaggcttagttctaggggatcatgcttcattcttaggtgcccttacttcaattggaattgctttaggatacatgcttctattctttattgtcgctagaaaggctacgcctttattaaataaattgcttaatattagttcagatgaaatctttattattgtagtatttgcttcattattctttattgcaggtttctcggaaacaattcacgtagccgaagcaattggagcacttcttttagggttagttttctctgagacagagcatagtgacagaattgaacatctcgttgttccatttagagactttttcggagctatttttttcttcagtttcggattaagtattgatccgttctcattgggcggggcgatatggttaacgttaggtgctgttcttcttacaatcatcggaaactttgtagcggggatgattgcaggacgacaagctggattatctcataaagcgtcaacaaatattggattaacaattgtttcaagaggagaattttccatcattatggccaatattggtatcgccggtggtttaatgtcagtactaaaaccattctcagcactatacgtgcttatactatcaatcttaggtccacttctgacgaaagagtcaaagaatgtatataaattgttaaataaaatctttaagtgggatatgaagaagagc

SEQ ID NO: 9751 - DNA, 1482 bp, Bacillus anthracis
atgttccaagtacaaaaagaattagcaagccatgaagcggtggttgttgccttatttgaggaagagaaaacgagtagctttgtacaagaactggacaaagcgtttgaaggacaattacaagttttattagaagagaaagaactttctacgaagaagaaagctatttcaaaagtacatagtttaggaaaaacagatgtgaaacgttattatttcgttggtttaggtaagaaagaatcttatacgacagaaacattacgttcggctcttggtaagacgtttaaaacactgcaagcagcaaaagtacaagatgcagcaatcttacttgattctttcgtaacagagaaattagacgcgattgatgtcgctcatattgcggcagaagtacaaggccttggtacatatgagttacaaacgtataaatcagataaaaaggatcgtgtagagttagagaagtttacggctattacagcggaagatgcacaggaaattgaagcggcattaacagttggctacgtacatggacgtgcaacaaattcagctcgtacacttgtaaatatgccgccaaacgtattaacagcaacaaagcttgctgagtatgctgttgagttagcggaaaagtatgatatggattataaagttcttgagaaagaagagatggaagagcttggtatgggtgcattacttgcagtaaaccaaggtagtgtagagccaccaaaaatgatcgctcttatttataaaggaaaagaagagtggacagatgttattggattcgttggaaaaggaatcacatatgatacaggtggttattctttaaaaccacgtgaaggtatggtcggtatgaaaggtgatatgggcggtgcagctgctgtattaggtgcgatggaaattatcggtgaacttcgcccagagcaaaatgtgatcgctgttattccatcaacagataacgttgtaagtggtacagcatttaagccagacgatgtaatcacatctatgagcggaaaaacaattgaagtattaaatacagatgcagaaggtcgcttagcattagctgacggtattacgtatgcgaaaaaattaggtgcaaactatttgattgatgttgcgacattaacaggtggtgtaattgttgcacttggaaatcatacgacaggtgcgatgacaaacaatgaagagttgtttgagcaagtactagaggcatctatggaaacagatgaatctatttggcaattaccgatttttgatcgtgataaagagcgcgtgagaaacagtaagtttgctgatttaaataactcgccaggccgcgaaggacatgcggttatggcaggtacattcataggtgaattcgctgaagatacaccttgggtacacttagacatcgctggaacatctgaatcatcaggagcgcatgatttaggaccagctggagcaacaggtgcaatggtacgtacacttgcaacacttgttgaacgtttcggcgaagaa

SEQ ID NO: 9752 - DNA, 675 bp, Bacillus anthracis
atggataaaagaatttcaattgctatagatggtccagcagctgctggaaaaagtacagttgcgaaagttgtagcgaagaagctttcttacgtttatattgatacaggcgcaatgtatcgtacgattacatacgcagcccttgagcaaaaagtggatattgaaaatgaagagcagctaatggaagttgtaaagaatgtgaaaatcgagtttcagcaaggagaaaatacacaacttgtatttttaaatggacaagatgtttctgaagtaattcgtacacctgaggtaacgaatcgagtatctattgtggcgaaacatcgccttgttcgtgaagagatggtacgccgtcaacaagagttagcggaaaaaggcggcgttgtaatggatggtcgtgatattggtacacatgtgttaccagatgctgaagtgaagatctttatgcttgcttctgttgaagaaagagcagaaagaagacatttagaaaatatgaataaaggtttcgattctaatttagagcagttaaaagaagaaattgctcagcgtgataaattagattcagaacgcgaagtttctcctctaaaaaaagctgatgatgcattggaattagatacaacttctttatcaattgaagaagttgtccaaaaaattatgggtattgttttgggagtgtttgcgaaa

SEQ ID NO: 9753 - DNA, 944 bp, Bacillus anthracis
tggttccaatgggcttgtgttatttttgactaccagatttacctatatgggggggaattgtaggatatgcagatcggttactatatagagcagcgtatacaagggttaaatacgtttctatttgaagtggagcgagggaatttcccgaggggtttttctgtttccggccggaggaggaatttttctgaaggggaacgaaaaggtaatcgtttgggcttgttggattagaggaggcaagcttggcttcttccaaaaaagtaccgaatggacggagttcctttgaattgaggagagaggacaagaggcgatttcccaaagaaagccttggatgggcggaggaggtggcatgtttctgtaagtcagcagctttttgccaatgtcgatgatgagttcgggttattaaggaacaagtagctggaatttccggaacggacgaaaaaggcagtggcaggctgttgaaaaatatggtggtaaatgcacattcagggatgagagccttgctttctccatttcgccccgttccagttagaggttaagaacttaccggggggtatggaggatttattaccagacctttttggaaagcaccatatgaaattggaatggttaatggacccgattcaattaaaaaaaggtgtagaagatcacttattccgcatggtccaagaggcgctttctaatactttacggcatgcgattgcacactaaaacgggaagtacgtttacgcaaaattgagcaatatgcaatattgaaaattattgatgatggtgtaggttttaaagtagggagtgattagggctggttcttacggattaagatcaatgcaagagcgagttcatgaaattggtggtacattaaaagtgcttagttttccaaataagggtacacaaatagaagtaaaaagttccgattatgattgagagaggggggagaatcatgataa

SEQ ID NO: 9754 - DNA, 1110 bp, Bacillus anthracis
atgggattaccggctgggattgttggattacctaacgtagggaagtccactttatttaatgcaattacacaggcagggagcagaatctgcgaactatccattctgtacaatgaatccaaacgtaggaattgtagaagtaccagatgagcgtttaaataaattaacggaattagtagaaccgaaaaaaactgttccgactgtatttgagtttactgatattgcaggtatcgtaaaaggtgcgagtaaaggtgaaggtttaggaaataaattcttatctcacattcgccaagtagatgcaatttgccaagttgttcgttgttttgaagacgaaaatattacgcatgtttcaggtaaagtagatccaattgatgatattgaaacaatcaacttagagctaatcttagcagacttagaatctgttgataaacgtatcgaacgtgttgcgaaattagcaagacaaaaggataaagagcccagtatatgagcatgaaattttagtacgtttaaaggaagcttttgaagaggggaaaccagctcgtactgttgaatttacagaagagcaaatgaagattgttaaaggtcttcatttactgacaacgaaagaaatggttatacgtagcaaacgtaagcgaggacgatgttatcgatccttctgaaaacaaatacgtacaaatggtaaaagaatttgctgcaaatgaaaattctcaagtaatcgttgtatgtgcaaaaatcgaatcagaaattgctgagctagacgaggaagagaaaaaagtcttccttgaagaactgggcattgaggaatctggtttagatcaattaattcgtgctgcatatgatttattaggacttgctacttacttcacagcaggtgtgcaagaagtacgtgcatggacgttcaaacaaggtatgaaagcaccacaatgtgccggcgtaattcatacagactttgagcgtggatttattcgtgcagaaacagtttcttacgaagacttaatgacaaacggttctatgacagctgcaaaagaagctggtaaagttcgtttagaaggaaaagagtatatcgtaaaagacggagacgttatgcatttccgtttcaacgtttaatttaat

SEQ ID NO: 9755 - DNA, 1332 bp, Bacillus anthracis
gaagagttatcggtaaaaaataaagcctatgtatggcacccatttacacaaatgaaggattatttagaagaagatcctgtcattattgaacgtggagagggaagaaagctatatgatgtaaatggaaatgaatattgggacggtgtttcgtctatttggttaaatgttcatgggcaccaagtgccagaattagatgaggcaattcgtgagcaattaaataaaattgcccattctactatgttagggcttgctaacgttccgtctattttattagcagaaaaaataattgaagttgtacacagaaggcttgaaaaaagtattctattcggactccggttctagcgctgttgaaattgcaattaagatggcctttcaatattggcagcataaaggaaaaccgaaaaaacaaagatttgttacattaaaagaagcgtatcacggtgatacaattggagctgtttcagtaggagcaatagacttgttttaccaagtggtatagtacacttttatttgaggcaattaaaatgccttatccatatacatatcgttcaccttatggaaatgataaggcggaaattgtaaaaaaacatttagaagaaatggaagagctactgaaagataaacatgaagaaattgcggcgattattgtagaacctttaatgcaaggtgctggcggtatgattacaatgccaaaaggatacttaagagggctacgtaatttatgtacaaaatataacgttttatttattacagatgaggtagcgactgggtttgggcgtactgggaaaatgtttgcatgtgaacatgaaaatgtaacgccggatattttgacagccggaaaaggtttaacgggcggatatttaccagttgcaatcactgtaacgacagatgaaatttataatgcctttttacggagctatgaagaacaaaaaacgtttttccacggtcatagttatacaggggaatccgttaggttgtgcggtagcaattgcgaatctagaactatacgagaaaacaaatttaatagaagaagtggcacgtaaaacagaatatgtggcgacacaattagaagagctctttgcatgtaaacatgtaggggatattcgtcagtgtgggttaatggttggaattgaacttgtgaagaataaagaaacgaaagaagcgtttgaatggacagagagagtcggtgttcaagtatgtaaacgctcaagagagctgggtatgattttgcgcccgctcggtaacacgattgtatttatgcctccccttgcttctacaattgatgagattgatgagatgttacgtattttatataaagcaatctcgggatat

SEQ ID NO: 9756 - DNA, 1110 bp, Bacillus anthracis
atgcgtatggggtacccagcagaaattaaaaaccaacgaaaaaccgtgtggcaatgacaccagcaggtgttgtacatttaattcgtaacaatcacgaagtattcattcaaaagggtgcaggtttaggatctggtttcacagatgctcagtatgttgaagcaggagcgaaaattgttgatacagctgaagaagcttggaacatggaaatggttatgaaagttaaggaaccaattgaaagcgaatacaaacaccttcagcgaaggtttgatcttattcacatacttacacttagctccagaaccagaattaacaaaagcattaatcgaaaagaaagttgtttctattgcatatgaaacagtacaattagaaaaaccgtttttttaccattacttgccccttatgagggaagtagttggtcgtatggctgcacaaattggggcacaatccctggagaaaaacaaggccggtaaaggtatcttacttgcaggtgttcccaggggttaaacgtggtaaagtaacaatcatcggtgggggacaagctggaacaaatgctgctaaaattgcagtttggactaggtgcggatggtaccatcctcgacttaagtgcagaacgccttccgccaattagatgatatttttcggaaatcaagtaaaaactttaatgtctaatccttacaatattgcagaagctgtaaaagagtctgatcttgtaatcggtgcagtattaatcccaggtgcaaaagctccaaaacttgtaacagaagaaatgattaaatcaatggaaccaggttctgttgttgtagatatcgcgattgaccaaggtggtattttcgaaacaactgaccgtattacaactcatgataaccccacttacgaaaaacacggcgttgttcattatgcagtgcaaaacatggcaggtggcgtttccacgtacatcacttcttgcattaacaaacgtaacagtaccatatgcagtgcaaattgctaacaaaggctacaaaaaaaacttggctaaggaacctccgcattactaaaagggatttaaacctttaaaatggctatgtaccatttggagccagttcaagaagctaccgggggtaggttacaaag

SEQ ID NO: 9757 - DNA, 759 bp, Bacillus anthracis
gtgaaaggaatgaaagggatggacaataatgcaccacacggttttttcggaggtggatcggatagttatgaacaaatgatgttaatgggtggagctggtcaacaaggatatggcggaattccgagctggatgggtggatcacctggagggttttcaacatcagtagctggcgtacaaacaggaatgcctacatcaatggggggcttttcgacatcaggggctggaatgcctacagtaacaggaggctttccaacgtcagtagctggcgtacagacaggatttccagtaccaggagtaggagttgtagctggaggaataggtggttttccgcaagttattcatggtcatcatggacatcaccaccatcaaggtcaccaaggtcaccatggtcatcaaggccaccatcatcaccaaggtcaccacggtcatcatgggcatcatcatcaccaaggtcaccacggtcatcatgggcatcatcaacaacaagtacatcaccacggccatcatcatatacatccacaggctattctttatcaaactcatcaaggtcaccaaggccaccatgatcatcacggtcaccacggtcatcaaggccaccacggtcaacacagtcaacagcaccaacagcaccaacaatatcaacaatatcaacaacaatcttcaccttgggcaggtggaattggagcaggggcagcgggggcagcggcaggagcggctagtattagtggagcagcagggcacgctggacacgtgggtcat

SEQ ID NO: 9758 - DNA, 1935 bp, Bacillus anthracis
atggcagatgtagttaaaattactttccctgatggagctgtgaaggagtttccaaaaggcgtaacaactgaagaaatcgcagcttctattagcccaggcttaaagaaaaaagctgtggctggaaaattaaatgatgagatgattgatcttgttacaccaatcgaagaagatggtgcagtttctatcattacattagattctgaagatggcttatatattttacgccactcaacagctcaccttttagcgcaagcgttaaaacgtttatataaagatgttaaggttgagcttggtattggtccagtaattgaaaatggcttctactacgatattgatatggaagaagcaattacagttgaagacttcaagaaaatcgaaaaagaaatgcaaaagattgtgaacgagaacttagaaatcgttcgtcatgaagtaccacgtgcagaagcaattcgtcgctttgaagaaatcggcgatgagttaaaattagatttaattaatgatcttccagaagatgcagttatttcaatttatgagcaaggcgaattcttcgacctttgccgtggtgttcaccttccatctacaggaaaaattaaagtatttaaattattaagcgttgcgggtgcttactggcgtggcgatagcaataataaaatgctacaacgtatttacggtactgcatttgttaagaaagcagaattagatgagcacttacgtatgcttgaagaagcgaaagagcgcgatcaccgtaaattaggtaaagaattaaaactatttactaatagccaaaaagtaggacaaggtttaccactttggttaccaaaaggtgcaacaatccgccgcattatcgagcgttacatcgttgataaagaagcaagcttaggctatgatcacgtatatactccagtactaggaagcagagagctttatgaaacttctggtcactggaatcactaccgtgatggtatgttcccatcaatggaaatggataatgaagagttagttcttcgtccaatgaactgccctcaccacatgatggtttataaaaacgatattcacagctaccgtgaattaccaatccgtattgcggaacttggaacaatgcaccgctatgaaatgtcaggtgcgttatctgggttacaacgtgtacgcggaatgactttaaacgatgcgcacattttcgttcgcccagatcaaattaaagaagagttaaaacgtgttgtaaacttaactctagaagtgtacaaagatttcggtttagagaactactcattccgtctatcttatcgtgacccagaagatactaaaaagtactatgctgatgatgagatgtgggaaaaagcacaaggtatgttaaaagaagctatggatgaaatgggtcttgattactacgaagctgaaggtgaagcggcattctacggtccaaaacttgacgttcaagttcgtactgctcttggaaaagacgaaacactttcaactgtacaattagacttcttacttccagaacgctttgaactatcttacgttggtgaagacggtaaacaacaccgtccagttgtaattcaccgtggtgttgtatcaactatggaacgtttcgtagcattcttaattgaagaatacaaaggtgcattcccaacttggttagctccagttcaagtacaagtaattccagtttctccgcaagtacatttagactatgcgaagaaagtacaagacgaattgcgccgtgctggtatccgtgttgaattagatactcgtgaagagaaaattggttacaaaatccgtgaagcacaaatgcaaaaaattccgtacatgcttgtagtaggtgacaatgaagtaactgaaaacggcgtaaacgtacgtaaatacggtgaacaaaaatcagaaacaatcgcattagatgcttttgttgatatgattaaagtagaaggaaaacga

SEQ ID NO: 9759 - DNA, 555 bp, Bacillus anthracis
gtgtatattttagctatcgcggctttcgtagtcggaacagttgagctaattataggaggaacgcttgatttagttgccaatgatttaggagtatctattagtgcagctggtcagcttatcacaatattttcagtagtatttgctttatcaggtcctgttttattagcattaacagggaagtttgaaagaaaaacattgtatgttggggcattatcaattttcttaatcggaaatattatttcagcatgtagtgtgaattacggcatgttaatgttctcaagggtgatttgtgcggcgagtggttcgcttattattgcactgtcagtaacacttgcttctagcgttgtagaaccgcattttcgtgcgcgtgcaattggaattattttcatggggattagtggatcacttgtacttggagtaccgcttggccttgtactcggaaatgcatatggatggcgtgcaccatttgtactcatttcaatcttaacagttatggcaatcgcttgtatttcattattcttaacgaaagtaacaccgacatcggtatttcatctt

SEQ ID NO: 9760 - DNA, 730 bp, Bacillus anthracis
atgaaagttactttatttgttacttgtttagtcgatatgtttgaaaccaaggttgggcaaagcaacagtggagtggttggagggtttaagtttggaaattgaatttcccggaggccaaggttgtttgcgggcaacctgcttataatagtggccatgtagaagcagcaaaagaagcgatgaaacatatgattgaaactttcgaagatgcagaatatatcgttacgccatctggttcttgtgcgacaatgtttcatgagtatccgcatgtttttaaagatgatccgaaatgggctaaacgtgcacaaaaagttgctgataaaacatatgaatttacacaatttattgtagatgtttttaaggttacggatgttggtgcaagtttaacagggaattgctactattcataaatcttgtcatatgacacgtatgcttggagtaacagaggcaccaggggatttattgtcaaaatgtaaaaggtttaactgtgagagagttaccaaatgtgcaaaattgttgcgggtttgggggaacgttttcagtgaagatgactccaatttctgagcaaatggtagatgaaaaggtagatagtgcaatggaaacaggtgctgattatttaatcggtgcagattgtgggtgtttgttaaacattggcggacgtattgagcgtttaggaaaagaaataaaagtaatgcatattgctgaggtactgaatagtcgctcatgaaggggg

SEQ ID NO: 9761 - DNA, 504 bp, Bacillus anthracis
gtgccgttaacaccattagatattcataacaaagaatttggtcgcggattccgtggctatgatgaggatcaagtaaatgagtttcttgatcaaattatcaaagattatgaattagtcattcgtgagaaaaaagctttagaagaaaaagttgcgcaattagaagggaaattagatcatttctctaatattgaagatacgttaaacaaatctatcgttgttgcacaagaagcagcggaagaagtaaaacgtaatgcgcaaaaagaagcaaaattaatcgtacgtgaagctgaaaagaatgcagaccgtattattaatgaagcgttagtaaaatcaagaaaagttgctttcgatattgaagagctaaagaaacaagcgaaagtattccgcactcgtttccgtatgttattagaaacacagcttgaaatgttaaacaacgatgattgggataaactaattgagttagaagacgaagtagatgagctgttgaaaaaagaagaaacagtg

SEQ ID NO: 9762 - DNA, 799 bp, Bacillus anthracis
gtgaaacagagaattattactggagtggttgctgccgcgctattcattcccatcgtaatttacggtggcgtgccttttacggttttagtgtatgcacttgcttctataggtttatatgaattaattcgtatgaataagcttacgcttatttcagtaccaacaggttttagctgcattattattatgggattattttaattccaagtagtgcatcgggaactgtttacttggattggattagggtaattagaaatcacatttggtgattggtttattacttttatcatatacagtcctttctaagaatacatttacctttggacatggcttcatttttactaatggcaacaacatatgttgcaatgggattcttatatctgaatgaaacgaggatattaggaattaaatacgtattttgtgcattatttgttatatgggctactgattcaggcgcatatttcgtaggaaaagcattaggaaaaagaaaattatggccagaaattagtccaaacaaaacgattgaaggttcattaggtggtatcgtttgtggaattattgtggcacttgtttacaacatgttcttccccagttgaatcgaatgtattgattttaattgcgctgacaattatcatttctatttttggacaaattggcgatttagtacaatctgcttttaagcgtcattatggcggtaaaaaatccggggccatttttacctgggcatggtggtatattagatcgaacagatagttggttattcgttttaccaattctctacttcttattacaatataattaa

SEQ ID NO: 9763 - DNA, 884 bp, Bacillus anthracis
gattatttattaaaagcgttaccgtttgatggagaaagtgcgtgcgtatagtgtacgtactgacaacacgggtaagtgatgcgcatagacgtcatgatacatggagaacagcttcagcggcgcttggtcgttctttaactgcaggtacaatgatgggggcaatgttaaaaggtgaccaaaagctaacaattaaggtagaaggtacttgctccgattggtcctatcttagtagatgctcatgcaaatggagatgtacgtggttatgtaacgaatcccacatgttgactttgaaggaacagaacaaggggaaattacgtgtatatcaagcggtaggtactgaaggatttgtaacggtaattaaagatattgggtatgcgtgagcggtttatggtccaatctccaattgttcagggagaatagggagaagacttcacgtattattttgcagtttctgagcagacgccgtcttctgttggtgttggtgtcccttgtaaatggagacgatagcatattagcagcaggtggattatcccttcaaattattgccgggtgcacagggaagagacaatttcattcattgaagagcgtttgcagaagattcctcctgtatcaacattgatcgaacaagggctttctcccagaagagttactgtatgcagtccttggagaagacaaggtaaaagtattagaaacgatggatgttcaatttaattgcacatgctcacgcgaacgtatcgagagtgtgttaattagtttaggtaaaacggagttagagcaaagtcggagaagaagaagaagaaccagaagttctttgtcatttctgtaatgagcgatacaagttctctaaagaaagatattacaattttaattgagaatttgtaata

SEQ ID NO: 9764 - DNA, 1014 bp, Bacillus anthracis
atgaacaaatttggtttcaatcaaaaaactggaatagatttacctggtgaaagtaaaaatactttactattaaatacacaaattcaacaagtaacaacttctttcggacaaggttctacagtaactccaattcaattaatccaagccgctactgctatagcaaatgacgggaaaatgatgcaaccctatatcgttgacaaagttgtaaatccaacaaacaaacaagttattatggaaaatcaaccgaaagaaattgggaatccgataaaaaaagagacagcggacaaggtaagagacttaatggagcgtgttattacgtcttcaaaaggtactggtacaatgtataaagtggatggttacccaataggaggtaagacaggaacagctcaaattcccaatcctgaaaatggacgatacatggaaggaaaagaaaattatattttttcatttttaggtatggctccgattgatgacccggagttaattgtatacttggcaattaaacaaccaaagttaaagggagacgagtatggagctcagccgcttgcagaaatatttaaaccagttgtgaaaaatagccttgaatatttaaaggtgagaccatacacagaaaaacaaatggccgatgcaacggaaaaatcccaattaaaagtgcaaaactatgtgaatcaatcaatgggtacggtagagaataatgtaaaaaaagagaagctccaaccaataactttaggagaaggaaaaataataaaacaatatccgcagtctggcgaagtaatgagtgaaggagatcgaatatttttattaggaaaaaacgctacaatgcccaatttacaaggttggtccatgcgtgatgtgatgtatttttctaaactattaaaattagatttaaaaacttcaggtacgggatatgtaacaagtcaaagtatcaaaaaaggacaagctatacaagaaggcgatgtattagaactagaattagagccaccgttacaaccgttaacagaagcaaatacaaat

SEQ ID NO: 9765 - DNA, 594 bp, Bacillus anthracis
gtgtacttcttactcggttatatcggggcttcaaacggcaacttaggacaattcgagaacggtggtcaactattagcaactgttatgtatcacttctttgggacaagcggtaatgttttattaagcatcgccattatcttcgcttgtttaacgacagcaattggtgttgtaagtgcatttgccaactattttgcaacagtattaacaaatgtttcttacaaaaagctcgtactatacgtttgtatttttagcttcattatttcaaacttaggattaagtttactaattaaaattactttgcctgtattaattattctatatccaattacaatcattttaattttcgtatcatttatcgataaatatacgaaacgtaaaccttctgtctacatcggggcaatgatcgcagcattccttattagttgtattcatgcacttgataatgtgggaatgataccaaactttattgctaatattgtacacaccattcctttttataatttaggaattggctggattatcccagccatcatcggtggtataattggatactttattccgcaaacagaagctgaaggcgaagtttctacaaaa

SEQ ID NO: 9766 - DNA, 2010 bp, Bacillus anthracis
atgaacaaaaaatcaattcgtgacgtagatttaaaaggtaagcgtgtattttgtcgcgttgacttcaacgtacctatgaaagaaggcaaaattacagatgaaactcgtatccgtgcagctcttcctacaattcaatatttagtagagcaaggtgcgaaggtttattttagcaaagccacttagggccgtccaaaagggtcaagcagtagaagaatttacgtcttactccagtagcagcacgtttaggcgagctttcttgggtaagatgttaaaaaagcagacgaagcattcggacccagttgcacaaagaaatggttgcagcaatgaacgaaagcgacgtattagttcttgaaaacgtacgtttctatgcgggggaagaaaagaacgatgcagaacttgcgaaagaatttgcagctcttgctggacatcttcgtaaacgaagcatttcggggcagctcaaccgtgctctgggtactacagcaggaatgcgcagactccctaccaagcagtttttgttttattaaggaaaaaagagtaggaagttttgggtaaagcacttttctaacccagaaaggtccattccaaggttatcttcggggggggcggaaggaaaagaaaaaaaccgggtttattccgcccctctattaaacaaaggaaaaaactttaactttcgggggggggaattggttcacaatttccttaaagcttttgggccggaaattggttctttcctctatgggaaggccgccaaagtttgatctaggttaaaggaattttatgcaacttccaaagagaaaagggggtaacctttttccatgccgggtggagtttgtatccagggaggatttctcggaatctgcaccaattaaattggtgggtatggactctatcccttctaactgggaaggcgtggacatcggtcctaaaacacgtgaaatttatgcagatgtaattaaaaactctaagcttgttgtatggaatggaccaatgggtgtattcgaaatgactccattcgcagaaggtacaaaagcagtaggacaagcattagcagatgcagaaggtacatactctgttatcggcggtggtgactctgcagcagctgttgaaaaattcggtatggctgataaaatgagccacatttctactggcggcggtgcgtcattagaattcatggaaggtaaagagcttccaggtgtagtttgtcttaacgacaaataagtagcagccaaagaaaaaggacggtgcaaagcatgcgtaaaccaattatcgcaggtaactggaaaatgaataaaactctatctgaagcagttagcttcgtagaggaagttaaaggtcaaatcccagcagcttcagctgttgatgcagtagtttgctctccagctctattcttagagcgcctggtagcagcgactgaaggaactgatttacaagtaggtgcacaaaacatgcacttcgaaaaaaaatggtgcattcactggcgaaattagcccagtagcacttagcgacttaaaagtaggctacgtagtacttggccactctgagcgtcgtgaaatgtttgctgaaacagatgagtcagtaaccaaaaagctattcgcagcattcgaacatggtttaacaccattcgtatgttgtggtgagactgtagacgagcgcgaaagcggaaaaaccatttgacctagtagcacgtcaagtgacaaaagcacttgcaggtttaacagaagagcaagttaaagcaactgttatcgcttatgagccaatctgggctatcggaacaagtaaatctttcttcttctgcagatgcaaacgaaatatgtgcgcacctcccgtaaagttgttgcagaagttgtttctccagctgctgcagaagctgttcgtatccaatacggcggtagcgtaaaaccagaaaacattaaagagtacatggcacaatctgacatcgacggcgctttagttggcggtgctagcttagagccctgcttcgttcttaggtcttctgggggcggtaaaatg

SEQ ID NO: 9767 - DNA, 1746 bp, Bacillus anthracis
gtgtcataccaagcgttataccgaacatggagaccgcaaaaatttgaagatgtagtcggtcaaaagcacgtgacaaaaattctgcaaaatgcccttcttcaagagaaagtttcacatgcatatttattttctggcccaaggggaacaggaaaaacgacaattgcaaaagtatttgcaaaggcaatcaactgtgaaactgccccgggaactgaaccctggaatgaatggcccccctgggttgggaattacgcaagggtctatttcagatgtattagaaattgatgcggcttcaaataacggtgtagatgaaattcgagatattagagataaagtaaaatatgctccaagtgctgtagaatataaagtatacattattgatgaagtccacatgggctttctatgggtgtgccttcaatgggcgctttttaaaaacgttagaagagccgccaggacatgttatctttattttgggcgacaacagaaccgcataagataccgcctacaatcatttcgcgttgccaacgtttcgaatttcgaaaaatatcagtaaatgatattgttgagagattgtcgacgggtgtgactaatgaagggacgcaagtagaagaagaggggttaccaattggtgcgcggggccctgaaagggggatgggtgaaggccctaatcctaatggatcagggaaattttattagggaggaaagggttacaacagaagatgtattaactgttaacgggttctgtttctcagcaatacttaggccaacttagtaaagtgtataacgtgaaaatgatgtatcaagggcgttacgtatcatagatgagatgatgggtaaagggaaagatccagttcgttttatggaggatttcatttactattatcgtgatatgcttttatatcaaacttcaccacaactggaacatatgttggaacgagtaatggtagatgagcaattccggtatgttagagtgaaggaaaggcaacccggaaagttaatctaaggaattcatttcatactcttaggaaggggccaacaggaaatgacccggggacaaatcatccgcgaattttctttagaagtcgttatgtcacaactgtgtcatcagtttatgatgcaagcaaacggtgcagatcgtttacaagcaattatgaacaggatgcagcaattggagaaagagttagatcaagtcaaaaagaatggtgtgccggtcggtttgcaacaggaagttaaagagacgggtgcagcaccaaagccagtgcggacagggagtatgaagattcttgttggacgtgtaaatgaagtataaaaccaagcaaagcgtcaagatttagaacgaataaaaagctgtgtggggtgagttactaggaagactcaaagcatacaacaaagtagcatttgccgttttaattagaaaattggggacccagtagcaggcttgggaggatacttacgttttagcgtttcaatatgagattcgctgtaaaatggcaagcgaaaatcgagaagctatggatacagtggaacaagctttatttgaattggtaagtaaaaaattaaatatgattgccattccaaaaagtgaatgggggtaaaattcgtgaagattttttaaaacgtgaaggtggaagttctgaagaaagcccagagaaaaaagaagatcctcttatagaagaggccataaaattagtagggcaagaactcattgaaataaaagagtaataataattaggaggaattaattatgat

SEQ ID NO: 9768 - DNA, 958 bp, Bacillus anthracis
cccgcaaccataataactgggttttcttggatctggggaaaaaacattatttaatcgcaatttttaccaaaaatcacgtccagaaatttaccggggatcctaaattgaaatagggagaattgggatcccataatcacattgattatgaatgttgaagaagaaattatggaaatgacaaacggttgtttatgctgtactgtgcgggaagatttactcgttgcgttaaaacaattactggatgtaaaagcagaaggtaaaatggactttgatggattagtaattgaaacaactggtcttgcaaatccaggtcctattattcaaacattctttttagatcctgttattcaatctgcataccaaattaatggtgttgtaacagtagtagatagttatcatatacataaacattttgaaaaaggactagaagcaaaagaacaaattgcatttgccgatgttatattagtgaataagttagatttaattgaagagagcgaaaaagaaaacctcttacatgaactgcaaggaataaacccgactgcaaagttaattcagtcgactaactgtgatgtggatattccatcgttactaaaaattcaaacgtttaaaacgaaagatacgttacaaatttatcctcataaagagcataatcatctagaaggtgtaaaatcgtttgtactacgcgaagagcgtccgctagatttacaaaaactgaatgaatggatgtcagctgtcgttcaagaactaggtgaatatttatatcgctacaaaggaattttatcaattgatggagtagataaacgcatcgttttccaaggtgtgcatacactgtttgctgcatcatatgatagagagtggcaagagggcgaagaacgagttaagtgaaagtgttttcatcggaaaaagatattaataaagaatggttcccagaacattttgaggagtgtgtgaaataagtctg

SEQ ID NO: 9769 - DNA, 530 bp, Bacillus anthracis
ttgatgaatcgtgttatcctcgttggtcgtttaactaaggaccctgacttacgttacacgcccaatggtgttgcagtagctacttttacgttagctgtgaatcgcgcatttgcgaatcaacaaggtgagcgtgaagctgactttattaattgtgtaatatggcgtaaacaagcagaaaacgtagcacattaattttaaaaaaggtagcttagcaggcgtagatggacgtcttcaaactcgtaattacgagggacaagatggtaggcgtgtatatgttaccgaagtttctgcggaaagggtacattttttaaagccgcgtaatggcgggggggagcaacgtgggtccttttatccgccaaccatcaagagctggtttcgggaacccaggctctaacccatttgggcaatctaataatttcgggccacccagggtacccaggggaactctgggatttcccaagaatgacgatccattttcaaatgtaggtcaaccgatcgacatttccgacgacgatttaccgttctaatac

SEQ ID NO: 9770 - DNA, 366 bp, Bacillus anthracis; identical to SEQ ID NO: 9131

SEQ ID NO: 9771 - DNA, 759 bp, Bacillus anthracis
atattagacgtacctctctttctttaggtatggaaactagggtggcgtggtcacgaaattaatcgagcgtaacaatacattccaccaagtaagtcacaagtattctcaacagctgctgataaccaaccagcagtagacattcacgtattacaaggtgagcgtccaatgtcagctgacaacaaaacattaggtcgtttccaattaacagaccttccaccagcaccacgtggtattccacaaatcgaagtaacattcgatattgatgcgaacggtatcgttaacgtacgtgcgaaagatttaggaacaagcaaagagcaagctattacaatccaatcttcttcaggtctttctgatgaagaagtagaacgtatggtacaagaagcagaggcaaatgctgacgctgaccaaaaacgtaaggaagaagttgaacttcgtaacgaagctgaccaacttgtattccagacagataaagttgtaaaagatttagaaggtaaagtggatgctgctgaagttgcaaaagcaacagaagcgaaagaagcattacaagctgcgattgagaagaacgagcttgaggaaatccgtgcgaaaaaagatgctttacaagaaattgtacaacaattaactgttaaattatacgagcaagctcaagcagctgcagggcaagcagaaggtgcagaaggagcacaagatgctggcgcgaagaaagacaatgtagtagacgctgagtttgaagaagtaaaagaagacaagtaatttaac

SEQ ID NO: 9772 - DNA, 758 bp, Bacillus anthracis
aaagtgattaaactacaggatcgtgtaccaaagttaaaaaatcaacagaagaaaaagaagaaaaatgttaatcatcggttgattttatacatatcaattttatttttattagtgctctttttaatttattttcgatctccgcttagcaatataaaaaagataagtgtgtttggaaatcattatatgacagatgaacaagtgatgaaggaatcaggtgtgacgtatgatacaagttatttccgggtgacagcacataaagcagaagaaaacttaacgaaacgaaaagaaattaaagcagtaaatgtaaagaaacgttttccaaataaaattgacgttcatattgaggaatatttaacgattggttatataaacaaagatgggaaattacaaccgttattagagaatgggaaaacacttgatgtactcccgaacggaaagcttcctgttgcagcgccaatttttgaaccttttaaagagaagaagatgaaggagttattgctgagctgaaaaatacccaccactatttaaaggtctatttctgaaattcgttattccccgacgaatgcgaatgaagaccatcttactttatatatgaatgaagggtatgaagtaagtacatcgatcaaaatttcgcaaagcgtatggaaacctatccacttatcttaaaaacaattgagccgggtaaaaaggtattaattgacttagaagtaggggcatatacaaaagaattaggagcggaagaaaaaaagaatagaatg

SEQ ID NO: 9773 - DNA, 432 bp, Bacillus anthracis
atgttaatgccaaaacgcgtaaaatatcgtagagagcatcgtggtaaaatgcgtggtcgtgcaaaaggtggaactgaaattgctttcggtgaattcggtttacaagcacaagctgcttcatggattacaaaccgtcaaatcgaagctgctcgtcgtgcaatgactcgttacatgaaacgtggcggtaaagtatggattaaaattttcccttctaaaccttacactgcaaaacctctagaagtacgtatgggttccggtaaaggggcaccagaaggctgggtagcagtagtaaaacctgggaaaattatgttcgaaatcgcgggtgtatctgaagaggtagcacgcgaagcattacgtcttgcagctcacaagttacctgtgaaatgtaaattcgtaaaacgtgaagaaaatggtggtgaatctaatgaaaac

SEQ ID NO: 9774 - DNA, 999 bp, Bacillus anthracis
atggcagaagtaaaagaaaagcgccatgaagagcttggcttaagtgatgagcaagtgttagaaatgttccgtacgatgttacttgcacgtaaaatcgacgaacgtatgtggttattaaaccgtgctggtaaaattccattcgtaatttcttgtcaaggacaagaggcagcacaagttggagcagcatttgctcttgatagagagaaagattatgcattaccatactaccgtgatatgggtgttgtactagcgtttggtatgacagcgaaagaactgatgctatctggtttcgcgaaagctggagatccaaactctggtggtcgtcaaatgcctggtcacttcggtcaaaagaaaaatcgtattgtgacaggttcatctccagtaacaacgcaagtaccacatgcagttggtattgcattagctggaaaaatggaaaagaaagatttagtaacgtttgttacattcggtgaaggttcttctaaccaaggtgatttccatgaaggtgcaaactttgctggcgtacacaagttacctgttattttcatgtgtgaaaataataaatacgcaatctctattccagttgaaaaacaattagcatgtaaaaatgtatcagaccgtgcaattggatacggtatgcctggatatacagtagacggaaacgatccgcttgcggtatataaagctgtaaaagaagcagcagaccgtggccgccgtggtgaaggaccaactttaattgaaacagtatcatatcgtttaacagcacattcaagtgacgatgatgatcgtgtttatcgtgataaagaagaagtagaagaagcgaagaaaaatgattcaattgtaacatttgctgcttatttaaaagaggttggcgtgttaactgaggagtctgaaaaacaaatgttagacgaaattatgcatatcgtaaacgaagcaacagaatatgcagaaaatgctccgtatgcagcacctgaagatgcattgaagcacgtatacgcagaa

SEQ ID NO: 9775 - DNA, 435 bp, Bacillus anthracis
atggatgaattatataagaagttaaaagcatatgtagataataacggtattagtcaagtgaatgtatatcgagaggatacgggagtaagcgtcgttatagtagataatttaatatttgatacaggtgacgcgaatgttaaaccagaagcgaaagagataataagtcaattagttgggtttttccaatcggtaccaaatcccattgttgtagaaggacatacagacagtagacctattcataacgacaaattcccttcaaactgggaattatcttctgcgcgagcagcaaatatgattcaccacttaatcgaagtgtataatgtggatgataaaaggctagctgcggtaggatatgcagacacaaagccagttgtaccaaatgattcaccgcaaaattgggagaaaaaccgtcgcgttgtcatttatataaaagaa

SEQ ID NO: 9776 - DNA, 667 bp, Bacillus anthracis
gaaaacaagtcctttttggatgaatggggtaaagtcatatgggaagcaaccattcaaacatttcaaatgacatctattgcactatatcatctctatccttattgcactaccacttggtgtcacacttgttgtaacaagacctggtgggcagcacgaaaataaaaccggttactcaattcctaatacaattattaatatcattcgctcacctccgttcatcactctattaatcttccattttaccctttaacaaaatttctaatggggaacatccattggtgtgcaaggtgttatcgtaccgcttgtcgtcttcactgctccctatatcgcaagattgatggagacagctttattagaagtcgatcgtggtgtgattgaagcttaccaagcgatgggcgtttctactatacaaattatttggcacgttatggtgaaagaagctcgtccctcccttgtacttggattaacaattgcaacgattggcttaatcggtgctacagcaatggctgttcttgtaggcgctggtgggctaggggacttagcatatcgcttcggacatttacgctatgaacctgaagtaatgtatgcaactgtctttattttaattatcctcgttcaaggattacagtctttagggaatggtattgcacgaagattgaagaaagat

SEQ ID NO: 9777 - DNA, 675 bp, Bacillus anthracis
atgaacggtattcgtgatgttgtcaaagaagaacagccacgggagcgtttattgttagagggagctggaagtttatcaaatcgggagcttcttgcagtgttactgagaacaggttctaaggaagaatcagttttgaagttatcagataaaattttacatcactttgatggtttacgtatgctgaaagatgcaacgttagaagagcttgtcagtatacatggtgtcggggttgcaaaggcaactcagcttatagccgcttttgaactcggtagaagaatggtgcgtttagaatatcaaaatagatacagcattcgaagcccggaagattgcgccacatacatgatggaagaaatgcgcttcttgcagcaggagcattttgtatgtttatatttgaacacaaagaatcaagtcatacataggcaaacgattttcattggaagtttaaattcatcaattgtacatccaagggaagtttttaaagaagcgtttcgccgtgcagcagcctctatcatatgtcttcataaccatccctcaggagaccccgcgccgagccgagaagatattgaagtaacgaaacgcttagtagaatgcggtcgaattatcggaattgaagtgcttgaccatattataataggtgaccataaattcgtgagtttaaaggaaaaaggtcatatt

SEQ ID NO: 9778 - DNA, 1317 bp, Bacillus anthracis
atgaacgggaatactgcaaagaaaatagaagttcaagctgaaaataccgcactaaacaatgagcaatatgcagatccgaaaaagtggcataagcaggatactacatgggcactcagtctatttggaactgcaattggagcaggggtgctctttttaccgattaatgcaggttcaggtggtttattatctttactactaattacattgcttgcatatccagttatgtactactcacatagggcgcttgctaaaatgatatacgcttctaattctgctgatgaggggatcacaggtacaattagagagtatttcggaaataaagcgagtatcatttttaacatcgtatatttcggttcaatttatacaatcgtactaatgtattcggttgcgcttacaaacactgcaagtagttttatcgtgcatcaattgcacatgccagaacctccaagagcaattttatcacttgtattagttcttggtcttatcgctatactaaattttggtcaagatattactgtaaaggtaatgagtatgttagtgtatcctttcatcgtttctctactgtttatcgcaatatctttaattccacagtggaatacgtcaatgctgagtttttcagctgtttcaactgcttcaacaggaacaggctattttgggacgatagtgatgattttaccaatcatcgtattctcatttaatcattcacctatgatttcatcatttgttgtgaaacagagagctacgtatggaatcgaagccactgatgcgaaatgtgcgcaaatacaaaaggtttgttatattatgacattcgctgttgttatgttcttcgtttggagtagcgcattgagcttgactccagatgatataaaaatggcaaaagaacaaaacctattaatcctttcatatcttgcgaatgagcttaattcacctgtaattacgattgcagctccaatcattgcttttgtggctattacaaagtctttccttggccattatatcggagcatttgaagtaatgcgtgacatgattattaagtttggtaaatcacgtggaaaagatattgaagaaaaaacaattaagacaataatccttacttttgttgtattatcatgctggtttgttgcttatacaaatccaagtattcttggacttattgattctctaagcggtccattagttgctgctatcttatgtctattaccgatgtatgcgattcaaaaagtaccggtattagctaagtacaaagggaaaatgagtaacgtatttgttattattgtaggtgtacttactgttttagcaagtattaagtcattattc

SEQ ID NO: 9779 - DNA, 1011 bp, Bacillus anthracis
atgcaggagcgatattcaaggcaaatattattttctggtgttggagaagaaggacagagaaaaattagagagaagcatgtgcttattattggtgctggagctcttggtgcagcaaatgcagaagcgattgttagagcaggtgttggaaaaataacaattgcggatcgtgattatgtagagtggagtaatttacaaaggcaacaattatatacagaagaagacgcaaagcagtataaaccgaaggcggtagcagcggcagagtatttaaaagcaattaattctgaggtggaaataaatccggttgtgactgatgtaacagtgcaggaaatggaagagctagtgaaggatgtagatttaatattagatgcgacagataattttgaaacgcgtcttcttattaatgatatttcacaaaagtataatattccgtggatatatggtggttgtgtcggaagctacggagtaacgtatacaattgtaccagggaaaacaccgtgtttccgctgtttaatggagcatccagcaagcggagcaacatgtgatacggctggtattatacagccggcggtgcaattagtagttgcgcatcaaataacagaagcgttgaaaatattagtagaagactttgaggcacttcgtgaaacgatgttatcgtttgatctttggaataatcaacagatggcatttaaagtgaatagacagaaaaaagacacgtgtttatcttgcggaaggttacgtacatatccgagtttaacttttgaagcacaaacgaaaacagaagtgttatgtggccggaatacagtacaaatccgtccaggtgtgcgaaatgaatttaatttagaagaaattaaaaagcgcttacaaagaagtgtggatgtaaaagctactccgtatttagtatcgtttctggtagaggaatttcgttttgttttatttacagatggtagggcgtttattcatgggacgaatgatataaatgtagcaaaacgtttatatacaagatacataggt

SEQ ID NO: 9780 - DNA, 775 bp, Bacillus anthracis
aaagaacggaagaaaaaaattttttttcaacgaatactttacgttgtttttttaagtacttttttctattccgtgtatgaattaagtgatatttttatgggattactatgaaaatcgcaaaggtaatggccgaagccccaaaacttttatgaaaaaagtccgatggaagagcaatcacaagacggggaagtgcgtaaacagttcaaagggcctgcagcaaattaaccaagaaatagttgggatgattttcgatggatgatacacaaattaattatccaatcgtatcaagcgaaagacaatgattactatttatttcgtaattataaaggtgaagatatgagagcaggaagcatctttatggactaccgtaatgatgtgaaatctcaaaatcgaaatactattttatatggtcaccgtatgaaagatggttctatgtttggaagtttaaagaaaaagtaagagaaggagttcttcatgtcgcatcgtaaattatattccgatacattatttgagggatatgttcttgaagtgttctcggtgtatacaccaccaactgattttttattacattgaaacggattttagcagtgatacggaatacacatcatttttggagaaaattcaagaaaaatcgttgtataaaacggatacaacagtaacagcaggtgatcaaattgtaacactttcgacgtgtgactatgcactcgatccggaagcaggaaggttagtcgtacatgcgaaactagtaaaaagacagtaaaaaaagtatagaata

SEQ ID NO: 9781 - DNA, 534 bp, Bacillus anthracis
atgaaaaaacgtttagttatgatcggaaatggtatggctggcatacgttgtatggaagaaatattaaaacatgattgtgattcatatgagattactatttttggagatgaaccacacccaaactataatcgcattatgctctctcatgttttacaaggtaaaacaaatatacaagatatcattatgaatgaatacagttggtatgaagaaaacgaaataactttgtatacaaatgaaagagttcaaagtattgaccgagaagaaaaagttattatgacagaaaagaatcgtactcttacatatgacaagcttattattgcaacaggttctagtgcttttattttacctgttgaaggttccactcttcctggtgtaacaggttttcgaaccattgaagatacacagtttatgatggatactgctaaagaaaagaaaaaggccgttgtcattggtggtggattacttggtttagaagcagcacgaggtcttattgacttaggaatggacgtacatgttgttcatttaatgcctagc

SEQ ID NO: 9782 - DNA, 981 bp, Bacillus anthracis
atgacgaagacgtgggagcagctttctgctatacaacccatcggtgtaaaaatgttgatgaatagcatcgcaaaagagcgtatatcccacgcttacttgttagaaggagagaaagggacaggaaagtttgcgacagcaattcaaatggcaaagagtttcctctgttctcagcggaatagggtagagccttgtcatgtatgtacaaattgtaagcgaattgattcaggtaaccacccgaacttacatattgtaaaaccagacggattatctattaagaagcaacaaattcatgatttacaagaagagttttccaaaacaggattagaagcaaataaaaaggtatatatcattgagcacgcagaccgtatgacagcaaatgcagcgaatgcactcttgaaatttttagaagaaccaagtagtgatacaacagctattttacttactgaacaaagtcatcaaattttaaatacgattttatctcgctgtcaagttgttacatttagaccgttacctacggaatctttaattagaagattgcaggatgaaggtattacggtatctttatcgacacttgctgcacaactcacgaatagttttgatgaagctttaactttatgtaatgatgaatggtttgcacaagcacgagctttagtgataaaattatgtgaagcgctcgaaaaagataaagcctctattttttttgtacaagaaaaatggggaaaacactttggagagaaagagcaattacagcaaggtttagatatgttactccttatttataaggatttattatatgttcaacttggagaagaagatcggcttgtttttcgtgagcagaaagagatgtttgaatctttctcctatgctcagaagcgcattgtatcagctctctttaatatattagaggcaaaaaatagaatcaacgctaatgtaaatgcgcagcttgtgttcgaacagttagtgttgcggttgcaggaggga

SEQ ID NO: 9783 - DNA, 711 bp, Bacillus anthracis
gaaaaaccagtgaactttactatatcagcagctgcaagcttacaagatgcgctaaaagaaattgaaacaaaatataaagaaaaagaacctaatattaaactttcttttaactttcggcgcttctggtgcacttcaacaacaaatcgaaccaaggtgcacttgctgatttattcttctcagcagccgaagattaaattcccaaactcttgttaaaaaaggattcattaatgaaaaggaaggggaaaaatcttcttggaaatgagctcgttcttagtcgtccccaaaagatagttctcttacaaaaattcaagatttaaaagatgaaaaaataaaaaaatcgcacttttggcacacctgttctctgtacccttgcggggaaaataccgcaaaagtttctttcacacatgaaaatctttggaaatgacgttcaaaattaaagtcatatttccaaaagatgcgccccaagtgttaacatatgtagaaacaggtaacgttgatgctggtattgtatacaaaagcagatgctctcatttcagacagaagtaaaaactcggcgagacagcagcaactacttctcatgagccaatccactatcctttaggcgttataaaagaatcgaagcataagaaagaggcgacttcattttatgagtatttgcagtcaaaagatgcacaatctatctttaagaaatatggatttacagtcctacca

SEQ ID NO: 9784 - DNA, 220 bp, Bacillus anthracis
aacaaatttcgtgtgtgcgatgattgccaggcaacgaatgttaaaacgttgattccaaagttaaaaaaagttagattcatgtgcaacgattgaagttggatgtcagtcttactgtggtcctggccgtaaaaaatcattcgcatttgtaaataatcgtccagttgcggcgccaacagaagacgaattaattgtaaaaattgaagcaaagttaaataagtaa

SEQ ID NO: 9785 - DNA, 609 bp, Bacillus anthracis
gtgaaaccgttatatatgacggcaatcgcagctcttgccacatttattttaggacttattttaggattgttgctctttatgacagcgaaagataatttatgggaaaacaaagcggttaacacggcgattggagcgttcgtaaacattttccgctcgataccgttcatcattttaatcattttattaatcccattcacaaagattctgcttggaacaattcttggagcaagtgcagcacttccagctttaattattggagcagcaccattttacgcgagaatggttgaaatcgcacttcgtgaaattgataaaggtgtaattgaagcttcgaaagcgatgggagcaaaaacaagcacaattattttaaaagtattgattccagaatcgttaccagcattagtatctggtattacggttacgacaattgctttagtgggctatacagcaatggcgggagttgttggtgctggtggtcttggaacacttgcttatttagaaggattccaacgaggaaataacgatgtaacaatcgttgcgaacatttggggatttacaaagtggatttttccttccggggattgggggatccgggaacaactccccattaat

SEQ ID NO: 9786 - DNA, 1150 bp, Bacillus anthracis
gagaagaagaggattgagatttttccggaaacatatgggtttcatccccgtatatgtggttcgtttatctattatttccaatttaccatttagtgcaggcgtcagggtggaagcttataattgggagcggtatgttgataatttttaatatcacatacccgtcactttattttgtgcagagaacgtttattttttttggcatgtattcaaaatgatactcatctttttatttgctttattttacaatccttttatgatattctttggctttttcacggcaagtgcgatgggatttgcaccaagtaagaaagtatttcgggtattactatgtttggtagttataatgcttggaagcattgtattttgtaatatgaaaatcactacacccgacaagtttagtaaatatcgttccaatgtttattttaatgattcttacaccatttggtatgcgcaactttaatcagaaaaaaatgttaagaaatcaattaaatgaagcgaatgagcaaattaaagacttagtaaaacgtgaagaacggcagcggattgcaagagatcttcatgatacgttagggcatacattatcactcattactttaaaaagtcagctcgtggagaagttaattgtaaaaaatccggagcgtgcaagtacggaagcgaaggaaattacacaaacatctcgcactgctttaaagcagctaagggaattaatttctgatatgcgtatgattacagtagaagaagagctttgagcaaataaaagcaatcttacaagctgctaatattagattagagattaaacaagaaacgagtgcgagttctttatcaccaattgaacaaaatattttaggaatgtgtttacgtgaggcagtgacggattgttgtaaagcatagtaaggcgacgcgttgcacagtttctgtactagaatcacaaggcgaattaattttgacggtagaagataacggaattggcttagcagatcaaaaccatgatggaaatggcattcgtggtatgaaagagcgtattgctcttattgatggatctgttgaactggatatgattaatcccgggacactattaacagtaaaagttccagttgttattcgaacaggaaaagatggggtgagggcatggatcgaatttatattgcag

SEQ ID NO: 9787 - DNA, 2216 bp, Bacillus anthracis
aatatgactaaatttcataccaataagggagcagggtattttatgattttattcctcctgctctttttgctgttattagcccgatttttttacatacaagcaacaggatcagttcataatcaagatttgaatgaacttgctaagcaaaaacatagtaaaacaggagttctagaagcaaatcgcgggacgatctatgatcaaaatggtcatgtattagcgcaagatgcaaactcttataaacttgtagcggaattaaaaggtgcgaagccggttgaggataaggaggataccgccaagaaaattgcgtccgtactccggaaaagatgaagagaagattttagctacgttaaataaagaagatagaagtcaagtggaatttgggaaattaagtaacgggcttgtcgcaagaaccaaacgaaccaattcgggcctttaaatttcgccggggtatcttttatttactgaaaatgcaagagtatatccgaagcggtgatttcgcatccttatggtcgtaagtcatgcgagaactgatgaataaaggggattgctatggggccaaatttggtttctaaaaaaagattggataagtatttaggagcttctcatggtccaagtagcttatacaggcgatcgtagaggcgtatctcttgtacggccgaaaagtaaacgtaaaagcacctaaaaatggagataatgtatatttaacgcttgaccaacgtattcaaagttatttagaagaatgcaatgaaagaagcgagtaaacattatgaaccagaaagcttaatagggatttgttgcgggatcaaaaacaggggaaaatattaggaatgtctaagtagccctagttatgatccgaaccagggaaaatatcagtatttttataatgatgcaatcgcaaatgcatttgtaaaaaatcacaacgatgtaaattttcacacttatctcagctattaatgaaggtgtgtataagggacaagattattatcagtctggtacatatccagttggggaaccgcaaaataaaagatcataatggcggcgctggatggggatctatcacatttgatgaaggagtaagacgctcttccaacgtagcatttgcaattttaggggatcaaaaacttgtcccagaacgttttcgaaaatatattcatagctttggattagatgaaaaaacaaagattgatttacctggtgaaggttcaaataccattgtattcgatcagcaaatacagcaagtaacaacagctttttggacaaaggtctactgtaacaccaatttcgcctggtccaagctgccactgctattgcgaacgatggggaaaatgatgaaaactttataccatttgataaaattgtagatccgataacagaggaagtaaaattagaacataaaccagaagaagtgggaaaacctgttacaaaagagacagcagcgcaagtaagacagttattagagcgtgttgttacatcaccgaaaggaacaggaactgcttataaagtcgatggatattcagttggtggtaaaacaggaacagcacaaattcccgatggaaaaggtggtttatatgccggggaagagagatttatatttttcgtttttaggtagggcacctatggacgatccgcaacttgtggtgtatgtagctgttaaaaagccgaaattgaaagatgatgagagcggtgccacaaccttaggctgatatttttaaatatgtaacgaagaatagtttagagtatttaaagattaagcctattgaagtgaaagatccgaagaaatatgtgaaagagcaccaacccgctgttccagatgtacccgaaaaaacgatggaagaagcgaaaaaagccattgataaagcaaaactacgtccaatcgtattaggtgaagggaaagtacagcaacaagtgccgaaagcaactgaacaaacattgaagggtggccgggatttttttggggggagataaccctacaatgccggatattcaaggttgggccttgggtgatgttatgattttagcaaaaacataaaggtttaccttaaaacttattggtccgggatacgttactgaaccaaggtgtcccagaagaaacattgttgcaacctggtacagagttaggtgtaacacttgtaccgccacttgaaccacaacaagaagcagaaaaaccgtaatggtaaaagagaagatgttctaattaaataagtacaagcatatat

SEQ ID NO: 9788 - DNA, 588 bp, Bacillus anthracis
catcaccatcaagaagtagatactgttcatctcttgtttacattattagaagagcaggatgggctagcagtacgtatttttcaaaaaatgaatgtcgatatagaagcattaaaacaaggcgtagaaaaattttattaagaaaaaagcccttccgtaacgggaaagcggtgcagaaagcaggtaaatttatatataacaggtgcccctgcaacaactggcttgtaagagcaggaaaagaaacagagaaaattgcgagaagattacattttcagtgggaacatggattacctggcttttactggagaaaaagggcgatataagcccaattgtttacaagatttccttaattacgaaagaacaacttattacagtctttaatgacagttcggggggaatcaagagtggactagccaaatcccagaagcactttatgaagcgttagaaaaatatggttcgtgatttagtgcgagaaggtgaaagcaggggaaaattgacccctgtattcgccggcgatagtgaaattcgccgcgtaaatccgcattctttcacgtaaaaggaaaaataaccctgttttaattggtgagccca

SEQ ID NO: 9789 - DNA, 1463 bp, Bacillus anthracis
aaatcaattgcttcaaatattttttataaaatactgctcaatacgtttaatattatccttccaagttttagatggtccttacgcatatcgaacgttaggagcaacttcaatcggaaccgttaatcttgctgaaacttttttcaattacttcttcgtgtttgccgtatttggcgtatatcaatatggtttacgcgaaattagcttaattaaaaacgataagaagaaagtttctaagttatttacaagtctctatgtaattaacttcacaactagtattttagctttatcatcctttgtgctctttagctatattggatatggacatgaaagtctatttcctgttcttcttattttcggttttaattttatatctaacatgttttatgtggaatggtttaatgaagcatatgaaaattatgacttcatcactaaaaaaacagttatcgttcgattaatctatgtcgtacttcttttctctttcattcatggggttgacgattataaaacatatgctggtttattagtattatcaacatttttaaaccactctaattagctttgtatatgtgaaacgccaagtgaaattggatttttccgactagacgattattcctcatttaaaaccgttactattagtattgattttttcaaatgctaatattttatatactcaattagatcgtcttgttttaggagtatatgttggaaaagaagaagttgcatattacgtaatggcttttcaaattatgatgattattaacacacttatgttaagtgttgtacaagtaaccgttccaaggctatcttacttatcaggaaatgcatctgaaatggagtatgaatctttactaaataaaatttcaaaagtatatttcattaccctattccctgctgcaattggtttaatgctcattgctcatggagctgttgttatttacggtggacaacaatttgctgcagctggtaatacattaattgtcttcgccttctatatgattacggttggtattgagtccattttatcgaatcaaattatttatgtgaaaaagaaagaaagcattttagtgcgatttttattcatttgcggatttatcaacttagcatctaatattgcactcatattcttccatgtacttacaccaacaacagcgattttcacaacaacaattgcgaactggcttcttaattacatttgaatatatttatgtgaaaaagaaactaaaagtgaattatacgttattcgatatacaaaaacttaaatatctattttattccctaacatttataccgatagcattcgttattgatatgattgtatctggacaaatactacaagtggatccgagtaataataacgtgtgggattaacgtatgcccttatcctctttataacaaaggatgaaattctcttttcgctacttgaaaagatactagcacgattcaaaaaggcttaaacgcaatct

SEQ ID NO: 9790 - DNA, 864 bp, Bacillus anthracis
atgccgcagcaaaaaaactttgtaacaatgccagcgcaacatcaaaacaaacagcctggcattgaatcattaatgaatcctctaccgcagtttgaagatccaaattataaaggaagcgaaaagctaaaaggaaagaatgtattaattacaggtggagatagcggaattggacgagctgtttccatcgcttttgcgaaagagggagcaaatattgcgattgcgtatttagatgaggagggagatgcaaatgagacgaaacaatatgttgagaaagaaggcgtaaagtgtgtattgttgccaggtgatttaagtgatgaacagcattgtaaagatattgtacaagagactgtccggcagctaggtagtttaaatattttagtaaataatgtcgcgcagcaatatccgcagcaaggactagagtatattacagcagaacagttagaaaagacttttcgtattaatattttttcttattttcatgttacgaaagcagcactttctcatttaaagcaaggggatgtcattataaatacggcatctatcgttgcatatgaaggaaatgaaacgttaattgattattccgcaacgaaaggagctatcgttgctttcacaagatcactttctcaatcgttagtgcaaaaaggtattcgtgtaaatggtgttgcgccaggaccaatttggacaccacttattccatcaagctttgatgagaaaaaagtatcacagtttgggagcaatgttccgatgcaaagacctggtcaaccatatgaattagcgccagcatatgtatatttagcgtctagtgattcatcctatgttaccgggcaaatgatacatgtaaatgggggcgttattgtaaatgga

SEQ ID NO: 9791 - DNA, 2342 bp, Bacillus anthracis
gttatggtagatcggtcattagaaatgattattggtatgatggggattttaaaagcaggagcagcctatttaccaatcgaccctaactacccaactgaacgaattgaatatatgttacaagatagtcaagcaaaatatttacttagtaagcgaacagaagaagtattgccacaatttgcgggtgaagtactgtatcttgataaagaatatctttttcaaggtgaagaaagtaatttagtacgagaacataatcctaatgatttggcttatgttatttacacatcaggatcgacaggaaatccaaaaggggtaatgatagaacaaaaatcgctagttcattttttaaatgtaatgagagaaaaagtaaaggctaatcaatcattcttgtttcttgctagtgtatcttttgatatttccttgttagaaatatgtcttcctttaacgcaaggttcaaaagtagtaattgctacggaggaccagtttgcaacaaaagaattggctcatttagtcaaaaaacataagtggatttatgggaatcaacgccatcgcgaatggaagtgattttgagtgatccagaaggggcaaattttctaaaagatttaaaatctattttattagcaggagaagcattttccattgatttggttgaaaaaattcgttgtatcagtgaagcaacaatttcaaatatttatggtcccacagaaacaaccatttgcgcaacagtaaaagacttgagcactmmcaaagaagttacgattggcaaacctaacccgaattatcattcctatatattgaataagtatggccaattaaaaccatttggaattcctggtgaactctgcattgctggcgtagcggtagcacgagggtatcttggtaaaagtaaactgacagatgaaaagtttgtaccgagtscttttgcggcaggggaaatgatgtatcatacaggtgatctcgttcgrtggttgcctaatggagaacttgaatatttaggtcgaatggatcatcaagtgaaaattcgggggtatcggattgaattaagagaaatcgaaactcaattaagggaatatccagaaataaaccaggttatcgwtgwtgatcaagtgmatggaaataggaaattattagctgsctactatgtatcggataacakggtgtcttttggtgaaatcagaaaatatttaagtgataaactacctgagtttatgattcctgaaaaaatgattcaggtagaagagattccattgaatccaaatggaaaagtggatagaaaaaggttattggatataacacaaacggattatgtatcaattccatacgttgccccgcgcaatgaaattgaacaaaaattagtgtgtgcgtgggaaaaagttatggagattgagggaatcggtattcatgatawtttttttgcattaaaaggagaatccattaaagcacttcaggtaattaatttattaagaaaagactgcttaaaaataagtacaacagatttttttaagcaccctacaatcgctcaactgagttcttgtgtaaagttagagcataaagaggaaaactttgaaagtagaccaactcatgttaaagatttgtctaatccattttccttaacagaagttcagatagcgtatatgttaggaaggaattcacagtttgaattaagtggtatttcacctcaaacatattttgaatatgaaacagcattggatatcaattgtctttcaaaaagttttcaaaaggtaatccatcgtcatccaatgttgcgagctgtaattttaccagagggaaaacaacaaatattacaaagcgttcctgattacgagattgaaatagtgagtctcatagatttagatgataggaatcaaaatgctcgcttacaagaagagcgttctcgaatgactaaccatgtattccctttggggcaatggcctttgtttgaattgaaagcttttcttttaaaagaagacaagtatttattatgttttcgatacgatgctttattaatggacggagcaagcatgaacattgttggacaggatttgttgcattattattataaaccaaatcaaaaattagaatctttatcttttgattttcaagattatatgtttatctatgatgaaatggaacaaagcgaagaatataaaacagcaaaagattattggacaagtaagcttcctgactttccgtttgcaccttctttgctgttaaaaaagggtccagcagagattgctactcctaaattccaatcacttacaaaaatcctggacaatgaaaaatggacaaagctacgaaagttagcacaagagaaagaggtaacgccttccgctctactttgtaca

SEQ ID NO: 9792 - DNA, 1015 bp, Bacillus anthracis
aaaaaaccttggagtttcctcattgttactgcattacttatcgttatgacatcattgtcagcgatgaaagggagtttagaagtaggtattgttgaacttgtacaagggatatttacaggtggaaatgaagatgttgaagtgattaaagatttacgttttccgcgtattattattgcgttattcactggagcggctttttgctgtttctggggggctttttcaaagctgttatgaaaaatccactcgctgatgctggagtgattgggatatcttcaggagcaagttttatgacacttgttattataacgttgttcccgcaattctttttctggacaccagtatttgcctttttaggtggtgcgtttgcgtgttatctcgtttatgcattttcatggaagtcagggttaagtccacttcgtattattttagttggtatagctattaatgcgatgtttactggattaaatgaatcgttcattacgatttgtggatattcatttaggagtattagccaaacgacgactttctaatataacgatgaaaacgtgggggcgatgtagaaataatggttacgtatggaacaattggtttggttcttgctctgtttgtaggagcttggtgtaatttattatcactacaagataagactgcgaaaaacttaggtttgcacgtgacgagagttcgtcttattatttctgttattgcagtactcttagctgcaggtatcacagcgaatgcaggggttaatggcttttggaggaatacttgtgtcctcccttttcaagacaattagtcgggtcagaatcataaagtataaatccctttttcggctcgcgccgggaggtttattattttgccggccggattcgattggaaggttaattgtaccccctaaccaaatttcagcggcgaccattatggcaggtatttggtgggcccttcttaatattcttggcttaaaaagagggataaagttcatggaaattaaaaatgtaaacctcctccccttataatg

SEQ ID NO: 9793 - DNA, 456 bp, Bacillus anthracis
atgaataatacatatacaaatattttaatcgcggtggatggttctaaagaagcagaaaaagcctttaaaaaagcaattcaagtcgcaaaacgcaacaatgcaacattaactattgctcatatcgttgatgtaaaagcatactcagcagtagaagcttatagccgtgcaattgctgaacgtgcaaatctatttgcagaagacttattagaagactacaaaaaaactgcgcttgaagctggccttgaaaaaattgaaactgtattagaatttggtaatcctaaatcaaaaatctcaaaagaaatcgctccaaaccataaagtagatttaattatgtgtggtgcaactggtttaaatgctgttgagcgtttcctaattggtagcgtctctgaacatattattcgctatgcgaaatgcgatgtccttgttgttcgtggtgatgaagagcaaggtgagctt

SEQ ID NO: 9794 - DNA, 267 bp, Bacillus anthracis
ttgaacgaatttatcaaaagatacataaaaagtgaaataaataaaacttttgtcgattggagtagtagtgaaactagagggattaaaacaattttgatgattattgttataatggtcgaatcggcacataaatgtaattttgattatgtaggtgttccttatccagtgggctatttaggtgatgaaaaagtattacgttttaatcatgataagattgtagaggaaatgcatagaggatatatgactgagagtgaattagtagaattg

SEQ ID NO: 9795 - DNA, 897 bp, Bacillus anthracis
atgggaaaccagtacatttatatgaatggggaatttgtagaaaaagaaaaggcagttgtttcagtatatgatcacggttttttatacggagacggtgtatttgaaggaattcgtagttacggtggaaatgtattttgtttaaaagaacatgtaaaacgattgtatgaatcggcaaaatctattttacttacaatcccgctgacggttgacgaaatggaagaagcagttttacagacacttcaaaaaaatgagtatgcagatgcttacattcgcttaattgtttcaagaggaaaaggggacttaggacttgatccgagaagctgtgtgaaaccgagcgttattatcattgcagaacaattaaaattattccctcaggaattttacgataacggactaagtgttgtatctgttgcatcaagacgtaatacgccagatgcattagacccacgaattaagtcaatgaactacttaaataacgtacttgtaaaaattgaagcggcacaagcaggagtgctagaggcacttatgttaaatcagcaaggatatgtttgtgaaggatctggagataatgttttcgttgtgaaagatggaaaagtgttaacacctccgtcatatttaggggcattagaaggcattacgagaaatagtgttatcgagctatgtgagcgactgagtattccgtgtgaggaaagaccattcactcgccatgacgtatatgtagcggatgaagtgtttttaacaggaacggcagctgaattaattccagttgtaaaggtggattcaagagaaattggagatgggaaaccaggaagtgtgacgaaacaattgactgaggaatttaaaaagttaacgagagaaagaggcgtacgtgttccaggactggcagaaagcttactg

SEQ ID NO: 9796 - DNA, 840 bp, Bacillus anthracis
atgaagttgaatagagcaatcggtgttatcgattcaggagttggcggcttaacagtagcgaaggaattaattcgtcagttgccgaaagagcgcattatatatttagggggatacagcacgttgcccttatgggtcacgttctcgagaagaagtgcgccaattcacgtggggaaaatgacggagcatttactagattttaaaatccaaatggtagttattgcttggaaaacaacaacctggggttgttttttaaaaaaatgcgaaaacaattaccaattccagtggtaggagttattcacccaggatcacgtacagctttaaaagtgacaaacacataccatgttgggattattggaaacgatggaaacggtgaaaagtggtgcatacgaagaggcgttaaagtctattaataaccgtgttatggtagaaaaattaacggggtcccccttctctgtgaaattgtataaaaagggaattttggaaaggaaatggggtatgaagttgtaagagaaacgttgcaaccgctgaaaaatactgatattgatacacttattttaggttgtacacattatccgattttaggtcctgtcattaaacaaagtaatgggagataaagtacaactcattagttcaggtgatgaaacagcgcgtgaagtaagtacaattttataccatagtaaaatgttgaatgagggagaggagcaaagcgaccatctcttcttaacaacagggaaaataggcttatttaaagaaattgcatcaaaatggttcggtcaaccgattgaaaatgtgaaacatattcatttagaaaaagaataatagtagaatccatataagtga

SEQ ID NO: 9797 - DNA, 1193 bp, Bacillus anthracis
ttttcaattcaaaaagcctatcttgtaagaagtgtacaagatgtaatgaaagctgttttcttttcgtacaacattcccgattcttaccggaatttaaagtggtcgcttccggaaaaaagagtcccctttaccagggaagccatgctgaaatttccaatggaaacttttaaccccatttgaaaaggatgggaaaaaaaattgtaaaagtaaaaccatccgggaagtaatggtttttaagggctaaaaatttttagtgaaaatggtaaaaaattgccggaaagaaaatgggagaaattttttgtcgaaaatcttttttatggccaaaaataactttttggggaaattcacaattttaattttaaatggtttagattctgcagaatatccattgttaccacaaattgaagaacatcatgtttttaagattccaacagatttacttaaacatatgatcagacaaactgtatttgcagtctccacttctgaaacaagaccaatcttgacaggtgtaaactggaaggtatataccagcggacttaacttgtattgctacagatagtcacaggttagctcttcgaaaagcaaaaattgaaggtatgtaggatgatttcaggccaaaatttgttatttccgggaaaaagtttaaatgaattaagcaaaattctagatgagtctgaagaaatggtagatatcgttattacggagtatcaagtattattccgtacaaaacatttattattcttctccaagattgttagaaggaaattatcctgatacaactcgattaatttcctgcagaggagtaaaacaagattttttggtaaattaccaaaagaatttttacaaggcaattgattcggtcatctctgtatagctagaaaatggtcgtaattaatgttgtgaaatttatcgactttagaggcaggcaatgctagaaatttgctccgagttcgccgggaattggggaaggtgttgagggaggttcgatttgaaaattagatggagaagagttaaaaatatcttttagtgcaaaatatatgatggatgcactaaaggcattagatagtactgaaattaagattagctttactggagcaatgagaccattcttaattcgtacggtaaatgatgaatccattattcaattaattttaccggttcgtacttactaagtaagaaataagggttgctag

SEQ ID NO: 9798 - DNA, 1039 bp, Bacillus anthracis
gggattattggtgctggacgaattgggaaactacatgttgataatttgcagcttatgccacaagtaaaaattaaagcggttttcagatgtagtaattggtcatctagaaaagtgggctccagaataaaggaatttccactctgactacaaactatccaggatttatatagcgaacccggaaaattgagctcgcgcttaatttgcttcaccaaccaaaacccatgggggcaaattattaaagaagcgggctcttgcgaaaaaaacatattttctgtgaaaaagcctggttagttttctccgtagaagaaacattagaagcattagaagtggtgaaagaacagggggtatctcttcaagtaggttttaatcgtcgttttgatccgaacttcaggaaagtttatgattttattcaacaaggagaagtgggacagccgcatattttaaaaattacgtcacgcgatccacaaccgccaagtatagaatatgttcgctctttcaggcggattgttttatggacatgatgattcatgattttgatatggctcgttatgtgatgaatagtgaagtcgttgaagtatttgcatatggaacaacattaattgatccatccattcaggaagtacatgatgttgatactgcaattgtcacattaaaatttgcgaatggagctttaggtgtaattgataatagccgccaagctgtttatggatatgaccagcgtgtggaagtgtttggtgaaaaaggcgcggttgctgcggataattgctgcccgacaacagttcaagtgtcaaaaacagaaggtattgtaaaagataagccgctttatttcttcttagagcgttacacgcagggcttacatttgaggaagtaacacaatttacaaagtcaattatagaaggacaagctggtatttgcagtgggtatgatggggttacaagcggagcgaattgcgaaagctgcgaaggaatccttactaacaggaaaacccgtacaaattgaacataaacagcctgcattaaatcaataaagagagcgctta

SEQ ID NO: 9799 - DNA, 1222 bp, Bacillus anthracis
ctgactagatgggatacgttaatttttgaagttggtacagcgttagtattagttgcaattgcggcagtaattgctggaaagtttaaattctcagtaattccgtttctaattgttcttgggatgttagtaggaccacatgcgccgacaataggtgttatcgatttcaagtttattgaaagtgcaagtgtcatttccttccttggacggattggggttctgttccttctgttctatctaggactagaattttccatggaaaaactaattaaaatctggacgttctatgcaaatggcgggaacgatctatattttaattaacttttcacttggactattatacggattattaatgggctcccctttactagaaatcttaattattgcgggtattattacgatttcttctagcgctatcgttgcaaaggtgtttttgtacactaagaagaactggtaataatgagacctatttaattttaggaatcatcatgtttgaagatatattccttgctgtatatttatcagtcgtttcacgcttagttctaggggatcatgcttcattcttaggtgcccttacttcaattggaattgctttaggatacatgcttctattctttattgtcgctagaaaggctacgcctttattaaataaattgcttaatattagttcagatgaaatctttattattgtagtatttgcttcattattctttattgcaggtttctcggaaacaattcacgtagacgaagcaattggagcacttcttttacggttagttttctctgagacagagcatagtgacagaattgaacatctcgttgttccatttagagactttttcggagctatttttttcttcagcttcggattaagtattgatccgctctcattgggcggagcgatatggctaacgttaagtgctgttcttcttaccatcatcggaaactttgtagcggggatgattgcaggacgacaagctggattatctcataaagggttcaccaaattttgggtttaccatttgtttcaagaggagaattttccattcattaatggccaatattggtatcggccgggggtttaatgtcagaacctaaaaccattctcagcacctttacggggctataactatcaaatcttaagggccacttctgacgaaagagtcaaaggaatgtatataaattggtaaataaaatctttaagttggatatgaagaagagctta

SEQ ID NO: 9800 - DNA, 863 bp, Bacillus anthracis
aaacaattatatgggtgtaatcgggaataccaattgggacatttcattattccccccttatgcattaacgaaggcatttgaacaacttgaaagatggatgcccattaccatgcctttcttgttaaagaggaagtgttaggggaagcagtaagaggtttaaaagcgttaggtatttcaggatttaatgtaacaactccgcacaaagttgcgattatggattatttggatgagattgacccgctagcaaaacaaattggtgcagtaaatacggtggttccatagggatgggaaaatgggttggctccaatccagatggaattggttttgtccggagccctgccatcccattagtagtggaacacttcaaggagaaacgtatttttattacttggcgcaggcggtgctagtcgagctatttatttttcacttgctgatgcaggggtgaaagagattgatgtagctaatcgtacagtagataggccgaaagactttattgctgcatgtacagctactgttcattctgtttgctttatccatggaaaaaggcacgaaaggaccaggggaattaggatattttcattcagacgacaacgataggtatgcatccacgggtcgaacatacgccgttacaaatttgttggttgaaaaagggaacaattgtatcagatataatttataatccatttgaaacgaaaattttatgtgaggcgaaagagcaaggtgcaatcattcaaaatggtattgatatgtttgtttatcaaggagcgcttgcatttgaaatgtggacaggttgcgtaccgaatatcgaacgaatgaaacaattagttataagaaacttggagggctaaccattatggtttacc

SEQ ID NO: 9801 - DNA, 856 bp, Bacillus anthracis
cgcatatacaaagtacaaaattatatagaattacacataaatgattcactatccattgaagagctagcggatatagcaggattttcaaagtatcattttcatagaatttttaaagggatagtagatgaaccattatctcggtatgtaaaccgcttgaaactggaaagggcaacaaaccttcttacataccgttcggatatgacgattactgatatcacttaccattttggtttcacagattcggcagttttctccgcgtacatttaaaaattattatggagtaagtccgtctcaatatcgaaacgacaatagcaagaattgcaaagacgtaagaagaatttctcaatacaatgaatgtaagaaggttcgaaggaatgttgaaattgtaacagtagacaatataaacgtcgcatacataaggcatatcggtacatatgaagagttaactatagcttttccgaaaatgatagagaaactattttcatacgcaaccaagcaaaactatcctgtatttggaggatacgaaggatttacccttttcccccgatctccttgaatttacgggaggacaatccatttacgaacaagtttatgtagtaacaatttccggggaattcggccattaaaaagaaaccacactgggaataaggggattaccctcccggcaagaatgccgtaggaacattttgaaatattccaagatgaatataaaagagcatgggactttatatatggtgagtggctgccaaatagcggatataaaccgagagactcatatccttttgaagtatatagaaatgatccaaagcagcatcccaagcataaacatatagttgatatatatgtacctatcgaa

SEQ ID NO: 9802 - DNA, 177 bp, Bacillus anthracis
atgataacattaaacggactgaaagcgatgcttgaagaatatgaagaaaaattagtattacttcaaaagttcaaagagcgacagcgacttgttgcaaagctaaaacagctaatcagcgaagaagagcatgtgaatgaagaaatgaaacaagttgttgaagctatcgaaaaattagat

SEQ ID NO: 9803 - DNA, 1153 bp, Bacillus anthracis
atgggtactaaaacaaaaaagaccctatttaatgttgatgagcaaatgaaagctatcgcagctcaatttgaaacattacaaattttaaatgaaaaaggcgaagttgtgaatgaagcagctatgcctgaattatctgatgatcaattaaaagaattaatgcgccgtatggtgtatactcgcgtactagatcaacgttctatttctttttaaccgtcaaggaccgtttaggtttttccgcaaccacagctggacaagaggtttctcaattagcaagtcatttcgcactgaaagcagaagatttcatcttacccaggatatcgtgatgtgccacaattagtatggcacggttttaccattataccaagcattcttattctctcgtgggacatttcatgggtaacccaaatgcctgagaacgtaaatgcacttgctccacaaatcatcatcggtgcgcaaatcatccaaactgctggtgttgcgttaggtatgaaattacgtggcaaaaaatctgttgcaattacttacactggtgacggtggtgcttcacaaggtgacttctacgaaggtatgaactttgcgggtgcattcaaagctccagcaatcccttcgttgtacgaaaacaaccgttatgcgatctctactccagtagaaaagcaatctgcagctaaaactgtagcacaaaaaagcagtagcagcaggtatttacggaattcaagtagacggtatggatccattagctgtatacgcagcaactgctttcgctcgtgagcgtgcagtaaatggtgaaggtcctactttaatcgagactttaacattccgttacggtccacatacaatggctggtgatgacccaactcgttaccgtacaaaagatatcgagaacgaaatggggaacaaaaaagatcccattggtacgcttcccggtcattcttagaaaaccaaaaggcctatggtctcaaagaagtgaaagagaaagtaatcgaagaacgcaaaagagtatatcaaccagccaattgctaaggctgaccaagctccaaaacaaaaagttactgatttaatggaaatcatgtacgaaaaaatgccttacaacttagctgaacaatatgaaatttcaaagaaaaagagtcgagagtaagccatggctcaaatgaca

SEQ ID NO: 9804 - DNA, 2321 bp, Bacillus anthracis
atgacagataggttatttaatggtttaaaccccgccaccaacaaaagcagtacaaaacacgaacggcacccacttctattaatggcagggcgcaggtagtgggtaaaacacggtgtggttacccattcgaattgcgtatttaacttggggaaaaagggagtaacaaccgtggaaatggactagcctattcaccttttaccaataaagccgctcgtgaaatgcgcgagcgtattgatacacttgtcggaccagaagccgaagatatttggatttctacgttccactctatgtgtgtacgtattttacgacgtgatatcgatcacattggtattaatcgtaactttacaattttagattcgggtgatcagttaactgtggtcaaaaaaattatgaaagagcgcaatattgatccgaaagaaattggccccccccttctatttgggctgtattaggtaggggaaaaaatgcctttttttcggcggataggtatgcaagaaaatttccatttgctgatccataggaaaaattaccgagccgatgtatatccagaatctcaaaaaacgtcttttgaaaaataactcattagactttgatgatttaattatgacgacgattcaactatttgaacgtgttccagaagtactagagttttatcagcgcaaattccagtatattcacgtggatgagtatcaagatacgaacaaagcgcagtaccttcttgttaaacatttggcagcacgttttaaaaatttatgcgttgtaggtgactcagatcagtcaatttatcgctggcgtggtgcggacatttccaacattttgtcattcgaaaaagactatgagaatgcgcaagttattctggtaagaccaaaattattccgtccctcacaaaattttttaaatgcagcggaatgctgttttgaaaagaattccgattcgtaaaccggaaggagttatgggcagataatggaagttgaaagcaaattcttcgtactatcgtgctgcaacggaaaaggacgagggcgtactttgttgccgaaaaaattcgcgacgatattcaaatgggaaaacgaaaatatactgattttgcagggctatatcgtacaaatgcgcagtttggtatgtcggaggagattttcctgaaatctatatattccttacaaaattgtcggcggtaggaagttctacggcggtaaggagattaaagacatttgggcgtatttacgtttaattgggaatcccagatgatgagattagtttttgcgcgtattattaacgtgcaaaagcgcggaattggtgcgacttctatcgacaaaattattaaattatggtgtacaaaatggaatttctttaactgctgtattcgatgagattgagcatgttggagtaagtgcaaaggttacaaaggcagtaaaagaattcgcaggtttattacacaattgggtaaatatgcaagagtatttatctgttacagaattggtagaagaagtgatttgaaaaacaggctatcgcgatatgtttgaaaatgagcgtacgtttaaagcagaaagtcgtctggaaaaccttaaatgagtttttatctggtacgcaaacatttgaatctccaagcgaagataagaagccttgtttgcattccttaacgaattaacacttggtgcacatattgattcgggtaaatggagacccaactgttggtgagaaagttattataatgacgatgcactcagcgaagggggttagaattcccagttgtcttattgtggttttagaaggagggaataattcccacatactcgttctctaatggaagaagatgaaaatgcaagaagagcgtcgtcttgcttatgtaggtattactcgtgcggaagaagagttgtatttatcaaatgcacaaatgcgtacttttatttggtagaacaagtatgaatgccgcatcgcgatttattacagaaatccgaacggaactagtagaatcctttaatgaaacagcacccaagcgtgaaacctcgctttgtgccaaaaggaagagtgggcaagtagcagtaaaacgacaactacaacacgttctcgctcagctttcgcacgtcctgcagctaagacgacaggcggcgaacaaattggctgggcagtaggtgataaagcttcccaccaaaaatggggagtcggtacagttataagtgtaaaaagtgaaggtgatgcaaaagaatttagatattgcgttcccaagccccaaattggtgttaaacgtttgttagcaaaatttgcaccctgtgacgaaacaataggaaaggaatgaggatatgtcaaaagagatagcaaaaaaa

SEQ ID NO: 9805 - DNA, 790 bp, Bacillus anthracis
aaaatggtaattattccagggatttctgggagttggaaagccagtagctttaccaagttttgaggatttaagataattctgtgtagataatttgccaccgatgttattgccgaaagttatttgagcttatgggcggattcaaaagggaaaatgaataaagtagcacttggcgttgatttgcgtggccgagagtttttcgaacatttatggggagcgcttgatgatttatcagaacgcacatggattattcctcatattttattcttagatgcgaaagatagcacgcttgtaactcgctataaagaaacgagacgttcgcatccagcttgcaccaactggtttgccgttaaagggaatcgagatagagcgcagcttattaactgatatgaaggcacgcgctaacattgtgcttgatacatcggatttaaaaccgaaagaattacgtgaaaaaattgttcacctatttttcactgaaacgggagcagcgtttcgtgtaaatgttatgtcatttgggatttaaagtacgggcatttccatttgatgcagattttagtattttgatgtttcgtttttttcccaaatccatattacatttccacatatgaaagccatttaacgggactagatgaagaagtttcatcgtatgtgctgaaaattttaatgagacgcataagtttttagagaaaattgacggatcttatcactttcatgctgcctcattataaaagagaaggcaagagtcaacttgtaattgccaattggatgtaccaggtgggcacgcattgtttct

SEQ ID NO: 9806 - DNA, 1352 bp, Bacillus anthracis
atggctaggtacacaaaagaagatattttccgtttggcgaaagaagagaatgtaaagtatatccgattacaatttacggaccttttaggagtaattaaaaacgtagaaattccagtgagccaattaacaaaagctcttgataacaaaatgatgtttgatggatcttctattgaaggtttcgtacgtattgaagaatctgatatgtacttatatccagatttagatacttgggtaattttcccttggacagctgaaaaaggtaaagtagctcgattaatctgtgatatttacaatgcagatggcactccatttgaaggagatccacgtaacaatttaaaacgtgtattaaaagaaatggaagctttaggattctcagatttcaatcttggaccagagccagaattcttcctattcaaagtagatgaaaaaggaaatccgacattagaattaaacgataacggtggatacttcgaccttgcgccgatggatctaggggaaaactgtcgtcgagatatcgttctgaaactgaagaaaatgggctttgaaattgaagcgtctccaccatgaggtgctttcagggcaaccacgaaattgactttaaatatgcaaatgcaattcgttcatgtgatgacattcaaacatttaaacttgttgtaaaaacaaattgctcgtaaacacggtttacacgcaacatttatgccaaaaccattatacggtgtgaacggttcaggtatgcactgtaacttatcattattcaaaaatggcgagaacgtattcttcgatcaaaacggtgacttacaattaagtgatgatgctcgtcacttcatcgcaggtatcttaaaacacgcgccagcatttacagcggtagcaaacccaactgtgaactctttacagcgtttagtacctggatacgaagctccttgttacgtagcatggtctgcacaaaaccgtagtccattagtacgtatccctgcatctcgtggtattagtacacgcgtagaagtacgtagtgttgacccagctgcaaacccatatttagtaatggctacattattagctgcaggtcttgatggaattaaaaacaaattaactccaccagctgcagtagaccgtaacatctacgtaatgacaaaagaagagcgcgaagaagcaggtatcgttgactttacagcaacattagcgcaagctttagttacattacaatctaaacgaagtaattagtaacgcattaggagatcacttacttgagcacttcattgaagcgaaggaaattgagtggggatatcttccgcacacaagttcaccaatgggaacgcgatcaatatatgtctctttactaagaggctcaaacc

SEQ ID NO: 9807 - DNA, 201 bp, Bacillus anthracis
atgaacatgcaaggaagagtgaaatggtttaatgcagaaaagggatttgggtttattgagcgtgaagatggtgatgatgtgtttgttcatttttctgctattcaacaagatggatataagtcattagaagaagggcaacaagttgagtttgatattgtagatggagcacgtggaccacaagcagctaatgttgtaaaactg

SEQ ID NO: 9808 - DNA, 1125 bp, Bacillus anthracis
gaaacaattaaatgtattggttgcggtgtagaaattcaaacagaagataaaaatgaagtgggatatgctcctgcctcatctttagaaaaagaacaagtaatttgtcaacgctgttttcgattgaaacattataacgaaattcaagatgtctcattaacagatgatgatttcctacgtattctaaacgggattggaaaatcggatgcgttagtagttaaaattgtagatatttttgactttaatggtagctggttacctggcttacatcgtttcgtgggaaataataaagtattacttgttgggaataaagcggatttaattccttagtcagtaaaacatgataaaggaaaggactgggatggggctatagtgcaaagcagctaaggattaaagccagaagatgtctttttaattagtgcagcgaagggacaagggggattgctgagccagtccgatagcgagtgagtattaccgcggcggaaaagatgtgtacgttgttggatggacaaatgtaaggaaatcaacatttattaatcggatgattaaagaatttagggatgagactggaaatgtaatttcaacatctccttttccaggaacaacgctttgaataaattgatatcccgttagacgaagaatcttctttatatgatacaccacgtatttattaaccaccatcaaatggctcattacgttggaaaacaaagctttaagcttattacacccaccaaagaaatttagcccgatggtgtttccaattaaatgaagaacaaacattgttctttagtggactggcacgttttgattatgtaagtggcggtcgtcgtgcatttacttgtcacttctcaaatcgcttaacaatccatcgtacaaagcttgagaaagcagatgaattgtataaatactcacgctggggatttactaagcccgcccacacccgaagaattagaaaatatgccagagctagtgaaatacgagtttaatattcgtgaaccgaaaacggatgttgtattctctggattaagatggggtactgtgaacgaaccaagagcaaaaattgttggcctcgtaccaaaaggagtaagtgtttcattacgtaaatcctttatttaatatgggagaggg

SEQ ID NO: 9809 - DNA, 909 bp, Bacillus anthracis
atgccttatttttatgtctttttactattattaacgagcttattatggggaggaaatttcgtcgttgggaaatcactcgttgatcacgcgtctccaatgacactgacaagtttaagatggataattgcgatcgtttgcttattaccaatggtttggtttaaagaaaagaaaatcattccaccacgcgctgcgatactcccgttaatattgatgggaatttcaggggttgctctttttaacatctttcaatttctagcattagaaaaaacatccgcaacaaatgtagggcttatttctacattaaacgcgatttccattgcactattttctgtcttatttctaaaagaaaaagtaaatacacttcaaattttatctatgattctttcattcttcggggttatcctcgtcctattaaaaggtaactttgcccttttattttcactacattttaatagtggcgatttatggatgattgcggctgtttgtatttggggaatctattctgtttgtagtaaatgggcaacaaagacaacgacaccacttatggcgacgctatactctggtattttcggcgttattttattactgccatttaatatagggagcttcactgttacaaatataaatacttctttcataacttcacttttatatacagggcttatttccacagttctttgcatggtattttggaatattggcgtacaaaaattaggagcaactacatcaggtatttttctaaacttcaatccaatttttacagctattttagcatttcttttcctcggtgaagaactaacgtggatacaaattgtaggaacaatgatcgttatgacaggatgttatttattctctcatttcaaaacagttactgttcaaccaactggaactttattacgaaaacattct

SEQ ID NO: 9810 - DNA, 1436 bp, Bacillus anthracis
gaatatgatttagtcttcctttggcgcccgaactgggccgatatagttgctggcaatccctgcgatcccaactaagttgttaaaaactgcactttgttgaaaaaaaaaatcttgttggaccttgttttacacaaaggatgtattcctaataaaagccccttttaccgtaggccggaaagtaaccgcaactgcttaaaaaaagcgaaaaaatccggggttattggcaagtaagtgtaaaactaaacttttgcgaaagtaccagagcgtaaagagaagattgtaacgcaacttcataaaggtgttcagcacttaatgaaacaggggtaaattgatgtggttgaaggtattggccgtattcttggcccatctatttttctctccgatgccacgggacaatttcagttgaacttgcaaaagtggagaagagaatgaatgtttaattccaaaaaaatgtacttattgcaacaggttctcgtccgaatttcattaccacgtttagaattagacggagagtatgtaatgtgcttccgatcatgccctaaaaatggaaacgcttcccagctcgattattatcgttggtggcggtgtaattggtatcgagtgggcatctatgcttgctgacttcggtgtagaagttacagtatgagagtatgcgaaaaccgatactaccattagaagatcaagacgtttcaaaagaaatgcaatggtctattcaagaaaaaaaggtattaaagttgtatactgggtgcaaaaggtatttcccagaaacatttgtaaaaagataatggagtaacaatttcagcctgaacataacggtgagaataaagaatttaaagcagaaaaaatgcttgtatctgtaggacgacaagccaatacgcaaaatattggtttagaagaaatacggatatctgttcgtggaaaaaggatacattcaaacaaatgagttttattccacgaaaagaatctcatacctacgcaatcaggtgatgtaatctggtggcttacagcttgctcacgttgcttctcatgaaggaattgttgcagtagaacatattgctggtaaagaagttacaccaattgattattctatggtatcaaaatgcgtatatagcagtccggaagttgcttctgtcggtttaacagaactactaccgaaagaaaaaggctataagttaaaagtaggtaagttctcattccgtgcaatctgggaaagcacttgtatacggcgaatcagatggtttcgtaaaacttgtagttgatgaagaaacaaatgacattctcggtgttcatatgattgggaccacatgtaacagatatgatttctgaagcaggtcttgcaagagtactttgatgcaacaccttggggagtagcacatacaattcatccgcatccatcatttatctgaggcgattggtgaagcagcattagctgtaga

SEQ ID NO: 9811 - DNA, 972 bp, Bacillus anthracis
atggcagagctagaatttgagaaaccagttgttgagctaagaaataagattcgtgaactgaaagactatacgaaaaacagccagatggacttcagtgaggagattcgtattttggaagacaagctagaaaatttagaggaagatatatacggcaatatgaaagtatgggaccgtgttcaaattgctcgtcatgcagaacgaccgacaacgctcgattatattgagcacttatttactgatttttttgaatgtcatggagatcgtctatttggcgatgatgcagcgattgtcggcggcattgcgaaatataaagggatgcctgtaactgtaattgggcaccaacgcggaaaagatacgaaagaaaatattcgccgtaattttgggatgcctcatccagaaggatatcgaaaagcattgcgtttaatgaagcaggcggaaaagttcaatcgtccaattatttgttttattgatacgaaaggagcttatcctggtaaagctgctgaagaacgtggtcaaagtgaagcgatcgcccgcaatttatttgaaatggcaggcttaacggtacctgttatttgtatcgttatcggcgaaggtggtagcggtggtgcgctaggtcttggagtaggagattacattcatatgctagaaaattccacttattctgttattacaccagagggtgcagcggcaattctttggaaagatgcaggaaaagcaaaggaagctgcagaggcgatgagaattacagcggcagatttgaaagaattaggtgtaattgacgaaattattccagaggcaaaaggtggagcacaccgtaatgttttgaaacagtcagaaaatatagatttaatgcttagaaaaacttttgaacaattaaacggaatttcgaaagatgaattaatcgaaaaacgttatgaaaaatatatgaaaattgggcaagtttcgttttcaaacgcttccatttggataaaa

SEQ ID NO: 9812 - DNA, 1692 bp, Bacillus anthracis
atgaaaaagattttagctagtgtagcagtagcttctgttacaggaagtgtatttattagtactgctcaagcgaaaaataccgttatacaaaaagaagcaaagcatgagaaacctactgatgtagtaaaatatgaaaatcaagtaacagtaaatacaaatgctctacgtgtccgcacacaaccaaatacgtctagtacaataatgggacgcgtgtatgaaggagaagttttacaagttattggagaagaaaacagttggctgaaaattaatcataaaggaaaaactggctatgtaagtagtgaatttgtttcggaaaatagtgtatcagcgaagacgaatgtaagcatgagtcgtagtaaaactgtaatcgctaatgtattacgtgtgcgcacacagccaaatacgtctagtgcaataatggggcgcgtgtatgaagggaaagctttacaagttattggagaagaaaacggttggttgaaaattaaacataatggaaaagtaggttatgtaagcagtcaatttgtaatagacggtacctcaaatggaagtgacaagaacaatggaaaagttcaagtagcgagtgggaattacaaagttaatgtatcttccctccgcgtgcgtacaggtccaagtacttcccatacgattttaggctctgtacataaagggcaaattgttcaagtaactggtgaagttcaagattgggtcaaaattaactatagtggacaaactgcttatattagtaaagattacatttcaaagaatgattttaatgcaaatgtagaccaaacgaatgaacaacaaaagaatattacggttcaaactgatggtacatatattgtagacgctacttctttacgtgtgcgtacaggccctgctacttaccatagtgtaattggtggtgtattaaacggacgaatattgcaagtaactggcgttgaaaatggttggttgaaaattaatcataatggaagaactggttatgtaagtagtgaatatgtaaaattcgtaaaaggaaatacgccatcaaaacctgaaactagtaatccgtctactggagcaacagttggtgactactatgttaacgtaaacgtgttaaatgtaagaagcggcgctggtacaaattatgatgtaatcggtgcattatcaaaaggaataaaagtacaggttctatttgaacaaaatggctgggggaaaattaattacaacggtaaaactggttatgtatcaagtaaatttttatcaaaaacaagtgagactgatgcagagaagcagcggcaatcccaggaggtaaataaaacaaatgactttattcaaccagctgcaggaagatatacttctagatttgaaaaacgtggtgggaaaatgcatcacggattagatattgctgcttcaggtacagtgccggttgttgctgccgcagagggtgtaatcactcgctcttattattctacaagctatggtaatgttgtgtttatttctcacaatattaacggacaaacatatacgactgtatatgctcatttaaagagccgttctgtttctgctggtcaaaaagtgaagcaaggacaacaacttggcataatggggaatacaggacaatctgaaggacagcacttacattttgaaattcataaaggtgaatggaatgcacagaagagcaatgctatggatccaaaaatatacattgat

SEQ ID NO: 9813 - DNA, 289 bp, Bacillus anthracis
atgagaaagtacgaaattatgtacatcattcgtcctggcgttgaagaagaagctcaaaaagctttagttgaccgtattgcaggtgttttaacaaaccaatggtgcagaaatcattaacacgaaagagtggggtaagcgtcgtttagcttacgaaatcaacgacttacgtgaaggtttctacatgatcttaaacgtgaatgctaacgcagaagcaattaacgaattcgatcgtttagctaagatcaacgaagatatccttcgtcatatcgttgttaaagaagaagaaaaa

SEQ ID NO: 9814 - DNA, 405 bp, Bacillus anthracis
atgagtaacacaaatcaaaaaatcactacgtttttaatgtttgaaggcaaagctgaggaagcaatgaacttttacacgtcgctattcgaacaatcagaaattgtaagtatctctcgctacgatgaaaacggacctggtaaagagggtactgtcattcatgcaacgtttacattacacgggcaagagttcatgtgcatagatagttatgtaaatcataattttacatttacgccagctatgtctctttatgtaacttgtgatacggaagaagaaattgaaacagcttttaataaactagctgaggatggagcagtacttatgcctttaggtgcctatccgtttagtaaaaaatttggttggttaaatgataagtatggtgtgtcttggcagttaacacttgctgaa

SEQ ID NO: 9815 - DNA, 591 bp, Bacillus anthracis
aatttaccaaataaaattacaatatctagaatcttcttaattccaatttttatggtaattatgttagcaccctttgattggggttcatacacaattggtgatgttgatttaccaattcaacatttagtaggagcacttatctttattgttgcttcggctacagattggattgatggacattacgcaagaaagtataatcttgtaacgaatttagggaagtttcttgatccattagctgataaattacttgtttcagctgcacttatcacgttagtggagatgcaatacgtaccagcttggatcgttattatcatttataagccgtgagtttggcggtaactgggtttacgtctttgtacctcgctggaaacaaggagaagggtaattgcggggcaatatcagctaggaaaaattaagacatggacacaaattatcgcgattgcagcatatttattacacgatgtacctttaaacttaatccatattccggtagctgacatctttatatggattgcattaatttttactgttatttcaggatgggattatttctggaaaaatagagctgcttttgtaaactcaaaatagaag

SEQ ID NO: 9816 - DNA, 795 bp, Bacillus anthracis
ttggggacccaagtaaacacagcgcagttaaatatacaaaaaacttcatctgtacaacaagcagcacttggagaaacttacacgtattctgttgtcattcgtaataatggtacagtaacagcaacgaacgtttctttcattgatccaattgctccagaaacaacatttgtagcaaatagtgtaacgataaatggaacgccacaacctggatttgacccgaatgtcggtttcccgcttcctaatattgcagctggaacatccttgacagtaacgttccaagttacggtaattgcaccgtctacacgtggagcagtattaaatacagcatctgctatagccactttcttattaaatcctttacaaccacctgtaacaacaacgaactcaagtaatacaacggtagttacaataccgttacctcctcctggtgaagtaacagcaacaaaaacagttgacgttgcagctggagcggttggggatgtattaacgtacactgtgcttatttcaaatgtaggaatttatacagttgcagatgtgttcttccaagatgtcatcccagaaggaacgacatttgtagaaggtagtgtaacgataggtggagtgcagcaacttggtttaaatccggaaataggatttacagttactccattattaatcgctggtggaagtattgagatcacattccaagtgacgattacagaaattccagataatgaagttatattaaatgatgcagacgttacatttacttcacaaccaaatccgcaagatacacaaacattacggaaacgatat

SEQ ID NO: 9817 - DNA, 969 bp, Bacillus anthracis
atgtgtactagtttgacattagagacaaaaaacggtcagcatctttttgcaagaacgatggacttcacattagatatgaatcaagaagtaataatcattcctcgacattaccagtggaataatataacgggtgaaatcattaatacgaaacatgctacggtcggaatgggtattaatcatcaaggaaggatcattatggcggacggagtaaatgaagcaggtatgacatgtgcaacactctattttccaggattcgctacttatagtcaaagcatagatgacaacacaacgaatttggctccatttgattttgtaacttggagtctgacacaattcaattctgtcaagagccagtgaagaaatctgtagatagcattacctttttggatataccattaccgcgatttaggacttacgccaccactacattggattttagcggataaatggggagattgcattgtactggatccgacaagtgaaggattaaaattgtatgataacccactaggagtgatgacgaatagtccggagtttaattggcatttacaaaatttaagacaatatataggccttaaatcgcagccattcgcgccaacagagtggagtaatttaccattaagtgcttttggccaaggctcgggctcaatgggacttccaggggatttcaccccgccatcgaggtttgtgcgggcagcatatggcaaacaaaacattcaaggtatagatagcgaagaagagggagtatcagccctttttcatatcttatcaaattgtgaggttcctaaaggtggagtaataacagaacaaggtgcattagataataccatatataccaagcgtaatgtggatggaatccggaacatattattatccttacttacaatggtagaccaattatagcttgttcatttatttcctgaaaatttagataccgatgagaataaagcctatcccttcccaccggaa

SEQ ID NO: 9818 - DNA, 1605 bp, Bacillus anthracis
atgactaagtatatttttgtaacaggcggtgtagtatcgtctttaggaaaaggtattacagcagcatctcttggaagacttttaaaaaatcgtggtttaaacgtaacgattcaaaagtttgatccatacattaacgtagacccagggactatgagcccataccaacacggtgaggtgttcgtaacagatgatggcgcagaaactgacttagaccttggtcactatgagcgtttcatcgacattaacttaaacaaatacagcaacgtaacaacaggtaaaatttactcttcagttcttcaaaaagagcgtcgcggtgaatacctaggaggaacagttcaagttattcctcacattactaacgaaattaaagagcgcgtataccgttctggtcgcgaaacaaacgcggatgttgttattacagaaattggtggaactgttggtgacatcgagtctctaccattcttagaagcaatccgtcaaattaagagcgacatcggtcgtgacaatgtaatgtacattcactgtacgttaatcccgtacttaaaagcagcgggtgaaatgaaaacaaaaccaacgcaacatagcgttaaagagcttcgcagcttaggtattcaaccaaatattatcgttgttcgtacagaaatgcctgtttctcaagatatgaaagacaagcttgcattattctgtgacattgatacaaaagcagttattgaagcacgcgatgcagatactttatatgcggttccattatctcttcaagagcaaaatatggaccaaatcgtttgcgatcacttaaaattagacaatccagctgcagatatgacagagtggactgcgctagttgaaaaagtgcgtaacctttctaagaaaacaaaaatcgctcttgttggtaaatacgtagagcttcaagatgcatacatttctgttgtagaagcacttcgtcatgcaggttactctttcgacacagatgtagaagtgaaatgggtaaacgctgagcacgtaacagcagagaacgtacaagaattagttggtgacacagacggtatccttgtaccaggtggcttcggcgatcgtggtgtagaaggtaaaatcgttgcaattcaatatgctcgtgaaaacaaagttccattcttaggaatttgcttaggtatgcaacttgcatcaatcgaattcgcacgtaacgtattaggattagaaggagctaactcttctgaaattaatcctgacacaccttatgcaatcattgacttattaccagaacaaaaagatgtagaagacttaggtggtacacttcgtcttggtttatacccatgtaagctttctgaagaaacaaatgcttacaatgcttacaatgagccggttgtatatgagcgtcatcgtcatcgttatgagttcaacaatcaattccgtccggatatggaaaaagcaggatttgtattctctggtacaagcccagacggccgtctagttgaaatcattgaattaaaagatcacccttggttcgtggcagcacagttccacccagaactagtttctcgtccaaaccgtccacaaccattgttccatgactttgtaaaagcttctcttacgaataaagagagcaag

SEQ ID NO: 9819 - DNA, 1230 bp, Bacillus anthracis
ttgaaagaagaacttattgaaagatttacgagatatgtaaagattgatacgcaatcaaatgaagatagtcatacagtgccaacaacaccaggacaaattgagtttggtaagttattagttgaagagttgaaagaagttggattaacagaagtaacgatggatgataatggatatgtaatggcaacacttccagctaatacggataaggatgttcctgtaatcggctttttagcacatttagatacagcaacagactttacggggaaaaatgtaaaaccacaaattcatgaaaactttgacgggaacgcaattacgttaaatgaagagcttaatattgtattaacgccagaacagttcccagaattaccgtcttataaaggacatacgattattacaacggacggtacaacactgttaggagcagatgataaagctggtcttacagaaattatggttgcaatgaattatttaatacataatccgcaaattaaacatgggaaaattagagttgcgtttacgccggatgaagaaattggccgtggcccagcacattttgatgtagaagcgtttggtgcatcattcgcttatatgatggatggaggtccattaggtggtttagaatatgaaagctttaatgctgcaggtgcaaagttaacgtttaacggaacgaatacacatcctgggacagcgaaaaataaaatgcgtaacgcgacgaaactagctatggagtttaatgggcatttaccagtagaagaagcaccagagtatacggaaggatacgagggattctaccatttactttctttaaatggtgatgttgaacaaagtaaagcatattatattattcgagattttgatcgtaaaaactttgaagcgcgtaaaaataccattgaaaatattgtgaaacaaatgcaagagaaatatggacaagatgcagtcgttttagaaatgaatgatcaatactataacatgcttgaaaagattgaaccagtaagagaaattgttgatattgcatatgaggcaatgaaaagtttaaatatcgaaccaaacattcatccgattcgcggtggaacagatggatcacaattatcgtatatgggattaccaacgccgaacattttcacaggtggtgaaaactatcacggtaaatttgagtatgtttcggtagatgttatggaaaaagctgttcaagttattatagagattgcaagacgatttgaagagcaagct

SEQ ID NO: 9820 - DNA, 1227 bp, Bacillus anthracis
atggaaacgattgtacaaaaatttggtggcacttctgtcggaagcgttgaacgcattcaacatgtagcaaatttaattattgaagaatatgaacgaggacatagtatcgtctctgtcgtttcagcaatggggaaaagtacagacgaacttgtagcacttgctaacgcgattacagaaaatccgagtaaacgcgaaatggatatgcttctatcaacaggagagcaagtcactatttcattattaacgatggcattacaagcaaaaggttataacgcaatttcattaacaggatggcaagctggtattacgacagaatctgtacatagtagtgcacggattactgaaattaatacggatcgaattcagtcttatcttactaaaggcacgattgttattgtagctggtttccaaggagttagtgaagaccttgaaattacaacgcttggacgtggtggttctgatacaactgctgttgcattagctgcggcactgaacgcaaaaaaatgtgatatttacacagatgtgaccggcgtatatacgacggatccacgagttgtaaaagatgcttataaattagatgaaatttcttatgacgaaatgttagaacttgcaaatctcggtgctggtgtattacacccgcgtgctgttgagtttgctaaaaatcataatgtcattttagaagttcgctcaagtatggaacaagaaaatggaacaattgtaaaaggagaatgtaacatggaacaacaatcaatcgttaaaggtattgcatttgaagataatattacacgcatcacagtgaaaggattggaacaaggatcgctttcaactgttttctctacattagcagcggcacatattaatgtagacatcatcattcaaagtattacaaatgaaggaactgttcatctctccttctccatccattctaatgatttaagagaaacgttagcagtgttggaacaaaatcaagaggcacttcactatgaatcagtagaatatgaaaatcatttagcaaaagtatcaattgtaggatctggtatggtctctaatccaggtgtcgctgcgaatatgttcactactttaaaagaagaagatattcatattaaaatggtaagtacatcagaaattaaagtgtctgtcgttattgaccgccttcatttagtaacaggtgtcgaggcgctgcatcaatcatttatggcgaaaattgagcctttagtgcagatgagt

SEQ ID NO: 9821 - DNA, 1154 bp, Bacillus anthracis
atgcgatatattacagctggtgaatctcatggtccacaacttacaacgattatagaaggtgttccagccggactatcactcacagcggatgatataaatgaagatttccctagaaggcaaaagggatatgggcgtggtagacgcatgcaaattgaaacagatcaagtacaaattgtgagtggtgttagacatggagaaacattaggttctccaattgcacttgttgttgaaaaccgtgattttgcacattggacaaaaattatgggtgcggagccgttaacggaacaagaagaaaaagaaatgaaaaggaaagtaacaaaaccaagacctggacatgctgatttaaatggtgcgattaaatatggtcatagagatatgagaaatgtactggaacgttcttcagctcgcgaaacgacagtgcgtgttgctgctggtgcggttgctaaaaaagtgttagcggaacttggtattacagtagcggggcccatgtaattgaaattggtggtgttgaggctaaagagactacgtatcgttcaattgaagaattaaaaagtattacagaagcatcacctgtacgctgtttagatgaagaggctggtaatcaaatgataaaagcaattgatgatgcgaaatcaaatggtgattcacatcggtggcatcgtggaagtaattgtggaaggaatgccaattggagtaggcagctatgtgcattatgatcgaaaactagatgcaaaattagccgcccgccataatggagcattaatgcctttaaaggggtggagattggaattggtttttgaaagcagcgcattggccagggaagggaaatttcatgatgaaattcttggaaccgaagagcctggatattcaggagggaccaattaacgcgggttgttttagaaggcggtatgacgactggaatgccaattgttgtgcgcggagtgatgaaaccgatacctacactatataaacctcttcaaagtgtcgatattgatacgaaagagccttttacagcaagtattgagcgttcagatagttgtgctgttccagcagctagtgtcgttgcggaagcggttgtagcttgggaattagcgacagctttaatagaacaattcggattagatcgtaccgacctatattcgtggaaaatattg

SEQ ID NO: 9822 - DNA, 672 bp, Bacillus anthracis
gtgacagtacaaacaaatttaacaactgtaaacgaagcaattaaacaatcttgcgcgcgagcgggacgttctttgcaagatattaaactcgttgcggttacaaaaacggtaggaattgaaaaaacaaacgaagtaattgaagctggaattatcgatttaggtgaaaatagaaatgaaggtttcttacagaagtacgaacatttcggttcaaaagtgaattggcattttattggatcattacaaacgagaaaagtaaaagaaattattaatgaaatcgattatttacattcattagatcgtctttcacttgcaaaagaaattcaaaaacgtgcgaataagaaggtgaaatgttttattcaagtgaaaacatcatctgaagaatccaagcaaggattggcaatagaagaaacagtttcttttattcaaagtttgcaagaattggataagattgaagtggtaggattaatgacaatggctccgtttacagaagaagaggaagaaattagacgctgttttaaggagttacgtatgctacaaaaagaggtgcaggggctagaattattacatgcaccatgcaaagaattatcaatgggaatgtctaatgattacacgattgcaattgaagaaggtgctacatatattcgtttggggacgattttagtaggaaaagcg

SEQ ID NO: 9823 - DNA, 679 bp, Bacillus anthracis
atggcaaaagatattaaatttagtgaagaagcacgtcgttcgatgcttcgcggtgtcgacactcttgcaaatgcagtaaaagtaacgcttggaccaaaaggtcgtaacgttgttcttgagaaaaaattcggttcaccacttattacaaatgacggtgtaacaatcgcaaaagaaattgaattagaagatgcattcgaaaacatgggtgcgaaattagtagcagaagttgctagcaaaacaaatgatgtagctggtggcgaaacaacaactgcaactgtattagcaccaagctatgattcgtgaaagtcttaaaaacgtaacagctggtgcgaacccaatgcgtcttcctaaaggtttccaaaaagctggtagttggtgccgttgaaaaattaaaaaacaatttttaaaccaaccgaaggtaaatcttctatcgcacaagtagctgctatttctgctgctgacgaagaagtaggtcaattaatcgctgaagcaatggagcgcgttggtaacgacggcgttattactttagaagaatctaaaggtttcacaacagaattagacgtagtagaaggtatgcaatttgatcgtggatatgcatctccttacatgattactgattctgacaaaatggaagcagttcttgataacccatacatcataatcactgacaaaaagattc

SEQ ID NO: 9824 - DNA, 780 bp, Bacillus anthracis
atgaaacataaatggttatatatcggtctcattttttcaattatgatggcacttgttccagtttctgcactagcttatacaaatactccacataactggggaatcccgcgccctaaaaatgaaacagtaccagatgcaggaaagctatatacagatttactacaaaaaaatggtgggttttatttaggagatacgaagaaaaaggatatttatttaacatttgataatggatatgagaatggatacacagggaaaatcttagacgtattaaaagagaaaaaagtgccagcaactttctttgtaacggggcattatattaaaacacaaaaagatttattgctaagaatgaaagatgaaggacacattattggaaaccattcgtggagtcaccctgatttcacagcggtaaatgatgagaaacttcgtgaagaattaacgagtgtaacggaagaaattaaaaaagtaactgggcaaaaagaagtgaaatatgtacgtcctccgcgcggcgtatttagtgaaagaacgttagctcttacgaaagaaatgggctactataatgtattttggtcacttgcatttttagattggaaagtggatgagcaaagaggatggcaatatgcgcataataatgttatgacgatgattcatccaggatctattttattacttcatgcaatatcaaaagataatgcagaagcacttgcaaaaatcattgatgatttgcgcgagaaagggtatcattttaaaagtctagatgacttagtaaaaagcaatcaaccg

SEQ ID NO: 9825 - DNA, 144 bp, Bacillus anthracis
atggaaagattaaaagagatatggtctcgaccactcacacaatgggttgcaaagacggtttattaccttgcaattttatttgcattactttggttgtatggattccatgatacaaacacaagtacatttatttacaacgaattt

SEQ ID NO: 9826 - DNA, 332 bp, Bacillus anthracis
gataaaattaaattaacggcgaaagatattttagaaaaagaatttaaaacaggggtatgagaggttatcaacaagaagaagtagacaagtttcttgatatgatcattaaagattatgaagcttttcacaaggaatttgagcaattaaagcaacaaaatgctcgtttaaagcgtgaactagaagagcaaaagctagcagcaacgcaagttccacaacaaccagttgtacaaacaccagttgcacaaccagtatataacaacacgaatacggacattttaaaacgtctatcgaatttagaaaaagctgtatttggaagtaagttatacgaataa

SEQ ID NO: 9827 - DNA, 954 bp, Bacillus anthracis
atgaaaaagaaatttgcagagtatgaagttggtgaacaagtcgatgttttcttgttaattaaaactgcgacaaaaggtatcgcaagcaatggaaagccatttttaacagtaatcttacaagatccaagtggagatattgaagcgaaattgtgggacgtatcaccagcagttgaggatttgatatgtagcggaaacaatcgtgaaagtggctggagatattttaaactacaaaggccgtattcaattacgtgtgaaacaaattcgtgttgcaaatgaaaatgaagtaacagatatctcagacttcgtagaaaaagccaccagtgaaaaaagagtatatggtgaagaaaattcggcatcacatatttgaaatgagaacccggaacattcagcgtttaacaagacatttattaaataagcatcaaaacgaatttttagactatccagcagcgacgaagaaccatcacgagttcgtatctggactagcttatcacgtcgtatcgatgcttgatttagcgaaaagctatctcaaatttctatatccatcattagataaagacttactatatgcaggcgttattttacatgaccttggtaaagtaattgaattatctggcccaatttctacaacgtatacgttagaagggaatttactaggtcacatttcaattatggtgaaacgaaattggtaaagcagcagacgagctgcaaatcgatgcagaagaagtattaattcttcaacacatcgtcctttctcaccacggaaaagcagaatggggtagcccaaaaccaccattagtaaaagaagcagaaattctgcactacatcgataacttagatgcaaaaatgaacatgatggaccgcgcattaggacgcacaaaaccaggcgaatacacagagcgtgtctttgctcttgataatcgttcgttctataagccgtcgttccataattaatag

SEQ ID NO: 9828 - DNA, 1796 bp, Bacillus anthracis
atgacctggaaacaagaatttagtcgctggctttcatatgcagagttagacgcagacctaaaagaacagttagaaaacatgaagcaggatgagaaaaaaatcgaggacagcttttataaaaatctagaatttggcacaggtggtatgcgtggtgaaacttggtgctggtacgaaccgtttgaacgtatatacagttcgtaaagcaacacaaggattagcgaagtttattgaaaagttaggtgaagaagcgaagaagacgcgggtgtgttgtagcgtatgattctcgcccataatcaccctgagttcgcaatggaagtagcagctacacttggtgcacacggcattacaacatatgtgttttgaaagcttacgcccaacgcccagtgctttctttcgcagttcgtcatttacatacagtgaggggaatcgttcttacggccaagccataatccgcctgaatataacggttataaagtatatggtgaagatggtggccagttgcctccgaaaagaagctgatgaattaaataggctaggtaaccgcagtagaaagagaattaaccagttgaaagttgttgatgtagagctatttaaaagctggcggtttattacatatgattgcacaaaaagtagatgatgcatatgctgcagaattgaacaatgtcattattaataaagaaatggtacaaaaggttgggaaagacttaaaaatcgtcttcacaccactacacggaacatcaaatctttctgtacgccgtggtttagcagaagttggatttacagatgtaacagttgtaaaagagcaagagttaccagatccgaatttctctacagtgaaatcaccgaacccagaagagcatgcagcgtttgaatatgcaattcgtgacggtgagaaggtaggcgcagatgtgttaatcgcaacagatcctgacgcagaccgccttggtgtagcagttcgtaatcatgatggtgagttcccaagtattaactggtaaccaaacaggtgcattaatgcttgattacttattatctcaaaagaaagaaaacggaacgcttccagagaacggtgttgtattaaaaacaatcgtaacatctgagattggccgtacaatcgcgaaagcatacgggtttagatacaggtgaatacgttaactggattttaaatttatcgggggagaaaaataaacagtattgaagaaaacggggacaatactcaaaatccaatatgcgggttatgaggaaagctatcaccctttaatccgtccattctgccgtgataaagatgcagtacaatctgttctatttgcatgtgaagtagctgcatactacaaatcacaaggtaaaacgttatacgatggtctattagaagtatttgagaagtacggtttcttccgtgaagatcttgtatcgttaacgctaaaaggaaaagatggagcggaacaaattcaagaaatgatggcaatctttcgggtaaaaatcctccggaaagaagtagattgtcttaacagttgtagcagttgaggcctataaagggagcatcatttcatctttacaagatggacataaggaagagatttcacttccggaaatcaaatgtgttaaaatatcaattagaagatggttcttgtttctacttagttccatctggaactgagccgaagatcaagttttacttcggtgttcaagatcatctctttacaaaatagtgaacaaaagttacttactattaaaggaagatattatgaatcgtttataatataaagtaattttaagtagtaggaaacaaaagggagcga

SEQ ID NO: 9829 - DNA, 757 bp, Bacillus anthracis
aaaagaacgaaaacgaataacgaagtatatcaaacatctacaatgcttgcgctattagatggtatatatgatggtgtgattagctttgaggaactaaaagaacgtggtgatttcggtatcggcacatttgatcaattagatggtgaaatgatcgcgtttgataatgaattttatcatttacgttcagacggttcagcagaaaaagtagagccggaggaaaccaccaccattttgcgactgtaacgttttttgaaaaagaaatgagttatacgatagagcgtccgatgaatcgtgaagaagtggaagcccattattacatgaattaatgccgagtaaaaacctattttatgcgatttcgaatggatggtacgttccgtgaagtaagaacgagaactgttccaagacaagaaaaaaccgtatacaccactcgttgaagtgacgaaatcacaaccaatcttctcatttgaaaatacagaaggtacgcttgctggattttggacgccagattatgcgcaaggtatttggtgtagctggattccactttacattacattgatgatgaaagaaagcgagggcggacatgttttcgactatgttgttgaaaactgcacaatccaaattggtcaaaaagctcatatgcatttagcacttccagaaacagctgactttatggcggctgaattttatcagagaaaactttagaggatatattgcgactgcggaaggtgcagaagtaaaaagaagagccgattctgct

SEQ ID NO: 9830 - DNA, 297 bp, Bacillus anthracis
atgacaacatatacgagtgaaatgagaaaaagtttagtttcagaagaagatgtagatattttaaaaattatggcgcacccaattcgattacaaatcgtaaatgaattaagcacgagaaaaacttgtaacgtaacacaactaacagaattactaaatattccacaatctactgtttcacaacatttatcaaaaatgaagggtaaagtgttacgagcagagagaagaggtttagaaatttattatcatattaacaatttaaaagcgagtaagattgttaatgttttaggatatataaac

SEQ ID NO: 9831 - DNA, 1421 bp, Bacillus anthracis
aaatataaatttctttctaaggataaaccgcaacacatttttgttatagagtggacgtggcgggccgttataacatcgtggggatttaacccactaccggtaattccaagggaagggggaagcgtttcctataaatgaaaagtggtgaggaaaccattaagcaaggaaaccccttggatttaatgccgcgatatatggagcgatggaaaacggattataatccggaatacccccccttttcaaggtggtgcaattggttactttagttatgattgcatccgttatattgaaaaacttccttctcttgcggaggatgatattaatatacctgatatattctttttattatttgatgatgtgtttgtgtatgatcaaaaagaaaaagtattatggattattacacattatgtagataagcatgaagaggcaaaagagcgattaaatgaatggaagattctcttgggcgacagaagcgccggaagtgactataccggtttgcgtgccctgtcaaagaaaaatgaagcagttgcttttactgaagaaagctttatgaaggcggttgaatgtattcaagaatatattggggctggtggatgtgttcccagaaaaactggccaacagacaagaaaaaacgttacaaaccaccccccttagaaatatatacagtttcttcgggaaataaatccatctccaatatatggttactgggagctcggggatttttcaaaatgtaaagtgattcgcccagagttgctaattaagaaacagggaaactgaagtaagtacacagacccaattgctgggaacgagatctaaaaggggcaaatgaccaagaggatgaagaattggcaaggggaattaattgagaatgaaaaagaaagagcagagcacgtcatgcttgtggatttagaacgaaatgattttaggacgtggtttgtatatatggcactgtagaagtagaacgaagtttatggtaatttgagaaatactcacatgttatgcatattgtttctaatgtgcgtggtgaggtggaagaagataaagatgctttcgatttagtgaaggctgtattccctggaggaacaattacgggtgctccgaaaatacgtacgatggaaattattgaagaattagaacctgttcgccgagggatttatacaggttcaatcggttgggatgggttattctggagatacagaatttgatatttgtattaggacacttcttgctaaagacggaaaagcgcatgtacaagcagggggcggaaattgtcattgattcaaatccgggaaaatgaatataaaggattcgttaaaaaagggcgattggctttatgggcgtgcaaaaagaacgtagcgaagaaaacgtttaggtgagagaaatgatattaatgattgataattatgattcttttacattta

SEQ ID NO: 9832 - DNA, 3723 bp, Bacillus anthracis
atgatggaaaattggcctaaaaaaccagaaggtagtcaatggacagatgatcagtggaaagcggttgtagcgaccggacgtgatattttagtcgcagcagcagcaggatcagggaaaacagcagtattagttgaacgtattattaaaaagattataaatgaagaaaacccagtcgatgtcgaccgcctgctcgttgtaacatttacaaatgcagcagcgcaagagatgaaaaacagaattggagaggctttagaaaaagtattaattgatgaaccaggatctcagcacgtaagaaagcagctgagcttattaaataaagcttccatttcaacgatccattcattttgtttacaagttattagaggatattattacatgcttgatgttgatcctcgtttccgcattgcgaatcaaacagaaaatgaattattaaaagaagaagtgttagatgacatattagaagaagagtatggaatagaagataatacgatattctttgaactcgttgatcgttatacgagcgaccgtagtgatgatgatttacaacgtatgattttagcgcttcatacagaatcaagagcgcatccaaatccggaaaaatggctcgataaattagtagaagcatatgacgtcgaaggaaagacaattgaagatttagtgtacgcctcttacttattagaagatgtgaaattccagcttgaaacagcggaacagcatattcgtaaagcaactgagctcgcaatgcttcctgacggtccagcgcctcgcattgaaacgctgcaagcagatttagctttacttggaacgttatcagcagctgctcgtgaatcgtggacaagcgtgtatgaagcgatgcaaaacgtatcgtggcaaacgttaaagcgcattaagaaaagcgattataacgaggatattgtcaaacaagtagactctcttcgtaataaagcaaaagatgaagtgaagaaattacaagaagagctatttagccgcaggcctgaaagtttcttacgagattttcaagatatgcatcctgtattagaaaagctcgttcaacttgtaaaagtatttacagagcgtttccaagcgatgaagcgagataaaggcatggtcgatttcacagatttagagcatttctgtttacaaattttaagtgaacaaagtgaagatggtgaaatgaagccatcagcagtagcacttcaatatcgtaataaatttgctgaagtattagtcgatgaatatcaagatacgaacttcgtacaagaatcaattattaaattcgtaacgaaagattccgagagtgaaggaaacttattcatggttggtgacgtgaagcagtcgatttatcgtttccgactagcagaaccaggattattcttaggaaagtataaacgtttcacacaagaaggattaggcggcggaatgaaaattgacttagcgaaaaacttccgtagtcgtcatgaagtgttagcgggtacaaactttatcttcaaacaaattatgggcgaagaagttggggaaattgattacgatgctgacgctgaattaaagctaggtgctagctatccagaaggtgaagatgtagcagctgaactattgtgcattcagcaaacagaggaagaagtaatagacggtgaagaaggtgcggaagtagaaaaggcacagcttgaagcacgtcttatggcgcagcgcattaaagcgatggttgattcaggttatgaagtgtatgatcgtaaaacggatagtatgcgccctgtaaaataccgtgacttcgttattttacttcgctcgatgccgtgggcaccgcaaattatggaagagttaaaattgcaaggaattccagtatacgctgaccttgccactggttactttgaagcgacagaagtaaatattatgatgaacgtattccgcgttattgataatccgatgcaagatattccgcttgcagcagtgcttcgctccccaatcgttggattaaatgatgaagagcttgcaacgcttcgtgctcacgggaagaaaggctcgttttatgaagtaatgagctcattcttaaaaggagcaccgcttgaagaagaaaaagaactacatgataaattagaatggttctataacttactgcaaggatggcgtgaattcgcacgccaacagtctctttctgatttaatttggaaagtgtacggtgagacaggttattatgactttgtcggtggtttaccagctggaaagcaaaggcaagcaaacctgcgtgtactatatgaccgcgcaagacaatatgaagcaacatcgtttagaggactattccgcttcttacgctttattgagcgtattttagaacgcggtgatgatatgggtacggcgagagctttaggtgaacaagaagatgtcgttcgcattatgacaattcataaaagcaaaggacttgagttcccagtcgtattcgtcgctggacttggtcgtcgttttaatacgcaagacttaatgaaacgtttcttacttcataaagacttcggtttcggttcgcaatttatcgatccgcgtaaacgaattaaatatacgacattatcacaacttgcaattaagcgtaaaatgaaaatggaattaattgcggaagaaatgcgcgtcttatacgtagcgttaacacgggcaaaagagaagttaattttaattggaacggttaaggatgcaactaaggaaatggaaaaatggctggatgcgagggagcatagtgaatggttattaccagatcacgtacgtgccggagcatcttgttatttagactggattgcaccttccttatatagacaccgtgatagtgaaatgcttcttgaattagggcaaggaagtattccagatgaaatttatgggtatgacactagctggaaagtagaagttgttgacgggaacacgttacttgcgccagaacccgttcaagaagagaaacaagaattgttagaagcacttcgtgagaaaaaggctgttccgttagagagtgaacggaaagaagaagtgtacgatagattaatgtggaagtacggatatggagaagcgacatctcatcgtgcgaagcaatctgttacagaaataaagagaaattatcaatctgaagaaggtagcgataacgcttttattaaaaaattacgtgcaccaattcaaacacgtcctcgttttatggagaaaaaagggctaacgtacgcagagcgaggaacagcagtccatgccgttatgcagcatgttgatttgaagaagccgattacagttgaaattcttcaagagcaaattgctggaatggtaaataaagaattattaacatttgaacaagcagaagaaatagcaattgaaaaagtgatttcattctttgacagtgacctaggtaaaagggtattagcggcgaaaagtgttgagcgtgaagtaccatttacgatgatgcttgcagcagaagaagcgtatcaagattggcaaggggagagcggggaatccattcttgtccaaggggttatcgactgcatgattgaagaggaagatggtattactttaatcgactttaaaacggatacgattgaagggaagttcccgggaggattcgaacaagcgaaaccaattttagaaactcgttacaaagtgcagctttcgttatatgcaaaggcacttgagaaaagcttacaacatcctgtgaaagagaaatgtttatacttctttgatggtaatcatgttataaaagttgaggaa

SEQ ID NO: 9833 - DNA, 510 bp, Bacillus anthracis
atggcgcaaattcgtattcatgaagtaaatactcgcattgaaaatgaagtgaaagtatctaaatttctacaagaggaaggtgttttatatgagaaatggaatatttctaaacttcctcctcatttaaatgaaaattattcgttaacagatgaaaacaaggctgaaatattagctgtgttttcaaaagaaattgctgatgtttcagcgcgccgaggttataaagcacatgatgtaatttcactttcaaatagcacacctaatcttgacgaactattaattaatttccaaaaagaacaccatcatactgatgatgaagttcgctttattgttagtggtcatggcatctttgccattgaaggaaaagatgggacattctttgacgttgaacttgagccaggcgatctcatatctgttcctgaaaatgcaagacattattttaccttgcaagatgatcgtcaagttgtagctattcgtatttttgttacaactgaaggttgggttccaatctat

SEQ ID NO: 9834 - DNA, 1440 bp, Bacillus anthracis
gtggttaatataagagggtgggataaaagaagacggggtgttgatatgcaacgaagaaaatctttagcgctttctattccatatcagttagatttctttaagcaatataaatttctttctaaggataaaccgcaacacattttgttagagagtggacgtggcggtcgttataacatcgtgggattaaacccagtagcggtaatccgagggaagggtgaagcgttacatataagtgaaagtggtaaggaaacaataaagcaaggaaacccattggatttaatgcaggaatatatggagcgatggaaaacggattataatccggaatacccgccttttcaaggtggtgcaattggttactttagttatgattgcatccgttatattgaaaaacttccttctcttgcggaggatgatattaatatacctgatatattctttttattatttgatgatgtgtttgtgtatgatcaaaaagaaaaagtattatggattattacacattatgtagataagcatgaagaggcaaaagagcgattaaatgaatggaagattctttgggcgacagaagcgccggaagtgactataccgtttgcgtgccctgaaaagaaaaatgaagcagttgcttttactgaagaaagctttatgaaggcggttgaatgtattcaagaatatattggggctggtgatgtgttccaagtaaacttgtcgacaagacaagaaagaacgttacaaacacacccactagaaatatatacaagtcttcgtgaaattaatccatctccatatatgggttacttggagctcggggattttcaaattgtaagtggatcgccagagttgctaattaagaaacagggaactgaagtaagtacaagaccaattgctggaacgagatctagaggggcaaatgaacaagaggatgaagaattggcaagggaattaattgagaatgaaaaagaaagagcagagcacgtcatgcttgtggatttagaacgaaatgatttaggacgtgtttgtaaatatggcactgtagaagtagacgagtttatggtaattgagaaatactcacatgttatgcatattgtttctaatgtgcgtggtgaggtggaagaagataaagatgctttcgatttagtgaaggctgtattccctggaggaacaattacgggtgctccgaaaatacgtacgatggaaattattgaagaattagaacctgttcgccgagggatttatacaggttcaatcggttggattggttattctggagatacagaattgaatattgtaattaggacacttcttgctaaagacggaaaagcgcatgtacaagcaggggcgggaattgtcattgattcaaatccggaaaatgaatataaagagtcgttaaaaaaggcgattgctttatggcgtgcaaaagaacgtagcgaagaaacggttagg

SEQ ID NO: 9835 - DNA, 1284 bp, Bacillus anthracis
atgagtattcaaaatgtggaggcggaaaagacggtgttaggttctctactacttgatggagagcttattaaggagtgccgtttgacggagcagtatttttcgatgccggtgcataagtctatatttcagttaatgagaaagatggaaggagaggggcaaccgattgatcttgtgacttttacttctagggtagatccgaattttttgaaggggatcgggggaatggagtattttataggattaatggatggtgtgcccactactagcaacttctcatattatgaggggcttgttcgaggtgcttggaaaatgtatcaggctggcgtccttgggcacaagatgggagagcgtcttattgcggagaagagtgagaagattattggtgagacgattacggcactttgtgagttagaggagaaagactgtgtatgtgagtttgatttgaaggatgcgctagttgatttatatgaagagcttcatcaagatgcgaaagagattactggtattgagacgggttatacatcgctaaataaaatgacgtgcggattgcaggaaggagattttgtcgttcttggtgcgcgtccttctatggggaagactgcgtttgcgctaaatgtgggactgcatgcggcgaagtctggagcggcggtgggattgttttcgttagagatgagtagtaagcaattgttaaaaaggatggcttcttgcgtaggtgaggtatcagggggcagactgaaaaatccgaagcaccgttttgcgatagaagactgggaaagggtgagtaaggcgtttgcggagattggtgagttaccccttgagatttacgatcatgcaggtgttacggtgcaagatatttggatgcaaactcgtaagttaaagaggaagcatggtgacaaaaagattttaattattgtagattacttgcagcttattacgggtgatccgaagcataagggaaatcgatttcaagagattagtgagatttctcgtaagcttaagttattagcacgtgaattaaatgtttgcgtagtagcattatcgcaattgtctcgttctgtagagtcacggcaagataagcgtcctcttttatctgatttaagagagaccggacaaattgagcaagatgcggatgtcattatgcttatgtatcgcgaagattattacgataaagaaacgatgcagaaagagatgacggagattcatgtggcgaagcatcggaatgggcctgtggggagttttaagctgcggtttatgaaggagtttggtcggtttgtggagggggga

SEQ ID NO: 9836 - DNA, 667 bp, Bacillus anthracis
attttatctcagccagagtggcgtattgtagatcagtctagtttaggaccaacattccatgcacttcaatcattcgcaatggatgatacattatgcacaagcattggaaagggcgagtcagctgcaacaatgcgctcttgggttcatcacaatacaattgttcttggcattcaagattcacgcctaccacacttagaaagaaggtatttcctttttaaaagaaaacaacttcaatgttatcgttcgtaattctggcgggcttgcagtcgtacttgatgaaggtgtgttaaacgtatcacttttattccaagaaacagaaaaaggtattgatattgatcttggatacgatacgatgtggcatttaattcaggagatgctaaaagattatgacgttacgattgaggcaaaggaaattgttggttcttactgccctggcagctacgatttaagtattcgcgatcaaaaatttgcctgccatttcacagcgacgtattcgccgggtggtgtcgcaggttcaaatataaccttttgcgctaacaggaagtggtgtctgaaccgtgccgcacatcgttccgggatttttataaacctagcaatcccaaggaagaagaaaaccccctttacctatcctgaaattgtgccgagtacgatggcttctcctttccag

SEQ ID NO: 9837 - DNA, 1392 bp, Bacillus anthracis
ttggataaaaatcttaagaaagacctcaaaatacgccacattacaatgatctcaattggcggcgtaataggagctggtttgtttgttggaagtggggcagttgtgcattcagcaggaccaggttctatcgtttcatatgcattagcaggacttttagtcgttttcgttatgagaatgcttggggaaatggcagctattaacccgacaagtggatcatttgcaacatatgcaagagaagcaattggtccgtgggccggttatacaattgggtggctatattggtttttctgggtaattgttattgcgatagaagccacagcgggtgctggtattattcagtactggattccagaaatcccgctttggttattaagcttaatattaacgattttattaacattgacgaatgttttttcagtgaaatcatttggagagtttgaatattggttttcttttattaaagtaataagtattgttttgttcctttgtcttggactagctgttattttaggatttgtaccaggaacggaagcacctggcacttcgaacttagtggggcaaggaggatttatgccaaacggtataagttcggtgctacttggaattactgtcgttatattttcatttatgggatcagagattgtagcggtagcagctggtgagtctgcagaacctgtaaaagcagtaaaaacagcaacaaatagtgtaatttggcgtattctcgtatttttcattggatctatcgctgtagttgttacacttcttccgtggaattcagcaaacatactaaaaagtccgtttgtagcggtgctagaacatatagggataccagcggcagcgcaaattatgaattttatcgttttaacagctgtactttcttgtttaaattctggtttatatacgaactcaagaatgcttttttcgatggcggaaagaggagatgctccaaaggcgttcttgaaattgaacagtagtggtgttccagttcgggccgttttattcggaacgttcttcgcttatattggagttgtttttagttacatatctccagataaagtctttttatttttagtgaatgcctctggtgggattgcgttactcgtttatctcgttatagctatttcgcatttaaagattcgtaaaaaaatgggaagggtagaacaacaaaatttgaaagtgaaaatgtggtttttcccgtatgtgacgtatgttacaattgcagctattatagcagttttaattgcgatgcttgccattgaatctttacgttcacaagcacttttgacgatgcttgtcactgttcttataatcatttcttattttatttttaatagaaataaaaatagtacagtgttgaatactaaaagtaagaatgaggaatctgtccgattt

SEQ ID NO: 9838 - DNA, 727 bp, Bacillus anthracis
atggaacatacatttactgaaacttctattgtcggtgagattgttacacaatttccaaaagctagtgatctttttaaatcctatagaatagatttttgttgtggcggtaataagccacttattgatgcaattcatgaaagaaatttatcagctactgaagtaattacagagttaaatacgcctttttccttatacccaaacgatttaaatgaatctgaaattgattggaaaaatgcttcttatcgtgaattgattgattatgtgattcataagcatcatcgttatttaaatgaagaatttcccacagttagttctttatgtgacgaaaagtattacgttttcagggagccaatccacccgcatttaggtaaaaattcataagttatttcatgaccttaaatgggattaggaacagcttttatttaaagaagaaacagaagatttcccattaatttttaaattttgaaaaaaatccaactgatgaaaactatgcaaaggtacgtaaagtagtagatgacctagaaaatgaacataaccacgctggcaaccattattaaagaacctccgtaaggtacaaatgactttactccccccaaaggactttgcggcacttatcgacttgtttacaatcccccttgaagcgttagagtctgatttatttgagcacattcatttagaaaataatattttatttccacgtgccattacgagagcgtaaataaagtgc

SEQ ID NO: 9839 - DNA, 1413 bp, Bacillus anthracis
atgagtaagttattaaaaaagaaatccgttacacaattgttggagcataatcaaagtaaggccttaacgaaaacattaggagcatttgatttaattatgttaggggtaggctcgataattggaacgggggttcttgtgttaactggattagtagcagcaagagatgctggtccagcagttattttttcatttgtacttgcagcaattatatgcggatttatagcattatgttacgcagaaattgcttccacactcccggcgtctggtagtgtatatacgtactcatatgcaacaattggtgagtttgttgctcatctagtaggttggtctttactgttaatatatattgtggcaacagcggctgtcgctgctggatggacaggctatttccacaatttaataaaagggtttggattagagatacctaaagctctagtaacgatcccttcacatggtggtattgtgaatctaccagcagtaatcattacattgatattagcatggatgttatcccgtggtacaagggaaagtaaacgaatcaataatataatggtattgattaaaattggtatgattttgttgtttattacagttggtatattctatgtaaaaccaatgaactggataccaattgcaccatacggtttaagtggggtttttacgggtggagcagctattttattcgctttcacaggttttgatatattagcaacttcagcagaagaagtaaaagatccgaagcggaatcttcccatcggtattattgcatcattaatcatatgtacaattatttatgttatggtatgccttgttatgacaggaatggtttcctataaagaattaaatgtccctgaggcaatggcttatgtaatggaagtggtaggacaaggaaaagtcgctggtgcaattgctgtaggagctgtaattggccttatggctgttattttttccaatatgtatgcggcaacacgagtattctttgcaatgagtcgtgatggattgttaccgaaatcatttgcgaaagttaataagaaaactggagcacccacttttataactggattggcaggaatagggagctctataatagctgggtttattgatttaaaagaattggttaatttagttaatatcggtagtttggtgacgtttgcgttagtttgtctatcagttattattctccgtaaatcacacccaaatttaaaacgtggatttatggtaccttttgtacctgtattaccatgcgttgcaattgtatgctgtgtgtttttaatgctaaatttaccgttaaggacatgggtgtactttagcatttggattactattggggtagtaatatatttcctttattcgataaaacacagtaatttaaatgaggaaacgatctcgaaattacatgataaaattgcgaga

SEQ ID NO: 9840 - DNA, 1468 bp, Bacillus anthracis
ggaacatatgacagatttatatttgaaacgagcgcggtacttattacactaattattttagataaactatttgaagcaaaagcaaagggacgttcatcagaagcaattaaaaagttgatgggtttacaagcaaagacagctacagttatgcgagatggaacagaaatgaaaattttaattgaagaagtagtagctggtgatatcgtttatgtaaaacctggtgaaaaaattccggtagatggtgagattgtagaaggaaagtcagcaatagatgaatcaatgttaacaggtgaaagtattccagttgataaaacaattggggatgtagtaatcggttctacaatgattaaaaaatgatttttaaaagtgaaagcaactaaaggtaggaagagatactgcgttagctcaaattattaaagtagtagaagaggctcaaggttcaaaagctcttattcaaagggtagcagatcaaatttcaggtattttcgtaccggttgtagttgtgattgctattattacatttgcagtgtggatgatatttgttacaccaggtgattttggcggagcacttgagaaaatgatagcagtacttgttatcgcttgtccatgtgcattaggtcttgcgacacctacatctattatggctggatcaggaagatcagctgagtatggcattttatttaaaggcggggagcatttagaagcaacgcatcgattagatacagttattctagataaaacaggtactgtgacaaatgggaagccagtgttaacggatgtaattgtcgcagatggattcaatgaagaagaaatattacgtttagtaggtgcggcagaaaaaaaatctgaacacccacttgcagaagcgattgtagaaggaattaaagaaaagaaaattgatattccaagttcagaaacgtttgaagcgattcctggattcggtattgaatcagtcgtagaagggaaacaattattaattggtacacgccgattaatgaagaaattcaatattgatattgaagaagtttctaaatcgatggaagagttagaacgagaaggtaaaacagcaatgcttattgcaattaataaagaatatgctggtatagtggctgttgcagatactgtaaaagatacttcaaaagcagctattacaaggcttaagaaaatgggtctagacgttgttatgattacaggagataatacgcaaactgctcaggcaattgcggggcaagttggtattgaacacgtaattgcagaagtattaccagaaggaaaagcagaagaagtgaaaaaacttcaagcgcaaggtaagaaagtagcaatggttggagatggaataaatgatgctccagcacttgctacggcggatatcggtatggcaattggaacaggaacggatgtagcgatggaagcggcagatattacgttaatccgtggtgatttaaatagtattgctgatgcaatcttt

SEQ ID NO: 9841 - DNA, 1563 bp, Bacillus anthracis
atgagattcaaaaggggacttgtgagttgttttatcgcaattttatgtctttcagtttttctagcggggtgttcatctaatgcgaaaacaggaaatgaaggatcaggaagcaaagggacaaaggaaggcggcgttttaacaattgctagactgtcagatgctgataatttagatccacattttattacaaacatcccttccgcaagtgttgtgtatcataaagtgtatgaaaaccttgtacaacgagataaaaacatggattttaagccgatgttagcaaaggaatggaaacaaattgatgatttaaattgggaatttaagttgcaacaaggcgtaacattccaagatggtgcaccatttaatgctgaggcagtaaagaaaaactttgaacgtgtattagacccgaaagtaggttcaaatcgagcaactgtttattctatgattcaagaaataaaagtaattgatgaatacacagtacagttcatattgaaatacccatactcacctcttttatctattttcgcaagtaatgaaggaagtattttaagtccgaaagcaattgatgaaaaagggaagggcttagcgcagcatccagttgggacaggtccatatacctttaagtcatggaaaccaggtgaagaaattcgacttgaaaaaaataaaaattattggggtgagaaagcaaaggttgatgaagttgtattcaaagtagtaccagaagatgcaacacgtattggaatgatcgaaactagtgaagctcacattgcagagaatttacctgtaactgaagtagagcgagtgaaaaattcaccatccatggagttaattgaaaatgaaggtttaggtgtagaatatattggatttaatgtagagaaaaagccatttgacaatccgctcgttcgtcaagcgattgcacatgcaattgaaacgaaagggattttaaaaggggtatataacaatgttgggactgaaataaactccgtaatgacacctaaagtgttcggttatacgaaagacgtaaaaggatataagtatgacattaatactgcgaaaaaattattagcagatgctggttatccaaatggatttaaaacaacaatttggacgaatgacagcaaagttagaatggcgttagtggaagtaattcaatctcaattaaaagggattggcgttgatgtagaaattaaagttatggaatatggtgcgtttttagctgcaacgaataaatcagaacatgcgatgtttgttggaggatggggaaacgcaacaggtgatggtgactataatcaatataatttattccattctagttcacacggagcaactggtaaccaatttttctatagtaatccggaagtagataaattaatagaagaagctagaaaagaaaaagatgagacgaagagaaaagaattatacaaacagttacaagagattgaattaaaagatgctttactagtaccaattcgagggattaatcatattgcggcaactacgaaaaatataaaaggattttggattgatccatctgggtatttgcgactggaaggtgtagagctacag

SEQ ID NO: 9842 - DNA, 412 bp, Bacillus anthracis; identical to SEQ ID NO: 9411

SEQ ID NO: 9843 - DNA, 2091 bp, Bacillus anthracis
atgatgagaccggtagtagtaaaagaaaaaagagtaaatgagtcacacatacatgcggtagaagatgaggttagacaagcgaaaacgatggatcgtgatatcgtgaaacatgcgatgaaacaatccgttgcgaaattgaatccgaaagttatgataaagaatccgattatgttcgttgtagaaattgggtttgtcattacgttcattttatcgtttcttccaagtcattctagtagtataccaggatggtttaatataactgtttctctcattctattatttacagttttatttgcgaactttgcagaagcattagcagaaggtcgtggtaaagcgcaagctgattctttaaagcagtcgaagaaagatgtgtttgcaaatgttgtaaaagaaaatggagaaattgttcaagtttcagcaactgaccttagaaaagatgacgttgttattgtaaagcaaggtgagatgattccaagtgatggtgaagtcattaaaggattagcgtctgttgatgaatctgcgattacaggggaatcagcacctgtaataaaagaagcgggcggtgatttttgttccgtaacaggcggtacgatggttgtaagtgatgagattacgattgtcattacgagtaatcctggtaaatcctttattgataaaatgatttcgttagtagaaggagctgctcgtcaaaaaacaccgaatgagattgctttaaatacagtattaacgagcttaactcttattttcttaatcgttgttgtgacgctgccgatttttacaaattatttaggatttcaaattgatacagctgtacttgtcgcgttgttagtttgtttaattccgacgacaattggtgggttattatcggcaattggtattgccgggatggaccgcgtgacaaagtttaatgtgttagcgatgtcgggtaaagcagtggaagctgcgggtgatattaatacaattattttagataaaacgggtacgattactttcgggaaccgaatggctcatacattattacctgtaggaaatgaaacgattgagcaagttggaaagtgggccgctattagttctgttttagatgaaacaccagaaggtcgatctgtaattgagtatgtgcaggcgaaatctatatcatataatagagaacttgcggaacaaggcgagttcattccatttaaagcagaaacgagaatgagtggtgttgatttacaggacggaatgaaagtgagaaaaggtgctgtaggtagcgtgattgaatgggttaggtcacaaggtggaacaattccgaaagatgtaaatcaaaaagcagatttcatttcaaaagagggcggaacaccacttgtagttgcagtagataatcgtatttacggtttaatctatttaaaagatacagtaaaacctggtatgcgtgaacgttttgaacagttgcgtcaaatggggattaaaacggttatgtgtacaggggataaccctttaacagcagcgaccattgcaaaagaagctggagtagatgaatttgttgctgagtgtaaaccagaagataaaattgcggttattaaagcagagcaagataaagggaaacttgtagcgatgacaggtgatggtacaaatgatgcaccggcattagcgcaagctgacgttggattagcaatgaatagtggtacgacagctgcgaaagaagcagcgaatatgattgatttagattcgaacccgacaaaaattattgaggttgtaggaatcggtaagcaattattaatgacacgcggtgcgttaacgacgtttagtattgcgaatgatatcgcaaaatatttcgctatcattccagcgatgtttacacttgcgattccgcaaatggaagcattgaacattatgaaactaacatcaccgctgtcagcgattttatcagcattactatttaatgcagttattattccgttactcattccgttagcgatgaagggtatagcatataaaccgatgagttcaaatgcactacttggccgaaacctacttatttatgggcttggcggagtgattgtaccgttcattggaattaaagtaattgatatcattgtcggattgttcata

SEQ ID NO: 9844 - DNA, 1416 bp, Bacillus anthracis
atgagagcaagtgacgataaagcactgcaatatgcgatagcggaaattacggaaattgcgactggatttgggcttgatttttatccgatgcgttatgaaatatgtccagcggaaattatttatacatttggtgcatatgggatgccgacgcgtttttcacattggagttttggaaaacagtttttcagaatgaaattacaatacgatttaggtcttagcaaaatatacgaactcgttattaactctgatccatgttatgcctttttattagatacgaactcgttaattcaaaataaattaatcgtagcacacgtgttagcgcactgtgatttctttaaaaataacattcgtttttcaaatacgaagcgagatatggtagaaagtatgtcagcaacagctgaatgggtgaaagcatatgagcataagtacggaaaagaagaggtagaaacatttttagatgccgtacttgctattcaagagcatattgatccgtcgcttatgcgtccgaaactggcgtggagtattgatgatttagaagaggaagaagtagagaagaaaaaggcatcgcaatatgatgacctatggaatttagataatcgaaataaaaagcaggaacgctccaatgtacgtaaaaagaagaaaatcccaccgcaaccagaaaaagatttactcctctttattgaagaatatagccgtgagttagaagattggcagcgagacatattaacgatgatgcgtgaagaaatgttatatttctggccgcagcttgaaacaaagatcatgaacgaaggctgggcgtccttctggcatcaacgtatacttcgtgaaatggacttaacatctgatgaagcaattgaatttgcgaaattaaatgcaggcgttgtacagccatcaaaaacgagcattaatccatactacctcggtattaaaatgtttgaagatattgaagaacgttacaacaacccgacagaagaaatgaagcgacgaggtgtcaaaccaggatctggtcgagacaaaatctttgaagtacgcgaaatcgaatgggacgtatcgtttttaagaaactacttaaataaagatctcgtaatgagagaagatatgtacttattccagcgccaaggaaaagaatataaagtaatagataaagagtgggaacatgtacgtgatcagctcgtaaatatgcgtacaaatggtggcttcccgtacttagtagtagaagacggagactacttaaagaacggagaattgtatattaaacatagttacgaaggaatcgagctcgatttaaaatacttagaaaaggtattaccatatctgcatcaactgtggggaagaacagtgcatatggagtcgattgtggagagtaagggtgttgtgttttcttatgatgggaagatggtgcatcggaagtatgtg

SEQ ID NO: 9845 - DNA, 4217 bp, Bacillus anthracis
cttatcttagaagatggaacagtattaattggaacaggtttcggaggagaaatcgaaaagtcaggtgaggttgtatttacaacaggaatgactggatatcaagaaacattatctgatccatcatattgcggtcaaattgtaacattcacgtacccactaatcggaaactacggcatcaaccgtgatgattttgaatcgattcacccatctgtaaatggtttaatcgtaaatgaaatttgtgatcacccatcaaatttccgtaacgaaatttcgttaaatgactacttaaaagaaagaaacatcccaggattagcagggattgatacgagaaaattaacgagaaaaattcgtcaatacggtacattacgcggacgcctatgtaacatggatgcagatgtagagtacatcgtgagtcaattaaaagcgacagtatttacagatcatgtaaaacgcgtatcaacgaaagatccatatccaagcccaggccgcggacatcgcgtcgtactagtagacttcggtatgaaacatggtattttacgagaattaaataaacgtgattgtgatgtaattgtagttccttacaacacaacagccgaagaaattttacgccttagtccagatggaattatgttaagtaacggacctggggatccaaaagatgtaccagaagcaattgaaatgttaaaagacattatcggtaaagttcctttattcggaatttgcctaggacatcaattgttcgctctagcatctggtgcgaatacaagtaagttaaaattcggtcaccgtggtttaaaccatccagtaaaaaatattgcaactggaaaagtagcaattacatctcaaaaccatggttacgcagtagaagaagaatcagttgaaaatacagagcttgaaattacacatgttgctttaaatgatggaacagtagaaggtcttcgtcataagaagtttccagcatttacagttcaataccatccagaagcttcagcaggaccagaagatgcaaatgatttattcgaagatttcttaacaatgattgaaaacttcaagaaagaaggggaagagttatgccaaaacgcctagacattaacacaattttagtaatcggatcaggaccaattgtaattgggcaagcagcggagtttgactactctggtacacaagcttgtcaatctcttaaagaggaaggttacaaagtaatccttgttaactctaacccagcaacaattatgactgatactgcaacagcagataaagtatatattgagcctttaacattagaattcgtcagccgcattattcgtaaagaacgtccagatgcaatcttaccaacattaggtggtcaaacaggtttaaacatggctgttgaacttgcaaaatcaggcgtacttgaagagtgcggagttgaaattttaggaacgaaattatcagcaatcgagcaagcggaagatcgtgatttattccgtacattaatgcaagagttaaatgaaccaacaccaccaagtgaaattattcataaccttgatgaagcatatggatttgtaaacgaaattggttatccagtaatcgttcgtccagcatttacattaggcggaacgggcggcggaatttgtcataacgaagaagagctaattgaaattgtaacaagtggtttaaaacatagtccagtaacgcaatgtttattagagaaaagtattgctggctgtaaagaaattgaatatgaagtaatgcgtgattcaaatgataacgcgattgtagtatgtaacatggaaaacatcgatccagttggtgttcatacgggtgattctatcgttgtagcaccaagccaaacgctaagcgatcgtgaataccaaatgttgcgtaacacttcattacgaattattcgtgcactaggaattgaaggtggatgtaacgttcagcttgcattagatccatatagcttccaatactatgtaatcgaagtaaatccacgtgtaagtcgttcatctgcactagcatctaaagcaactggatatccaattgcgaaattagcagcgaaaattgcagtcggcttaacattagatgaaattgtaaacccagtaacacaaaaaacttacgcttgcttcgagccagcactagactatgttgtttcaaaaattccacgctggccatttgataagtttgaatcagcgaacagaacacttggaacgcaaatgaaagcaactggtgaagttatgtcaatcggacgtaacttagaagaatcattattaaaagcagttcgttctttagagcttggcatttatcacttagaattagaccacttaaaagaacttgataaagaaacaatgaaaaaacgcattattaaagcagatgatgagcgactgtttatcgtagcagaagcgattcgtcaaggtgtaacgaaagaagagattaacgaatggtgtgaaatggacttcttcttcttacaaaaagttgaaaacatcgtaaatatggaacgcgaagtaaaagcgaatgtaggaaatatggaagtactacaaactgcgaaagaaatgggcttcagcgatcactatattgcagcagcttggaacaaaacggagcgcgaaatttacgatatgcgtaaagaaaataatatgacgccagtattcaaaatggtagatacttgtgcagcagagtttgaatctgcaacaccgtattactacagcacatacgctgatgagaacgaattaattgtaacagatcgtaagagtgtagtagttctaggatctggaccaatccgcattggtcaaggtgttgagtttgactacgcaacagttcactcagtatgggcaattaaagaagctggatatgaagcaattatcattaacaataacccagaaactgtttcaacagacttcagtatttctgacaaattatactttgaaccattaacaatcgaagatgtaatgcacatcatcgatttagaaaaaccagaaggtgttatcgttcagttcggtggacaaacggcaattaacctagcggcgaaattagaagaacatggtgtgaagattttaggaacatcacttgaagacttagaccgtgcagaagatcgtgataaattcgaagctgctttaacaaagcttggtatcccacaaccagttggtaaaacagcaacgactgtagaacaagcggtagcaatcgcagaagaaattggttacccagtattagtaagaccatcttacgtactaggtggacgtgcgatggaaatcgtatatcgtcaagaagaactactgcactacatgaaaaatgcagttaaagttcacgcagatcacccagtattaatcgaccgttacatggttggtaaagaaattgaagtagatgcaatttcggatggtgagaatgtattcattccaggtattatggaacatattgaacgcgctggagttcactctggtgactcaattggagtatatccaccacaaagtttatctgaaaaactaaaagaacaaatcattgaacatacaattgcacttggaaaaggattaaacattgttggattactaaatatccagtttgtagtattcaaagatcaagtgtacgtaattgaagtaaatccacgtgcaagccgtacagtaccgttcttaagtaaaattacaggcgtaccgatggcgaatgttgcaacgaaagttattttagggcaagacctagtagagcaaggatacggaactggctatcacccagaagagaaagaagtatatgtaaaagctccggtattctcattcgcgaaactacgctcagttgatacaacattaggacctgaaatgaaatcaacaggggaagtaatgggtaaagacttaacgcttgaaaaagcattatacaaagggttagttgcttctggaattaacatcccaacgcacggctcagtaatcattactgtagcggataaagataaagaagaggcgatggaaattgcaaaacgtttccacgaaatcggctataacttattagcaacagctggaacagcacaatcgttaacagagcaaaatatcccagtacaagttgtaaacaaaattgattctgaagactacaacttactagatattatccgtcaaggaaaagcacagtttgtaatcaatacattaacaaaaggtaaacaaccagcgcgtgatggtttccgcattcgccgtgaatcagtagaaaatggtgtagcttgcttaacatcacttgatacaacgagagcaatcttacgagtattagaa

SEQ ID NO: 9846 - DNA, 357 bp, Bacillus anthracis
atgttagttgcatatgattctatgacaggaaacgtaaagcgtttcatccacaaattaaatatgccggccgttcaaattggtgaagatctagtaatagatgaagactttattttaattacgtatacaacaggttttggcaatgtaccagaacgtgttttagaatttttagagcgcaataatgaaaaattaaaaggcgtatctgcaagcggcaatcgtaactggggagacatgttcggtgcaagtgctgacaaaatttctgctaaatatgaagtgcctattgtatcaaaatttgagttatcaggaacaaataacgatgtagaatattttaaggaaagggtgcgggagattgcgacacat

SEQ ID NO: 9847 - DNA, 905 bp, Bacillus anthracis
aaaaagaaaattttattttgggtactcggtatccttggggtactaatcataggtggaggaatttatgcttataatgtatattcttctgtatctaatacattaaaggaagttcatcaacctttaaaacgtgatcaaaacaacagtaatgttggagaaaaagtgagtaagagtgaaccagtgtcaattttattactaggagcagatgagcgcggtgaggataaagggcgttcagattctttaatggtgattacattaaatcctaaaaataactctatgaaaacagtaagtattcctcgtgatacgtatacagaaattgttgggaaaggtaaaagcgataaaatcaatcatgcttatgcattcggcggagttgatatgtctgtagcgacagtagaaaacttcttgaatgttcctattaattattatattgaagtgaacatggagggctttaaagatattgttgatgcagttggcggtgtagatgtaaagaatgatttagaatttacgcaggatggacatcattttgcgaaaggaaatattcatttaacaggtgaccaagctctagcattcacacgtatgcgtaaacaagacccacgtggtgactttggtcgtcagatgcgtcaacgtcaagtgatgcaaggtgttatcaaaaagggtgcaagcttctcttctttaacaggttatgagagatgtattatcagcaattcaaaagaatgtagaagacaaacttaacgcaagatcaaatgtttgatatgcaaaagaactataaagattgcttgaaaaatagtgaggatattcaaatcccaggtgacggtcacaaggctgctgatggcatttggtattactatgttccagatgcagcaaaacaagatttaacgaataaattaagaacgcatcttgaagtgact

SEQ ID NO: 9848 - DNA, 981 bp, Bacillus anthracis
atgaataaaaaaacttggagtttcctcattgttactgcattacttatcgttatgacatcattgtcagcgatgaaagggagtttagaagtaggtattgttgaacttgtacaagggatatttacaggtggaaatgaagatgttgaagtgattaaagatttacgttttccgcgtattattattgcgttattcactggagcggctcttgctgtttctggtgtgctttttcaagctgttatgaaaaatccactcgctgatgctggagtgattgggatatcttcaggagcaagttttatgacacttgttattataacgttgttcccgcaattctttttctggacaccagtatttgcctttttaggtggtgcgtttgcgtgttatctcgtttatgcattttcatggaagtcagggttaagtccacttcgtattattttagttggtatagctattaatgcgatgtttactggattaaatgaatcgttcattacgatttgtggatatttcattaagagtattaagcaaacgacgacttctaatataacgatgaagacgtggggcgatgtagaaataatggttacgtatggaacaattggtttggttcttgctctgtttgtaggagcttggtgtaatttattatcactacaagataagactgcgaaaaacttaggtttgcacgtgacgagagttcgtcttattatttctgttattgcagtactcttagctgcagtatcaacagcgattgcaggtgttattgcttttgtaggattacttgttcctcacatttcaagacaattagtcggttcagatcataaagtattaattcctttttctgctcttgcaggagcgttattaattttgacggcggatacgattggaaggttaattgtaccacctaacgaaattccagcggcgacgattatggcagttattggtggcccattcttaatattcttgcttagaaagagtgataaagttcatggaaat

SEQ ID NO: 9849 - DNA, 354 bp, Bacillus anthracis
gtggctaaaaaggtaattaaaatggtaaaacttcaaattcctgcaggtaaagctaacccagctccaccagttggtccagcattaggacaagcaggtgttaacatcatgggcttctgtaaagagtttaacgctcgtacagcagatcaagctggtcttatcatccctgttgaaattacggtatttgaggaccgttcattcactttcattagttaaaacccctccggctgctgtttttttaaagaaagaagctggtattgagtctggttctggtgaaccaaccggtaataaagtgccaacctgttaaggcgtgataaagtacgcgaaatcgctgaaactaaaatgcctttaccttaa

SEQ ID NO: 9850 - DNA, 1353 bp, Bacillus anthracis
atgaacactgtatcaaaaaaacatatttttttcacgggtcttatgctattttctttattttttggggcaggtaatttaattttccctcccatgcttggacaaaatgcaggtgaaaacttttggccagcaatgattggatttttactaacaggagtcggtttaccactactaactgttatcgcaatttctttatcaggaaatggtatgcaacaacttgcaagtcatgttcacccattattcggaatattctttacggtagttgtatacattgccattggtccttctatgggtattccacgcgttgcaaatgtcgcttatgaaatgggcgtaagttctttcttaccagaaacaatccgttctagcagcctagtgctatttgtatatacaatcatattctttgctatcgtattttggctgagcttgaatccatctaaacttgtagatcgcattggaaatatattaacacctattttattactctctattttcttattgtttgttaaaagtgtatttacaccactcgggcaatcaggtccagcgatgcaagagtatcaaactttcccgatcttcaaaggatttatggaaggatacttaacgatggataccatttcagcacttgcatttggaattatcgttgtaaatgctattcgctctaaaggtgtgaatgatcgtaaatccattgccatcgcaacagcaaaagcagggcttattgccgctactggtctcgtacttgtatatggtgcgcttggctggctcggtacaactagcgtctcgctcggatatgcaaaaaatggcggacagttacttactgttatcgtacaacaattattcgggccatacggcttacttctactagctctaatcgttacactcgcttgcttaacgacatgtgttggactcgtatctgcatgtagtcaatatttctcaacattattgactaaattttcatacaaaacatttgcaagtatcatttgtgctttagggttactagttgctaacttaggtttaacaaaaatcattgccatctctgttccaattctacttgttgtatatccaattgcaatcgtacttgttctactatcgttactgcataaatacttcgggggatatcgttctgtttatgtaggtgctttaattggagcagctatagtgagcgtatttgatggattaaaacaagggggtatttcagtttcatttatcacatcatattttgaatttatccctttatataatgaaggaataggctggctagtacctgcattaaccggagctcttatcggccttacaatcgctaaactaagcggtgcgaaaaaagttcctttactaaccgaatctcgtgaagtaaaagcatcc

SEQ ID NO: 9851 - DNA, 471 bp, Bacillus anthracis
atgtatcaagtaaatttttatcaaataacaagtgagactgatgcagagaagcagcggcaatcccaggaggtaaataaaacaaatgactttattcaaccagctgcaggaagatatacttctagatttgaaaaacgtggtgggaaaatgcatcacggattagatattgctgcttcaggtacagtgccggttgttgctgccgcagagggtgtaatcactcgctcttattattctacaagctatggtaatgttgtgtttatttctcacaatattaacggacaaacatatacgactgtatatgctcatttaaagagccgttctgtttctgctggtcaaaaagtgaagcaaggacaacaacttggcataatggggaatacaggacaatctgaaggacagcacttacattttgaaattcataaaggtgaatggaatgcacagaagagcaatgctatggatccaaaaatatacattgat

SEQ ID NO: 9852 - DNA, 1185 bp, Bacillus anthracis
atggctaaagctaaattcgaacgttctaaaccccatgttaacatcggtacaatcggccacgttgaccatggtaaaactacattaactgctgcgatcactacagtacttgcaaaagctggtggtgctgaagcacgcggatacgatcaaatcgatgctgctccagaagaaagagagcgcggtatcacaatctcaactgcacacgttgagtacgaaactgaaactcgtcactatgcacacgttgactgcccaggtcacgctgactatgttaaaaacatgatcactggtgctgctcaaatggacggcggtatcttagtagtatctgctgctgatggcccaatgcctcaaactcgtgagcacatccttctttctcgtcaagtaggtgtaccttacatcgttgtattcttaaacaaatgcgacatggtagacgacgaagaattattagaattagtagaaatggaagttcgcgacctattatctgaatacggattcccaggcgacgacattcctgtaatcaaaggttctgctcttaaagctcttcaaggagaagctgattgggaagcaaaaatcattgaattaatggctgaagttgatgcttacatcccaactccagaacgtgaaactgacaaaccattcttaatgcctgtagaggacgtattctctatcacaggtcgtggtacagttgctactggtcgtgttgagcgcggtatcgttaaagttggtgacgtagtagaaatcatcggtcttgctgaagaaaatgcttctacaactgtaactggtgtagagatgttccgtaaacttcttgaccaagctcaagctggagacaacatcggtgctttacttcgtggggttgctcgtgaagacatccaacgtggacaagtacttgcaaaaagcggttctgtaaaagctcacgctaaattcaaagctgaagttttcgtattatctaaagaagaaggtggacgtcacactccattcttcgctaactaccgtcctcagttctacttccgtacaactgacgtaactggtatcatccaattaccagaaggtactgaaatggtaatgcctggtgacaacatcgaaatgactatcgaacttatcgctccaatcgctatcgaagagggaactaaattctctattcgtgaaggtggacgtacagtaggttacggtgtagttgctactatcgttgag

SEQ ID NO: 9853 - DNA, 524 bp, Bacillus anthracis
ttgaaagagtacatgttaaaacaggtggattcccatgcttgggctaatatacgattattcgatcgaataaaagaattaccaaactatgaggcgattttttctgaacagatacagagcgtattcccttcaatcaaggatacttttgcgcatatttatattacagatcaagtgtggttacacatattgcatggtaaaagtatgaatgaagcaatacaagaccgagaaaatttacgaaaacaaatcgaacctaaatcgttatatgaattagaaaaattatctgaaaacatggcaaatcaatataaagactttttaagtacgatacaagacgtgaatgcagtatttgttattgagaacccatatgcaggggcattagaaactttcatttttagagttagtacaacatgtcgtaaatcatggtacatatcatagagggaatatttacagcatgattccgtcacttggtcatttcgtcgacaatgatggattttgtactgtatttacatatggttaaaaagcagggagag

SEQ ID NO: 9854 - DNA, 219 bp, Bacillus anthracis
atgagttttaagtggaaaccccaacctgcaattctcattggtttatcagcattaggtgcagtcactggtaacggtcttatcgtatcacgtacaatcgaaggtgttgctcgtcaactagaattaaaaggcgcacttcaaacaattatgttcatcggggttgctttagttgaggcacttccaatcatcggtgtaattattgcattcatcgtaatgaacaaa

SEQ ID NO: 9855 - DNA, 273 bp, Bacillus anthracis
atgcgtctagataagtttttaaaagtatcacgtttaattaaaagaagaacattggcaaaagaagtagctgatcaaggaagaatatccattaatggtcaagtggcaaaagcgagttcggatgtgaaagtagctgatgaactaacaattcgttttggtcaaaaaatagtaactgtaaaaataaacgaattgaaagaaacgactaaaaaagaagatgcagcaaatatgtatagcttagttcgtgaagaaaaagtaaaggctgaagaaggcttgttc

SEQ ID NO: 9856 - DNA, 905 bp, Bacillus anthracis
ttggtttctattatgggcaggccgaaatgttgggaaatttccattttttaatccgtattattggtcaaaaaatttgctaatatgagtggacaaggcaacaacccatcttgtaataaatttcaagggcgtatatccagaaaaatgattcacaagtaattttcattgatacaccaggaatacataaccctaaacataaactaggcgacttcatggtgaagatgccgcaaacgacattaaaagaagtggatatcgttctgtttatggttaatgctgtcgaaggctttggtcgtggtgaagaattcatcattggagaagttaaaagaaacgaaacaaccagtatttctagttattaataaaattgaccaagttcacccagaacaattattagagttaattgatcaatatcgcaaattacatgactttgcagaaatcgtaccaatttctgcattagacggtaataatgcggaagctctaattggaacaattaaaaagtatttacccggaaggaccacaatactacccagataatcaagtaacggatcatccggaagagatttattattgcagagcttattcgtgagaaagtactacatttaacacgtgaagaaagtgcgcatttctgtagctggtggtatcgatggcattcaaaaacgcgaggggcggagcggtttatatcaatgcaacgattgttgttgaacgtccgtgaagaaaaagggattattatcggaaaacaagggaagatgttaaaagaagtcggtaagcgagctcgttttgatattgaagcattacttggttctaaagtatttttagaagtatgggtaaaagtgcaaaaagattggcgtaataaaatgtctcagcttcgtgaccctgggttcccgcgaaggcgagtattaaaatagagtaaa

SEQ ID NO: 9857 - DNA, 777 bp, Bacillus anthracis
ttaatatttattggataatttcaaagttaccggaagggggaccgaattggtttttgggttcctttggatggaaggggttcgccatttaattttaaggtggctaggagttccggattcagaacggacccttcttttacctttattatcagggatttatttttatgttgggttatggattacgatgtctttagtcattaatcgatttatgaggattgactttttagtcttttttacaaatgttgtcgcatttggcgtaagcgctttttctatttttacaccgctcggaaaagatgtcgccgggtacttgcaaaaaaattaaatttcggaacttggaaccgaactggccgggagggcatttatttcttatgcaacttttactgtatcgttcattttttctattatgtatttattgcaatatcgcctattaaaaaagaaaaaatggaatgcgagattaagaaggttaggaaattttccgaaagctagaatcgatgtcttcgggataaaattaattttctgttccatttttctacttagctattttattaggatgcatatggggatatacaaaatgggacaattcccattggtatgatacgaaagtaatcgggtcttttgtcgttctatttgtatatggtgcgggcctatatttacgagctgcagacgtgttgccaagggaagaaaatcgtccagtggaccatgggggcatttttggtaatgttaattaatatttttttattaagcagtttatccaacttccacttttggtatttataatga

SEQ ID NO: 9858 - DNA, 753 bp, Bacillus anthracis
atgaaagccatcttatatatatgtcatggaagtcgcttgaaagcagctaaagaagaagcggttgcatttattacgtcatgtatgaaccgtgtagaggtaagtattcaagaaatttgttttttagagttagcgagtccaactattgatgaagggttccgtacatgtgtgaagcgtggtgctacagagattatcgttattccagtttttttattagcagcaggtcatgtaaaaaaagatattccgtttgaattggaaaagttaaataatcaatatccaagtattaaagtgacctatggtaatccatttggcgtatcagaagcacttataaaatcagtgtatagcggaagtggcattgaacaggaaaataagaatgaagtgacgttacttctcgttgcaagagggagcagtgatcctgaagtattaagagatataaactggattgcttctttatttcaaaaggaagagaagattaagaaagtagaagtttgttacttagcggctgccgagccgaaatttgaggagaagttaaaggaagttgtagaacgaaaagaaaagaatatcgttgtgctgccttacttgttatttacaggtttacttatgaaacatattgaaaaagaagtgcgccaatatgagctagatgagataaaaataagtccgtatttaggaaagaatgaagcgtttcagtatatgttaattcagaaaacgaagaaattattgaagggagatcaatatgtatccacttacagtgcgagt

SEQ ID NO: 9859 - DNA, 315 bp, Bacillus anthracis
atggatacgatagagacgaaagcttttcatttgattttgcatgggggaaatgcgagaagttgttcaatggaagcaattgattgcgcgaagcgtggggagtttacagaagcagaagcgaaattacaagaagcgttagaggaattaaaagaggcgcaccgtgtacaaacggatctcatacagaaagaagctggtggtgaaaaaactgaagtaactcttctgatggtgcatgcgcaagatcatttaatgaatgcgattacggtgaaggaattagcgagtgaatttgtagaattatataggaagatgtcagtgactgaa

SEQ ID NO: 9860 - DNA, 992 bp, Bacillus anthracis
aaatatctaaattctaatttgaaagtattctctttaaaacttttaataagggaatcttgctggagcaatattgcaaaagccccattgggagtgggattagggaaaaattttcttgtggatcgttttaagtgatggagaagtttaaaattaacattggaagaaagtatcccgtgggttgcgatgtattcatatccatttctacaagcttcccagtaaacgaccatatcatggaattacttattatgatcgatgcattaaaagcgtgcattctgcaaaaacaattaatattgttattccttactatgggtatgcgcggccaagaccgtaaagcgcgttttcgtgaaccaattacttccaaactgggagcaaacttgcttggaaacagcaggtgcaacccgtgtaatcactctagatttacatgctccacaaattcaagggttctttgatatcccaattgaccacctaatgggtgtaccgattctttcagattactttgaaacaaaaaggcttaaagatatcctaatcctggcacctgaccaccggggaataactcctgctaaaaaaatgggaaaaccccttaaaacacccatccctaataatgattaaccgcctcctccttccaaccgattctaaggaattaaccttaatcggaataattgaaggtaaaacggaaattttaattgatgacaccactgtccaggactggtacaattacattagcagcaaacgctcttgttgagaacggtgcttctgaagtatatgcttgctgtacacacccagtatctaacaagtccgagcgaattgagcgtatccaaaactcaaatattaaagagttagttgtaacgaactctatcgtattaccagaagagaagaaaattgacaaagtacatgaactttcagttgctccactaatcggagaagcaatcattcgtgtatacgaagaagaatctgtaagtgtattattcaattaattggatagaatgagacgtaac

SEQ ID NO: 9861 - DNA, 993 bp, Bacillus anthracis
gaaaaagttcaaggaaaaggcatttctatcgtacttcctgaaaggaactgatgaaagaattttaggcgctgcagagcgtttagcaaaagaagagttagtaaaaccaatcttagttggtaataaagaagaaaattggcgcaaaaagctgctagccatgaattttaaattaagaagcggttggtattttacaatccacctacatacccaaaaaaaaggatgcaatggtagcatctttcgttggacgccgtaaacgtaaaagcacagaagaagacgctcgctaaatcctttaatgacgaaaattacttcggtacaatgcttgtatacatgggcaaagcacacggtttagtaagtggtgcagctcatcttacaggtgatacagttcgtccagcacttcaaattattaaaacaaaacccaggcgttacaaaaacttctggcgtattcatcatggtacgtgaagaagagaaatatgtatttgctgattgcgcaattaacattgcaccaaatagccaagatttagctgaaattggtatcgagagtgcgaaaactgctgaactattcggtattgacccggcaagttgctatgttaagcttctctacaaaagggtgtgggaatttcccagaaacaagaaaagttgtagaggcaacttggcattgcaaaagaaatggcttccagaattaactttagatggagaattccaaattggatgcagcattcgtaccatctgtagctgagaaaaaagctcccaggttctacaataaagggtgatgctaacgtattcgtattcccaaagtttagaagctggtaatatcgggttacaaaatcgctcaacgtttaggtatcttggaagcagtaggaccaatcttacaaggttttaaacatgcctgtaaatgacctatctcgtggatgtaacgaagaagaagtgtacaagttagctttaattacagcagctcaagcactttaattctataatgaattgaaaataaagaccgtc

SEQ ID NO: 9862 - DNA, 941 bp, Bacillus anthracis
gagtttaaacagggtatagaaaaaacggagaaattcgtttgcggataaagtaaatgatttagtctttcgttaccgtaaagtagatgaagattttttgggggaattagaagaaatcttaatcggtgcagatgtgggcgtttcaacagtgatggaattaatcgatcagttgaaagaagaagtgcaacgccgttacctttcaaggccccagagagaagtccaaagtttttattttcggaaaaaattaaatggaaattttttaaagggggccggcggtttttactaaagaaggtaaatatgcaaaggggatgcctgcacagttgttttattgttgggtgttaatggtgtaggtaaaccgacaacaaattggtaagatggctcataagtttaaatcagaaggtaagtctgtcttattagcggcaggagatacattccgtgctggagcgattgaacaattagaagtttggggcgatcgcgttggggtagaagtgattaaacaaggatcaggatctgatccagcagcggttatgtatgatgcggtacaagctgcaaaagcacgtaacgtagacgtattactatgtgatacagcaggacgtttacaaaataaagtgaacttaatgaaagagttagagaaagtaaagcgcgtaattgagcgtgaagtaccaggagctcctcatgaagtattacttgttattgatgctacaacgggacaaaacggtttaagtcaagcgaaaacattccgtgaagcaacgaatgttactggtattgttttaacgaagttagatggaactgctaaaggtggtattgtattagcgattcgtaacgaaatggatgtaccggtgaaattcgttggattaggagaacaaatggatgatctgcaacagttcgatccagaacaatatgtatatggtttatttgcgaacttagtagaaacagaagaagta

SEQ ID NO: 9863 - DNA, 795 bp, Bacillus anthracis
atgaatatggaatggttggaacaattattaggaaaagagtggagtcttgtaccggctggtggagtaacgggcgatgcatatattgcgcaaaacggacaacagaagttatttttaaagcggaatacatcgccctttttagcggtattgtcagcagaaggaattgttccaaaattactttggacaagaagggtaacgaacggtgatgtaatttctgctcaaaaatggcttccgggacagaagttagagccagaggatatgaaactagaacgtgttgcgaaacttttgaagaaaatacactcctctaaagcacttgtgcagatgattcagagacttgggaagcagccgcttcacgcacaagagttattacaacaactgcaacttgttttaaggggagatataagggatgaggaaacaattcagcaaggtcttcaatatttaatggattcattaaaagatattgaatacaacgaattcgttgtatgccattgtgatgtaaaccataacaattggctattgtcggatgaagatgagttgtttttaattgattgggatggagctgtaattgctgacccagctttagacctcggtatgttattatattggtacattccgcgccaagaatggagtgagtggctcggttattatgatattgaaatggatgaatcactgcttaaacgtatgagatggtatgtgatagcgcaaacgattttatctattcaatggcatacaacaaaaaagcagcaagcagaagctgaatattggcatcaatatttacagcaactacttgcttcagag

SEQ ID NO: 9864 - DNA, 1425 bp, Bacillus anthracis
atgcagcaaacaacgaatgagaaattacatcgtacgatgaagagtagacatttatttatgatcgcactaggtggtgtaatcggaacaggttttttcttaggttcgggttacaccattaatcaggctggaccagggggagccatcctttcatatttagtaggcggattcattatgtatttaacaatgctatgccttggagagttaacggtagcaatgccagtttcaggatctttccaaaagtatgcgacgaagtttattggaccaggaacgggctttatgattggctggctatattggcttggctgggcagtaacagtaggactagaattaacgtcaattggtttaatgatgaagagatggtttccgaatgttgatgtttgggtatggtgtctcgtcttcggcgttattttatatgcgtcaaacgcaatttcagcgaaaagttatgctgaattagaattttggttctctagtattaaagtaattacaattcttgcatttgttgttcttggtggtagtgcattattagggtttatatcatatgacggaaaagaagcagcacctcttttctctaactttgtaagcgaaggcgggttattcccgaatggattagctgccgtattacttacaatgattacagttaacttctcgttccaaggaacagagttaatcggaattgcagcgggagaaagtgaaaatccagaaaaaacaattccacgtgccatccgtaatacagtatggcgcattatgttattcttcattttaacaatgacgattttagtaggattaatttcttggaaagaagcaggcgtaattgaaagtccattcgtagtcgtatttgataaaatcggtattccatacgcagctgatattatgaacttcgttattattactgcgttattatctgtagcgaactctggattatatgcagcgacgcgtatactatggtcacttgcaaatgaaggaatggcaccaacatctttccaaaaagtaaataagcgtgggattccaattaccgcattagttgtaacgattgctgtagctggcctttctttattcacaagtttccttgcagaagatacagtatacatgtacttattatctatagctggtttatcagctgtttcaagttggatcattattgctttatcgcaactacgctttagaagtcagtatataaaaggcggaggaaagttagaggatttaaaatatagaacaccgctatatccaattgttcctattttagctttaattacaaatagtatcgttgttattagtttagcgtttattccagaacaacgaatggcgttatattgtggtattccatttatcattttctgctatatatattattatataaataagaaacggcagaaaccgatgaaagtggagatggaaaaagcaaatgaaactaacaatcaaacacga

SEQ ID NO: 9865 - DNA, 1020 bp, Bacillus anthracis
atgacaaaaatcacagtagttggagcaggtagctggggaacagcgttagcgatggtattagctgacaatgggcatgatgtacgtatttggggaaatcgttctgaacttatggatgagattaatacaaaacatgagaatagtcgatatctcccaggaattacattgccaagcacaatcgtagcctactcttctttagaagaagcattagtagatgtaaatgtagtacttattgtagtaccaacgaaagcgtatagagaagtactgcaagatatgaagaaatatgtagcaggcccgactacttggattcatgcaagtaaaggaattgaacctggtacgtcaaaacgtatttcggaagtgattgaggaagaaattccagaggacttgattaaagatgttgttgtattgtctggaccgagtcatgctgaagaagtagggttgcgtcaagcgacaactgttacgtctgcagcaaagcgtatggaagcggctgaggaagtacaagatttgtttatgaatagttacttccgtgtatacacaaatccagatatcgttggagttgaacttggtggtgcgttaaaaaatattatcgcattagctgctgggataactgatggtcttggattaggtgataatgcaaaagcggcattgatgacacgtggtttaacggagattgctcgtttaggaagaaaaatgggcggaaatccgttaacgtttgctggactaactggtatgggtgacttaattgtaacttgtacaagtgttcatagccgaaattggcgcgctggaaatatgcttggaaaaggacactctttagaagaagtgttagaaagcatgggtatggttgtcgaaggtgtaagaacaacgaaagctgctcatgaattggcagaaaaaatggaagtagaaatgccgattacagctgctttatatgatgtgctattcaatgggaataatgtaaaagatgcagtaggctcattaatggggcgtgttcgaaaacacgaagtggaagctatacctgacttactt

SEQ ID NO: 9866 - DNA, 556 bp, Bacillus anthracis
atgggaaatttccacgctaccacgaaatttgcagttcatcataatggaaaatgtgccatggcttggagatggccaggtgaccaatggaaatgctggtggtatgaaacatacagctcgtaaaagttcgtaaacttttccaagggaaagttttagctgggtttgcaggttcggttgctgatgcatttactcctttttgaaatgtttgaagggaaattagaagagtacaatggaaacttgcagcgtgctgctgttgagatggcaaaacaatggcgcggcgacaaaatgttacgtcagctagaagcgatgctcattgtcatggataaaacaacgatgctcccttgtttcaggtacgggagaagtgattgaaccggatgatggtattttagcaattggatctggcgggaattatgcgctttcagcaggtcgtgctttaaaacaatatgcaagtgaacatttaacagcgaagcaaattgcgaaagcgagtttagaaattgctggcgatatttgtgtttatacaaaccacaacataattgtggaagaattgtagaatcgtaag

SEQ ID NO: 9867 - DNA, 965 bp, Bacillus anthracis
atgcgcaaaattattgtagggtcacgaaagagtaaattagcattaacgcaaacaaactggtttattgatcagttaaaagcgctaggtttaccatatgaatttgaagtgaaagaaatcgtcacaaaaggtgatgttattttagatgttactcttttcaaaataagccgaaaaggggttggttgtgaaaagagattgacccagcgttccttccgaaaagatattgatatgggctggacataagtatgaaagatatgccggccgtacttccagaaggattaatgatcggttgtacaccaaagcgtgttgaccctcgtgatgcttttatctcaaaaagtggagcgtcgtataaagagttagccagaaggcgttatttttagtttcggagtagttttaaggtgtagggccccagttgcttcgttggcaagaccagatttacaagtgaaaggtggattcggcggaaatatggattaccccgttttcggccaaattaaaagaaggaagttctccgatccaattattttaagcgacggcgggaattacaaaagaatgggctgggattaatgaagttatttccagaccattttagatgagacggttatgtgtacctgctgtaggacaaggcgcattagcgattgagtgtcgtgaggatgataaggatttactacagttgttagcgcatataaatgatgcagtaacagagaaaacagtggcagcttacacgagtatttcttcataaacttgaaggtggatgccaagttccgatcgctggatatgcaactattacagaaaacgatgcaatcgaattaacagctcttgtcgggtctatggatggttctgttttattgaaagagacagtagtaggaactgatccagagaaagtaggattagaggctgcggaccgtttaattaagcaaggcgcaaaagaactcattcttgctgcaaataaggggcaacaataatatgaa

SEQ ID NO: 9868 - DNA, 303 bp, Bacillus anthracis
ttgggggaatcaaaagctgttaacagcttgcaaaattcattaccaaaaagtgaaatgttaagattacctggacgaaatggtgcacggaaaacaacgacaatccaaatgcttctccgaataataacgcctaatgaaagctctatttactggggatggaaaaaaattttgggactatggggggtaccaaaagatacttacccgaaaaaaagaggggtttttccccaaagtggaggaattaaaccccctggcggaatttttggtaaattaaaagggaagggcgaaaaaagaagtagatcttgctat

SEQ ID NO: 9869 - DNA, 966 bp, Bacillus anthracis
atgaacgtacaggaaagtttcgttacggcattggatgaatcggaaatttatttacgcaagtggttaccagaatgtgaaccgaaagggattattcaaattgcgcatggtatgacagaacatgcaggtgtttatacagactttattgatgcgttattagaagcagggtatggtgtgtatgcgcatgatcataaaggtcatgggaaaacagtagaaggagaggaaggtctatgggcattttgaaccggatatagggtggaatcagcctgtgtatgatgtgatctttgtttcggaaatgataaaagaagagcaggcatgtctattgtttttactcggtcatagtatgggatctttcctatcaagacgagctgtgcaacttagaagcgaactatatgatggatttcttatttcaggcactgggggaaactccaggggttgtaagaatcgttggtcataaagtaacgaccattgagatgaaattgcgcggtgcaaaaacgaaaaggccgatgctaaactttttatcttttggcaaccttaattcgaactttaagcccaatcgtaccaatttttgaatggttatcttcagataatgatgaaagttgataaatatattggcgaatcgttatgtggaatcatttggaccacgaatttttttcgagaattatttttctgtgtattacaaatggataaatttagacgaatcccagaagaaggccaagcaatccttccgattcatataattctctgggaaaccgtgatcttgttggagaaatggggaaaaaggggtgaaaaaaatgtgttgaaaatttataaaaatgtggtgtgaaagacgtgacactacggttatttgaaaatgaaagacatgaaatggtccatgaagtgaataaagaagaagtatttaaagatttgatttcgtggttagatgcgcataatagataagaaagttaagctcaaactgttttttaggtg

SEQ ID NO: 9870 - DNA, 710 bp, Bacillus anthracis
ccgttagtaagtgtattaattcctacgtataatcgtccgcattattttgaaaaagcattatgtagtgtgttagaacaaacatatccaaatgtggaaattattataggggatgatagtacgaatgatgaaacagaaaaggtgttttccaaagttttttagtgacagcattccaaatatttttcttaataaaaaaattggtccatcttttggcacaatttggaaaatgccctttatgttattgaataagggcgaacggggaaataaaaaatttcctggatggaggaggccttttttcaggtaaataaaattccaaaaaaggaggcaattcttttaaaatgttctagataaaggaattaaagctggaaccatcgcatcgtcaagtaaatagatggggaaaggcaccttattgccagatgtttattcaacgatgccgttgtttgatacagatacaattatagaggggatacaattaggaaatctggtaattacgaatcaaaagaattatataggagagccgacgacagtattattcccgtaaagtgatttaacagaaccgtatggtatgtttgatcagagacggtatctttgtaacgtagatgtagcttcatgggttatccctactaagtaaaggaaaaccagtatataagcggaacactcccggtcactttggattccattccaatcagcagttgaataaatcgaatcagctt

SEQ ID NO: 9871 - DNA, 897 bp, Bacillus anthracis
gtgaatgtgaagaaattgttacaattattcgttggatatttacaaattgaaagaaattattcaaaatatacaattgcaagttatcaaaatgatttagaacattttgtgcaatttatggagcgagaaggtatatcctcttttttagatattacatacgcggatgttcgtttgtacttaacgacgttgcacgatgaaaagttagcccgtaaatctgtcgcaagaaaagtatcaagcttacgaagtttatatcgctttttgatgcgtgaaggttatcggaaagataatccgtttgcacttgcgtcactccccaaaaaagaattgtcaatcccaaagtttttatatgctgaagaattagaggaattgtttgaagtttctgatacggaaaccccgttaggtcaaaggaatcaagctttattagaattgatgtatgcgactgggatccgtgtgagtgaatgtgtcaatttacaactgaccgatattgactttgcagtgggaacaattttagtaatgggaaaaggaaaaaaacaaagatatattccgttcgggagctatgcacaagatgctttaattacttatatagagaacgggagaaaacagttagccgagaaaactgaagaacaatctcatatggtatttttaaatgcgaaaggtacgccgctgacaagtcgaggggtacgctatgtattaaatgaactcattaagaaagcttctctgacaatgcggataagtccccatatattaaggcatacatttgctacacatatgttagatgaaggggcagatttacgtactgtacaggagctactcggtcatgaaaatttgtctacgacacaaatttatacgcatgtctctaaagaaagattgcgttctgtctacatgaagcatcacccacgggca

SEQ ID NO: 9872 - DNA, 2718 bp, Bacillus anthracis
atgaactggtatggaatgcgcgcacatgaagtggaagaaagtacgaatacgaatgtgaaggttggacttacagagaaagaagcagaaggacgaataaaaaaatttggtacaaatgaattagaggaagcgaaaaggccttctgcactaatggtatttttagcgcaatttaaagattttatggtacttgttttatttggtgcaacaatagtctctgcttttttaggggaatacattgattctattgcgattgtggcaattgttattatcaatggtattctaggcttttttcaagaaagaaaggctgaaaagtcattggaagctttaaaagagctagccgccccgcaagtaactgtattgcggaatggaaagtgggtaaaggcaccgtctaaagcactcgttttaggtgacgttattaaattttctagtggcgatcgtattggagctgatgtacgtcttgttgaggcgtcgagtttatatatcgaagaatcagctttaacaggagagtcagttccagtgcagaagaaagtagaagcgttgcaagggcaagatgtttcaattggtgatcaaaaaaatatggcttttatgggtacgatgattacacgaggatctggcacaggggtcgttgtagcaactggtatgaatacagcgatgggccaaattgcaaatatgttacaaaatgcagagcagatggaaacaccactgcaaagaagattagaacaactcggaaaaatattaattattgtggctcttgttttgacagctcttgtcgtgttagctggtgtgtatcaagggaatgaagtatatcatatgtttttagccggcgtgtcgctagctgttgctgctattccagaagggttaccagcaatcgttacagtagctttatcgcttggtgtacagcgtatgataaaaaagagagcaattgtaaggaagttaccagcagtagaaacgttaggctgcgcttctgtcatatgctctgataaaacaggaacaatgacgcaaaacaaaatgatggtaacacatatgtggtcaggtggagagttgtggaaagtgacaggccaagggtatgaacctaatggctcttttatgaaaggtgaaaaagaaattaatgcagctaagacgaaagcactttatcaactacttacatttggttcgctatgtaataacgcaaatattattcaaaagaaaaaggcgtatgtattagatggagatccaactgagggggcgcttgtagctgcagcaatgaaagcggggataacacgtgaggcactgaaagggaaatttgaaattattcgtgaacttccctttgattcaactcgaaaaatgatgagtgttattgtacgagatcgagaagggaaaaaatttgttgttacgaagggagcgccagatgtccttctgcaaatgagtcaaacgattttatggggagataagcaacaacctttaagtgagttgtatagaaaagaagtacaggcggctattcatagcttaggtagtcaagcacttcgaacaattgcagttgcatttaagcctttaaaagtaacagattctatcgaacatgaaagagacgttgaaaaagattttatgttagttgggatacaaggaatgattgatccgccaagaccagaggtaaagcaggcagtaaaagagtgcagagaagctggcattcgaacggtgatgattaccggtgaccataaagtgactgcaatggcgattgcggaacaattgagcattttaccacaaggtggacgcgttgttgaaggggtagaactcgcaagtatggatgtagaagaattagaaaatgttgtagaagatacgtatgtatttgctcgcgtatcaccagaacataaattgaaaattgttaaggcgttgcaaaataaaggacatatagtagcgatgacaggtgatggagtaaacgatgctcctgctataaaaacagcggatattgggatagcgatgggaattacagggacagacgttgcgaaagaagcttcttctcttgtcttgctggacgataatttcgctacgattaaatcagcaattaaagaaggtagaaatatatacgaaaatatacgtaagtttattcgttatttattagcatcgaacgtaggggaaattttagtcatgttatttgcgatgttgcttgcattaccactgccgatggttccaattcaaattttatgggtgaacttagttactgacggtttaccggcgatggcactaggtttggataaagctgaaggagacgtgatgaagagaactccacgtcatccgaaagaaggggtatttgctagagggcttgcctggaagattataagccgtggctttctaataggagcagtgacgttagtagcgtttattattgcatataatcaacatccaaatgaactgaaatatgcacaaactgtagcattcgcgacgttggtacttgctcagcttattcatgtatttgattgccggagtgagcattctgttttccatcgcaatccgtttggaaatgtgtatttagtaggagcggttatcatttcattactactcatgctcgtcgttatatattacccaccgttacaaccgatttttagcacgatgccaatacaagcgagagattggttgttaattggaggtttatcatcaattccgactttcttattagtaggctctttattaacagggaaaaaggggaagaaaaagccaatattatataagaagggattaaacttgaaa

SEQ ID NO: 9873 - DNA, 1718 bp, Bacillus anthracis
gaaaaagttaaaacaacaattcgcgcgcccagaggtactggagtacaaacgaaagggtgggtgcaagaagctgcacttcgtatgttaatgaacaatttagatcctgaagttgctgaaaaaccagaagaattagttgtatatggcggaattggccgtgcagctcgtaactgggaaagctatcaggcgattgtagattcattaaaaacgttagaaagcgatgaaactttacttgttcaatcaggaaaaccagttgctatttttaaatcacatgaagatgcgcctcgcgttcttttagcgaactcaaacttagtaccgaagtgggcgaactgggatcacttccgtgaactagagaaaaaaggtcttatgatgtacggacaaatgacggcaggtagctggatttacatcggacacccaaggtattttacaaggaacttatgaaacgtttgtgaaagcggcgcgtcaacatttcggtggttcattaaaaggcacattaacacttactgctggtttaggtggtatgggtggtgcacaacctcttgctgtaacgatgaacggcggcgatgttattgctattgatgttgataagcgcatcatcgatcgtcgtattgaaaagagatactgtgatatgtatacagaatcattataagaagcgttagcggttgcgaacgagtataaagagaataaagaaccgatttctatttgttttattaggaaatgcggcagaaattttaccatgaactagtgaagcgcaatattacgccagacttggttacagatcaaacatctgctcatgatccattaaacggttatattccagtaggtcacgcacttagaagaggtagcaaaacttcgtgaagaagatccagaacgctacgtacaattatcaaaagaaagcatgacaaaacatgtggaagcaatgcttgctatgcaagaaaaaggcgcaattacatttgattacggaaataacattcgccaagttgccttctgaagaaagtttgaaaaaatgcattcgatttcccaagaatcggtccaccacttattccgcccattaatctgcgaaggaaaaggaccattccgctgggtagcacttttctggtgacccagaagattttttataaacccggcggaaggtatttttccgggtgttgcgcgaataaggaccatttatgtaactggaatccgcatggctcggcagcaagttgaattccaaggccttccatcacgtatttgttggcttggttacggtgagcgtgcgaaattgggccgcatcattaatgaaatggttgcaaatggtgaattatcagcaccaatcgttatcggtcgtgaccatttagattgcggatcagtagcatctcccaacccgtgaaacagaagcgatgaaagacggtagtgattcagtagctgactggccaatcttaaatgcattaattaattagtgtacgcggtgccagctggggtatctgtctcaccacgttggtggcgtttggtatgggttatccacttcagcgcagaaatgttattgttgccagttgaaccagagcgcgccaccaaacgtgtttgagcgtgtattaacttctgaccctggtatgggtgttgttcgtcacgttgatgcaggatatgacttagctgtggaaactgcgaaagaaaaaggcgttaacattccaatgatgaaataaggaggagaaaacatgctggacactttactaatcaatatcggt

SEQ ID NO: 9874 - DNA, 1377 bp, Bacillus anthracis
atgaaagggtcaccgtttatacgtggaacgatatttttaacgatggcaacgatgatatctaaaatgttagggtttatatatgttataccatttacagctatggtcggtacgagtgggtatgttttatacacgtatgcatatcgtccatatacaattatgctcagcattgcgacaatgggactaccacttgcggtttcaaagatggtatcaaaatatgatcaattaaatgattatcatacggttaagagagtgttgaaaagtggaattgtgtttatgtttataatgggagttatttcgtgttttacgttatatatgctagctccgcatttggctaaacttgtaatcgatggaaatgatcaaacggggaatagtgtagcggcggtcactactaatattcaaattgtaagttttgcgttaatacttgtaccagtaatgagtttattaaggggcttttttcaagggtttcaatcgatggggccttctgctctaagtgtagttgtagagcaattttttcgggtattaaccatcttgataggaagctttgtcgttttatatgttttaaaagcttcagtctcactagctgttggtatttcaacgtttggtgcttttatgggagcaataggtggattaactgttttaagtgcgtattacataaggaggagaaagcacttaaagaaaaaagaaatggcgagtataccgcaaacaacgaaatcttttttctcactatataaggagctcttcacatattcaataccatttgtggtagttggtttagcaattccgttgtatcagacgattgacacatttacaattaataaattgcttatacaaataggatatatgcaaggagaagcggagaagattaatgcaataattggacttgttcagatggttgtacttatcccagtttccgttgcgactgcttttagtatgtcacttgtacctgagatgacaaaagcctatacagcaggaaatgtgaagttactgtataagcattttacgaggacgaatctattagtagtagggattacggtgccagcggcaattggaatgatggtgttagcaaaaccagtgtatactcttttatttggtgccggaaatgatccggagatgggaagagttattttacagtattacgctccggcttgtatactattttcgctttttacagtaacggctgctatgttgcaaggaattaatcaacaacagaaaacagtgctagggttagtgattggcattattgtgaaaatcgttttaaatattgtattgcttccgtattttgattatgtaagttttattatttcaacatacgctggttatacgatttcagttggctttaacttgtggatgctttctaaatatgttataaaggcaaca

SEQ ID NO: 9875 - DNA, 357 bp, Bacillus anthracis; identical to SEQ ID NO: 9846

SEQ ID NO: 9876 - DNA, 2421 bp, Bacillus anthracis
atgacagttgctgagttccgtaagttatgtgcagagtatgcatatgaacaagtagaacgtcaacgtgaacaatttaagcgtttaggtgtacgtgctgattgggataacccgtacattactttagagccagcttatgaagcacaacaaattaaagtgtttggtgatatggcgaaaaaaggttatatctataaaggacaaaaaccagtttactggtcaccaacgagtgaatcagctttagcggaagctgaaattgaataccaagataagaaatcagcatctatttacgtagcattctctgttaaagatggaaagaacgtattagaaggtgatgagaaatacattatctggacaacaacaccttggacgttacctgcaaacttaggtatttctgttcatccagaacttgaatacgctattgtaaaagtaaatgatgaaaaatatattattgcttctgaactatttgagacagttgcaaaaacgttagagtgggaaaatgctgaagttgtgaaaacggtaaaaggtagcgaacttgagtatacagttgcaaaacatccattctatgatcgtgattcattagttatgctaggagatcacgtaacaacagatgcaggtacaggttgtgttcatacagcaccaggacacggggaagatgacttcattgttggtaaaaagtatggattagaagtactttgcccagttgatgataaaggtgtattaacagaggaagcacctggatttgaaggcttattctatgataaagctaacaagccaattacagaaaaattagaagaagtaggcgcgttactgaaactaacattcattacccattcatatccacatgattggagaacgaaaaaaccaattattttccgtgcgacagcacagtggtttgcatctattgaagcattccgtaaagagttattagaagctgttgcggaaacaaaatgggtaccagcatggggagaaactcgtcttcataacatggttcgtgaccgtggtgactggtgtatttctcgtcagcgtgcatggggtgtgccaattcctgtattctatgctgagaatggtgatccaattattacagatgaaacaattaaccatgtagcagatttattccgtgagcacggttctaacgtatggttcgagcgtgaagcgaaagatctattaccagaaggattcacacatccaggtagcccgaatggtgaattccgtaaagaaacagacatcatggatgtatggttcgactcaggttcttctcaccaagcggtattagaagagcgcgatgacttacaacgtccagctgatttatatttagaaggatctgaccaatatcgtggttggtttaactcttcattatcaacagcagttgctgtaacaggcaaagctccatataaaggtgtactaagccatggcttcgtattagatggtgaaggacgtaaaatgagtaagtcgattggaaatatcgtcgtaccgaagaaaattatggatcaattaggcggagatattttacgcttatgggtatcttctgttgactatcaatctgacgtacgtatttcagatgatattttaaaacaagttgcagaagtatatcgtaaaatccgtaacacattccgtttcttattaggaaacttagacgactttaagccaagtgaaaatacagtagctgtagctgaacttcgtgaagtagatcgttacatgttagtgaaattaaatgacttaattacaaaagtaaaagaagcatatgagacatacgacttcgctgctgtatatcatgcaattcataacttctgtacaattgatttaagttcattctacttagactttgcaaaagacattttatacattgaaggtgcgaaccatgaagatcgtcgtgcaatccaaacagtattatatgatgttcttgttgcattgacgaaacttgtaacaccaatcttaccgcatacagctgatgaagtatggccatacattccaggcgtaacagaagaaagtgtacaattaactgatatgccagaagctgtacaattagatgatgcggaagcattaaaaacaaaatgggatgcatttatgacattgcgtgatgacgtattaaaagcgttagaagtagcccgtaatgagaaggtaatcggtaagtcattaaatgcaagcattacgctatatccaactgcagaaatgaaagctatgttagagtctattaacgaagacttaaagcaattattcatcgtttctgagtacaaacttggtggcatgatggaagaagcgccagcagatgcaccgaagtatgaacatacagcggttgttgttgctcaagcaactggtgaaacatgtgaacgttgttgggtagtttcagaaacaattggtaaagacgctgagcatgaaacattatgtgagcgttgtgcaacggttgttaaagaaaattatgtaaaa

SEQ ID NO: 9877 - DNA, 1200 bp, Bacillus anthracis
atgcggctaatgttttattatggttgcttggtttattttattgaaggaatcatacatgtttgtataggtagtttaattccttcattaatacaatattatggaagaacccctgatcaattaggtgttttaatattttttcaatttacaggttttttatttggtgttctaagttcacctatattagtaagaaagtatcattattttaaaacaataacattaggtgttttagtaatgtccatcgttctaggaggttttatatatataaaagaatgggcatatttatctgttatttgctttgtattaggctatggagcagggttgttagaaactacggtgggttcctttattatttcagcagaaaggaatagtgctgctaaatttagcattcttgaagtatggtttggggttggggcgctagggtttccgttactagttaattatattataaaattttacgaatggtattttattctttatgggatattactattctttatttttacactgtttgtttggtacgtgtttggacgtacgaaatttctaaatttttctcctcaaaataatgaaaagggaggagcatccctttcctcattcactctgaaatttaaaagtgaaaagattacagttatattatttatttcactttttgcattcttatatgcaggcatagaaactaatcttgcaaattttttatctacaataatgattcttaccaataatgaattaatcagttcagtaagtatatcttgtttttggctagcaatagttataggaagaatacttgtaggtaagctagcccataaatttaattattggacatacattacatctagttgctttacattagtgattcttttatctctatttccctttgttcgaggtacaggtatgtatttgtttatcatctttattattggtttagtcatagcgggggtttttccaataacattaattttagcttcccgtattatggaaaataatattgatcaagtgactagtttatttattgcatcggctagtttagggggggcactagtatctttcctaattagctggagtctatcattaaatactatcactgttacttttgggatattttcactttttgcattgagtctaggttgtattattttaaaaatgaggaaaatttcaacttacagtaatgaaagtgccaagaaagtagaaagtatgaaaaattta

SEQ ID NO: 9878 - DNA, 972 bp, Bacillus anthracis
atgctacatttaactcgttataacaatatgaatagggtgggaatacaaatgaacaaacctaaaattggaatgattggacttggaagtatcgcacaaaaagcctatcttccaacacttacaaaagaaacaaattggaattttgtaggggcatttacacctaacgcggagaaaagaaaacaaatttgccagcaataccgcattcaagacttccattctattgaaacgttagcttcggaatgcgatgcaatcttcgttcatagttcaactgcatcgcattatgaaatcgtttctgaacttctgaaaaaaggaatcgatgtttacgttgataagccgctagctgctacagtagaacaagctgagaagctagtcgagttgagcgaaaaatataaccgaaagttaatggtcggatttaatcgccgcttcgttcctatgtatgttgcggcaaaagagcaagctcatcatatttcatggattcgaattgaaaagcatcgtacaaataaaatcgggccctatacgtacgactttacgatgttagatgattacttacatattgtagatactgctcgctggttagctaacgatgagcttaacgtcgttcataatatgatgcaaatcaatgaaaagaatgaacttctttacggacatcatacatatacaactgcaaatggactgttactttctaccgcaatgcaccgccatgccggtacaaatttagaacaaattgaacttgtaacggcgggaaaaatcattcgtgtaaaaaacatgaacacatttgaagttgaacaggaaaactctgtttcacaaagtggttccccctcatgggaaacgacgttaaaacaacgcggttttgaagatgctgttcatcattttattgactgtgtacacggagacacaaagccgttagtagatggattagaaggattaaaaacgcagcaaatgctccaatctctactgaatgatataaacaaaaat

SEQ ID NO: 9879 - DNA, 327 bp, Bacillus anthracis
atggcatatttattacaagttgattttccgtttgaaggtccttttggtgaagaaatggaaaaaggattttgggatttagcaaaaagtattaacgaagaagaaggattccattggaaaatatggactgagaatcaagaaacaaaagaagctggaggcatctatgtatttgaagaaaaacaagatgctgaaaaatacgctgaaatgcacaagaacagacttgaagcagctggtgttaaagatattagagtaagaatttttaacatcaatgaaaagttaacggcaaaagaatcgtgggtatacgaaataattccgaaagtcaggcaagca

SEQ ID NO: 9880 - DNA, 610 bp, Bacillus anthracis
atgaaaattgatagaccaaaaatttcgccagagttatctttaaagagttttcacgatattttttatgaagaagatccaacattagaaatgtgtgaaattatcgattctacttttgaaaatgaatctgtcgatagagtgcgtttatatagtgcagtgataaaaaattgtaagttcacgaatacagactttagcaatattgatattacagatgtttgttttgagaactgtgatttatcaaatgttaatttaagcaattcttctgttcacagagtcgaatttaaaaacagtaaattaattggagttaattttacagaatctagcttagggaatgttgaatttagccacatttggaaattctaagctagaaaagattatatttaatgaagcttcattaaataatgcagacttttttgactgtaagctaaagaaggttgaatttgattcatgcagccttaacgaagcaaattttgatcaaccatcactaaaaggaatagacattagttcctctacttttgatacacttaccgtttcagtgaacgacctaagaggatgtaaagtatcaccatatcaagctattcagtttgcatctttattgggattaataattaaa

SEQ ID NO: 9881 - DNA, 1396 bp, Bacillus anthracis
accatatccgaagcattacataaagaagctttagaacatatcgttggcggggttaatagaccgtcgcgaacttttaaaacagctggcggcggcgcttcatatgctatggaacgctgaaaaagtagcttatttctgggatgtagaacggaaataaatatatcgatttatttagcagcatagcggacctactattactggacacggtcaccccacacttccaaaaagcaattacaactgctgctgaaaaatggtgtacttttacggaacaccaacagcactagaagtaaaatttgcaaaaatggtaaaagaaagcatgcctgcattagataaagtccgctttcgtaaactctggtactgaaaccgtaatgacaacaatttcgggtcgctcgtggcttacacaagccgcacaaaaatatatgaaatttgctgggtgggtaccatagcgcattcctgatttaataacctgaagcaactgggatctggccccttcttaactatggaaacccttgaattcacccggggtacccacaaatatccctcccagaaattattttttgttccatttaataatgtagaaactttaaaagaagcattagataaatggggacatgaggtagcagctattcttgtagaaccgattgttggaaacttcgggtatggtagagccgagaacctggctttccttgagaaaagtgaatgaacttgtttcttgaaactggggcatttagaatttatgatgaagtttattcccgctttcccgcttcatgtacggtgggcgctcaagacttacttgggggtacccccagacttaacagcgcttgggtaaagttatccggcgggggacaaccaatcggtgctttacgggggtaagaaagaaattatgggaacaagttgccccgctcggacctgcatatccagctggtacaatggcggaaaatcctgcttctatggcatctggtattgcgttgtctagaagttctttcaacagaaggggctttattgagaattagatgagcttggttgcatgcttggaaaaagaattttagagcaagctgcaaaacataatatcgatattacattaaaccgtctaaaaggtgctttaactgtatacttcacaacaaatacaattgaagattacgatgcagcacaagatacagatggggaaatgttcggcaaattcttcaagctaatgcttcaagaaggcgttaacttagcaccttctaaatacgaggcatggttcttaacaacagagcatacaaaagaagatattgaatatacaattgaagctgtaggcagagcatttgctgctttagcagagagaaaaataatctcatcattaaaaggaaaaaagaaaagcacatctttcttttttccttttttctatttcataaatccc

SEQ ID NO: 9882 - DNA, 1394 bp, Bacillus anthracis
ggaagatgtgaaaacggtcgttatacatattcctcacctaatatcgcgaaacctttcttcatggggcatttacgttctacaatgattggaaattcattgaagcatatctctgaaaaatgtgggtatgaagttgtaggaattaattatattggagactggggaacacagtttggaaagttaattacggcttataaaaaatggggaaatgaagcagtagtgaaagaggatccaatacgtgaattatttaagttatatgttcaatttcatgaagaggtaaaagacgacgaagaattagaagaagaaggacgcgcttggtttaagaaattagaagaaggtgatgaagaagctgttgaactttggaattggttccgccacgaatccttaaaagaattttctcgtatttatgaacttctcggtgtggaatttactaattttcaaggagaagctttttataataatttaatggaagactttattgggattttagaggaacatgatttacttgaagagtcagaaggtgcattagtcgttaatttagaagaagagggcatgccaccttgcttaattagaaaatcagatggtgcgacgatttacgcaacgcgtgacttaacggcagctctatatcgtcaaaacacatttggttttgataaagcgttatacgtagttggcccagaacaaagtttacacttcaatcaattcttcactgtattaaaaaagctcggctacacctggggttgatggcatggaacatgtacccgcttgggttccttttttaagacggtaagaaaatgtccacacgtaaaggaagagttattttacttgaagaagtacttgaggaagcaatcgaacttgcaaaacaaaattttggaagggaaaaattccaacctgaaaccggaaagaagaagttgcaaagcaaggtgggcgttggggcagtcattttcccaggtttaaaaaaaggagcgtatgcccaatattgaattttcataggaaaatatgctgaaattcgaaggggaaaacaggcccgtacgtacaatacacacatgcacgtgctggctctattttaagaaaagaaagtgtagaatttgaaacgtgtacatttgcattaaaagatgatcatagctggagtgtggtaaaattactcaataaattcccacaagtaattgaaatagccttcaacaaaaaatgaaccatcggttattttcgaaatacgtattagatgtagcgccaatcttaaaataaatattgcgggaagtgtgcgtattttggaggagagtggaaggagaaacgcccggtcgcctggccattggtttatgctgggccggttgtattaaaaggaggggttacgtttccttgggggtggaggccacgtggaggagatgttatcatagttaata

SEQ ID NO: 9883 - DNA, 731 bp, Bacillus anthracis
cgagctgtgctcgttagtttatcattattacttgtttttgttttatctggttgcagtaatgcaacccccaattgatgccacatagtacgggaattttgggatcattttactttgtatatccaatctcgtttatgattcaatttgttgctcatcatataccgggagctagctttgggattgctatcattattatgacgctcgttattcgttcagcaatgattccattagctgtttcgcaatatcgtagccaagcgaaaatgaaaaaaatgcaacctgaattgcagaagctaaagcagaaatacggtaatgtaagcaaagatctgtgaaaaacaaaaacagtatcgaagagaaatgtccgaactaatgaaattcagccgttgggaatccacctggctgtttgctgggcccattaatacaaatgccgaatttccccgccttggaattatgcgattagccgaacagaagagattcgcacatctacatttttatgggtgaacttaggacatgcagatcccttatcatatattccggattattgcagcgttaacgccatttattcagatgaaagttttccaatcgagatcgaaatgctggagaacaagtacaaatgctaaagatgcagcaaattatgatgcccgcaatgattctatttatgggatattgcggcgccatccgggactttgtggtggaatggaataacaggggacctattttacaatgatgggaacaaa

SEQ ID NO: 9884 - DNA, 2758 bp, Bacillus anthracis
ctaatgcccaaaaccagagattcccaatggcgtgggaatttaacaaaaacgtggagcctgcaatgccaaaaaaagtggggccgaaattgaattatttatgaaacgggaccaaaaacattcgaaaagggccgacctttaatattgtactgcatgatggacctccatatgcgaatggcgacattcatatgggacatgcattaaataaagtattaaaagactttatcgttcgttataaatcaatgactggtttctgtgcaccatatgtcccaggttgggatacgcacggtttaccaattgaacaagctttaacaaataaaggtgtaaagcgtaaagaaatgacagttgctgagttccgtaagttatgtgcagagtatgcatatgaacaagtagaacgtcaacgtgaacaatttaagcgtttaggtgtacgtgctgattgggataacccgtacattactttagagccagcttatgaagcacaacaaattaaagtgtttggtgatatggcgaaaaaaagggtatatctataaaggccaaaaacccagttttactggtcacccaacgagtgaatcagcttttagcggaaagctgaaattgaatacccacgataggaaatcagcatctatttacgtagcattctctgtttaagatggaaaagaacgtatttagaaggtgatgagaaatacattatctggacaacaacaccttggacgttacctgcaaacttaggtatttctgttcatccagaacttgaatacgctattgtaaaagtaaaggaggaaaaatatattattgctttcggacttatgggagacagttgcaaaaacgttagagtgggaaaatgctgaagttgtgaaaacggtaaaaggtagcgaacttgagtatacagttgcaaaacatccattctatgatcgtgattcattagttatgctaggagatcacgtaacaacagatgcaggtacaggttgtgttcatacagcaccaggacacggggaagatgacttcattgttggtaaaaagtatggattagaagtactttgcccagttgatgataaaggtgtattaacagaggaagcacctggatttgaaggcttattctatgataaagctaacaagccaattacagaaaaattagaagaagtaggcgcgttactgaaactaacattcattacccattcatatccacatgattggagaacgaaaaaaccaattattttccgtgcgacagcacagtggtttgcatctattgaagcattccgtaaagagttattagaagctgttgcggaaacaaaatgggtaccagcatggggagaaactcgtcttcataccatgtttcgtgaccgtggtgactggtgtatttctcgtcagcgtgcatggggtgtgccaattcctgtattctatgctgagaatggtgatccaattattacagatgaaacaattaaccatgtagcagatttattccgtgagcacggttctaacgtatggttcgagcgtgaagcgaaagatctattaccagaaggattcacacatccaggtagcccgaatggtgaattccgtaaagaaacagacatcatggatgtatggttcgactcaggttcttctcaccaagcggtattagaagaggcgcgatgacttacaaagtccaggctgattatattttagagggatctgaccaatatcgtggttggtttaactcttcattatcaacagcagttgctgtaacaggcaaagctccatataaaggtgtactaagcccatggcttcgtattagatggtgaaaggacgtaaaatgagtaagtcgattggaaatatcgtcgtaccgaagaaaattatggatcaattaggcggagatattttacgcttatgggtatcttctgttgactatcaatctgacgtaccgtatttccgatgatattttaaaacaagttgcaaaagtatatcgtaaaaatccgtaacacatttccgtttcttattatggaaacttagacgaccttttagccaagtgaaaatacagtagctgtagctgaacttcgtgaagtagatcgttacatgttagtgaaatttaaatgacttaatttacaaaagtaaaggaggcatatgagccattgcgacttcgctgctgtatatcatgcgaatccataacttctgtacaaattgatttaagttcattctacttagattttgcaaaaagacattttatacattgaaggtgcgaaccatgaagatcgtcgtgcaatccaaacagtattatatgatgttcttgttgcattgacgaaacttgtaacaccaatcttaccgcatacagctgatgaagtatggccatacattccaggcgtaacagaagaaagtgtacaattaaaagatatgccagaagctgtacaattagatgatgcggaagcattaaaaactaaaatggagagcatttatgacattgcgtgatgacgtattaaaagcgttagaagtagcccgtaatgagaaggtaatcggtaagtcattaaatgcaagcattacgctatatccaactgcagaaatgaaagctatgttagagtctattaacgaagacttaaagcaattattcatcgtttctgagtacaaacttggtggcatgatggaagaagcgccagcagatgcaccgaagtatgaacatacagcggttgttgttgctcaagcaactggtgaaacatgtgaacgttgttgggtagtttcagaaacaattggtaaaggacgctgagccatgaacattattgtgagcgttgtgcaa

SEQ ID NO: 9885 - DNA, 498 bp, Bacillus anthracis
atgagcaaagtaatcgaaactaaacaacaagttgtaactgaaatcgcggacaaacttcgcgctagtaaatctacaatcgttgttgactaccgtggtttaacagtttctgaagcaacagaattacgtaagcaattacgtgaagctggcgttgagttcaaagtttacaaaaactctctaactcgtcgtgctgcagaatctgctgaaatggctgagttaaatgaattcttaacaggaccaaacgcaatcgcgttcagtaacgaggatgtagttgctcctgcgaaagtattaaacgacttcgctaaagatcatgaagctttagaaattaaagcgggcgtaatcgaaggtaaacttgtaacacttgatgaggttaaagctatcgctactcttccatcacgtgaaggcttactttctatgcttcttagcgttcttcaagctccaatccgtaaccttgcacttgctactaaagcagttgcagaccaaaaggaagagcaaggcgct

SEQ ID NO: 9886 - DNA, 381 bp, Bacillus anthracis
gtgtcaacaacttggattattttattagccgtaatcgtagcgttcatcggttacactgtatggatgtatttctatcagaaaaaattaattacaacactttcagaagaagaatttcgcgctggctaccgtaaagcacagcttatcgatattcgcgaagcagacgaatatactgcagggcatattttaggcgcacgtaacattccgttatcacaaattcgccttcgtcataaagaacttcgtaaagatcaaccagtttacttatactgtcaaagtggattccgtactggtcgtgcggctcaatacttaaagaaacaaggctacaaagatttctaccaattacaaggtggattcaaaacgtggactggaaaaattaaaaagaaa

SEQ ID NO: 9887 - DNA, 1284 bp, Bacillus anthracis
atggaacaaatgaaaaacgaaagaatcgagaaattacaagagagctgggaattagatacgcgttggaaagggattacacgtccatattcggcagaagatgtaattcgcctgcgcggatcaattgatatcgagcatacattagcgcgccgcggtgctgaaaagctttgggcatcgcttcatacagaagattacattaacgcacttggggcattaacaggaaaccaagcgatgcaacaagtaaaagctgggttaaaagcaatttatttaagtggatggcaagtagcggccgatgcaaacctgtctggacatatgtatccagaccaaagtttatatccagcgaacagcgtacctgctgtcgtaaaacgaattaatcaaacacttcaacgtgcggatcaaattcagcatatggaaggaagcggtgatacagattatttcgtgccaattgtagcagatgcagaagctggatttggcggacaattaaacgtatttgaactgatgaaaggtatgattgaagcgggtgcgtctggcgtgcactttgaagatcaattatcttcagagaagaaatgcggtcatttaggcggaaaagtattactaccaacgcaaacagcagtgcgtaatttaatttcggcacgccttgctgcagacgtaatgggagtgccgacaattatcgttgcaagaacagatgcggatgcagcagatttaattacgagcgatatcgatcctgttgataaagcgtttattacaggagaaagaacaccagaaggattttaccgtacgaaagcaggtcttgaccaagcgattgcacgtggtttagcgtacgctccttacgcagacctcgtttggtgtgaaacttcagaaccaaatttagaagatgcaaaacgatttgcggacgcaattcataaggagcatccagggaagctacttgcatataactgctcaccttcattcaactggaaacaaaaactagatgaaaaaacaattgcaagcttccaaaaggaaatcgcatcttacggttacaagttccaattcgtaacacttgctggattccattcattaaattacggtatgtttgaactagcacgtggctataaagagcgcggcatggcagcatactctgaactacaacaagcagaattcgcagctgaaaaacacggctactctgcaacacgtcatcaacgcgaagtaggaacaggttactttgatgaagtggcacaagtgattacaggcggaacttcatcaacgacagcgttaaaaggatctacagaagaagcacagtttacgaaa

SEQ ID NO: 9888 - DNA, 985 bp, Bacillus anthracis
gtgaaacttattcatttaactcatccacatgagcaaaataaattagaattaccacctactgtaatggcattaggattttttgatggcattcatttaggacatcaatgtgtgattcgaactgcgaaacaaatagcggatgaaaagggatataaaagtgcagtgatgacattttatccgcatccatctggttgtttagggtaaaaaaagaagcgcatgccgagtatattacaccaatgtgtgataaagaaaaaatagtcgagagtttaggaatcgatatattatatgtttgttaaatttgatgaatcatttgcaggggctatgccgcagcaatttgtagatgattatattattggtttaaatgtaaagcatgtagtagcagggtttgattattcatatggacgtttaggaaaaggaaagatggagactttaccattttcatgcaagaggggagtttacacagactgtgattgaaaaaagtgaatttcaaggaagaggaaagtaaagttctacagcctttcggaaagtttaatttgaaattgggaaaatggagcaaattcccatctattttaggtaggagcatatacggtagggaggaacgtttgtaccacggtgataaacgtggacgtcaaattgggtttccccaccagctaatgtaggtttaagtgatgagtatctattaccacctgtaggtgtttatgcagtgagattacaagttcacggtgaatggtacgacggtgtatgtaatattggatataaaccaacttttaaagaagatgagcgtccaatctatctattgaaagtgcatttatttgaaattaaccagcgacatatatgatcaaaaatgttacggtagagtggcatatgcgtataagagaagagaagaaattcaatggcattgatgagttagttgaacaaaatcgcaaaagataagaaaacagcacaagaatattttgcgaacgaaaagaatatacttgctttttcaaat

SEQ ID NO: 9889 - DNA, 236 bp, Bacillus anthracis
ctgtctagaccgggtcttgttcttcgtgattaccggagcgtccagaaggtattgaagcaggtacgttgaaattagcgggaacagttgaagagacaatctttagtcttgctgatgagttgttatcagacaaagaagctcatgataagatgtcaaaagcatctaacccgtacggtgatggccgtgcatcagagcgtattgtagaagcaattttaaaacactttaataagtaaaaaaga

SEQ ID NO: 9890 - DNA, 939 bp, Bacillus anthracis
gtgttaggagtgacaggaatgcgagtggcacaatcagtttcagaattaatcgggaaaacgccgatcgttaagttgaaccgcatcgtagaatcagacagcgcagatatatacttaaaattagaatttatgaatccggggagcagcgttaaagatcgtatcgcattagctatgattgaagatgctgagaaaaaaggattattaaaagaaggcgatacaatcattgagccgacaagtggtaacacaggaattggcttagcgatggtagcagctgctaaaggatataaggcaattttagtaatgccagaaacaatgagcgttgagcgtcgcaatttattacgtgcttatggcgctgaattagtattgactccagggcctgaaggaatgggcggagcaattcgtcaagcgactgaattagcaaaagaacatggctactttataccgcaacagttcaaaaatcaatcaaatccagaaattcatcgtttaacaacaggtccagaaattgttgagcaaatgggtgatcaattagatgcatttattgcaggtattggtacaggtggaacgattactggtgctggtgaagtgctgaaggaagcatataaagatattaaaatttatgcagtagaacctgcggattcaccggtgttatctggtggaaaaccgggtccacataaaatccaaggaattggggctggatttgttccagaaacattggatgtagaagtatatgatgaaatcattcaagtgaaaacagagcaagcgttcgaatacgcaagaagagtggctaaagaggaaggtattttagttggtatctcttcaggagcggttatttatgcagcgacagaagttgcgaaaaagttaggtaaagggaaaaaggtacttgttattatcccaagtaatggtgaacgttatttaagtacaccactttatcaatttgagtct

SEQ ID NO: 9891 - DNA, 1374 bp, Bacillus anthracis
atgataaatcgaacgttaaaacaagtagaacaaatgataaatggtacgggattagcagagcagtatgagggaattactatamaaggggtgtctattgatacgagaaaaatcgaaaaaggaaacctatatgttccgattcaaggtgaacgtttcgatggacatgcttttgtagataaagctgttgaaaatggagctgtggcgacattatgggtgaaagatgtagcaaatccacctgagaatcttccggttatttttgtagaagacacgctatcagcattacaaatgttagcgaaaaactatcgcgatcaattggatgttaaagtgattggtgtgacaggtagtaacggtaaaacatctacaaaagatattgtaacaagtcttcttgcaactaaattcaaagttcaaaaaacagaaggaaacttcaataatcatatcgggctacctcttactattttaaacttagaagaaaatacagaagtagctgtattagaaatgggaatgtcaagccgcggagaaattgaattcttatctaagttagctcgtccaaatgcagctatcattacgaacattggtgaagcacatttaatggacttaggctctcgtgaggcaattgccgaagcgaaattagaaatcgtgacaggattacaagaaggtggagtgttcgtatataacggagacgagccattattaacgaatcgtgttcctgaaatgaatttaatagctgaaacagttacgtttggtgatgctagagcaaatgattattatccaacgactgtaacgttacaagcaactgggacgcattttaaaatgaatagagaagaaaacatttcattctatctacccgtattagggaaacacaatgtgtataatacgcttgcttctatggcaattgcgaaatactttggtgtaacgtgggaagagatgaaagaaggtttagtaacacttcaaatgacgggcatgcgtatggaaattgtaaaaacagacagtggattaacaatcatcaatgatgcctataatgcaagtccaacagctatggaagcggcattccacctaatgaatggtttagatggattctctaaaaaaattgttgttctcggggatatgttagagcttggagatcaagaagtgcagtttcattatgaagtaggtaaattaattgatccagcaaaaatctcctatgtgttcacatatggtaaattaggggctcaaattgctgagggagcgaaaattaatttccctaacgaacgtgtaaaggcttatgataataaagaagagttagtaaaagagttgcaagcagtagtcgatacaaaagatgttgtattagtaaaagcatctcgcggtatgaaattggaagaagtaattacgatgttgaaa

SEQ ID NO: 9892 - DNA, 1131 bp, Bacillus anthracis
atgaatcttgattttaataataatccatttattgtaatatgggagttaacaagagcatgtcaattaaaatgtttgcattgtcgtgcagaagcacagtatcatcgtcatcctctagagctaacatttgaagaaggaaagaaactaattgatgatatatatgaaatggaaaatccaatgcttgtatttactggtggagatccattaatgcgtccagatgtatatgatattgcggaatatgcagtgaaaaaaggtgttcgagtatctatgacaccaagcgccaccccgaacgttacgaaagaaacgattcaaaaagcaaaagaagtaggacttgctagatgggcatttagtttagatggaccaacagctgaaatacacgatcattttagagggacagaagggtcatttcaattaacgatgaatgcaattcgttatttgcatgaattaaaaattcctattcaaattaatactgttgtttctaattataatgtggatgcacttgaagagatggcagtgttaatagaagaattagaatgtgtactctggagtatatttttcttagttccaatagggcgagggaaggaaaaagatatgatttcaccagctcaacatgaaagggtattccgttggctatatcaacttagtaaaaaggtttcttttgatattaaaacaacagctggtcagcactatagacgtgttgtgatccaagaaaaaatgaaagaacataaaaaggaaaaacaggtcattcaatatcaggatgtattgatgaatgggatgacggggcgagttaatgggcttgggcgtgctccaaaaggggtgaatgatggaaacggttttgtatttatttctcatattggagatgtatatccaagtgggttattgccgattagaaccgggaatattagaacaaattcgctagctgaaatctatcgaaactcccctgtttttcaaaatcttcgtaatcctgacaagtataagggaaagtgtggtgtttgtgagtttcgatatgtttgtgggggatctcgttctagagcatatgcaatgacgggggattatatggaaagtgagcctttctgcgtatacgtaccaaaagcattgcgaaaacagaaaaagaacataaaaaagggacatgag

SEQ ID NO: 9893 - DNA, 2421 bp, Bacillus anthracis
atgcaagcagagaagtttcatgacctcccgcttgaagacgtgttaggtgaccgctttgcacgttatagtaaatatattattcaagatcgcgcacttccagatgcgcgtgacggcttaaaaccagtacaaagacgtattttatattctatgtatgtagaaggaaacgtacatgataaagcgttccgtaagtcggctaaaacagtcggtaacgttattggtaactatcacccgcacggtgattcctctgtatatgaagcgatggtacgtttaagtcaaacttggaaagtacgtaatgttttagttgagatgcatggtaataatggtagtgttgacggggatccggcagcagcaatgcgttatacggaagcccgattatcaccaattgcatctgagttattacgtgatcttgataaagaaacagtagaattcgtatctaattttgatgatacgagtgaagaaccggttgttttaccagcagcgttcccgaacttattagtgaacggatctacaggaatttccgcgggttatgcaacagaaattcctccgcatcatcttggagaagttattgacgctacaatgatgcgtattgataaaccgaatagtactgttgatgatttattaacagttatgaaaggaccagatttcccaacaggtggtattattcaagggattgatggtattaaaaaggcgtatgaaacaggtaaaggtaaaattattattcgcgggaaagcagaggttgaaacggttcgtggcgggaaacagcaaatcgtaattactgaaattccatacgaagtaaataaagcaaaccttgttaagaaaatggatgagttacgtctagataaaaaattagatggcattgctgaagtacgtgatgagacagatcgtacaggtcttcgcattgtcgtagaattaaaaaaagaagcaaattctgaaggtattttaaattatttatataaaaatacagatttacaaattccatataactttaatatggtagcgattaataatcgtcgtccaacgcttatgacattaccgaaaattttagatgcatatattggccatcaaaaagaagttgttacgagacgttcacaatatgaattacgaaaggcagaaaatcgtcaacatattgtagaaggtttaaagaaagcattatcgattttagaccaagttattgaaacgattcgtgcttcaaaagataagcgtaatgcaaaagataatttaagtgcgaaatttggttttacagaagcgcaagcggaagcaattgtatccttgcaattatatcgtttaacgaatacagatattacagcgctacaacaagaggcagatgagcttaataagaaaattattgagctacaggcaattttacaaagtgaaaaaagattacttcaagtcattaaaacagatttaaagagagttaagaaaacatatagtgatgatcgacgcgcgattattgaagatcaaatcgaggaaattaaaatcgatgtagaagtgatgatcccacaagaagatgtcatcgttactgtaacgaaagaaggatatgtgaaacgtactggatggcgctcacataatgcctcaaatggcaaagacttcggtatgaaagagggtgacatcttacttgaacgattcgatacgaatacgacagagacagtcctcttatttacgaataaaggaaactatatatatctgccagtatacgaaatgccagatattcgttggaaagatttaggacagcacgttgctaatatcgtttcactcgatcgggatgaaaccatcatttgggcaactgtcgtaccgaactttgaggaagaaaagcgatttatcgtatttgtaacaaagaacggtatgattaagaaaacagaattaaaccaatataaagtacagcgttactcaagagcatttgttgctgtaaacttgaaaaaagatgatgaagttgttgatatatttgcgacagatggaacgagtgatatcgttcttgctacacacggtgcatatgcacttattttccatgaagatgaagtaagtccagtcggtgtaagagccgctggtgtgaaagcaattaatttaaaagaagatgactatgttgcttctggtaaaccattaaatgctgataaagatcaacttattctcgtaacgcagcgcggtgctgtaaagcgcctaaaagcatcagaaattgagaaatcaacgagggcgaagcgaggtcttgttattttcaaagaattaaaacgtaatccataccgcattgtcggtattgaaatcgttcgagacgatgaactagtttacatgaagacagagaaacatatcgtagaagaaattgatccgaaagcgtatcgaaataaggacaggtatagtaacggtagtttagtgctagatgttaacgatactggtgaagttattgaaacgtggacgaaaaaacgaccggaa

SEQ ID NO: 9894 - DNA, 1110 bp, Bacillus anthracis
atgacagatcaagaatatatgaggattgccctgcaattagcagaaggaacatgtgggcaaacaagtccaaatcctatggttggtgctgttgttgtaaaagacggaaacatcgtcggtatgggggctcatttacgtgctggtgaagaacacgcagaagttcatgctcttcatatggctggtgacaaagcaaaaggagccaccgtgtatgtaacccttgaaccatgtagccattttggaaaaacaccaccttgctgtgaattgctcatcaaaaaagaagtcaaacgggttgtaattgctactcttgattgcaatccgctcgtttctggtaatggaaaaagaaaattagaggaagctggcatcgaagtaactaccggtgttctggaagcagaagcagttttattaaatcgctacttttttcactacatgaaaacgaaacgtccatttgtaacaataaaaacagcgatgagcttagacggaaaaacagcaactgttactggtgaaagcaagtggattacaggtgaaaaagcacgagctgatgttcaccaataccgccatacacatgatgcgattctcgttggagtgaatacagttatagctgataatccgcatttaacaacaagaattcctaacggggggcaaaatcctatacgagttattttagatacccatttacgaacgccaccatcttctcatgtcataacagattctttagcaccgacatggattatagttggtacggatgtaaatcaagagaaaatagcttcttatgaatctaaaaatatagctatattccaaatgaaaacgaagcagattgaaatacaggatgttttacacttactcggcgaaaaacaaattctttctcttttcgtcgaaggggggcaaacagttcatgcaagcttcttacaaacaaagtatttcaatgaaattgtaacttatataagcccaaaattaattggtggcagtaaggcccctactttatttggcggaaatggtttttcaacattacaagatgcgctttccttggaaattcaagagatgaaacaaattggtgatgatataaaaatcgttgcgcatgcccgaaacgaggtgacgaaatgtttacaggaattg

SEQ ID NO: 9895 - DNA, 2235 bp, Bacillus anthracis
aaaccgttgtaatccttgaaaaaaccttccgttgcaccaaaaaatttcgcggggtactggaagggcgacaaaaaaggaaacggctaccttgaaggtagtaaatatattgtaacttgggctttaggtcatcttgttacattagctgatccagaaagctatgatgtgaaatataaaaagtggaatttagaagatttaccgatgctacctgagcgtttgaaattaactggtattaaacaaacagggaaaccatttaatggtgtgaagaatcagcttcctaaaaaagaaggaaatgaaatccttggaaccaccaaacctggacctgaaagagaaattggttgctccttggaatattgataaaggtccaatttaccaacccaattaaacgtctatggatttcatctgttactgataaagcaattaaagatggtttcgcaaatttaaaaccaggtaaagcatatgacaatttatacgcttcagctgtcgcacgttcagaagctgactggtatatcggtcttaacgcgactcgagctttaacgattcgctttaatgcccagcttaactgtgggcgtgtgcaaacacctactggtgctatgatcgctaatcgcgaagatgaaaataagaacttcaaagctcaaacttactacggcattgaagctctaacaacaaatcattttaaaacttacctgggcagatgcaaatggcaaaaacccccattttaatataagaaaaaaaggatggggattgttaaaaagtgttaaaaaaacaataatgctaccgggttttaaaattggataaaaaaacaaaaaaagcctttccctcccgggccttttcgaattaactgaattgcaacgtgatgccaataaaaagttcggttactctgcgaaagaaacattgaatattatgcagaaattgtatgattatcataaagtgctaacataccctcgtacagattcgcgttacatttcatctgatatcgttggaacacttccagaacgtctaaaggcgtgcggcgttggggaatatcgtcctttagcacataaagtattacaaaagcctatcaaggctaataaatcatttgtggatgatagtaaagtaagcgatcaccacgcaatatttccgacagaaggatacgttactttctcagccttcacagataaagaacgtaaaatttatgatttagtgtcaaaacgtttctataagttgttttattccccagcctttggaatacggaccaattacggttccgcccaaagggtcggcaaaggaaacattcattgccacgggaaaagacaaatttaccatcccggtttgaaaggaagtatatgaaaatcgctttgaaggatgatgattaaactgatgacgtaaaggagcaactttttccctcgcattgaaaaaggcggatacattacctgtaaagttaattatgcaaacatcagttcaaacgaaagccacctgcacgtttttaccgaagcgactttactttcagcaatggaaaatcctacaaaatatatggatacgcaaaataaacaacttgctgatacgttaaaatcatttcgtggattaggtactgtggcaacacgatgctgatattatcgacaaactattcatttcattcttaatttgaaaaacgcggggaaagatattcccattacttcaaaagccggtcagttacttgatttagtcccaagaagagtttaaaattcaccttccattaacgtgggggggggaacaaaaaaatgaggggcaattggcaaaaggtaaaccgaaaaaatgttgttttccttccgaaaaggaggacttataagaaagaatttgtttctgaaattaagtgggaggaataaaaaattataccctggcctctttttcaacaaatgtttgtcccagatggcgggaacccaatgttagaggtaaacggcaaaaaaggaaaaaatgcttcgttgccaaagacggtgaatgtgttcatcgtaaaaatgtatctcgtacaacaaacgcttgttgccctcagtgtaagaagaagttagaattacgtggtgaagggtgcaggacaaatctttgcatgtaaatgtggctatcgcgagaaattatccacattccaagaaagacgtaaaaaggaattctggaaacaaagctgataagcgtgacgttcaaaaatatatgaaacagcagaaaaaagaggaagaaccatttaataaccccattcgcagaagcattaaagaaattaaaatttgattaaaa

SEQ ID NO: 9896 - DNA, 930 bp, Bacillus anthracis
atgaaaaaagtattatttttaggagacccaggaattgatgactctttagcaattatgtatggattgttgcatcctgatattgatattgttggtgtagtaactggatatggaaatgtaacgcaagaaaaggcgacaagtaatgcggcatatttattgcaactggcaggacgggaagatatacctattattaatggtgcgaaaatccctttatctggagatattacaacgtattatccagaaattcatggggcggaaggcttaggaccaattcgaccgccgaaaaatctttctccaaatataaggcctttttgtgagttttttgacattcttgaaaaatataaaggagaattaattatagttgatgctgggaggtcaacgacacttgcaacagcatttattttagaaaaaccattgatgaagtatgtgaaagaatattatataatgggcggtgcttttttaatgcctggaaatgttacaccagtcgcagaagcgaattttcatggtgaccctattgcatcacaattagtcatgcaaaatgccaagaatgtgacgttggtgccgctgaatgttacatctgaagctataatcacgccagagatggtaaagtacattacgaaacattctaaaacgagttttaataaattaattgaaccgatttttacgtattattataaagcttatagaaagttaaatccgaaaataacaggaagtccagtacatgacgttgttacaatgatggtcgcggcgaatccttcaatactggattatgtgtatcgtcgtgtagatgtagatacagtggggattgcaaaaggagaaagtattgcagatttccgtcctcaacctgatgcaaaagccttaaaaaattgggtacgaattggttggtcattacattataaaaaattccttgaggattttgtgaaaatcatgacg

SEQ ID NO: 9897 - DNA, 411 bp, Bacillus anthracis
atgaatctaacagaagctttacgcctaatgaaagataaaggatacaaacatactgggaaaagagaagaaatgctgagattatttgcagctcacaatcgttatttaacggcgaaagacgttttagagcatatgaaggatgattatccaggtcttagctttgatacgatttatcgtaacttaacggtgtttgctgaaatcggtgttttagaacaaacagaattaaacggtgaaaaacattttcgttttacatgttctattatggaacatcatcatcattttatttgtttagattgcggggggacgaaagagattacttcctgcccaatggattttatgaataaagattttaacggttatgaagtaacaggtcataagtttgaaatatacggacgttgtccaaaatgtgcaaag

SEQ ID NO: 9898 - DNA, 942 bp, Bacillus anthracis
atgggaaaactagcatttctttttccgggccaaggttcacaggcagttggaatgggtaaacagttagcagagaataataaagaggttgcaaatgtatttgcaaaagcagatgaagtgttgcaagattcactttcagaagtgatttttgaagggtcgcaggaaaagcttacgttaacgacaaatgcgcaaccggctttattaacaacgagttttgctattttgacagctttaaaagagtatgatattacaccagactttgtcgcagggcatagtttaggtgagtatagcgctcttgtagcagcgggtgcattaacttttgaggatgcagtatatgctgtaaggaaacgtggggaatatatggaagaagctgttcctggcggagaaggtgcaatggcggctattttaggtgctgatccacatatgctgaaacgagttacagaagaggtaacaggtgaagggtatgcagtacaaatcgctaatatgaatagtacgaagcaaattgtaatttctggaacaaagcaaggggtcgagattgcttctcaaagagcgaaagaaaatggtgcaaagagagcgattccgcttaaagtaagtggaccgttccactctgcgcttatgaagccagcagcggagaaattccaaagtgtcttaaatgaaattacaattcaagatacaaatattccggtaatcgcaaatgtaacagcagacgttattacaagtggtgcgcatattcaagaaaagctaatcgaacagctctactcgcctgtcttatggtacccatccattgaatatatggtgaatcaaggggtcgatacatttattgaaattggacctgggaaagtacttgctggacttatgaagtcaattgattcatcagtgaaagcatacgcgatatacgatgaagagacattaaaagataccatttcaaatttgagaggagaaaac

SEQ ID NO: 9899 - DNA, 1296 bp, Bacillus anthracis
gtgaaattcacaaaatcagaagcattacataaagaagctttagaacatatcgttggcggcgttaatagtccttctcgttcttttaaagcagttggcggcggcgctcctattgctatggaacgcggaaaaggtgcttatttctgggatgtagacggaaataaatatatcgattatttagcagcatacggtcctattattactggacacgctcacccacacatcacaaaagcaattacaactgctgctgaaaatggtgtactttacggaacaccaacagcactagaagtaaaatttgcaaaaatgttaaaagaagcaatgcctgcattagataaagtccgcttcgtaaactctggtactgaagcagtaatgacaacaattcgtgtcgctcgtgcttacacaggccgcacaaaaattatgaaatttgctggttgttaccatggtcattctgatttagtacttgtagcagctggatctggcccttctacactaggaacccctgactcagccggtgtaccacaaagtatcgctcaagaagttattactgttccatttaataatgtagaaactttaaaagaagcattagataaatggggacatgaggtagcagctattcttgtagaaccgattgttggaaacttcggtattgtagagccaaaacctggcttccttgagaaagtgaatgaacttgttcatgaagctggtgcattagtaatttatgatgaagttattaccgctttccgcttcatgtacggtggcgctcaagacttacttggcgtaacaccagacttaacagcgcttggtaaagttatcggcggcggactaccaatcggtgcttacggtggtaagaaagaaattatggaacaagttgccccgctcggacctgcatatcaagctggtacaatggcaggaaatcctgcttctatggcatctggtattgcttgtctagaagttcttcaacaagaagggctttatgagaaattagatgagcttggtgcaatgcttgaaaaaggaattttagagcaagctgcaaaacataatatcgatattacattaaaccgtctaaaaggtgctttaactgtatacttcacaacaaatacaattgaagattacgatgcagcacaagatacagatggggaaatgttcggcaaattcttcaagctaatgcttcaagaaggcgttaacttagcaccttctaaatacgaggcatggttcttaacaacagagcatacaaaagaagatattgaatatacaattgaagctgtaggcagagcatttgctgctttagcagacaataaa

SEQ ID NO: 9900 - DNA, 1188 bp, Bacillus anthracis
atgtctagtaaaacacttgcgaaatttttagaagaaaatttagaggatttaaaatcaaaggggctttataacgtaattgatccgcttgaaagttcaaatggaccgatcattacaattggcggaaaagaatatattaacttatcttcaaacaactatcttggattagcaacagatagccgtttgcaagaagcagcaattggtgcaattcataagtacggcgttggagcaggagcggttcgtacaattaacggtactttagatttgcatattaaattagaagaaacaattgcaaagtttaaacatacagaagcagcgattgcttatcaatcaggatttaattgtaatatggcagcgatttcagccgttatggataaaaatgatgcgattctttcagacgagttaaaccatgcttctattattgatggtagtcgtctatcaaaagcaaaaattattgtttataaacattctgatatggaagatttacgccaaaaagcaatcgcggcgaaagaatcaggtctttacaataaattaatggtaattacagacggtgtcttttcaatggatggagatgttgcaaaactaccagaaattgttgagattgcggaagaattagatttaatgacatacgtagacgatgcacacggttcaggtgtacttggaaaaggtgcaggaacggtaaagcacttcggtctgtctgataaagttgatttccaaattggtacattatcaaaagcaattggggtaattggtggatatgtagcagggaaacaaaacttaattgactggttaaaagttcgttcacgtccattcttattctctacagcagtaacgccagctgatgcagcggcttgcatgagatcaattgaaatcttaatggaaagcacagagttgcacgatcgtttatgggaaaatggtcgctatttaaaacaagggttaaaagaacttggctttaacatcggagaaagtgaaacgccaattacaccttgtattattggtgacgaagtattaacacaagaatttagtaaacgtctaaatgaagaaggcgtatatgcaaaatctatcgtgttcccaactgtagctaaaggaaccggacgcgttcgtaatatgccaacagcagctcatacgaaagaaatgttagatgaagcaattcgtaagtatgaaaaagtagggaaagaaatgggcatcatt

SEQ ID NO: 9901 - DNA, 2442 bp, Bacillus anthracis
atggagataactctatttcttcattcactttctatatatgaccaagtcatattctcatataaggcattgcccttttttatcgtacaatatattttgctcttttctggctttgctataaagttcataaaacattactctattagaggactagctcaattttcattcgatagcatctttatcgttattatgaatatttattttaccttaacttttattttggacatttcaagctttcgtatgttaacaacggatacttgggttttaattggatattttattgcacaatcattagtaatttacgccgtaattagtctatatagaagagaagaatattcttctagcagaatttcattaattatcggctttactattatactcgtgtacggatatatacacctgtttcaattaaacgcagggataaaaccttcttctgaagtctcttacttaatacatactgcttcaattttattaatcggtttgtcgtccatactatatattttagataaaccaatacagcacgaaacgaaaacaaagtattatcgatttgattatgtgcgcttcatattaccctattttagtataatcattactttttcttttattatctttcaaccttgggatgataagttcatgttaatcggtctagtattatcactcatcttattattcttacgacaactttatatgtggaaagataatcaggcactaatcgatacatacgaacagctgactacacaactagaaggcaaagtagaagaaggggcatctgcgttatcaaagagtgaacaacgttataaatctttattcgaagatcacccggatgctgttttctctttaaatatgtatggtattttccaacaatctaatacagcttgtgaaagcttatttactgcctactattgtgaagtagaaagctattctcttttacactttattgacccaaaagaccatgatttactacagaaagctttacaactaacgaaagaaggtagcccacaaactttagaagttcgtacaaaagaaaaagaaggttattactattaccttcacattacactcatccctactttcataaacaaagaagttgtcgggatgttcggtatagcacgtgatattacaactttatatgaaaaacaaaaacaagtagaacatttagcctttcatgatgcacttaccggattaccaaatcgccgcaagtttgaaaaagatttaaaaaatattttaaatacagctcaggctagcgcaaatgatgttgccgtcatgttccttgatttagatcgattcaaaaaaattaacgatagactcggtcatggcatcggagacttattattaattgaagtcgcaaaaaggttacgtggttgcttacgttcaaaggatgtcgttgctcgtcaaggcggagatgagtttacaattctattaccagatatgtactcagaaaaaagtgcggcttttatagctgaacagattttaaatattttaaacaagccattcttcattaaagatgaagaactgtctattacaccaagtatcggaattgcgatgtaccctgattgtggaactgatgtaacagaattaatgaaaaatgctgatatggctatgtatcgcgcgaaagcaaatggaaaaaaccgatttgttttcttctcaaaagaaatgagtatcgctcaaaatgagagtaacttcttagaaggagaactttcaaaagcattacaacaaaatgaatttttccttgaataccagccgcaagtaggcacaaaaacaaaacaaattatcggttttgaagcattaattcgttggaagcatccaaaactcggcatcgtatctcctgcccaattcattcctctagcagaggaaactggatttattattgaacttggaaattggattttacgtactgcttgcttagaagcaaaaagatggcataatcaaggtttctctcacttaaaagtcggtgtgaatttatctgttgttcaatttaaccatgcagatttaatcccaactatttcaaaggttttagaagaaacagagttaaaaccagaagcactagatattgaaattacagaaagtatcgccattaatcaaaatcaatctgtagttgcaaaactagaacagcttcaaaacctcggtattcaaatttcaattgatgactttggaaccggttatagttctttagcttatttaacaaaatatccaatcaacacattaaaaattgctcgagaatttatttgcggaattacaactagccctttagaggaagcgattatttcttccattattacactatcaaaagaactaaatttagaggttattgcagaaggtgtagagaccgaagaacaatggaagtttttatatgaacaaaactgtgaccacattcaaggattctttattagcaagcccgtttctagtaaagacgtttggaggttactccacaaaaaaacaaccgtc

SEQ ID NO: 9902 - DNA, 495 bp, Bacillus anthracis
gtttcatttatggtcgcaatggacgaaaatagagtaattggtaaagataataatttaccttggcgtttaccgagtgaattgcagtatgtaaagaaaacaacgatgggtcaccccgcttattatgggaagaaaaaactatgaagcgattggtagaccactgcctggaagacgtaatattattgtaactcgcaatgaaggatatcatgttgaaggctgtgaagtagcacattctgtagaagaagtgtttgagctatgcaaaaatgaagaagagatcttttatttttggcggagcacaaatttatgatctctttttaccttacgtagacaagttatatataaccaaaattccttccgggcttttgaaggagatacatttttcccagaaatggatatgaacaaattggaaagaagtttttgttgaaaaaggtttaacggatgaaaaaaatcccgaatacgtattattaccatgtatatgagaaacaacaataatcccaa

SEQ ID NO: 9903 - DNA, 786 bp, Bacillus anthracis
atgaatattcttgttgtaaaaactccagaagaactagcagaagcaggttataaattaattgaagaagttgtaaaaacaaaagaaaatccaacattaggaatggctacaggaagctctccattaggtatttatgcagaaatgcgaaaaaataaacttgatacaagccgtgtaaccactgtaaacttagatgagtacgtaaatttaccacatgaagataaaaacagctatcattatttcatgcaagaacagttgtttgatcatcttccatttaaacaaacttatgtaccaaacgggatggcaagtgatttagaggaagagtgcaaacgttacgagggcattctagctgctaacccagttgacctacagattcttggaatcggtgaaaacggtcacatcggatttaacgagccaggaacaccgtttaattctccaaccaacattgttgaattaacagaatctacacgccaagcaaaccttcgcttcttcgaaaaagaagaagatgtgccaactcatgcaattacaatgggaattggaagcattatgaaagcgaaacaaattctacttgttgctatgggttctaaaaaggcagaagctgttaaagaattattgcaaggtgcatatagtgaagcgtgtcctgctacagttttacaacgtcatccgaatgtaaccgtaatcgctgatcaagaagctctatctttatgcagtgaggcgattgctgatgaacatcgacaagtattcaccatttccgatctattatcagattcaagagtgggtgaaacagctaat

SEQ ID NO: 9904 - DNA, 618 bp, Bacillus anthracis
atggaaaaagtactagttttcgggcataaaaacccagatacagatgcaatttgttctgcaattgcttatgcagaattgaaaaaagaattaggaatgaatgctgagcctgtacgtttaggtgaaatcagcggtgaaactcaatttgcgttagactattttaaagtagaaggaccgcgttttgttgagacagttgcaaacgaagtggacaacgttattttagtagaccataacgagcgtcaacaaagtgctaacgatatcgaatctgttcgtgtgttagaagttattgatcatcaccgtattgctaactttgaaacaagcgatcctatttactaccgttgtgagccagttggttgtacagctacaatcttaaacaaaatgtacaaagaaaacggcgttacaattcgtaaagaagttgcaggtttaatgttatctgcaatcatttcagattctttactattcaaatctccaacttgcacagagcaagacgtagcagcagctcgtgaattagcggaaatcgctggtgtagatgctgacaaatacggcttagaaatgttaaaagctggtgctgacttaagcggaaaaacaatggagcaattaatctctcttgacgctaaagaa

SEQ ID NO: 9905 - DNA, 713 bp, Bacillus anthracis
atgaaacgattacaaaaagtgattgcgcaagcaggtattgcatcgagaagaaaggctgaggaattaattcagcaaggaaaagtgaaagttaccggaaaaaatagtgaaggagttaggaacgaaagtaactcctcaagataaagtagaagtaaataacatccctcttgaaaaagaagaacctgtttattttttactatataaaccaactggcgtaatttcaagtgtatcagatgataaagggaagaagtgttgtaacagactttttcccagaaattacacaacgtttatttcccatcggacgtttagattatgatacgtctggcgtattattaatgacaaacgacggggacttcgcaaacgtattaatgcacccctagatataaagttgaaaaaacatatgttgcaaaaataaaagggcctctaacaggtgaaaaaatccgcatgttagaacgtggtgtgacgttagaagacggaaaaacagcaccagcgcgtgtgaagattatttcttgggacaagcgtaaagaaatggcgattgtacaactaacaattcatgaaagacgtaaccgtcaagtacgtcgtatgtttgaagctttagactgtaaagtagtgaaaactaagccgtgacgctacgccttttttaaaagtgggtagcttgccacctggtgatggcaagagatttgacccccctggaggttgaaaccattacctggcat

SEQ ID NO: 9906 - DNA, 1005 bp, Bacillus anthracis
ttaaacacagataagaagagagctattactgtaactacaatatttggttgtattggtatcgctgtcattttaattagtttaaatacaggaacattgagtatagcgccacttaaagtaattcaaacactttttggttatggtgattttgagagcgcaaccgtgctatatgattatcgtatgccaagaattataatcaccatgttagctggcattggccttgggatttccggtgcgattttgcaaggattatcacgtaatgcacttgcagaccctggtattttaggattacattccggtgcgtctttcggtcttatcgtatttgttactttctttcattctattaatgagaatgcatccattttaattcccgttaattcacattgggcggaggagtattagctgcatttcttattattttacttgcgaggattcggtcaaaaggttttcttcccattagacttattctcgaatggtattgcagtttcagctggctttagtgcaatttcattatttttctctctcaagttaaatgatgagacgtatacattcgcttctagatggctagttggtaacgtgtggggaagggactggattcatgtccttgcattattaccttggattttcatactaaccccttatgcatggctaaaatctaaaacgttaaatgccttgtcactaggtgatagtgtagcagcaggactaggtgtttctgttcaaaaagaacggttactacttttagctacagcggttggattatcttgcgggagtgtagcgatggcaggagggattggttttatcggtttagttgctccgcatatcgcaaggaagttagtaggtactacatatcaacacttccttcctttagctggcattatcggaatgattattttagtgctagcagatacgataggtcgttctatatttgagccaaactctattccagctggtgtagtagtggcagctttaggagcaccgtattttctttatttacttacaaaaacaaaa

SEQ ID NO: 9907 - DNA, 759 bp, Bacillus anthracis
atgactacaattgatttgaattgtaatttaggagaaagttttggcgcttataaaatggggaatgatgatgaaattcttccgttcgtttcctctataaacgttgcatgtggttttcatgcgggtgatccgtccgttatgcggcaaacggttgaaaaggcaatgcagcataatgtagcgataggggcacacccaggatttcctgatttaattggatttggtagaagaaacatgaacgtttcagcaaatgaagtatacgattatgttttatatcaaattggtgcattagacgcttttgtaaaagcagctggtgggaagatgcagcatgtgaaaccgcacggagccctatataatatggcggcaactaatccggaaattgcagatgcaatcgcaaaggcaatttatcatatgaattcaagtctatcactttacggattagcaaatagcgaggcgtttatacaggctgcggaaaaatacaatataactctcgtacaagaagcttttgcagatcgtacgtataaggaagatggaaccttaacgagtcgtacggaagaaaatgcgcttataaaaaatgaagatgaagcgataaaacaagtgcttcaaatggtgaaagaaggctatgtaaattcggtgaatggtgagaaagtagcagttcaggcgcagacaatctgtttacatggtgatggagaaaaagcagtacaatttgcgagaaaaatatacagaacattcgaacataataaaatttctatatgtgcaccgaaa

SEQ ID NO: 9908 - DNA, 690 bp, Bacillus anthracis
atgtttgaaattttcatgtctacttatcccacactcttaaaggctactattgtcacattacaattaacattaacttccctagtactcggttcattaattggattactattcgctttctttcgaatctcaaacaataaagttttaaatagtatcgctcatgtctacattgccattattcgtggtacaccattaattgttcaaattgcaattctctattttggtattacatcggttgttgttttcacccctttttgggcaggagcaattgctctagcaatccataacggtgcatatattactgaaatttttcgtgggtccatccaatctgtcgaccgtggacaaatggaagctgctcgctctctaggtatgccgtatcctttagcgatgcgccgtatcgtattaccgcaagcatttcgtcaatctcttcctcctttaggaaatcagtttattattggattaaaagattcttcgcttgttgcttacgtaggaatggccgaattatggggatcaggtttatctattgctgcaggtaactttcaacaattagatacatatataatcgttggtttatattacctcgtacttgttctcctatttacttaccttgttaaccttttggaaaaacgactacagcgaaaagaaacaaactcagttcaagttagtgcaaagaagaaaaaagaagtctcttta

SEQ ID NO: 9909 - DNA, 712 bp, Bacillus anthracis
aaagccatcttatatatatgtcatggaagtcgcttgaaagcagctaaagaagaagcggttgcatttattacgtcatgtatgaaccgtgtagaggtaagtattcaagaaatttgttttttagagttagcgagtccaactattgatgaagggttccgtacatgtgtgaagcgtggtgctacagagattatcgttattccagtttttttattagcagcaggtcatgtaaaaaaagatattccgtttgaattggaaaagttaaataatcaatatccaagtattaaagtgacctatggtaatccatttggcgtatcagaagcacttataaaatcagtgtatagcggaagtggcattgaacaggaaaataagaatgaagtgacgttacttctcgttgcaagagggagcagtgatcctgaagtattaagagatataaactggattgcttctttatttcaaaaggaagagaagattaagaaagtagaagtttgttacttaaggggctgccgagccgaaatttgaggagaagttaaaggaagttgtagaacgaaaagaaaagaatatcgttgtgctgccttacttgttatttacaggtttacttatgaaacatattgaaaaagaagtgcgccaatatgagctagatgagataaaaataagtccgtatttaggaaagaatgaagcgtttcagtatatgttaattcagaaaacgaagaaatta

SEQ ID NO: 9910 - DNA, 1962 bp, Bacillus anthracis
ttggcgaagcatcagttccaatataatgaagatgcgattcaagtgttagaaggacttgaagccgttcgaaaacgcccgggtatgtatatcgggagcacggacagccgtggattgcatcatttagtatacgaaatagtagataactccgttgatgaagcgttagcgggatttggcgacgaaatttctgtcgtaatacataaagataatagtattagcgttatagataaagggcgaggaatgcctacgggaatgcataagcttggaaaacctacaccagaagttattttaactgtacttcatgccggtggtaagtttggtcaaggtggttacaaaacgagtggtggtttacacggtgttggggcatcagttgtaaacgccttatctgaatggttagtcgtaacgattaagcgtgacggaaatatttatgaacaacgctttgaaaatggcggtgttcctgtaacgacgcttgagaaaatcggaaagacgaaagaatctggtacaacaatgcatttcaaaccagatacaacgattttcagtacaacaaattacaattatgaaacattatgtgagagattacgcgaatctgcattcttattaaaagggatgaaaatctcaataaaagatgaaagaaatgatttagaagatgtctttcattatgaaacaggaattgaagctttcgtttcctatttaaacgaagaaaaagattcaattcacccagttgtatacttcactggtgaacaaaatgggattgaagcagaattagcatttcaatttaacgatggctactcagaaaatattctttcgtttgtaaataatgtacgtacaaaagatggtggaacacatgaagctggatttaaaacggcgatgacacgtgtgtttaatgagtatgctcgcaaagtagcactattaaaagaaaaagataaaaacttagaaggtacagatattcgtgaaggtgtagcagctatcgtttctgtacgtgtaccagaagaagtacttcagtttgaaggacaaacgaaggggaaactaggtacaagtgaagctcgttcttcaattgatgccattgtatcagagcatttagcttactttttagaagaaaacccggacgtagctacacttcttgtgagaaaagcaattaaagcagcgcaagcacgtgaagccgctcgtaaagcgagagaggaagcgcgtactggtaaaaagaaaaagaaatcagaaggtacattaagtggtaagttaacacccgcacaatcacgtaacccgcagaaaaatgaactgtacctagtagagggtgactctgccggtggttctgcgaaacaagggcgagatcgacgtttccaagcggtattaccgttacgtggtaaagtaattaatacagaaaaagcaaagcttgctgatattttcaaaaatgaagagattaatacaatcatttatgcaattggcggcggcgtaggcaatgaatttgatgtggaagacattaactacgataaagttgtaatcatgaccgatgccgatacagacggagcgcatattcaagtattgttattaacattcttctacagatatatgaaaccacttatcgaagctggtaaagtgtttatcgcacttccacctttatacaaagtaagtaaaggaaaagggaaaagtgaagtaattgaatatgcatggtcagatgaagagttagatagtgtaacgaaaaaagttggaaaaggttacatgttacagcgttacaaaggacttggcgaaatgaatgcggatcaattatgggaaacaacgatgaatcctgaaacacgtacattaattcgcgtgaaaattgatgatgcagcaagagcagagcgccgcgtaacaacattaatgggcgataaagtagaaccgcgccgtaaatggattgagcgtaatgtacagttcggtatgcaagaagaaggaaatattttagaaaatgaaatgattatggagacggaggtggaa

SEQ ID NO: 9911 - DNA, 828 bp, Bacillus anthracis
gcattggagacgaaacgtttgacgttgtcttatggtgaaacaattattattgatgagttgaatttagaaattccaaaaggtgaaattacaatcttcattgggtctaacggttggtgggaaatcaactttattgagttcattacctacattattacagccaacaactggtgacgttttggtatataatcaagccgttctaagtatgacaaactgaagcaaattgctcgtcaaatggcaattttaccgcaaggaccgcaagcgccagaagggcttacagtattacaacttgtaaagcaaggacgttatccgtatcaaacatggctgaagcaatggtcagaaaaagatgaggaaatggtacagaatgcacttgcagcaacaggtatgacagaatttgctgagcgtgatgtgcatgctacttcaggtgggacaacgcccaacgggcttggattgcaatgacgcttgcacaagatacagatattattttattggatgagcctactacctatttagatatgactcaccaaattgaagtgctagtatctattattcgaattaaatgaaacagaacaaagaacaattgttatggtactacacgatttaaatttagcatgccgttatgcagataatattgtagccatcaaagataaacaaatatatgcacaaggtaagccagaagaagtagtagatgagaaactagtacgtgatgtattccgaatggaatgtcaaattagtacggatccgttatttgggacaccactttgtatcccacatggaaaaggaagacgtgtacgtaaagaagttgctcatgcgatgagataaagaaaaaga

SEQ ID NO: 9912 - DNA, 3277 bp, Bacillus anthracis
atgccaaaacgcctagacattaacacaattttagtaatcggatcaggaccaattgtaattgggcaagcagcggagtttgactactctggtacacaagcttgtcaatctctttaagaggaaggttacaaagtaatccttgttaactctaacccagcaacaattatgactgatactgcaacagcagataaagtatatattgagcctttaacattagaattcgtcagccgcattattcgtaaagaacgtccagatgcaatcttaccaacattaagtggtcaaacagggttaaacatggctgttgaacttgcaaaatcaggcgtactttgagagtgcggagtttgaaattttaagaacgaaattatccgccatcgagccagcggaagaacgtgatttattccggaccttaatggcagaagtaaatggacccaccccaccaagtggaattatttcttaactctgatgaaacatattggattggttaaccaaaatgggtaatccagaatcggttcgtcagcatttacattaggcggaacgggccgccggaatttgtcataacgaagaagagctaattgaaattgtaacaagtggtttaaaacatagtccagtaacgcaatgtttattagagaaaagtattgctggctgtaaagaaattgaatatgaagtaatgcgtgattcaaatgataacgcgattgtagtatgtaacatggaaaacatcgatcccggtggtggtcatacggggtgattctatccttgtagcaccaagccaaacgctaagcgatcgtgaataacacatggtgcgttacacttctttaccaaatttttcgtgccctaagaattgaaggtggatgtaacgttcagcttgcattagatccatatagcttcccaatactatgtaatcaagaaaaatcacgcggtaagccgttcttctggccttacatcttaaacaaatgggtatccccttgggaaattaacaccccaaaaatggcggcgcgctttaaattttaaaggaatatgtggacccccctaaaccacaaaattttatcctggcttttagcccacactaaaataatgttggtttcaaaaattcccccgctgggccattttattaagtttgaatcagcgaacagaacacttggaacgcaaatgaaagcaactggtgaagttatgtcaatcggacgtaacttagaagaatcattattaaaagcagttcgttctttagagcttggcatttatcacttagaattagaccacttaaaagaacttgataaagaaacaatgaaaaaacgcattattaaagcagatgatgagcgactgtttatcgtagcagaagcgattcgtcaaggtgtaacgaaagaagagattaacgaatggtgtgaaatggacttcttcttcctacaaaaagttgaaaacatcgtaaatatggaacgcgaagtaaaagcgaatgtaggaaatatggaagtactacaaactgcgaaagaaatggggctcagcgatcactatattgcagcagccttggaacaaaacggagcgcgaaatttaccatatgcgtaaagaaaataatatgacgcccgtattccaaatgggagatacttgtggcaccaaatttggatctgccaccacggattaattccgcaccttcgctggtgaaaaccaatttattggtaccgatcgtaagaatggaataattccaaggtctggaaccattcccattggtccagggggtgagtttgactacgccaccagtcactcagtatgggccatttaaaaaacctggtatgaaaccaattttatttaccattaccccgaaactggttcaaccgaattccagaatttcctgacaaattatacttttggaacatttaacattccgagaatggaatggcccttcctccgattttaaaaaaaccaaaagggggttttccgttcccttccggtgggacaaacgggcatttaaccctagcggccgaaattagaagaacatggtgtgaagattttaggaacatcacttgaagacttagaccgtgcagaagatcgtgataaattcgaagctgctttaacaaagcttggtatcccacaaccagttggtaaaacagcaacgactgtagaccaagcggtagcaatcgcagaagaaattgggttccccagtattagtaagaccatcttacgtactaggtggacgtgcgatggaaatcgtatatcgtcaagaagaactactgcactacatgaaaaatgcagttaaagttcacgcagatcacccagtattaatcgaccgttacatggggtgggtaagaaaatgaagtagatgcaatttcggatggtgagaaatgtattcattccaggtattatggaaacatatgaacggcgctggagatcactctggtgactcaattggagtatatccaccacaaagtttatctgaaaaactaaaagaacaaatcattgaacatacaattgcacttgtgaaaaggattaaacattgttggattactaaatatccagtttgtagtattcaaagattcaagtgtacgtaattgaagtaaatccacgtgcaagccgtacagtaccgttcttaagtaaaattacaggcgtaccgatggcgaatgttgcaacgaaagttattttagggcaagacctagtagagcaaggatacggaactggctatcacccagaagagaaagaagtatatgtaaaagctccggtattctcattcgcgaaactacgctcagttgatacaacattaggacctgaaatgaaatcaacaggggaagtaatgggtaaagttcttaccgttggaaaaagtcttattaaaagggtttagttttttttggaataaacatcccaacgcacggctcagtaatcattactgtagcggataaagatacagaagaggcgatggaaattgcaaaacgtttccacgaaatcggctataacttattagcaacagctggaacagcacaatcgtgtacagagcagaatatcgcagtacaagttggtaacaaaaattgattctgaagactacaacttactagatattatccgtcaaggaaaagccccatgttgttatcatattctttaacaagggggtaaccacccaggcgggggaaggttcccggcattcgccgggaatcagtagaaaaagggtgtagcttgcttaccttcccttgaaacagggagaccattcttgggattattagaatttagggcattttcggttcattcaaggaaagaaattccgcaaacaaagccgtcgggaggtgtaccatgcatgatgcaaaag

SEQ ID NO: 9913 - DNA, 1766 bp, Bacillus anthracis
aagtttttaattacttgtttattacttggtattgttggtttagtggggggagttgctacctttttcgtaatgattaaggatgcaccaaaacttgagaaagcaaaacttgttaatccgttatcctcaaaaatttatgataaaaaatggcgatttggtatatgaatacgggaaagaaaaacggacgaatgttacgtatgatcaaattcctaaattagtagaaaatgcatttttagcaacagaagatgcacgtttttacgagcatagcggagtagactttaaaggtactgcccgtgctgttttggtgagtcttaaaggcgattacggttcacaaggtggaagtacgataacacagcaggttattaaaaattacttcttatcgatggaaaaaacatcaaaacgtaagattcaagaaatatatttagcgtataagctagaacaacagtattcaaaacatgaaattttagaaatgtatttaaataaaattaatttaggtaatcgttcatatggtatcgcaacagcagcacaaaactactacggtaaagaattaaaagagttaactttaccagaagttgcgatgcttgcaggtttaccaaaagcaccgaataactatgatccaacgaagacagaaaatgttcaaagagcaacagaaagaagaaatgttgtcctaaaattaatgaatcgacatggttatattacgaaggcagaaatggaagaagcttcgaaagtgaaagtaacagatggactttagactgcaactgtacaagcaaatgccatatcctggcatttatggatgcggtttggaaaagaaggtgaaaaaggattgcccagatggtaatattgtttctgccggtttagaaatttattaccactttagccatagccgcccagaaggcttgcggacaggatattagatgctaatattattcattatcccaatgataaattccaaagtgctttcgcatttatggatacgcatacaggagaagttcgtgctatacggtagtggacgtggtgaaaataaagcagtatttaaagggcataatatggcaattgaattagatcgtgcagctggttcaactatgaagccaatctttgattacggtcctgcaattgaatacttaaaatgggctacgtatcatcaaattgatgattctccatttaaatattcaactggacaagaagttcgaaatgcggaccgaagtcatttaaggatcattaccatgcgtgaaagatttaaaatgtcacgtaacgttcccggaagttaaagctgcaacaaaaagaaggacttaataaagcgaaaggaaattccctgaaaaattagggttttacaccttaagtcagctccaaaaatctacccgcgattggtacacacgcaagtatcaccaactgaaatagcgggtgcttatgcgacatttggtaatgggtggaaagtatgcaaaaccgcatttttgttagaaaagtagtttatccagaacggcaagtcacaagtttttggacaaaaaccaaaaaaacagtatagctgactctacagcatatatgattactgatatgcttcgttcagtagtgacatcaggtactggtacagcagcaaatataagttctttagatgtagctggaaaaacaggtacaacaaactatgattcaaaacaattagcgaaatttaatattcccggaagtgcaaactcgtgatagttgggtttgcaggttatacgccgcaatatacgatggcagtatggactggggatatgaaagatgggtaggacgag

SEQ ID NO: 9914 - DNA, 366 bp, Bacillus anthracis; identical to SEQ ID NO: 9131

SEQ ID NO: 9915 - DNA, 546 bp, Bacillus anthracis
atgacttgtcaaaactgtaatataagaccagcaactttacattatacaaaagtaatcaacgagaagaaggcggaagttcatctttgtgagcaatgtgcagaacaaagtggctatacgtctttctttcaatcatcgcagtctaacttttcattccatgatttatttgctgggttattgcacggtgaatcaacaatgtttgaagaaggaaaaaatgggttttcgaatacgagtatattaagatgcccagattgtaagatgacatatgaacaatttacaaaggttgggcgctttggatgtgcttcttgttacgatacatttaaggaacatttaaagccattattaaaacgtcttcacggtgggcatacagatcattgtggaaaaattccggagcgtatagaaggaaatattcacttaaagaaagaattagatgaactaaaactcattctgaaacaatacgtacagaaagaggaatttgagaaagctgctgaagtaagggataaaattagaaatcttgaaaatcagcttagtgagtatagagagggggaa

SEQ ID NO: 9916 - DNA, 1306 bp, Bacillus anthracis
atgttagggttagctccataattggaagcgggggttcttgtgttaacgggattagtagcagcaggagatgctggtccaagcagttattttttcatttgtattggcagcaaattatatgcgaatttttagcatttatgttaggcagaaattgctttcccatctcccgggcgtctgtaggtgtatatccgtactccatatgcaacaatttggtgagtttgtgtctcatctagtaggtgtgtcttttctgtttaatatatatggtgccaacagcggctgtcgctgctggatggacaggctatttccacaatttaataaaagggtttggattacagatacctaaagctctactaacgatcccttcacatggtggtattgtgaatctaccagcagtaatcattacattgatattagcatggatgttatcccgtggtacaagggaaagtaaacgaatcaataatataatggtattgattaaaattggcatgattttgttgtttattacagttggtatattctatgtaaaaccaatgaactggataccaattgcaccatacggcttaagtggggtttttacgggtggagcagctattttattcgctttcacaggttttgatatattagcaacttcagcagaagaagtaaaagatccgaagcggaatcttcccatcggtattattgcatcattaatcatatgtacaattatttatgttatggtatgccttgctatgacaggaatggtttcctataaagaattaaatgtccctgaggcaatggcttatgtaatggaagtggtatgactacgaatagtcgctggtgcaattgctgtacgagctgtaattggccttatggctgctatatgttcaatatgtatgcggcaacacgagtattctttgcaatgagtagtgatggattgttaccgaaatcatttgcgatagttaataagaaaactggagcacacacttctatacatggattgccaggaatagggagctctataatagatgggtttattgatttaaaagaattggttaatttagttaatatcggtagtttggtgacgtttgcgttagtttgtgtatcagttattattctcggtaaatcacacccaaatttaaaacgtggatgtatggtaccttttgtacctgtattaccaggcgttgcaattgtatgctgtgtgtttttaatgctaaatttaccgttaaggacatgggtgtattttagcatttggattactattggggtagtaatatatttcctttatttgataatactcagtaatttaaatgaggaaacgatctcgaaatta

SEQ ID NO: 9917 - DNA, 729 bp, Bacillus anthracis
atgacgaaatcaatggaatttctttatcctgaaaaatggctttcaaaagcttctacaggtgatcgtgttgcgagcgaattgagaatgcgcattattgcaggtgtgattgaaagcggtaccatactgtcagaaaataaaatagctgccgatttttctgtaagtcggtcacccgttcgtgaagcattaaaattactagtttctgaaaatattattcgcttagaaagaatgggcgcagttgtcattggtttaaccgagaaagaaattgaagaaatatatgatgttcgtttacttatagaaacgtttatctttgagcgacttggaaagatggacacaaatgatttagtaagagaactaaataaaataatggaaatgatgaaaatcgccattaaatatcatgattctgatgaattttcttatcaagatctcttattccatgaaacgattattcgaaccattgagcattcctacatcctgatgatttggaataatttaaagcctgttatggaaagcttaatccttttatcaatgcgtactcgtttcaaggaaaagtacgaagactttgaacggattattaaaaatcatgagctttatataaaagcaatcgaatcaaaagatcgagccctcatgattgaggccttacatcaaaactttgatgatgttcaagggaaagtcgaagacctctggatgtcacaacaaatgttatctaaaggagttgagcaaggacatgag

SEQ ID NO: 9918 - DNA, 826 bp, Bacillus anthracis
ttgactttaaatgaaaaaacattaattatgggggattttaaatgtaacaccagattcgttttctgatggtgggagttataatgaggtagatgctgcagtgcgccatgcgaaagaaatgcgagatgaaggtgctcatattattgatattgggtggcgaatctactcgtccggggttttgctaagagtatcggcggaagaagaaataagacgagttgttccgatgattcacgctgtttcaaaagaggtaagattgcctatttctaatcgacacggataaaggtgaagttgcaaaaccagccattgaagctggagctcatattattaatgatattttggggaagcgaagggcagacccaaaattcgctgaagttgcagctcattacgatgtacttattatcttaatgcacaatcgcgataacatgaaatattcgcaatttaatggctgatatgattgctgacttatatgacagaattaaaattgctaaagatgctggtgtgccgaaatgagaatatcattttagacccgggtatcggttttgctaaaacacctgaacaaaatttagaagcgatgcgtaatttagaacagttaaacgtactaggttatccagttctcttaggtacttcaagaaagtcctttattgggcatgtgctagatttaccggtagaagaacgtcttgagggaacgggagctaccgttttggcttggtattgaaaaagggtgtgaagtttgttcgcgttcatgatgtgaaggaaatgtcgcgtatgggctaagatgatggatgcgatgattggtaaaggggggtaagaatttggataaaatttatat

SEQ ID NO: 9919 - DNA, 3101 bp, Bacillus anthracis
cagacgatggagtatatgaaagaacatgattactattacaacgttctggacgagtataacttggaggaagtagaagaggtatataacatcgcttatggtgaaaacttcgagttccaatcttatatggcagcatcaaatcttttacaaagattatgcgttaaaaacaaatgatcaaaaacaatacttagaaagctatgaagatcgtgtagcaattgtgtcattatacttaggacgcggtgatgttgccaaggcaaaacaattcgcaagcatgattgtcaaacaaaactaccaaccagcaacaccaacctttttaaatgcgggaagaagcagaagaggagaaatggtgtcttgtttcttgttagagatggatgatagcttaaattcaatcggctttaacattaatactgcaatgcaattatcaaaaatcggcggaggagtagctttaaacttatctaagctacgcgcacgtggtgagcaaattaaaggtatcgacaacgctgcaagtggtgtagtacctgttatgaagttacttgaagaattcgtttcatatgcgaatcagcttggccaacgaaaaggtgctggcgcagtatacttgaacatttttcattgggatattatttgaattcctggattaattggtagtccctctacacagtaatgtgtatgagaaaaccttgtgaacctaacccataggggtgtcgcattagcggcgtaacggtatcaagtgaaataagggggaaaagaaaaagaaccccgcgaagaagctgactaagaaaagcctacggtcccatgcaagtggaaaaccaggtaataccggcggccagccttgaaagaaatattaccttgggtggaaagggaaatcttattattccccgggaggggaaaattccctgaacatgggggaattatttgataattaataagggaaaacaggaagttttttaattggtagttccaataatttttaagggcgattttaaaaatcctagaaaacaattgaatgctaatccgcctcctaagaaaccattttcaagccgcccctggaaattttattgtggagaaataaattttgagtttaaagggataattgaattaccaaatgataaggactttcttcataagatagagcaaagtttattatgtcaatattattgggaaacagtattgctacttttactcatcctatcgctagaggtggggcgcacactggggaaaagaaccatatgtattgggaaaacccactcaaaggaagtaaaaaaatttctttctgaaattaatactgggcctaataattattggtatgataaacctcaacatctggagaatatgagatctaagattactaaacgatttcatggtagaaaacatactgatgaaacaaaagaaaaaatgtctagatctcgtaaaggtaaaaagcatacaaaagaaacatgtatgaagataagtaaagctcaaaaaaatcaatataattcaggtagagaaaaacaaaaaaagccaattgttattaatgacatttactatgagtctttagcagaagccggacgagcggttaatgtacctgctaatacgaataaatatagagtactatcccataactttccctaattatcaatactttcaagaaggtgtaagagactatcgaacgcgcgtcattaaacgaaagctagtaaagtaggctgggaaataagtaccactccaaatgcaaggcaaccagttacaggttgatgatatagtccaaccttcatagaaatatgaagacgagttgaccaaaaaaataaatgccgatgagaagagccgtattcagtctctatccatcgggaatatccgttcccagtaagttctttgagcttgctgagaaaaacgaaccttttccatgttttcgcgccttatactgtatataagatacggggaagccatttagatgacattgatatcgatgaaatgtacgatgaataatggagcatcccaaaagtgagaagaaagccgctagatattagtgcgcgtgatatgcttattaaaattgctatgattcagcttgagtctggttatccgtacttaatgtttaaatcaaatgcaaataaccaacatccattgaaggacattggaactgtgaagatgtccaacttgtgtacagaaatcttccagctacaagaaacttctgaaattaacgattacggtacagatgacattattcgtcgtgatattaactgtaacttaggatcgttaaatatcgtaaatgtaatggaaaataaagaaattcgtgaagcagttcatgcgggaatggaagctttaacagctgtttctgatatgacgatcattccgaatgcaccaactgtgaaaaaagcaaatgatgagcttcattcagttgggcttggcgcaatgactttacacggatatttagcaaaaaataaaaatcgcttatgaaagtgaagaagcgaaagagttcgctcgtacattctttatgatgttaaattactactctattgagaaaagtatggaaatcgctaaagaaaaaggcgaaacatttaaagacttcgataaatctgattatgcgaatgggacatactttgaaaagtatgaaacgacagattacagcccagttctcagaaaaagggcatgcaatatttgaaggaattcatattccaacaaaagaagatttgacaagtttaaaagagcaagtgcagaagaatggtttatacaactcatatcgtcttgctatcgctccgacacaatcaatcagttacgttcaaaatgcaacttcaagcgtaatgcctatcgtaagtcaaatcgaatcaagaacgtatgcgaatgcgacaacatattatccaatgccgtatttatcaaaagatacgttctggtactataaatcttcttacgatatgaatcagtttaaattaattgatttaatcgcagaaattcaagaacatattgaccaaggaattagtacaattctttacgttaatagtgatatttcaacacgtgaattagcacgttactacatctatgcacataaaaaaggcttaaagagtctgtattatacgagaacacgtaaattaagcgtggaagagtgtgtggcttgtactgtttaatataaaaagtga

SEQ ID NO: 9920 - DNA, 1872 bp, Bacillus anthracis
tttggattctttctgtttgccgttattttattttggctcaaaacatatgcggcttatgtaacagaatttaatttaggtatttcaaatacaattcaaaaattcttgctgtttttcaacccgcttagttcagcagtgttatttttaggacttgcattatttgcaaaagggaaacgatcttatatttggttaattgttatcaacttgttattgtcgattcttttatatgcaaacgtcgtatactatcgctttttcagtgactttattacgttcccgacgttgacacaaacgaataactttggagatttaggtggtagtattgttgcgttgctacatctttttgattccgcttacttcttagatacaattactgtaatgatgttactggcaacgagatttgcaaatcctaaatcaattcgtgtccgaaatgtaaagtatcactagtattgtagcaggtattaattattcagtgttatcttaggacttgcagaatctgaccgtcgtgaattattatcaagaacgtttgatcgtaatagtattgtgaaatatttaggggcatataactatacgatttatgagggtattcaaagtgcgaaagcatcaacggaaagagcgttagctgatggagataatatgacggaagtaagacaattatttatcatcaacttacgcaagtccaaatcgtgagtatttcggtaaaggtaagggaatgaacgtaatttatattcatgtagagtcattccaaaacttgttaattgattataaattaaacggtcaagaagttacgccgttattaaactcatttacaaaagatgcgaatacgctttactttgataacttgttccatcaaacaggacaagggaaaacgtgtgatgcggagtttatgttagagaattctatgtttggttttccacaaggatctgtatttacatcgaaatatcataacacgtatcaatcagcaccagcaattttaggacaacaaggatacacatcagctgtattccatggtaactataaaacattttggaaccgtgatgatatttatacaatcatttggttttaataaattctttgatgcttcatactatgatatgaacgaaaaagatgtagtaaactatggattaaaagataaaccattctttaatgaatccattccgttattagaaacattgaaacaaccggtctatacgaagtttattacgttatccaaatcacttcccgtatccaattgataaaggagaagcgacaatttgaacaccggacaccagtggactcatctgtagataccgattttccaacagcacgtttatttaaaccaccctgtaaaagggttctttccattacttgaagcaatctggtttatatgataattctattatcgttatgtacggagaccattacggtatttcagataatcataacgcagcaatgtcaaaagtaatgggtaaagaaattaactcgtttgaaaatgcacagttacagcgtgtacctttaatcgttcgtgtaccaggtgtgaaaggtggcgtacaacatcaatacggtggtgaaattgatgttcttccaactcttttacacttactaggaacagatacaaaaaattatgttcaatttggttcagatttattatcaccagatcataaacaagttgttgcgttccgtaacggcaacttcgtaagcccaacagtactgcactaaacggcaaatattatgatacaacaactggaaaacctggaaaattttccgatgaaataaaccaaatgaacaaatggttcaaactcgttaaataatctgaccagtcgtaaatggggattaatacgattctaccaccgggaggatttaccccataaaacggttcgaggaatactataacaatcg

SEQ ID NO: 9921 - DNA, 1106 bp, Bacillus anthracis
aaacaaccactcgcacatcgaatgcgccctacaaatattcaagaagttatcggacaccaacatttagttggcgaaggaaaaattttatggcgaatggtgccaagcgaatcattttcaatctatgattttatatggggcctccccggcaccggaaaaaaatctatcgcgagcgcaattgtccggaagtacccggaacccccttttcgccctattaaaaggctggttactcctaataaaaaaagaaatgggaggttggtcgtacaaaaaaacaaagatgcatcgacacctcgttttaattttagatgaagtacaccgtctagataaagcaaagcaggattttctattacctcatttagaaagcggacttcgtagccttaaatggtgcaaccacgagtaatcccttccatgcgataaaatccgctattcaaaatcgttggcaaatcttcgaattacacgcattaacagaagaagatctttcaattgtgcttaaaaccagcacttggagaaatagaaaaaagtcttggggaatatgatgtaactggtacgcctgaagcattacatcactttgcaaaatgcgaacaggcggagatatgcgttccgcttataatgcacttgaactagctgttttatctagctttacaactgatgacaaagctgcggaaatcacgctagaaatcgcagaagaatgcttacaaaaaaagagcttcgttcatgataaaggtggagatgctcattatgacgtattatcggcatttcaaaaatcggtgcgcggaagcgatgtaaatgcagcacttcattatttagcacgtcttattgaagctggtgatttacaaagcatcggtagacgtcttcttattatggcatatgaagatattggacttgctagcccgcaagctggaccgcgtacactagcagctatagaatcagcggaacgagttggattcccagaagcacgcataccacttgcaaatgctgttatcgagctttgcttatcacctaaatcgaactcagcttataaagcacttgatgctgcattacacgatttacgtaacggtcaaacaggcgatatcccaagtcattaaaagatatcattcttccagcacacg

SEQ ID NO: 9922 - DNA, 1740 bp, Bacillus anthracis
atgaagagaaaagagaatgagtctgttaaagtatttgctcttggtggagtaggtgaaatcagggaaaaacatgtactgtgttgaaattgattctgaaatctttattgtagatgcaggggttattgttcccgggaggatgaaatgtttggaattgaatatcgttattccggatattacatatttacgtggaaaaccaagagcgagtaaaaggtttatttattactcacgggtcatgaagatcatatgggtggtattgtttacgtacttcggtaaattatctattccagtgtatgcaacgaaattaacagtaggacttatacaagaaaaacttgtgcaaacaaggtatgttatgccgcggtaactttaaaaacaatcgattcaaattcaacagtagagtttaatactacaacggtgtcattctttggaacgacacatagtattccagattctgttggtgtttgtttccatacatcaaaacgtgcgatcgtatatactggagactttacattcgatcaaactccaattggaaatagtggagcagatcttgggaagatggcatcaatcggagatgaaggtgtactatgcctattatctgatagtacaaatgctgagcgtccaggctatacacgttctgacacagaagttggtgtagaaatatctatagtattctacggcgcagaaggacggattatcggtgcttcatgtgcatcgaatgtacatcgtattcaacgagtatttgatgcagctgctgcaacacgactatcagtctcggatgtaagacgtagtatagtgaaagcagtaaatatcgcaagacgccttggtttatttagatgttccacaaaggatgggtaatttccctacaagaaagtacacaattttcccaaggaaaaagggtagctatttttacagacagggtagccaagcggaaccgatgggcaagcctttttctagaatgggggaaacaaagctcgctaaacaaaatttcaattcgtaaaggtgatacggttattattgcggcttctccaattccgggtaatgaaatatctgtatcgaaaattattgatttgttatttagagctggagctgaagttgtttattatggtgaaagaaaagttcacgtttcaggtcatggtagccaagaagaattaaaactaatgttaaacttaatgaaaccgaaatattttgtacccgtacatgggtgaggttcgtatgcgaaaagcacatgcatacttatactgaaaaatgtaagtatttgcagagaaaatatctttatcgtataaaaaggcgaaggaattgggttttggtgacaatgaaacaacattattttggtaaaaagccaccgggccaatgcaataaattgatggattaggtgtaggtgacgttggtaatatcgttcttcgagatagaaaaatgttatctcaagatgggatattagtagttgttgtaacacttggtaaagatgaaaagaaaattatctctggtccagaaatcatttcgcgtggatttgtatatgttcgtgaatcagaagcgttaattgaccgttctacagagattgtacgtatgattgttgagcaatcaattaaagaatattcaattgaatggtctatgttaaaacaaaatattcgtgaattattaggacagttcttgtacgaagagacaaagagaaaacctatgattttaccgattattatggaagtataaaaaaagatcacctttacgggtgatcttttttctttttaa

SEQ ID NO: 9923 - DNA, 1032 bp, Bacillus anthracis
atatagatgcacgagaacatgaaagattctttaaagcggccacttcaagatttacgcatttcagttattgatcgttgtaattttaggtgcacatattgtatgcctgctgaagtgttcggacctgattatgcttttttacaggaagagtgtttattaacgtttgatgaaatagaaaggttagcgagattatttataagtatgggagttaataaaattaggcttactggcggtgaacctttattgcgtaaagacttaccgaagttaattgcaagacttgcaaagctagaaggcttaaaagatattgggctcacaacaaacggaattcatttagcaaaacaagctaaggcgctaaaagaagcaggattaaagcgtgtaaatattagtttagatgcaatagaggatcgtgtcttccaaaaaattaatggaagacatgtaagtacgaaacctgtactgaaaggaattgaagcagcgaaggaagctggattagaagtaaaggtaaatatggtcgtaaaaaaagggatgaatgatagtcaaattcttcctatggctcagtattttaaagaacaagaaatacagttacgtttcattgagtttatggatgtaagcagtacgaacggatggaactttgaacaagtcgtttacgagggacaattaatagagaaaattaatcgtgtatatccaattgaacctgtttaaactcggtactttggagaaagtggcgaattgtatcgatatgtttgaaaaccatgccgaaagttggatttattacttcagtatctgagtcattttgttcttcttgtacgagagcacgtatttcggcagacggcaagttttatacgtgcttatttggagaaaaaggaacggatttacgatcgcttcttccaaaaaaaatttttgaagctctcccaccaaaaaattcccccccaacctggggaggtttaaaccgatcccatttttcaaagaaaacacacgggggaaagtacaaataaacgtcaaaaagttgagatgtcttacattggtggatagcgaaag

SEQ ID NO: 9924 - DNA, 1014 bp, Bacillus anthracis
gtgaggacaagtgtcttaacaaaaaagaacgtttctgttttaacaattttagtaggattaatcgttactgtatttttagtgagtttaaatacagggacatttaaaataccgccaatggacgtattaaagtcattggttggacttggggctgaagatcagtctgttattttatttgaatttcgtatgccacgtatggttatcgctatattagttggatctgctttagctatgtcaggtgcgattttgcaaggtttatcacgaaatccacttgctgatccgggtattatcggtattaacgctggagcaggattaacagttgttatattcgtctactttttcttcgggaaagttgggactggtacatttttatctgtatttatccttccattcttcgcgttagttggagcgatattagcagcggttattatttatttactagcatggaaagacggcgtttcatctactcgattgatacttgttggtatcgccgttgcagcagggtttggtgctgttagtttaattttttctatgaagatgacatctaacgatttccgttttgctacgatttggttagcgggaagtctttggggcacagattggaagttcgtgctaagtgtccttccatggatggttattttcttgccactagctattagtaaagcacacatactaaatgtaatgaacctaggcgactctacagcagttggtcttggtgtaaacgtagaaaaggaaagacgtaaattattatttattgcagtttgtttagcaggtgcatctgtcgctgttgccggaggaattggttttatcggtttaatggctccacatttagcgaggcgccttgttggtgggaaacatcaaattatgctgcctacagctgcactaataggaacgtttttacttttattcgcagacgtaatttcaagaagtgtgttaccaacttcagaaataccggtcggtcttgttatttctgtaattggtgcaccgtattttatatacttacttatgaggacaaag

SEQ ID NO: 9925 - DNA, 888 bp, Bacillus anthracis
atggagaataaacaaagtagaaatgagtatttacagcgcatatacaaagtacaaaattatatagaattacacataaatgattcactatccattgaagagctagcggatatagcaggattttcaaagtatcattttcatagaatttttaaagggatagtagatgaaccattatctcggtatgtaaaccgcttgaaactggaaagggcaacaaaccttcttacataccgttcggatatgacgattactgatatcacttaccattttggtttcacagattcggcagttttctcccgtacatttaaaaattattatggagtaagtccgtctcaatatcgaaacgacaatagcaagaattgcaaagacgtaagaagaatttctcaatacaatgaatgtaagaaggttcgaaggaatgttgaaattgtaacagtagacaatataaacgtcgcatacataaggcatatcggtacatatgaagagttaactatagcttttccgaaaatgatagagaaactatttcaatacgcaaccaagcaaaactatcatgtatttgaggatacgaaagtattaaccatttaccacgatcatcatgaatttacggaggacaatcatttaagaacaagtttatgtataacaattccaggtgaatctgcaatagaaacgaacgacattggaataatggtaataccttcaggcaagtatgcagtaggacattttgaaatattccaagatgaatataaaagagcatgggactttatatatggtgagtggctgccaaatagcggatataaaccgagagactcatatccttttgaagtatatagaaatgatccaaagcagcatccaaagcataaacatatagttgatatatatgtacctatcgaacctttt

SEQ ID NO: 9926 - DNA, 1191 bp, Bacillus anthracis
atggtaccaaatacggttcgtactccaaacaagaagaagaaatggattattatcggagttattgcactaattgttattgtagcagcagttaatatttttgttatgcaaggtaagaagaagggggcatcaacatctgctgatgctgtaagttttgagaaggtaacggagcgaaagttgaataatacgaagttaatttctggtcaggtgaagcctgggaatatcgaaagtttttatgcggatccggccaaagggaaagtgaaagatattgaggtaaaagaaggccaagaggtagagaaaggtgcgaagttattctcttatgataatgaagagattaatttgcaaatgaagcaagctgatcttgatcagaagatggcagatatgcgttatgatcaagggaagaagaagattgattcgttgaagaaagaaattaagaaggcaaaagatagcggagctgggaaagaagtaacagatccgatggaagagcaagtaagtgagttagagatggcgcaaaagacaacggatctggagaaagaaaaagggaagttgcagaaagaagagttaagtaaaaagcagaaagagcttacgatttatagtaactttgctggtgttgttcaaaagttagataaagatgcggcgcaaagttcatctcaagcgttaggtggtcaagggaaagccttcttacaagtggcttctaaagatccgttccaaattcaagggacgttaactgagcttcaaaagtcacaaattcaaaaagatcaaacatttactgttactgcgaaagcaaataataagaagaagtggacaggtaagattacagaagtaagtgaattcccaacgagtgcagagatggcgcaagccggtggtatgggtgaagcgactcaaaatatgtctcaatatacatataaagcaagccttgatagtcaagatggtttatctccaggttatcacgtttctctgcaagtaaatttagagaataagacgatggttgctgttccgactaagagtattgtagaaaaagatgatgatgcatttgtttatgttgaggataaaggaaagcttcgtaaacaaaatgtgaaaaaaggttctactgatggggactggacagagattactgaaggcgtaacagtggggcaaaaggtggttaaaaatccttccgacgatgtgtatgacggaatggaagtgaaagagaaa

SEQ ID NO: 9927 - DNA, 1952 bp, Bacillus anthracis
ggatacatgcccggttcatacgatgtcataagtaatcggtgcaaggtcatgcaagaatttgaaaactggtcttgccggaaccaccaatgggctccaaaacattaatggtaaccattaacttaaatatggtaaccgttatgccatggaacccttctggtggtggaacaaccaaaaggaatggtggtcctgaaattgatgcattagcgggagaaatgggggcgcaaccattgattaaaacgccatattcaatgcgtatgttaaatacaggtaaagggcccaactgtacgtgcacctctaacacaaagcagataagttctccttaccagcctgaattaaagaaaacaatttgaagaaaaccccaacttaacgttggttccaggaaatggagaaacgtttaattgttgaagatggcgaatgtaaaggtgtaattacgcaagctggtgctgaatatacagcaaaaaccctgtggtaattaccaccgggaaggttttttacgtgggggagattataagggggagatttgaaattttggagggggtccaaattaatcaccaacccatttattctttatcaggaacatttaggggaggctggatttcgatctgtttagatttaaaacaggtacactcccgcgtgtaaatagtaatacgattgattacagtaaaccagaaattcagccaggtgacgataaaaccaccgagctttctctttgaaaaacaccaaatttttattatggatcaatttccatgttggttaacgtatacaagtacggaaacacatcgtttaatagatgaaaatctacatcgctcagctatgtattctggtatgattaagggaacagggcctagatattgtccttcaattgaagacaaggtagtaaggtttaatgataaaccacgtcatcaaattttcttagagccagaaggacgtaatacacaagaagtgtacgtacaaggtttatctacaagcttaccagaagacgtacagcgtgatatgcttagaacaatccctggtttagaaaatgttgaaatgatgcgtacagggttatgcatttcgaatatgatgcaattgtgccaacgcatctatggccaacacttgaaacgaaaaaaattaaaaatttatatacagcaggacaaattaacggaacttctggttacgaagaggcagcaggacaagggcttatggccggaattaatgcagcatgtcgttctttaggtaaaaaagaagttattttaggtcgtgaagatgcttatattggtgtcttaattgatgaccttgtaacgacaaggaacgaatgacaccaatatcgttaattaacgtctcgtgcagagtatcgtctattattacgccatgataatgcggatcttcgtttaactgaagttggtcatgaaattggattaattacagtttgaagcgctatgaacgggatttacaaataaaaaattacaaattgaacaagaaaaggaacgtttaagcagcattattattaaaaaacgtcctgaagtccaagaattaattcgcaatattggcggaagtgaattgaaagatgggatacgtgcaagtgacttattacgtcgtccagagatgacatatgagcatattcatcttttagtaccaagtgaagtagaatctagtgatgaagttaaagaacaagttgaaattcagattaagtacgaaggatatatcgaaaaatctttacaacaagtagagcgtatgaagaaaatggaaaataaaaaaatccctgtagatattgattatgatgcgatttctagccttgcatcagaagctagacagaaattgaaagaatgttcgtccgccttccatgggggcaagctccacgtatatctggcgtaaatccagcggacatttccattttacttgtgtatattgaacaagggaaaaattgcgcgagtatcgaacccattaatattaaggaagaaattgttagatga

SEQ ID NO: 9928 - DNA, 3912 bp, Bacillus anthracis
ttagattggatgaaaaagctgtttaacaaagaggaagaacaaacagcgatgaataaagaagtaccaaagcaagttgaaagtcagccgaaaattcctcgtgtaaaccaccacactgaagcaagagaagcacaaatggcaagtaggaatgcaggtaaatgccgttttccattagtaccggataatgggttcgatgaagaggatgttatagaaacagggcattttgaagaacaacctgttcaagctgtaacatatgaaaatgagcctattcaaagaggaatcaaagtggaaagaagtagacgacagtatgtggagaaggtagtttctacatatgaagaaccggaaatgcaatatgaaccggagcgagaacctgtcgtaaagaaagcatctacaccagcacaagaaagtaaccgtagaccatttcgtccaacagaaatgatttcgccaatttacggatataatcgtccttcagtagagaaaaaggaagaaaagcaggaggaagtaaaggaaagagaagaccttgaaatatctgtagagggcaaatcagtcgttgatgcatggttagagaaaaagggatatacattatctgatttctcagaaggacaagcaccgacttcttctagtcatagagctgctaacgagcaaggagagcgacaatatgaagagagtaaaaaggaagaaaagtcagttgtcgatcaatggctagagaaaaacggttatgaaatcgaacgccaagagcctatagtagaagaaaaagaagtggttcaagaaatgagtgcaccgcaggaagttccagcggctgaattacttcatgaaacaattgctgagcgcatggaaggtgcgaagcaagaaagtgatgtagtggacaaaaacattctacaagaggaattagtagattctaaagtagagcacgaggatacaatattatcagaagaaattaaacgtagtacagaaatagaacaacctactattgaagtagaaaaacaagcaccagaagaatcagtgattgtcaaagcagaagaaaaacttgaagaaacaattgttgtagaaataccagaagaagtggaagtaattgcagaagcggaagaaccagaagaagtagaagtaattgcggaaacagaagagtcagaagaagtagaagtaattgcggaaacagaagagtcagaagaagtagaagtaattgcagaaacagaagagttagaagaagtggaagtaactgcagaaacagaagaattagaagaagtggaagtagttgcagaaacagaagagttagaagaagtggaagtaattgcagaaacagaaaaattagaagaattagaagaagtggaagtaattgcagaaacagaagagtcagaagaagtagaagtaattgcagaaacagaagcaccagaagaagtggaacctgtagcacttgaggaaatgcaacaagaaatggtgttaaatgaagcaattgaacaaaagaatgaattcatacatgttgctgtggctgatgaacaaacgaaaaaagatgttcaaagctttgcggatgttttaattgcggaggaacaatcagttgtagaagaaacaccgattgtagaagaacaaccagttgcagaagaagcaccggtcgtagaagaacaatcagttgtagaagaaacaccgattgtagaagaagcaccggtcgtagaaggacaatcagttgtagaagaagcaccgattgcagaagaacaaccagttgcagaggaaacatcggtcgtagaagaacaaccagttgcagaggaaacatcgatcgtagaagaacaaccagttgcagaggaagcaccagtcgtagaagaacaaccagttgtacaaaaagaagaaccaaaacgtgagaaaaagcgtcacgtaccatttaatgttgttatgttgaaacaagatagagcgcgattaatggaaagacatgcgtctagaacgaatggaatgcaatcttctatgagtgaaagagtagagaataagcctgtacatcaagtagaagaacaaccacaagtggaagaaaagccaatgcaacaagtagtagtggagccacaagtggaagagaaacaaatgcagcaagtagtggagccacaagtggaagaaaaaccaatgcaacaagtagtagtggaaccacaagtggaagaaaaaccaatgcaacaagtagtagtggagccacaagtggaagaaaaaccaatgcagcaagtagtggtagaaccgcaagtggaagaaaaaccaatgcaacaagtagtagtggagccacaagtggaagaaaaaccaatgcagcaagtagtggtagaaccgcaagtggaagaaaaaccaatgcagcaagtagtggtagaaccgcaagtggaagaaaaaccagtgcagcaagtagtagagccacaagtggaagaagtgcagccagtacaacaagtagtggcagagcaagtacaaaagccaatttcaagtacggaagtagaagagaaagcatatgttgtaaatcaaagagagaatgatgtgcgcaatgtattgcaaacgccaccgacgtatacgattccatcattaacattactatcgattccacagcaagcagcgttagataatacggaatggttggaagaacagaaagaattattagatacaacgtttaataatttccacgttggcgcacatgttattaatgtatcgcaaggtccagcagtaactcgttttgaagtacagccagacccaggtgtaaaagtaaataaaattacaaacttaagtgatgatattaagctaagtttagctgcgaaagatattcgtattgaagcgccgattccaggaaagagtgcgattggaattgaagttccaaataaagaaagtaagccagtatttcttcgtgaaattttaagaagtcctgtgtttacaaagagtgaatcaccgcttacagttgcacttggacttgatatttcaggcgatccaattgtaacggatattcgaaaaatgccacacggacttattgcgggtgcaacgggttctggtaaaagtgtgtgtattaacgccattttaacaagcattttatataaagcgaaaccacatgaagtgaagttaatgttaattgatccgaagatggttgagcttgcaccatacaattctgttccgcatcttgtagcacctgttattacggatgtaaaagcagcgacagctgcattaaaatgggcagttgaagaaatggagcgccgttatgaattgtttgcgcacgcaggtgctcgtgatttaactcgctacaatacgattgtaagtgggcgagaaattccgggagagacattaccttatatcgttattgtcattgacgagttagccgacttaatgatggtagcacctggtgatgttgaggaagcaatttgtcgtattgcgcaaaaagcacgtgcttgtggtattcatttattagtagcgacgcagcgtccatctgtagatgttattacaggtttaattaagtcaaacattccaacgcgtattgcgtttactgtatcatctcaagttgattcgcgtacgattattgatattgggggcgcagagaaattacttggccgtggtgatatgttattcttagggaacggtacatctaagccagttcgtgtacaaggtgtatatgtatcggatgatgagattgaaaagacagttgatcatgtgaaaaagcaaatgaagccaaattacttatttaagcaagaggatttattagcgaaaacagaacaagccgagtcggaagacgaattgttccttgatgcatgtcaatttgttgtagaacaagggggagcgtccacatcttctgtacagcgaaaattccgcatcggttataatcgcgcggcacgtctcattgaagagatggaatcgcaaggaattatttctgaaggtagaggaacgaaaccgagagatgtccttatttccgaggatgaatttgccgct

SEQ ID NO: 9929 - DNA, 597 bp, Bacillus anthracis
atggcagaccattatttttctaacgacccttctagtaaaagtgatcgtaagcgatgggaatttacgcttcgtggatctcgatttactttcttatctgaccgtggggtgttctcgaaaaacgaagtggactttggttctcgtcttttaattgaagcgtttcaagtgccagatattaaaggtgatatattagacgtaggttgtggatatggaccgattggtttatcgttggcgaaagagtttcaagaccgtaaagttcacatggtggatgtgaatgaaagggcgcttgagcttgcgaaagaaaatgccgctaacaatagaattggaaatgtgcacatttttcaaagtagcgtctacgaaaacgtagatggtatgtatgctgctattctatctaatcctccaattcgtgcaggtaaagatatcgtgcatgagattttagaaaaagctgtagagcatttagttccaggtggagagttgtggattgttattcaaaagaaacaaggtgcaccatctgcactgaagaaactagaagaagtgttttctgaagtcgaagttgtagaaaagaaaaaaggatattatatcataaaatcaaaaaaacgt

SEQ ID NO: 9930 - DNA, 663 bp, Bacillus anthracis
atggataagttactcacgaatgttgattggaatcaaatgttagaagcaactggtgaaacgttatatatgacggcaatcgcagctcttgccacatttattttaggacttattttaggattgttgctctttatgacagcgaaagataatttatgggaaaacaaagcggttaacacggcgattggagcgttcgtaaacattttccgctcgataccgttcatcattttaatcattttattaatcccattcacaaagattctgcttggaacaattcttggagcaagtgcagcacttccagctttaattattggagcagcaccattttacgcgagaatggttgaaatcgcacttcgtgaaattgataaaggtgtaattgaagcttcgaaagcgatgggagcaaaaacaagcacaattattttaaaagtattgattccagaatcgttaccagcattagtatctggtattacggttacgacaattgctttagtgggctatacagcaatggcgggagttgttggtgctggtggtcttggaacacttgcttatttagaaggattccaacgaggaaataacgatgtaacaatcgttgcgacaatttgtgtattactagttgtatttttcattcagtggattggtgatcgtgtaacgactcgaatagataaacga

SEQ ID NO: 9931 - DNA, 361 bp, Bacillus anthracis
atgactaaagaacaaatcattgaagcagttaaatctatgactgtattagaacttaacgacttagtaaaagctatcgaggaagaaattccgcgtaactgctgctgctcctggacctgttgctggtggcgctggaaaacctgctgctgagaaaaatgaatttgatgtgggactaaataacgctggtggcccaaaaatcaaagttatcaaagttgttcgtgaaatcactggtcttggcttaaaagaagctaaagaattagttgacaacactccaaaagtaatcaaagaagctgctgctaaagaagaagctgaagaaatcaaagctaaacttgaagaagttggcgctgctgtagaagttaagtaa

SEQ ID NO: 9932 - DNA, 1428 bp, Bacillus anthracis
atgcaactacaaactgaagtaaaaaaacagcctagtaaacgaaagtttaaaatgcctgacgcgtacgtactactattttttattgctctgctttgtgcaatagctacgtatttcgttcctgctggagaatttaaaagagttacaaacgggactgttacaacgacaataccaggaagttaccattctgttccgcaatcaccggtagggtttgtttctttttttaccgctattgaaaaaggaatgacacttgctgctcctatcatcttcttaattttatttacaggcggtgctattgcgattcttgaaaaaaccggtgctcttgacggtttaatctatcatgttattaacaaatttcgtaaccagcaattactttttatatgcattgtcgccgcactcttttctattctcggaacgactggtattatcgttaactcggttatcggctttatccccatcggcatcatcgttgcacgcacattaaaatgggacgctatcgtcggcgtagcaattatttatttgggcacttatgctggttttaatgctactatattatctccttcacctttaggcatttcacaaaaaatcgcggaactcccaatgttttcaggaattggtttacgcacagcaatttatatctcttttttacttgctaccattctatatattaattggtacgtaaaacgcttaaaaaaatcgaataaaggaagcatactcggagataactggtttccaagtaatgctctttcaagcggaaaagaggcgcaaaaaacagaagttccttggacaatacgtcataaattaattttactcgtttcagctttatcattaattgcatttttaatcggcgcttttcgtctacattggacagacgcggaaatgactgctacttttagtttcatagcaattacagccggaataataggtggaatgaaagcaaacgatatcgcttctacttttctagcaggctgccaaaatctcatatacggtgctttgatcgtcggaatggctcgttgtatttcagtcattttggagcaagggaaattacttgatacaatcgttaaccaactcgcacagtctctcgaaggacaaagcccagtatttggcgttatcggtatgtatgtaagtagtgccgcattacatttcctcatttcatccgggacaggtgaatctgtgattttcattccgatattagctccattagctgatttcatgcacattacacgccaagttacagtacaagctgttatgctcggcgaaggtgtagtgaactgcctcaatccaacttctggtgttttaatgggagtactcgcggcgagcggtatttcttacggaaaatggattcgatttatggctccacttgcattcatttggtttattattggacttatttttcttattgttggggtgaatattgagtggggaccgtat

SEQ ID NO: 9933 - DNA, 412 bp, Bacillus anthracis; identical to SEQ ID NO: 9411

SEQ ID NO: 9934 - DNA, 2744 bp, Bacillus anthracis
atgaactggtatggaatgcgcgcacatgaagtggaagaaagtacgaatacgaatgtgaaggttggacttacagagaaagaagcagaaggacgaataaaaaaatttggtacaaatgaattagaggaagcgaaaaggccttctgcactaatggtatttttagcgcaatttaaagattttatggtacttgttttatttggtgcaacaatagtctctgcttttttaggggaatacattgattctattgcgattgtggcaattgttattatcaatggtattctaggcttttttcaagaaaagaaaggctgaaaagtcattggaagctttaaaagagctagccgccccgcaagtaactgtattgcggaatggaaagtgggtaaaggcaccgtctaaagcactcgttttaggtgacgttattaaattttctagtggcgatcgtattggagctgatgtacgtcttgttgaggcgtcgagtttatatatcgaagaatcagcttttacaggagagtcagtttccagtgcagaagaaagtagaagcgttgcaagggcaagatgtttcaatgggtgatcaaaaaaaatatggcttttatgggtacgatgattacacgaggatctggcacagggggtcgttgtagcaactggtatgaatacagcgatgggccaaattgcaaatatgttacaaaatgcagagcagatggaaacaccactgcaaagaagattagaacaactcggaaaaatattaattattgtggctcttgttttgacagctcttgtcgtgttagctggtgtgtatcaagggaatgaagtatatcatatgtttttagccggacgtgtcgctagctgttgctgctattccagaagggttaccagcaatcgttacagtagctttatcgcttggtgtacagcgtatgataaaaaagagagcaattgtaaggaagttaccagcagtagaaacgttaggctgcgcttctgtcatatgctctgataaaacaggaacaatgacgcaaaacaaaatgatggtaacacatatgtggtcaggtggagagttgtggaaagtgacaggccaagggtatgaacctaatggctcttttatgaaaggtgaaaaagaaattaatgcagctaagacgaaagcactttatcaactacttacatttggttcgctatgtaataacgcaaatattattcaaaagaaaaaggcgtatgtattagatggagatccaactgagggggcgcttgtagctgcagcaatgaaagcgggggataacccgtggggcccctaaaggggaaaattgaaattttttggggaacttccctttgattccactggaaaaaatgatgagtgttattgtacgagatcgagaagggaaaaaatttgttgttacgaagggagcgccaagatttccttctgcaaaagagtcaagcgattttagggggagataggcaacaacttttaagtgagttgtatagaaaaggaagtacaggcggctattcatagcttaggtagtcaagcacttcgaacaattgcagttgcatttaagcctttaaaagtaacagattctatcgaacatgaaagagacgttgaaaaagattttatgttagttggggatccaaggaattgattgatccgcccaggcccagagttaaagccagccagtaaaagagtgcagagaagctggcattcgaacggtgatgattaccgggtgaccataaagtgactgcaatggcgattgcggaacaattgagcattttaccacaaaggtggacgcgttgtcgagggggtagatctcgcaagtatggatgtagaagatttagaaaatgttgtagaagatccgtatgtatttgctcgtgtatcaccagatcataaattgaaaattgttaaggcgttgcaaaataaaggacatatagtagcgatgccaggtgatggagtaaacgatgctcttgctataaaaacagcggatattgggatagcgatgggaattacagggacagacgttgcgaaagaagcttcttctctcgtctagctggtcgataatttcgttacgattaaatcagcaattacagaaggtagaaatatatccgaaaatatccgtaagtttattcgttatttattagcatcgaatgtaggggaaatctttagtcatgttatttgcgatgttgcttgcattaccactgccgatggttccaattcaaattttatgggtgaacttagttactgacggtttaccggcgatggcactaggtttggataaagctgaaggagacgtgatgaagagaactccacgtcatccgaaagaaggggtatttgctagagggcttgcctggaagattataagccgtggctttctaataggagcagtgacgttagtagcgtttattattgcatataatcaacatccaaatgaactgaaatatgcacaaactgtagcattcgcgacgttggtacttgctcagcttattcatgtatttgattgccgggagtgagctttctgttttccatcgcaatccgtttggaaatgtgtatttagtaggagcggtattcatttcatacctactcatgctcgtcgttatatattacccaccgttacaaccgatttttagccacgatgccaatacaaggcgagagattgggttgttaattggagggtttatcatcaattccgactttcttattagtaggctctttattaaccagggaaaaaaggggagaataagccaatattatattaagaagggatttaacttggaat

SEQ ID NO: 9935 - DNA, 418 bp, Bacillus anthracis
atcaagatttcaacgaaaggccgctacggcttaacaattatgatcgatcttgcaaaaaagtttggtgaaggtccgatttcattaaaatcaattgcgcaggcacatgacttatcggaacattacttagagcaattaatttcaccacttcgtaacgcgcgtctagtaaagagtacgcgcggggcatatggcggatatgtattatcagatcagccggctaacattacagctggggatgtaatccgtgtgttagagggtccgattagtgtgtagaaaatgatagagaagaggacgccagcacaacgcccattatgggatgcgtgttcgtgatgcggtgcaagaagtgttagatagtacaacgttagaagatttagtacgttatgaggaagaaaatcacgggggctatatgttttacatttaa

SEQ ID NO: 9936 - DNA, 285 bp, Bacillus anthracis
ttggcgtctgagacagtatcaaatcatcaggaaaaggcactagcccttctacaagcggatgcggagaagattttaagacttattaaggtgcaaatggaccatcttacaatgccgcaatgtccattatatgaagaagtgttagacacacaaatgtttggactatcccgcgaagtcgattttgcagttcgccttggtcttattgcagaagaacaagggaaagtaatgttaggagagcttgaacgtgagttatctgcacttcatgaagcatttacaaacaaacaacaa

SEQ ID NO: 9937 - DNA, 961 bp, Bacillus anthracis
ggatatgtatatttagttggtgcaggacccagtgatgaagggcttattacaaagaaagcgatagagtggttaaagcgtgcagatatcgttttatatgaccgtgtactaaaccctttcttcgtcagctatacaaagcaaacatgtgaacttatgtatcgcggaataatgccaaagaatcatattatgcgacaagaaatgattaacgcacaccattcttcaatttgcgcaagaggggaaaaatgttgtcggattaaaaggcggagatccatctatttttggccgtgttggtgaagaagcagaaactttagcagcagcaaatattccatatgaaattgtaccaggcattacatctagcaccgccgctagtagctatgcaggtatcccccttacccaccgtaactacagtaatagcgttactttactaaccggacatgcaaaaggttctttaaccgatcatggaaaatataattcatctcacaatagcgatacgatcgcctactacatgggtataaaaaacttacctacaatttgtaaaaacctacgacaagcaggaaaaaaagaagatacgccagtagcagtcattgaatggggtacaactggtaaacagcgcgttgttacagggacactatctaccattgtttctatcgtcaaaaacgaaaatatttctaatccatctatgacaattgttggtgatgtcgtttcattacgagatcaaatcgcttggaaagaacataaaccattacatggtaataaagttttatttacatccgcaacgaataaaacaagtgtaatgaagcaacagttacaagaagctggtgcagaatatatatcaaattccaactttcaaaaaggaagaatatacattaacacttgaacaaatcattgaaaattcttaacgttaatcgccatagttctttgttcagctgacagtgtagaaatgttgatgccatcatgtagctaa

SEQ ID NO: 9938 - DNA, 1041 bp, Bacillus anthracis
atgaaaacattgttagaggtaaaagatttacaagtctcctttgatacacatgcaggtgaagtacaagctgtccgcggcgttacttttgatttgaaaaaaggagaaacattagcgattgtaggagaatctggttctgggaaatcagttacttctaaagcgttaatgggattaattccgaatcctcctggacgcattaaaaatggtgaaatcgtatttgaaggtcgtgacttaacgaaattaacagaaaaagaaatgcagcaagtacgtggtaaagatatcgcgatgattttccaagatccaatgacatcattaaacccaacgatgacaattggaaatcaaattatggaaggtctgattaaacaccaagggatgagtaaagcagatgcacgtaaagttgctttagaattaatcgatcttgtaggtattccaaatccagaagctcgcttaaagcaatatccgcaccaattctctggtggtatgagacagcgtgtagttattgcgatggcattagcttgtaacccgaaattattgattgccgatgagccgacaaccgcgctagacgttacaattcaggcgcaaattttagagcttatgaaggacattcagcaaaaaacagaagcagcaatcattttcattacgcatgacttaggtgtagtggcaaacgttgcggaccgcgtagcagttatgtacgctggtaaagttgttgaaatcggaactgtagatgaaattttctacaatccgaaacatccgtatacttggggcttaatcgcatctatgccaagtttagatggttcagaggaagagttatacgcaattcctggaacgcctccagatttattgaagccgccaaagggagatgcttttgcaccacgtaacccgcaggcactgaaaattgattttgaaatggacccacctttatttaaagtaagtgatacacactatgcggcaacttggttacttcatgagcaagctccagaagtaagaccgccggcagtcgttgaaaaacgcattcttcaaatgaaagcaggtgaacaacatgac

SEQ ID NO: 9939 - DNA, 2007 bp, Bacillus anthracis
atgaggttattcgggaggttcaaaacaatgacagaggaaaacaaatccttttatattactaccccaatttattatccaagtggaaaattacacattggacatgcttatacaacagtagcaggagatgcgatggcacgatataagtgcatgcaaggatataatgttcattatttaacaggaactgatgagcatggacagaagatccaaaagaaagcagaagaattaaacgttacaccacaagcatatgtggataacatcgttgcaggaattaaagaactttgggaaaagatggatatctcttatgatgattttattcgtacaacggaagatcgtcataaagatgttgttgaaaaaatcttcaagcaactagtagatcaaggtgatatttatcttgatgaatatgaaggttggtattctgtacaagatgagacattctatacggagcatcaattagtagatccaattatggaaggtgacaaagtagttggaggaaaaagtccagatagtggtcatgatgtagaacttgttcgtgaagaatcgtatttctttagaatgggtaaatatgtcgacagactattaaaattctatgaagataatccacatttcattcagccagagtctcgtaagaatgaaatgattaataacttcattaaaccaggcttagaagatttagcagtttctcgtacttcatttgactggggagttcgtgttccaggtaatccgaaacacgttatttacgtatgggttgacgcactatctaactacattacagcattaggctatggaacagaaaatgaagagatgtataagaagttctggccggcagatgtgcatttagttggaaaagaaatcgttcgtttccatacaatttattggccaatcattttaatggcattagatttacctcttccgaaaaaagtctttgctcacggttggattttaatgaaggatggaaagatgagtaagtcaaaaggaaatgtagtagatccagttatattaatcgatcgttacggattagatgcattacgttattacttacttcgtgaagttccattcggatctgatggcgtattcacaccagaaggatttgtggagcgtattaatttcgatttagcaaatgacttaggtaacttattaaatcgtacagtagctatgattgataagtactttaacggagaaatccctgcatttaaagcaaatgtaacggaatttgatgaaacgttagtaacatttgcgaaagatacattgaaaaaagttgaagaagcaatggagaatatggaattctctgtagctctaagctcaatttggcaattggttagccgtacgaataaatatattgatgaaacacaaccatgggtattagcgaaagatgaggatgatcgtgaaaagttggcgtctgtaatggctcatttagcagaagtacttcgtcaaacgggtattatgcttatgccattcttaacagtagcaccaagcaaaatgtttgctcagcttggccttactgatgaagcacatacatcttggggaagcctatctacaatcggctgtattccagctggaacaaaagtagaaaaaggacaaccaattttccctcgtttagaaatggacgtggaagtggcgtacattaaagaacaaatgaaagcctctgctcctaaagtagaagagaaaaaagaagaagaaccgaaggcagaagaaattacaattgatgatttctttaaagtagaattgcgtgtagctgaagtactatctgctgaacctgtaaaaaaggcagataagttgttgaaaattcaactagacttaggtacagaaaagcgtcaagttgtttctggaattgcaaaattctattcgccagaagacctaaaaggtaaaaaggttatttgtgtaacaaatttaaaacctgtaaaattacgcggtgaattatcgcaaggtatgattttagcgggtgaagagaatggtgtattgtcattagcatctattgaccaaaatataccaaatggtacaaaaatcaag

SEQ ID NO: 9940 - DNA, 1707 bp, Bacillus anthracis
atggcattcgatggattatttacaagagcgattacacatgaaattgcaaattctctttacacgggaagaatttcaaaaatatatcaaccttcaaaatacgagattttattacatattcgagcaaacggaaaaaatcaaaaactcattctttccgctcatccgacatatgcacgtttacacttaacaaatcaaaattacgattcacctgcacttccaccaatgttctgtatgcttcttcgtaagcatttagaaggtggattcattgaaaaaattgaacaaattgatttagaacgtattattcaaattaccgttcgtagcagaaatgaaattggtgatgaatcgctaaaaacattagtaattgaaattatgggacgacatagtaacattattttagtagacacgaaaacaaacaatattttagatagcttaaaacacgtttctttagcagtaaaccgacatcgaactgtatacgctggagctgaatatattgcaccaccagtacaacataaaattaacccacttcagatcgaaacaaatgatgaatttattagaccgctagactttctatctggaaacatggataaacaacttgtcggcacctttacaggaatatcaccgttattcgcaaaagaagtcgtgaaaaaagctggtatggtaaatgaaaaagcattagctgatgcatttttctccatacaaaaaccattattaactcatacatattcgccaacaatgactacttcaaatgggaaagaattcttttatcttttccctcttgcgcacttagcaggagagaacaagacattctcatctgttagtgaattgctagaccgtttctttttcggaaaagcagagcgtgaccgtgtaaaacaacaagctcacgatttagagcgctttatgcaaaacgaaaaaaataaaaatgagaaaaaactcattaaactagaaaaaacattacaagatgctggaaaagcagataaatatcaactatttggagaactacttacagccaatatgtacgctttgaaaaaaggcgataaagacattgaagtcgttaactattacgatgaaaatggtggaactgtaaagattgcattagatcctttaaaaacgccatctgaaaatgcacaacgctatttccaaaagtaccaaaaagcgaaaaattcaattgttgttgttgaagaacaaatcgaaaaaacaaaggaagaaattctttatttcgatagcttacttcaacaaatggaagctgcttcttcaaaagatattgaagaaattcgtgaggaattagctgaagaaggttatatgcgcaatcgtaaaacgaaaaacgcaaagaaaaagcctactaaaccagtattagataaatatgtagcaagtgatggtacagaaattttcgtcggtaaaaataataaacaaaatgattatttaacaacgaaatttgcccgtcgtgatgaaatttggttacatacgaaagacatacctggttctcacgttgtcattcgttctttagaacctgctgaagaaactttactagaagctgccaaaattgctgcttattatagtaaagcaaaagagtctagttctgtacctgttgatttcacaaaaatacgccatgtgaaaaaaccgagtggtgcaaaacttggttttgttacttatgacaatcaacaaactgtatatgtaacaccagatgcagatactgtaatgaaattaaaagct

SEQ ID NO: 9941 - DNA, 300 bp, Bacillus anthracis
atggatcataaagagcatgaagcagtaacacatagatcagaaaaagaaaaagaacaaattataaatagattaaagagaattgaaggacaagtccgcggtattcaaaatatgattgaaaatgatcgttattgcgtggatattttagtgcaaatttcagcgattaatgcagcgatgaaaaaagtaggaatgggtgtattaaaaaaccatacgagtcattgtgtttcaggtgcaattaaagatggtaatggtgacgaagcaattgaagaattaatgacagtatttgaacgtttttcaaaagcg

SEQ ID NO: 9942 - DNA, 597 bp, Bacillus anthracis
ttgttatgtctgcaaaggaaaaacacggctaaatcaaaacaatttaaaaagatattactttctgcagatttaataacagcggatggaattggcgtcataattggttcgaaaatattaaaaggaacgctgaaagaacgcgtcactggggcagatatcactcacgatttaataaaacattgtaatgaaaatggatgtcgggtctttctttttggagctgctccagaaagtaataaaaaggcattagaaaaattaaatgagcagttcccaggagcacagtttaaagggcagcatggatttgtaaatggtgaagaaatagaagaagtaaaaatgaaaattaagcaattcaagccggacttactgctagtaggactaggctcacccaaacaagaagaattcatttatgaaaatctacaaacattaaacattccgctatctataggtatcggaggtatgatcgatataatttctggtactgtaaaaagagcaccgaaaattatgagggatacaggaactgaatggttatatagattactctcacagccgaaaagaataaagagacaactcgtacttccgaagatatttaatttccagttatgg

SEQ ID NO: 9943 - DNA, 1151 bp, Bacillus anthracis
atggtagagaaaatgaatgaagaagttatggattcaaaagaattacaagttggtgacgttgttacaggttctgtaacgaaagttgaagagaaacaagtgcttgtaaacgttggatacaaaacagatggcgtaattccagagtaatgagttagctaacgttcatatgaaaaaagcaggcgatgttgtagaattagatccaccccctagaattaaaggttattaaattagaagagaatgatcttgtattatctaaacgtgctgttgatgcagaaaaagcatgggtagaattacaagagaaatttaattctggtcatgtatttgatgttactgtaaaagatatcgtgaatggtggattagttgtgacccttggtgttcgtggttttatcccggcttcacttgtagaagtacattatgtagaagattttactgactataaaggcaaaacgttagccgtgaaaattgttgaattagaccgcgaaaaaaatcgtgtaatcctttcacataaagcggtagtagaattagaactagattctaagaagaaagaagcgatttcttcattaaaagaaggagacgttgttgaaggaacagtgcaacgactaactgacttcggcgctttcgttaacgttgggggtgtggacggtttagttcatatttcacaaatttcgcacgaacgtgtagagcaaccttctgaagtattagagcaaggtcaaaaggtaaaagtaaaggtattatctgttgatgctgacacacaacgtatttctttatcaattaaagcattctcgccgggaccttgggaaaatgttggttgcgaagtaaaagctggagatattcgtgaaggagtagtaaagcgtcttgttacattcggtgcattcgttgaaattttaccgggcgttgaaggtcttgtgcatgtatctcaaattgcaaatcgtcatgtgaagaatccaaatgaagtattggaaatgggacaagaagtaaaagtgaaagtgcttgaagtgcatgtagcagaaaaacgtatttctttaagtataaaagaagcgcttgaggaaaataatgtaactgaagattacagtcagtatgaaccaaatgctgattctgctactttccaattaagtgatattattggtgaacaactgaaaaaattaaagaaataa

SEQ ID NO: 9944 - DNA, 909 bp, Bacillus anthracis
atgaaacgatggcaaatggaatggctcctagtatcagtagcgttagtatggggagcaaattatacaattggaaagtatggcgtggcatatatgtcatccattcaatttaatagtttacgatttttagtagcatcaccggtattattacttattacatttttaatggaacgctcattacgtattgaaagaaaagattggctacgattagtagcagtcggtatcgttggtacgacaatgtatcaaacgatgtttatgctatctgtgaaatatacttcagcaacgaacgcctcattattaattgcgatgtcacctatatttacagggatattagcagtattgcacaaacaagaacgcttttcgatgaaagtacaaataggttcaatagtagcctttattggtgccgcattcgttttattaacaggtcatacaggaggagctacttacgagtatgcatggctcggaaatataattggattagtcgcagcaattgcgtggggatggtatccaatattagcacaacctcttattacaaaatactccgcaatgagagttacatcatggtctactttaattggaattgtaccgcttgtgatatactgtctattcaacgtaaattctttaacgtggccagtagatacgctaagctgggggtctctagcatattccatcatctttgcgactatcttcggacttgcaatgtggtatgtcggtattagtcaaataggctcaacgaaagtaatggtttatatgtatctcgtaccattattcgcagttatctttgcggcagtaacgattggggagcaaatcaatatgatgcaactcgttggcggacttattatctttgtgggtctatatgttgtaaaaaagggcggaatcaaaaagccagctctcaatttgaaaaaagtaagt

SEQ ID NO: 9945 - DNA, 640 bp, Bacillus anthracis
atgaagggataatttgaaactatttgaaggtccagaaggttcgggtaaaacaacattaattcaaagtttattgccatactttgaacaaaaggaacaaaaggtaatggcgacgagagaaccgggtggtattgcaatttctgaggatattagaacgattttacataaacaagaatatacgatgatggaagcacgtacagaggcactattatatgctgctgcacgtagacagcatttagtagaaaaagttatgccggcgcttaatgaggattaccttgtattatgtgatcgttttatagatagctctttaggctttccaggatatgcaaagggggttttggtatggaataaagttattgaaaataaaccgtttcgccaccagaggaattttagccttaagtttaccaatttaccttagatattgaacccagaggttgtcttagccgggattgccaaaagatgcaggacgtgaagtgaatcggttaaattaggaaagatttttctttcataaaccggtgcgcggaggggtatttaccaagttgtagaacgcttttcggatcgcattgtattagtaaatgctgatcaaccaatggaaaaacttatagaggaggttattcaggttatagaggataaatggttatat

SEQ ID NO: 9946 - DNA, 120 bp, Bacillus anthracis
atggggggatcacttggactaagttcagaagtaatgaagcgttcaaatgaatctctttctttttcaaagatgacattaccacaccaattaatgcgattagtattgcttgagacaagtgta

SEQ ID NO: 9947 - DNA, 870 bp, Bacillus anthracis
ttgaaacggtttaagttttatatgattagcggtattgtgctcgttttacttatcgtatgtaacttcgttgataagccaatcgctaaggttggagaagtgaaagatactgttatgatgaagctgaatacgaaagagagtatggcacaaatcgacgggcagacgatttattttaagaaaattggtgaggggaagcctcctttacttatgctgcacgggtttggtggttcttctgatggatttagtgatatttatccggaacttgcgcgagatcacacgattattgcagtggatattttagggtttgggcgttcttcaaagccaattgattttgagtattcgtttcctgcgcaagtgaatttatattataagttaatgaagaagcttggatacgatcagtttgcggtgctcggtcattcgatgggcggagagatgtccctcaatttagcgtatttatatccggacgcagtgacgcatctcattttagcagactctacaggaattgaatctttccagcaaaaagaaagttatgaagtgccgccactatcgacagacttacaaacggtaacagagattacggattacaataaaaatgaagtgaaaaatagtcgcgatgataaagggcattatgatcagctgacgaaaatgagagagcgccgcattgcgatggaagccgataaaattaaggtgccgactttaatcatatggggacgacacgataagagcgtttcttggaaaaatggtgaactgtatcatgggctatttgcgaatagcacgttccatattattgaaaaaggataccatgcaccgtttcgccaggaaccaatcgagtttatggaatatgtacaagcgttcttcgcgaagaatccacaa

SEQ ID NO: 9948 - DNA, 870 bp, Bacillus anthracis
atgcgttttgatgaagcttattcaggtaaagtatttattaaaagtcatccaagttttgaagagtcagaggtagttatttacgggatgcctatggattggacagtaagttaccgtccaggatctcgctttggccctgcacgtattcgtgaagtatcaatcggtcttgaagaatatagtccgtatttagatcgtgaactagaagaggtaaaatattttgatgcgggtgatatcccattaccatttggaaatgcacaacgcagcttagacatgattgaagaatatgtatcaaaacttttagatgccggtaagtttccactaggtctcggcggtgagcacctagtgtcttggccaatttttaaggcaatggcaaaaaaatatccggatttagcaatcatccatatggatgctcatactgatttacgtgaatcgtatgaaggggagcctttatcccactctacacctattcgtaaagtgtgtgatttaattggtccggaaaacgtatattctttcggaattcgttctggaatgaaggaagaatttgaatgggcgaaagaagtaggtatgaacttatacaaatttgacgtattagaaccgttaaaagaagtattaccgaaacttgagggacgcccagtctatgtcacaatcgacattgatgtattagacccagctcacgctccaggaacaggaacgttagaagctggtggtatcacatctaaagaattattagattccatcgtagcaattgcaaattcaaatataaatgtagttggagcagacttagtagaagtagctcctgtctacgaccatagtgatcaaacaccagtcgcagcaagcaaattcgtgcgggaaatgctgctcggttgggtaaag

SEQ ID NO: 9949 - DNA, 651 bp, Bacillus anthracis
atgaatcagtttcgaagaatggtgattatcaacattatcacattaattgtactagttggcggcggtattggcggttattactattacaatcaagcggaaaattacttaaaaacagacaatgcaaaaattgatggaaaggtaattccgattgcatcaccagtagcaggtaaattaactgactggaaagctgaagtaggtaagaactacaatgagaatgataaattaggtgctgtcactgtagcagcagcgaatggagaacaaacagtagatgtaacaattccacaaaatgcaacagttgtacaatcaaacgcaacaacaaatgctttcgttggagcaggtagcccgattgcttatgcatttgatatgaacaatttatgggtaacagcaaatattgaagaaacagatgttgatgatgttcaaaaaggtcaagatgtagatgtgtatgtagatgcatacccagatacaacgttaacaggaaaagtagagcaagtaggcttaacaacagcgaacacattctctatgttgccatcaagcaacgcaacagcgaactatacgaaagtaacacaagtagtaccagttaaaatttctttagatcatagcaaatcagtaaatattgttcctggcatgaatgtgacagttcgtattcataag

SEQ ID NO: 9950 - DNA, 648 bp, Bacillus anthracis
atgaacttaattttaatggggcttcctggtgctggtaaaggtacacaagccgaacagattgttgccaagtataacatccctcacatctcaacaggagatatgttccgtgcagctatgaaggctgaaactgaaatgggtttacaagcaaaatcttttattgataaaggtgcacttgttccagatgaagttacaatcggaattgttcgtgaacgtttaagccaagaagactgtgtaagaggcttcttattagatggtttcccacgaactgttgcacaagcatcagctcttgaagagattatgaaagatcttggcaaaaaaatcgactatgttttaaacattaatgtggattcagggttgttattaaaacgccttacaggccgtcgcatttgtaaagagtgcggtgcgacttaccacttagaattcaatgcgccagcaaaagctgacgtgtgcgataaatgtggtggcgaattatatcaacgctctgatgacaatgaagaaactgtagcaaatcgcttagatgtaaatattaagcaaactaaacctttgcttgatttctacgaggagcttggttacctacaaagcattaatggtgagcaagatatcaataaagtatttgctgatatcgatgttctcatcggaggcttagcg

SEQ ID NO: 9951 - DNA, 942 bp, Bacillus anthracis
atgaaaaagaaaattgcagagtatgaagttggtgaacaagtcgatgttttcttgttaattaaaacagcgacaaaaggtatcgcaagcaatggaaagccatttttaacagtaatcttacaagatccaagtggagatattgaagcgaaattgtgggacgtatcaccagaagttgagaaacaatatgtagcggaaacaatcgtgaaagtggctggagatattttaaactacaaaggccgtattcaattacgtgtgaaacaaattcgtgttgcaaatgaaaatgaagtaacagatatctcagacttcgtagaaaaagcaccagtgaaaaaagaagatatggttgagaaaattacgcaatacatatttgaaatgagaaacccgaacattcaacgtctaacaagacatttattaaataagcatcaaaacgaatttttagactatccagcagcgacgaagaaccatcacgagttcgtatctggactagcttatcacgtcgtatcgatgcttgatttagcgaaagctatctcaaatctatatccatcattagataaagacttactatatgcaggcgttattttacatgaccttggtaaagtaattgaattatctggcccaatttctacaacgtatacgttagaagggaatttactaggtcacatttcaattatggtgaacgaaattggtaaagcagcagacgagctgcaaatcgatgcagaagaagtattaattcttcaacacatcgtcctttctcaccacggaaaagcagaatggggtagcccaaaaccaccattagtaaaagaagcagaaattctgcactacatcgataacttagatgcaaaaatgaacatgatggaccgcgcattaggacgcacaaaaccaggcgaatacacagagcgtgtctttgctcttgataatcgttcgttctataagccgtcgttccataat

SEQ ID NO: 9952 - DNA, 2469 bp, Bacillus anthracis
atgtcagacaatcaacaacaagcacgaattcgagaaattaatattagccatgaaatgcgtacctcatttttagattacgcaatgagtgttatcgtatctcgtgcattaccagatgttcgtgatggattaaaacctgtgcatcgtagggttttatatgcgatgaatgatttaggaattacggctgataaagcgtataaaaaatcagcacgtattgttggtgaagtaatcggtaagtatcaccctcatggtgattcagctgtttatgaaacgatggtacgtatggcgcaagatttcagtcaacgttatatgcttgttgatgggcatggtaactttggatctgtcgatggagattcagcggcagcaatgcgttatacagaagcaagaatgtctaaaatctctatggaattaatacgtgatatttcaaaaaatacaattgattatcaagataactatgatggttctgaaagagagccgattgtgttaccagcgcgttttcctaacttactagtaaatggtacgacaggtattgcagttggtatggcaacaaatattccgccgcatcaacttggtgaagtaattgatggcgtattggcattaagtcataatcccgatattactattgcagaattaatggagtgcattccaggaccagattttccgacggcaggtttaattttaggaagaagtggtattcgtagagcttatgaaacaggacgcgggtctattatacttcgtgctaaagttgaaattgaagagaagtcaaatggcaaacaatctattatcgtaacggaattaccttatcaagtgaataaggcgcgattgattgaaaaaattgcagaattagttcgcgataagaaaattgaaggtattacagatttacgtgatgaatcagatcgaaatggtatgcgtattgttatggaagtacgtcgtgatgccaatgctaatgtattattaaataacttatataaacatacagcacttcaaacaagttttggtattaacatgctgtctcttgtaaatggagaaccacaagtactgaatttaaaacaaaatttatatcattacttggaacatcaaaaggtagtaattcgtagacgtactgcttatgaacttgaaaaggcagaagcacgtgctcatatcttagaaggattacgaattgctttagaccatctggatgaagttattacattaattcgtagttcgaaaacagcggaaattgcaaagcaaggtttaatggaacgttttggcttaagtgaaaaacaagcgcaagctattttagatatgcgtctgcaacgcttaacaggattagaacgcgaaaaaattgaacaagaatatcaagatttaatgaagttaatcgctgaattaaaagcaatcttagcagatgaagaaaaggttcttgagattattcgtgaagaattaacagaagtaaaagagcgcttcaatgataagagacgtacagaaattacaattggtggtatggagtctattgaagatgaagacttgattccagaacaaaacatcgccattacgttaactcataatggttatattaagaggttgccagcttctacgtacaaaacacagaaccgtggtggacgtggtgtgcagggaatgggaacaaatgatgatgatttcgtagagcatttattaaccacttctacgcatgaccatattctattcttcactaataaagggaaagtataccgtacgaaaggatatgaaatcccagagtatagtcgtacagcgaaaggtatacctattattaacttattaggtgtagataagggtgaatggattaacgccattattccaattcgtgaatttggtgacgatgaattcttattcttcacaacaaaacaaggtatctctaagagaacaccactttcatcatttgcgaatatacgtacaaatggtttaattgcaatctctcttcgtgaagaggatgaagtaatatctgtacgtttaacatctggtgataaggatattattgtaggtacaagcaatggtatgctaattcgttttaacgagcaagatgtacgttctatgggacgtaatgcggctggtgtaaaagcaattacattaggtgaagaagatcaagttgtaggtatggaaattgtcgaagaggatgtaaatgttttaattgtaacgaaaaatggttatggaaaacgtactccgattgatgaatatcgcttgcaaagccgtggtggtaaaggtctgaagacttgtaatattacagataaaaacggtaaattagtagctgttaaatctgtaacaggtgaagaagatatcatgttaattacagcagcaggtgttattattcgtatgccagttgatcaaatctctcaaatgggacgtaatacacaaggtgttcgtctaattcgattagaggatgagcaagaggtagcgacagtagcaaaagcacaaaaagatgatgaggaagaaacgagcgaagaggtttcttcagaagaa

SEQ ID NO: 9953 - DNA, 1966 bp, Bacillus anthracis
ttcttgcaaacataaaaatggaaagtttcaaaacgaaaagatcgtatcgcattagtcgggacgaaaatgggagccgggaaaatctacattattaaaaataatagcgggtgagctatctcatgatggtggcgaaattatatacccgaaaagatgtctcaatggggatattaagctcaaaataccgggtttagaaacatctttaacaattttgggatgaaatgctaaccgtctttacacactgctagcaaatggagacaaaacttcgaaggctagagcaagagatgggaaaagaagaaaacttttcaaaccgaggttacataggaaagattattagctgattatgaccaattacaattagattataaagattcagggtggctatcagtacgaagtcagatatccgtgtcgattttaagtggtcttgggcttcccagttgaaacgcaccagacgacgatttcgacattaagcggtggacaaaaaaacacgattagctctcggtaaattattattaacgaacccagtcttattttttttggacgagcctacaaaccatttagacatggaaccattaccatggcttgaacaatatttacaaggttatccgggggcaatattaatcgtttcccatgcccgttatttcttagataaccttgttacacaagtatatgaaatttcgaataaaggaaggtagccgattggttggtaccttcaggtaaatatttagccttaaaatcagcccttatgggaccaggaaatgaaacgttattgaaaaacaacaagatgaaatcgctaagctggaggacttcgttcaaaagaatatagctcgtgcatctaggaacaaagcgtgcacaaagtcgccggaaaccatttagaccgatgggaattattaacaagaccacttaggggagtctaagtcagccttcctccacttttgatatcgaaaaacaaaatgggcaatgattgttttacaagtaaaggatgcaacctttcggctttggataaaggtctcattatttgaacatgtaaccaaggccgcttaactccgcggaaaaaaacgtttgcctttattttgggcccaaatgggaatttgggaaatccccctttgtaaaaatccattgctgaataagttaccactattacatggtgatgtttctttcgggatccatgtattccggtgggtattatgatcaggaaacagctaatttaacatctttcaagcgagtttttaatgaattatggggtcaatatacagtgcaacctgaaaaaagaaattcgcacgatattaggtaacttcttattcacaggagatgatgtattaaagccagtatcctctcttagtggtggacaaaaagctcggttagctcttgcaaaacttatgatgcaaaaatcaaatttaattaattctcgacgaggctacaaaccatcttgatttaaatagtaaagaaatctttggaaaaggctttaattgattatcctggtgacccttctatttgtttcacatgaccgctactttattaatcgtgtaacgacaactgttattgagttatcaacagaaaggggcacagggatacttcagcgattacgatttctacgtgaaaaagaaaaatgagatgatcgaacgtgcggaattataacaagaagatgaaactcccggttcaaaagacagttgcacaagaaaaattaaattacctgggaagaaaaagaggcaaaaaaattggaagcgtcaacgtcctggaaaaattgaggaacctagaacaaaacattgtaccattttgaagaagaaattgctacgttagaagatcaactttgcttaccagaaatatatgcagattatgaaaagggttagtgaaattacatcgaagtatcaaacccctccaagagcaactggatgcttgtatggcagaatgggaagagctgcatgtataaatatattttaataaaggaagatgtctcataagtcaggga

SEQ ID NO: 9954 - DNA, 1224 bp, Bacillus anthracis
atgtttcatcgtattgaagaagctctagaagatttaaaacaaggaaaagtcgttatcgtatgtgatgatgaaaaccgtgaaaacgaaggcgattttatcgctttagcagagtatattacgcccgaaacaattaactttatgattacacatggacgcggtctcgtttgtgtaccgattacggaaggatacgcagaacgtctacaattagaaccaatggtatctcataatacagattcgcatcatactgcatttacagtgagcattgaccatgtttctacaacaacaggcattagcgctcacgaacgtgcaactacaatacaacaattgttaaatcctgcatcaaaaggtgaaagatttcaatcgacctggacatatctttccattaatcgcgaaagaaggcggtgtcctgcgtcgtgctggtcatacagaaagttgctttcgatttagcccagttttgcggagcagaaccagctgaggtcatttgggagattatcaatggggacggtacgatggcacgcgtccctgatttactacagtgtgcaaaacaatttgatataaaaatgattacaatagaagatttaattgcttatcgccgccatcatgaaacacttgtgacgagagaagtggaaattacattacctacagatttcggtacttttcaagcaattggctattctaactcattagatacgaaagaacatattgcactcgtaaaaggtgatatttcaacaggtgagcctgtacttgtacgcgttcattcagagtgcttaacaggagatgtatttgggctcgtgccgctgtgattgcggaccacaaactccctgctgcacttgctcaaattgaaactgaaaagaaaaagcggttctttttttttgtaaacaaaaaggacgaggccattggcctccttaataactttcccgcttataagttacaagaagaaggtttcgatactgtagaagcaaaacgaaaaacttgggtttcccgctgactttcgtgattacggtatcggcgctcaaatattaaaagattttagggttaccacatttacgattattaacgaataatccaagaaaaatcgctggcttacaaggttacgatttaaccgttacggagcgcgtaccgttgcaaatgccagcaaaagaagagaataaaacgtatttacaaacgaaagtaaacaaattaggacatttattaaacttataattaaaggagagatttattatg

SEQ ID NO: 9955 - DNA, 576 bp, Bacillus anthracis
atgacacaagaaattgaaattgaatttaaaaatattgttacagaagaagaattccatgcattatgtaaatcattttctattgaggtatttacgaaacaagtgaatcactattttgaaacaccgaacttctcattaaaggaagctggctctgcacttcgtattcgtcataaaggagaaacttatacattaacattgaaacaacctgcagaagtcggcttgttggaaacacatcaagttgtaacagaaaacgaagcaaaaatgatgatggagacaaacgtaattatttcaggggctgtaatgaatcaactatgcaaactacaaattcctgtttctgctctaacttatatgggtagtttaacaactgaaagagctgaaacgttatttgaaggcggaacgcttgtctttgatcatagtttctattacaatcacgatgattatgaaattgaatttgaagtgcaagatgaagaaacaggaaaagctgcctttattcatttattaaagcagcataacatacctatccgtcatacaaataacaaagtaaaacgctttttccttgccaaacaaaacaaagcacgc

SEQ ID NO: 9956 - DNA, 1022 bp, Bacillus anthracis
gtgcttgagcaaggtttattagtaacggctggggtagcattcttaatttctgttgccctttcgcccattgtttattccatttttaagaaaattaaagttcggaacagagtattcgtgatgagggacccaagttcacatcaaaaaaaatctagggacccccgaccaatgggtggtatgttcatatatgtatctatgatggtaacttcacttattatggcgattaaagtttaatcatttaggtgcagaagtttcgttattactattagtaacatttggttacggattgattgggtttttagatgactacataaaggtagttaagaagagaaatcttggtttgacatcaaaacaaaaattagtaggtcagcttgttattgcaattgcgttcttttttattgaaaaagggcaagcgttccacacatacattatgattccaggaacggatgttaagtttgaattaggttgggcgtattttgtacttgtactatttatgctttatgggtggatcaaatgcagttaacttaactgacggtttagatgggttattatcagggaacagctgctattgcatttggagcttttagtattattgctgttgcacaagagcaatttgggggaggggatattctgtatggcggttgtaggagctgtactttggatttttagtattcaaggggaatccagccggaagtgtttatgggagatacaggttctttagctttttagggtgggaaagccctattgccacagccggtagcccaaattttattaaaacaagaaattgctaccttgtaatcataggcggagtattcgtaatggaaactttatcggttattattcaggtcatttcatttaaaacaacaggaaaacgtgtctttaaaatgagcccattacaccatcattatgaattatgtggttggtcagagtggcgtgttgttgtaacgttttggtctgtaggatttttattagctgtgttaggaatttatatcgggggtgtggatgtaattgaaaactgtaactga

SEQ ID NO: 9957 - DNA, 1005 bp, Bacillus anthracis
aagaatccacttcttcgcattgaaaacttacagacttcctttcgtatacaagatcaatatcatgccgcagttgatgatgtttcgttaactgtccatgaaaatgaaattgtcgcgtatagtcggtgaatcaggttgcggaaaagtgcacttgccctttccattatgcgactgcataatgaagcaaatacaaaatcacaagggcaggataactatagagataaggatttactaacgatgtcagccgcagagatgaataaagtacgcggatcaaacatcggcatgattttccaagaacctcttacagcactcgatcctcttatgacagttggaaaacaaatcgaaggaaattttggattcccacacagccttttcaaaggtggaaaggaaggacggcccttaagaattattttatcaagtgggtattccaaaaccagaacttacattataaccaatccccaccggatttatctggcgaaatgagacaaagaattgttatcgcaattgcaattgcttgttccccagcacttattattgcagatgagccaacaacggctcttgatgtaactatccaagccacaatttttagacttactaaaatctattcaagaacaaacgaaaatgggcatcattttaaatcgctcaggattaaggggttgtggcagaaacagccgtttgtatcgtcgttatgtacgctggacaagttgtagaaacagggaaagtttgaagagatttttaacaaccctcttcacccatatactcgttctctattaaactccattccatctgcttacgctgaaaaagaaaaattgcatgttattcaaggtgttggtaccgacgttagctaagttacctcgcacaggttgtcgcttccaagcacgaattccatggattagacctgatcaacacgaggaaaatccaattttacatgaagtaaaaccaaaccattgggtacgttgtacttgctacaaacatttcaacttccaagataagaaaggagatgacgta

SEQ ID NO: 9958 - DNA, 1414 bp, Bacillus anthracis
aaggtgattacgaagttgaaagatacatttgttgaaaaggtagatgactttgtaaggcaacatgatgtattaaagggacgtttcacaattggtgtaaggggtttcctggtggccctgactctttggcccttccataataatttattagagaggaagagcagcaaaacagtttgaaaatggtaatggggccaggtgggatctatatgtttagaggtgatgaatctcatgaggacctacagtttgtgcaggacctttgtaaaggactgggagttatttgcgaaacgataaggattaatgtgtcgcaatatcaaaagcaatacgggatgaatgcacaggttgctgctagagaatgcagatatgcattttttggaaagaataatgaagaaatatgatgcgagatatgtagccccttggacatcatggtgatgatcaagtagagacgattttaatgcgtcttgtacgagggagtactccgaaaagatatgcaggaattgcagtgaaacgtcccttttctaatggggatttaattaggcccctacttggagtaacgaaggaaaaaattgttatttactggaatgagctaaaaataattccccccatagatccccagtaacaaaaaggaagtatatacaaggaatcgattacgtaaatatgttcttcctcatttgaaagaagaaaacccacaagtgcatgagaaattccaaaaatttagcatgcagatgcaagaggatgaggcgtatttgcaggaattagcttttgagaaaatgaataaagtaattacaaaaaaaagtgataaacaaattagcttatcaattccttccctttgaaatccagtttaaagcctttacaaaggaagggggatttcaacttattataaacttttctttaggaattaaagattcccttcttttcttttctttaatcattatggccaggttgattgagttttttaaaggggaccccacctttcgggtccccttgattttcccaggtgatttgaaaatttgttcccccgtacaaaggaggtacttttggattttaacaaggaattggtttcccttttctaacaagattaatcagtgccggggacaattccgttatggaccgggaataaattggtaacagaggtgagcgaagatataccaagtgacatgaatgaaacagtatgtggtggctaagtataatgatatatcatatccaattcgtattcggtctagagaaaatggagatcgcatgtcaatacaaggtatgaatggcacgaaaaagataaaagctatttttatcgaagcaaaagtcccaagggaaaaaaggggagatggccccggtcgtttgtgatgcaagcgggaatattatttggttacccttgttgaagcgatctgcatttgctatctcgaaagagacagcaaagaaggat

SEQ ID NO: 9959 - DNA, 1299 bp, Bacillus anthracis
atgtttcgtacaatctccaactttatgcgcgttgctgagataagacgtaaaatattattcactttagcgatgttaatcgtattcaggattggcacgtttatccccgtgccatttacaaatggagacgtactgaaggcacaagatcaattaaatgctttaggtattctaaatacatttggcggtggagccttgaaaaatttctccatctttgcgatgggaatcatgccgtatattacagcatccatcatcgtgcaattattgcagatggatgttgttcctaaattttcggaatgggcgaagcaaggtgaaatgggccgtcgtaaattaacgcaattcacgcgttattttacaattgttcttgcgtttattcaggggtttggtatgtcaatcggttttaacggtatggtaggtggacaattaattttgaatcctggttggagcacttatttatacattgctacggtactgactgctggtactgcatttttaatgtggttaggtgaacagattacagctaaaggtgtaggtaatggtatttccattcttatctttggtggtattgccgcagcgatcccaagtgttatatctcaagtgtatcagcaacagtttcaaaatatcggagatcaattgttcatgagtatcgttaaagttgcattgatcttactagctgtgctagcagttattgtgggtgttattttcattcaacaggctgttagaaagatcccaattcaatatgcgaagcgtgtaacaggaggaaatggtggttatgctggagcacaaaacacacatttaccgcttaaggtaaatagtgctggtgttattccagtaatttttgctgtttcattcttaattacgcctccgactattgcacagttcttcccgaaacatgatgtatcgcagtggattattgcaaactttaactattctcacccagtgggaatgatcatatatgttgcgctcattgtagccttcacatatttctatgcatttgttcaggttaatccagagcaaatgtcagagaatctaaacaaacaaggtggatatgttccaggtattcgtccgggtaagaatacggaacaatatctaacaaaaatcttgtatcgtttgacctttgtaggatcaattttcctagcagcgattgcaatcttaccagttatctttacgaagctgggaaatcttcctccatctgcacagatcggtggaacgagtatgttaatcgttgtcggcgttgctttagaaacaatgaagcagctagaaagccaactggtaaaacgccattacaaagggtttatcaagcag

SEQ ID NO: 9960 - DNA, 598 bp, Bacillus anthracis
gaaacgttccccaatttagaactttaaaccacctcttattttataatgggggatactgggtattcgcttttagattagggtgtgaactatgattgccataaccttttttgaaaactgccttatattttagaaagtcgtttataatagagccattactttatttcagtctttacatgcaacagaagatgatatttatatcgtagtggatgtaaatgactatgcagacggtgaaagttttaaacacaaattgaatatattttctaagtatgtaaaagcgaagtcggatttgtttaagttacagaaaaatacaattccttatgtttttccagaagacgatgaagacggggtatataaaatgcatagatatattttgaaatgtaaagtttctgacttgaaatacattcctatgttaaaagcaatttgtaatcaagatatgggaataaaaccgcgtattgttcatagagtgtatttcataaatagtaacaagaatactatatttcacgtttatgatgatagaggttgtgatgtattagctacctctcctaatacaattagggatatttatcatacatataatgattggatattagaatacgat

SEQ ID NO: 9961 - DNA, 393 bp, Bacillus anthracis
atgtatcatctagtatattggatgcccctgacaatacatttatctccttttgttactaccctcattagtgacatactcagttttatattatggattcttgttgggatattaattgcagtattaatgagaccgaagcgagaggcgatgatttggactattattgaaccgatacaaaaaattgcaaaaggggacttttcggtaaaaatacgaaatgaagagaaatatgatggggaaattggtgtgctcgtaaaaagtataaacgatatgacagatgaactgaatgcgatggagaagatgcgtcaggaatttgtttcgaatgtttctcatgaaatacagtcaccattaacttctataaaagggtttgctagagcactacaagatactaattcttcc

SEQ ID NO: 9962 - DNA, 1179 bp, Bacillus anthracis
ttgtatatagatttaaatcgttttaagaccattaatgatacaatgggacattcaattggtgatagtgttttaaaagaagttgctaaacgttttaggacatgtctgtcaccgtctattcctctggctagaatagggggagatgagtttgcagtcttagtccataaccacacagaacaacagctattggatttatgtgaaaatctgtttcgtataactgaaaaaccatttgtagtcaatcagcatagtttttacttatctcttagtataggaatagcagtgtatccgtttggaggaataaacactactacacttttacaacatgctgatatcgccatgtatagcgcaaaggaaaaaggtaacaatgctgtttgtatgtacgacgagacattatctcaaaaaataacaagacgattacaattagaacaggatttaccgaatgcaattgaaaataatgagttgtttttattatatcaaccacaagttgatagtaaggcaggtaaggttattggtgcagaggctttaatacgttggcaacatccagagcttgggctaatttcaccttttgagtttatacctatcgcggaagaaacatcgcagattatttcaattgggaaatggacgttacaggaagcgtgtcagcaactgaaagaatggcattctgcaggctattcaaatttaaagatggggataaatttatcagctatagagtttgaacagaagggctttgttcaaacagtcatatctattatagaagaagtaggggtaccagctaactcgattgatttggaattaacagagcgtattgccatggtagatgaaaaagaaactttatcgaagttaaaagcattaaaatcatatggtgtacatttatcaattgatgattttggtacaggctattcttcattagcgtatttacctttgtatccaattgatactttgaaaattccaagagaatttgtgaataggattggaacttcaaatgatggagatgaaattatacaaactattatttcgttagcccatactttaaatatgaaagtaatagcagaaggggtagaaacgaaggagcaattaacagtgttacaacaaaatgcatgttatctaattcaagggtattactacagtaagcctgtaaatgaagatgaatttattaattttttaaatacgacacaaaacaaa

SEQ ID NO: 9963 - DNA, 1069 bp, Bacillus anthracis
ttattcccttggattgaaaggggaaggggccctgaattctgaaattgggtttaaataagccgaattcctttggcgtcgaattttaaaaaaaaatcaattctctactatgcaaaatgaagaagaaactaaacagattcaagaattatttaaaaaggaatttataaataaaacggtagaaccttttggagagtttgaactattaaaaatgaatgaattaacgcctcttcaaaggagagtatttttccgaaaagcatttaattagtcccaaccttgcaggaacggaatatggagcatgtctcttgtcagaaagcgaacatattagtgttatgctgaatgaagaagatcatattcggattcagggcctaattttcaggaatggagttattcaaaggccctttaaagggccaatccaaataaaaaattggattgagaaagaggttgaatatgcttttgatgaatcacttggatatattacgagttgtcctactaacgttggtacaggacttagggcttccgtaatgattcatttaccaggactcgttttaacaaaaagaattagccgtattatacaggtaattcaaaaattagggttagtagtaggaggaaatatacggtgaaggtagcgaagcgttaggtaatatatttcaagtgtcaaaccaaatgacgctaggaaaatctgaagaagatattattgcagatttaaagagtgttattcaacaaatcatacagcaagaaaaaaatggctagaggattaatttgtacaaaatttcaagtaattgaacttgaaagataaaagttatcggctcttaatgggatactagcccaacagtcggtttaatttctatctgccggaagcagccaattgcttatcagatttacgacttagcattgatttaggatatatccaaggagatgaagagaaattattttgactgagctaatggttcttacacaaccaggcattttacaacaatatgcaggaggacctttaggcccagaagaaagagattatcgaagagcaaccttaatccgtgagcgattacgaatgcgaaaaaaactaagcgcaagt

SEQ ID NO: 9964 - DNA, 180 bp, Bacillus anthracis
atggggaccaaaggaaacaccttattagtttacttgtgggggtaccaaagctatgaaacatatgtagagcatatgaaaaagcatcatccagaagaagaagttgtatgtcaaaaacaattttttgcagaagcgcaagaagctagatttaatgcaaagggtggaaaaatatcacgctgttgt

SEQ ID NO: 9965 - DNA, 717 bp, Bacillus anthracis
gtggaacacggtaaattagttgaatttctaggtttaacgttcgatttgtcgtcagttatgatggttactgtagcagcagttattgttttcttaatcgctgttatcggaactcgcagcttagctcttcgcccaacaggaatgcaaaacttcatggaatgggtgtttgacttcgtgaaagggattatcaatagtacgatggactggaaaacaggtggacgtttcttaacgcttggcgttacgcttatcatgtttatcatcgtatcgaacttccttggtttaccattcatgtattcaacagttgaggctggcgaacatattgcatggtggagatcaccaacgtctgatccagcagttacattaacattagccgtgatggtagttaccctcacccattattatggaattaagatgaagggtacgaaagaatacgtaaaaggttatttccaacctatgaaattcttattcccattaaaggttattgaggagtttgctaacacattaacgttaggtcttcgtttattcggtaacatttatgcaggtgagatcttattaggattacttgctaagttaggtggagcaacattccttggagcattaggtgcacttgtaccgatgttagcatggatgggattcagtgtattcgttggatcaatccaagcatttattttcgttatgttaacgatggtttatatggctcataaagtaagccatgaccat

SEQ ID NO: 9966 - DNA, 366 bp, Bacillus anthracis; identical to SEQ ID NO: 9131

SEQ ID NO: 9967 - DNA, 406 bp, Bacillus anthracis
aaggagaaggtaaaaaacgtcccagatggttatgcaaataacttcttgctaaaacaagggattagctgctgaagcaacaaatagcagtatgaaaactttagaagctcaaaaacgcaaagaagaaaaagatgcagcagcagagcttgaaagtgcaaaacaattaaaagaaacgttagagaaactaactgtagaattaaaggctaaatctggagaaggtggccgtctatttggttcaatcacaagtaaacaaatcgtagatgcaatgcaaaaatctcacaagattaaacttgataagcgtaaatttgaaatggatgatgcaattcgtgcactaggctatacaaatgttactgtgaaattgcatccgcaagtaacagcaacagtaaaagttcatgttagtgaacaataa

SEQ ID NO: 9968 - DNA, 288 bp, Bacillus anthracis
atgttagaaacctttcaaaaagaaatagaactatatgaaagcaatgcagaattattgaaagtacttgctcatcctgttcgcttatgtattgtaaaaggattaattgaacgtggtccaagcaacgtttctacaatgtacactggcttaaacatgccacaatctacaatttcacagcatttagcaaaattaaaaagtgctaaaatcgtttcaagcgaaagaaaaggtttggaaatttattacaaagtagaaaacgagacaattattcaactcgttcgcgtattattgggt

SEQ ID NO: 9969 - DNA, 1674 bp, Bacillus anthracis
atggattataaaacgcagtttgcggaaagtttatctaatatttttacgaatgaattaacgcaacagcaaattttagatttaattgaaacaccgaaacaagatgaatttggagatgctgcatttccgtgtttttcacttgcgaagcaatataaaaaatcaccagctattatcgcaaaggaagttgcagagaaattaagtgatccgttttttacgaaagtagaggctgttggtccttatgtaaatgtattttttaatcgtgatacagtaagtgatgcagtattaaaaacgattttagcggagaaagaagagtacggtaaaaattattttggatgtgaaaaaacggtcgttatcgattattcctcacctaatatcgcgaaacctttttcaatggggcatttacgttctacaatgattggaaattcattgaagcatatcgctgaaaaatgtgggtatgaagttgtaggaattaattatattggagactggggaacacagtttggaaagttaattacggcttataaaaaatggggaaatgaagcagtagtgaaagaggatccaatacgtgaattatttaagttatatgttcaatttcatgaagaggtaaaagacgacgaagaattagaagaagaaggacgcgcttggtttaagaaattagaagaaggtgatgaagaagctgttgaactttggaattggttccgccacgaatccttaaaagaattttctcgtatttatgaacttctcggtgtggaatttactaattttcaaggagaagctttttataataatttaatggaagactttattgggattttagaggaacatgatttacttgaagagtcagaaggtgcattagtcgttaatttagaagaagagggcatgccaccttgcttaattagaaaatcagatggtgcgacgatttacgcaacgcgtgacttaacggcagctctatatcgtcaaaacacatttggttttgataaagcgttatacgtagttggcccagaacaaagtttacacttcaatcaattcttcactgtattaaaaaagctcggctacacttgggttgatggcatggaacatgtaccgtttgggttcattttaaaagacggtaagaaaatgtccacacgtaaaggaagagttattttacttgaagaagtacttgaggaagcaatcgaacttgcaaaacaaaatattgaagagaaaaatccaaacttgaaacagaaagaagaagtagcaaagcaagtcggcgctggcgcagtcatcttccacgatttaaaaaatgagcgtatgcacaatattgaattctcattagaaaatatgctgaaattcgaaggggaaacaggcccgtacgtacaatacacacatgcacgtgcttgctctattttaagaaaagaaagtgtagaatttgaaacgtgtacatttgcattaaaagatgatcatagctggagtgttgtaaaattactcaataaattcccacaagtaattgaaatagccttcaacaaaaatgaaccatcggttatttcgaaatacgtattagatgtagcgcaatcgtttaataaatattacgggaatgtgcgtatattagaagagagtgaagagaaagacagtagactggcattagtgtatgctgtgacggttgtattaaaagaggggttacgtttacttggggtggaggca

SEQ ID NO: 9970 - DNA, 1880 bp, Bacillus anthracis
atgtgtggaatcgtaggatttatttggagagcaaggatgcaagaggaaattttattaaaaggtttagaaaagctagaatatcgtggatatgattcagccaggtattgcagtacaagcagagaacggtgttgttgtatacaaagaaaaaggtctgtatcgcaaaacttcgcgaaatcgtagatgagaacgtagcagcaagcgtaggtatcggtacacacacgcttgggctacacacggtgttcccaagtaaagtaaccgcgcatccgcatcaaagtacatcaaaacagctctacacaagttcataacgggtgtatttgaaactatgaatttagtgaaaaagggatattttcaagaatgtaacgctctgaagaggaaacggataccgagggtattctacaccctattggaacaacaagtgagcacaggactaagtgtagaagaagcgttccgtaatacgctatctcttttacatggctcttatgcaatcggattacttgatgctgaaaatccaaacatgatttatgttgctaaaaacaaaagcccgctattagtaggtgttggtgacaactttaatgttgtggcgagcgacgctatggcgatgttacaagttacagatcaatttattgaattaatggataaagaaatcgtaattgtaatgggaagaagtattacaatttaaaaacttaccagggtgaaacgattgaaacgtgcacccgtttacagcgggaattagacgcaagtgatattgaaaaaggaacataccctcatttcatgctgaaagaaatcgatgagcaaccacttgtaatccgtaatataatccaaaagtatcaagatgaaaatggcgagattgaattagatcaagacatccgcaatgctattttagatagcgatcgtattacattcattgcatgtggaacaagtaatcatgcaggtctttgttggaaaacaatgtatcgagaaagttgcaaaaatgcccacttgaagtgcatggagcaagtgaattctcttataacatgccattagttacagaaagaccattcttcatttacatttcacaaaggtggtgaaacagactgatagctcgtgcagtacttgtacaaacaaatgaaagtgggtcataaagcattaacgattaaaaacgtaccctgggtctaacacttctcgtgaagctgattatacacttccgttatacgcggggaccagaaaacgcagttgcatcaacaaaagcttctttccagcacagcgtgcagtacttttcaattttagctgcggatattgctaaagcaaaaggtgaagttcttggttttgatttaacacatgaactaggacttgtagcaaatgcaatgatagaactttgtgatcaaaaagaagaaatggacgcattagcaaaaccaattttagcaacaacttggtaactttttctcaatcgaacgtagcgttgacttctacgtaggattagaaggcgcgttaaagctaaaagaaatttcttacatccaagcagaaggatttgctggaggagagttaaaacacggtacaatcgccttaatcgaaaagcggtacacacgttatcgcacttgcttcccaaggaaacctaaacctttggaattcgtggtaacgtgaaagaagtagtagcacgcggagctaacccatgtatcatctcaatgaaaggcttagaaatggagggtgacagcttcgtactaccagctgtacacgaagcactagcaccgctagtagccgttattccattacaacttatctcatactacgcagcacttcaccgcgagtgtgacgttgataagccacgtaacttagctaagtctgttacggttgagtaggagattagtaggttagtaaatatagtgtagttttgaaataaagtt

SEQ ID NO: 9971 - DNA, 717 bp, Bacillus anthracis
atgaacatagaacaatttcaatctatgctagaagagaagggtatcaccctctcttctagacagttagagcagttcgaaatctacttcgaaacattagtagaatggaatgaaaaaatgaatttaacggctattacggagaaagaggaagtatatttaaaacacttttttgattccattacagctgctttttattatgatttttcaaaaccattctcaatttgtgatgttggcgcaggagctggattcccaagtattcctttaaaaatttgtttcccgcatttaaaagtgacaattgtagactcattgcaaaaacgtattaatttcttaaatcatttagcacaaaagttggaattaagtgacgtcgcgttttgtcacgatcgtgctgaaacatttgggaaaaaagaaggtgtacgtgaagcgtacgacattgtaatggcacgtgcagtcgcgcgtctttcagtattaagtgagctatgtttaccgcttgtaaaagttgggggaacattcattgcaatgaaaggtgccgcagcaaacgaagaaattgaaaatggcaagtatgctttagaggtgctaggcggggatctaaaggaaatgtctacgttccaattaccgtttgaagaaagtgaacgtaatattttattaatcgagaaaaagcgcaagacaccaaagaaatatccacgcaaaccgggaacacccaataaattacctattgaaaaa

SEQ ID NO: 9972 - DNA, 1566 bp, Bacillus anthracis
atgagtgaaacgctactcgttattattagtatattactattattactgttgcttttaatcgtcttttttattattacattttttataaaaaaacggacgcatcattctattttaaaactacatccatacttaggaagaatgcgctacttactggaaaagatagggccggaattccgacaatattggtttgatcacgatacagatggaaaacctttttcacgttacgactttcaaagtgttatgtttttagcgaagtatcgctctgaaatacttggttttggatcgaaacgagattttgaagcatcgggttattatattgctaatacgttgtttccggtattaacagaagaattaagtgtgaatgtaacgccagaacgtgaagggaaaaagtatgtaattcataaagaaggattattttcacggagagaaaaattgacagcggatacaacgaatctttggttatacgaagaagacgatgcaattatcatcggtgaaaatcgtaaatatccatggaaactgtatggcatgtttggagcatcagcaacttcttacggttcgattggtgaaaattatattttagcgagtgggtttggagcgaaaatggctggcggttcgtggattaatactggcgaaggtggcgttattccagaacatttacatacaggggcaaatatcgttgcacaaattggcccagggttatttggatatcgtgatgaggacggtaatttttcgatggagaaatttatggggaaagcgaaagagagtaatattaaagcatttgaattgaaatttgggcaaggtgcgaaaatacgtggtggtcatttagaggggcaaaaagtaaacgagaaaattgcttttgttcggaatgtacgagagggagagacaattaattcaccgaatcgattttcatttttaaataatgcagcagagacactttattttattcaacagttgcaagaaaacggcggtaaaccagttgggatgaaaattgtgattggacaacaggagccgttggaaaatttattcaaaacgatgaaagagttaaacatctatccggatttcattacaattgatggttcagaaggtggatcaggagcaacgtataaatcgatggcagatagcatgggaatgccgcttattccagcattattgacgtttattgatacagcaaatcattatgatattcgggataaattcaaagtgtttgctgctgggaaattaattacaccagataaagtggcaattgctttagcaattggtgcagacgctgtaaattcagcgcgtggttttatgatggcaagcggctgtataatggcgcttcaatgtaattctggccaatgtccatctggtgtggccacgacgaatccacattatcaaaaagcgttagatccgtatgagaagaagtggcgagtcatgaattatattgttagtatgagatatagtttattttcgttagcagcggcggcgggagtgaagagcccgcgtcatttaaagagagatcatattgtatttaaagatgagatggggcgggtagtccctctctcagaattgtttcctactagtaaa

SEQ ID NO: 9973 - DNA, 521 bp, Bacillus anthracis
atgaacgatattttaatcgttgacggttacaacattattggagcttggggagacttgaaaaaactacgggatgtagatttgcaatcatcaagagatgcactgattgataagatggcggattaccaaggttacacaggtacaaaggtaatgatagtttttgatgcttatacagtccacggtattgaaaaaaagatgaaacaatcgcgtgtggaagttatattcacgaggaagaatcaaactgcagatgaaaagatagagcaacttggcaattgagcttagaaatataaatacgcaaatatatgttgcgacttctgattatacggaacaatgggttatatttgctcaaggtgcgctccggaaatctgcacgggaattagagctggaagtacaagcgatggagcaacaagtaagaaaggcgtccccacagccccaaaaggaaaagccacctggctatgcgaaagatatttagtaaagatattacagaaaagttagaaaaattaggaagaggagagcgttgaaac

SEQ ID NO: 9974 - DNA, 819 bp, Bacillus anthracis
atgcaaaaagcattggagacgaaacgtttgacgttgtcttatggtgaaacaattattattgatgagttgaatttagaaattccaaaaggtgaaattacaatcttcattggttctaacggttgtgggaaatcaactttattgcgttcattagctagattattaaagccaacaactggtgacattttgttagataatcaagccattcaaagtatgcaaacgaagcaaattgctcgtcaaatggcaattttaccgcaaggaccgcaagcgccagaagggcttacagtattacaacttgtaaagcaaggacgttatccgtatcaaacatggctgaagcaatggtcagaaaaagatgaggaaatggtacagaatgcacttgcagcaacaggtatgacagaatttgctgagcgtgatgtgcatgctctttcaggtggacaacgccaacgggcttggattgcaatgacgcttgcacaagatacagatattattttattggatgagcctactacctatttagatatgactcaccaaattgaagtgctagatttattattcgaattaaatgaaacagaacaaagaacaattgttatggtactacacgatttaaatttagcatgccgttatgcagataatattgtagccattcaagataaacaaatatatgcacaaggtaagccagaagaagtagtagatgagaaactagtacgtgatgtattccgaatggaatgtcaaattagtacggatccgttatttgggacaccactttgtatcccacatggaaaaggaagacgtgtacgtaaagaagttgctcatgcaatgaga

SEQ ID NO: 9975 - DNA, 960 bp, Bacillus anthracis
aaaccatacagagtattactatattacatgtacacaacaattgaaaacccagaagaattcgcggcagagcatttagaattttgtaattcacttgagttagaaggaagaatccttgtagctaaagaaggtattaacggaacttgttttggtttcggtaggccaaaccggagaaattccttgaaggcatggaacaacgatccacgttttgacggtatcgtatttaaaatagatgaagcggaatggtcatgcattcaagaaaatgcacgtgcgtcctcgtccagagttagttacacttcgtctagaagatgacattaacccacacgaaataactgggaagtatttagagccaaaagatttttatgaagcaatgaaacaagaagatacagttatcattgatgcacgaaatgattatgagtttgatttaggtcactttaaaggtgcgattaaacctgatatcgaatcattccgtgaattaccagattggattcgtgaaaataaagaagtactttgaaggcaaaaagattttaacttattgtacaggtggaattcgttgcgagaagttttctggttggttagttcgtgaaggctatgaagatgtaagtcagcttcacggcggtattgtaacgtacggaaaagacccagaagtacaaggtgagctttgggatggacaatgttatgtgttcgatgagcgtatcgctgtaccagtaaatcaaaaagaacatgttatcgttggtaaagaccactttacgggtgaaccttgtgagcgatatgtaaactgtgcaaatccagaatgtaacaagaaaattttatgttctgaagaaaacgaagcgaaatatttacgtgcatgttctcacgaatgtcgtgtaagcccacgtaaccgctacgtaatccaccatgatttaccggaaggaccaagtagctgctgcattagagaaaatcgaagcagggaagtaagaggga

SEQ ID NO: 9976 - DNA, 480 bp, Bacillus anthracis
atgacacaacataaagaagaacagatgaatgaagcgttagccttattttactttgcatataaaacatttactgaaaagccagatgaaattataaaagagtatggtattcaaagagtacatcaccgaattttattttttatcgcacgctttccgggagtaagtgtaaatgagttattatcactactagaaataagtaaacaagctcttcacggaccattacgacaacttgtggaaaagagcttaattgagagtaatgaagctacacatgatcgccgtgtgaaacagttatctttaacagaaaaaggtgccgatttagaaaagaaactgagtgatgtacaaagacaacaaatgggtgctattttttcaaaatttggtgaatcgtgtgaagaaaattggcatcaagttatgaatgaaatggcacatagccgatcaggttttgatgcttggatatcgaaaagggaagttgcaatcgatcaaaaa

SEQ ID NO: 9977 - DNA, 624 bp, Bacillus anthracis
ttatgtaaaaagctacaaccccaatttgtttttttttaactcccaaataatggatggaaactggatttgaatatgtgaatttattaagggaagtaaattgttatgcaaaatttatttttatgggtgaagatatagaagaatccattacggcatttcgcttttcaagcattttattatttactacgcccatttcgcgaagacaaaatcaaaaagcgttttatatagaatgggtaaagagcaaggagagaaagcaaagagttatttgcgaaaactacccctaaaaagccagcaacgaattccggatattttttccgcgacaaattgtattatgttatgccacaaataagggaaaacaaaacaggttccatttataccaccaaataaatcggaatatttccaacgtattacaccttccgggaactagaaaaaaaaacctaaagggcttatgaattttttaccggggggcataaaagttatttaattaatatgtcatatgtacaagagttaaagccttactataatggcacatataatctatatttagataaatatgatgagcaaccgattccagttagtcgtaattatgtgaaacgacttcgaaataaaattgaattgtagcagata

SEQ ID NO: 9978 - DNA, 360 bp, Bacillus anthracis
atgatcactaaagctgataaaaatgcgactcgtaagaaaagacatgcacgtgtacgtgctaaacttactggtactgcagagcgtccacgtttaaacgtgttccgttctaaccaacatatttacgctcaagttattgatgatgtgaatggtgtaacgttagtaagtgcatctactcttgataaagaccttgctcttaacggtactagcaatattgaagctgctacgaaagttggagaatcagttgctaagcgtgctgtagagaaaggcgttaaagaagtagtatttgatcgcggtggttacttataccatggccgtgttaaagctctagctgaagctgctcgtgaggctggattacaattt

SEQ ID NO: 9979 - DNA, 3586 bp, Bacillus anthracis
cactattagtcgaacaacaacaagcaatatagttaatacagatattttcacagctaatgttgcattagtaaaaacggttgacaaaacaattgctaccatcggtgatacgattacgtataccattaccgcaacgaaccaagcaccattagctgcaaataatgttatcattacagatatacctcctgctggcactacttttgtaccaggtagtgttacagttaatggtacgcctactacaaacaatcctgctactggtataaacattggaacgattgcagctaatggaaatgcaaccattacttttcaagttcaagttactagtttacctgcacaaaatccaattcgaaatagcgcttcatcaagctttcaatataatccacctggtcaacctcctattaatagaacgtcaactagtaatattgtagaaacattaattaatgccgctatcattaatccatcaaaaacggcaaaccaacaaattgtaaatattggtgacattattacttacacgatcacaatcccaaataacggtaacacttcagcaacgaatgtttcaattactgatccgattcctacaggtactacttttattcctaacagcgttacagttaatggcactatacaaactggcataaccccgacaaatattccaatcggtactgttgcagctggtcaaacgacgaccgttacttttcaagttcaagtcacttcccttccagccaacggaacgattacgaacgaagcaaacgtaacctatacgtcacaaccgaacccgactgaacctccaacaactactacaactaccccacctccaactaacacttctgtacgaactgcaattgtaaatcctacaaaaactgttagcccacaagttgctgacatcggtgatattattacgtatacgattacattgccaaacacgggaaatatctctgctacaaacgtcattgtgaccgatccaatccctgctggtactactttcattccaaatagcgtaacaattaatggtgtttcacagcctaatattaatcctgctggcgggatacaagttggaacgattaatgccggttcaacaacaaccgttacgttccaagtccaggtaacttcccttccacaaaatggggtaattcgaaatataggaaatacaacatttacttatcagcctgatccaactaaacctacgattacaacaacaaatcctacaccacctactaccgttcctattaataccgctattattaatcctataaaaacagctgataaaaccgctgttgatattggtgacattattacgtatacgattacatttaataatgacggaactgttcctgctactaacgtaatatttactgattcaatccctgctggtactactttcatcccaaatagtgtagttttaaataataatcctgttccaaattcgaaccctgcattagggattactgttggtacattgaatccaggcgaaacaaaaacactatcattccaagttcgtgttacacaaattcctgctggcggtactattacaaatgaggcttcaacaacttatacgtaccaaccagatcctaccttgccaccagtaacaacgactgaaccaacgccacctacaagtgtaactgtcaatacagcaacagtgaacccaacgaaatctgccgatcgagcttttgctgatattggtgatattattacgtataccattagtttacaaaataacggaactgttcctgctactaatatcatcctgacagaccctattccaaatggaactactttcattccaaatagcgtgactattaacgggatttcacagccaaatacaaacccttccacaggtataacagtaggcacattggatcccactgaagcagcaactatatcttttcaagttcaagttattagtgttccgccacatggtttagttgaaaaccaaggtactgtttcatttactcatattgtaaatcctaatgagccgcctgtgacaaaaacaagtcctacccccaaaacagaaacagccgttaatactattatttcaactccaactaaaactgccgacaaacaacttgctgatataggtgataccattacgtacacaattacatttcgaaatggaggaactgttcctgccactaacgtgacacttatagattctacccctagcggaaccaccttcattccagatagtgtgaccattaatggtgttacctctccgggatcaaacccagcacttggtattcaattgggtactgtagctgttggagaaacaaaaacaatcacctaccaagtcctcgttacaaattttccaccaaatggaataattgaaaatcaagcatcgttcacttatcaatatcaaccaaatccaaatgaaccccctgtcacttcaactacaccaacacctaatgtgaacgtatctattaataatccaaatccaacaactacaaaatccgcggaccttcaaatagctgatataggcgatatagttacttttactgttactttccaaaataaaggaaccgttcctgcaacgaatgttactgtgcaagattcgcttccgcaaggtgtttcattcgttccaggtagcgttgttattaatggaatatctcagcttggcgaaaatcccgaaattggcataccgattggaactgtcaatcctggtcaaagtattacagttacgtttcaaggtatcgtaaacagtatcccacctggtggagtcattagaaataaagcaaatatcacattcacatatgaaccaagtcctaacgagcctcctgtcacaactaccattacaactcctgaaacggaaacaactgtcaatacagctacattagaaccacaaaaaacagtaaatcgttccttcgttacattaaatgacattattacctatactctttctttccaaaatgttggaactgtatcagctacgaacgtaactataacagactcgattccagctggtactacatttattccagatagcgtaactattaacggtgttcctcaagcaggaataaatccagcatcaggaattccaatcggtacgctaacaccaactgaaagagttactatcacttttcaagttcaagtcattaacattccaccgagcggaaccataaataaccaaggaagcgctacatttaattatcaaacggatccgactttacctcctgtgacaaaaacagaaacaacaccagaaacgaatactccgattcaaaccgcagtaatcagcccaacaaaaactgctaatttaacatttgcagaaataggaaacactgtaacttatactattacatttacaaaccaaggtacaatccctgctacaaatgtaacaattacagacgctttacctccgggtacttcttttgttacgaatagcgttactgtaaacaatgttactcaacctggcgccagtccagtgacaggtattcttgtcggtacagttaacccaggcgaaacagttacagttacattccaaattcaaataaatgctattcctcctagtggaaaaatagaaaacacagcaagtgttacctatacttctcaacctaatccgaatgaacctcctatcacaacaacagaaacgactccgacg

SEQ ID NO: 9980 - DNA, 255 bp, Bacillus anthracis
atgtttgcacctggtgttcacatttatactgctacgcatcctttacatccggtagagcggaattctggtaaagagtatgggaagcctgtaaagattggtaacaatgtttgggttggcgggggagctattattaaccctggtgtttcaattggagataacgctgtaattgcttcaggggcagttgtgacaaaagatgtacctaataatgtagtagttggtggtaatccagctaaagttattaaaacgatagaagaa

SEQ ID NO: 9981 - DNA, 1113 bp, Bacillus anthracis
atgactgaacgtttaaaagtaatgacaattttcgggacacgtccagaagcaattaaaatggcacctcttgtattagagttgcaaaagcatccagagaaaattgagtcgattgtgactgtaacagcgcaacatcgtcaaatgttagaccaagtattaagtatctttggaattacaccagatttcgatttgaatattatgaaggatcgccaaactttaattgatattacaacacgaggtttagaaggtttggataaagtaatgaaagaagcaaagccggatatcgtacttgtacatggtgatacaacgacaacgtttatcgcaagcttagctgctttctataatcaaattccagtaggtcatgtcgaggcgggacttcgtacatgggataaatattctccatacccagaagagatgaatcgtcaattaacaggcgtaatggcggaccttcatttctcacctacagcaaaatcggcaacgaacttacagaaagaaaataaagatgagtcacgcattttcataacaggaaatacagcgattgacgcactaaaaacgactgtaaaagaaacatatagtcatcctgtactagagaaacttggaaatgatcgtcttgtacttatgacagctcaccgtcgtgaaaacttaggagagccaatgcgtaatatgttccgtgcaattaagcgtcttgttgataagcatgaagacgtacaagttgtatatcctgttcatatgaatcctgttgttcgtgaaactgcaaatgatattttaggcgatcatggccgcattcatttaattgagccgttagatgtaattgatttccacaatgttgcagctcgttcatacttaatgttaactgattctggtggggtacaagaggaagctccgtcacttggtgtaccggctcttgttcttcgtgatacaacagagcgccctgaaggtattgaagcaggtacgttgaaattagcgggaacagacgaagagacaatctttagtcttgctgatgagttgttatcagacaaagaagctcatgataaaatgtcaaaagcatctaacccgtacggtgatggccgtgcatcagagcgtattgtagaagcaattttaaaacactttaataag

SEQ ID NO: 9982 - DNA, 588 bp, Bacillus anthracis
ttgcttgatgcaattatcggtagtgatacagttcttcatccaggaacaattattgaggggaacactgtaattggttctgattgtgaaattggaccgcatacagtaattcgcgatagtgaaattggagatcgtacgacaattcgtcaatctactgtacatgatagtaagcttggtacagaagtatcggttggtccatttgcacatattcgcccagattcagttattggagatgaagtacgcgttggaaacttcgtggaaatcaaaaaaactgtttttggtaatagaagtaaagcttcacacttaagttatatcggggatgcgcaagttggagaagacgtgaatcttggttgtggttcaattacggtgaactatgacggtaagaataaattcaaaactgtgattggtaacggggtatttattggatgtaattcaaaccttgttgctcctgtaacagttgaagatggtgcttatgtggcagcaggctctacaattacagagaatgttccatcaaaagcattatctgtagcacgtgcacgtcaagttaacaaagaagactatgttgatcaattgctgaataagaaaaaatca

SEQ ID NO: 9983 - DNA, 1293 bp, Bacillus anthracis
atgtcaacaattattgatgtttatgctcgcgaagtccttgactctcgtggtaacccaactgtagaagtagaagtttacacagaaagcggcgctttcggacgcgctatcgtaccaagtggtgcatctactggtgagcacgaagcagtagaattacgtgacggtgacaaatctcgttaccttggtaaaggtgttatgaacgcagtaaacaacgttaatgaagcaatcgctccagaaatcgttggtttcgacgtaactgaccaagctggtatcgaccgtgctatgatcgaattagatggcactccaaacaaaggtaaactaggcgctaacgctatccttggtgtatctatggcagtagctcacgcagcagctgacttcgtaggtcttccattataccgttaccttggtggattcaatgcaaaacaattaccaactccaatgatgaacatcatcaacggtggttctcacgctgataacaacgttgacttccaagagttcatgatcttaccagttggtgctccaacattcaaagaatcaatccgtatgggtgctgaagtattccatgcacttaaagctgtattacatgacaaaggtcttaacactgcagtaggtgacgaaggtggattcgctccaaaccttggttctaaccgtgaagcattagaagtaatcatcgaagctatcgaaaaagctggttacaaagctggcgagaacgtattcttaggaatggacgttgcttcttctgagttctacaacaaagaaactggtaaatatgaccttgcaggtgaaggccgtactggcttaacttctgcagaaatggttgatttctacgaagagctttgcaaagacttcccaatcatctctatcgaagatggtttagacgaaaacgactgggatggtcacaaattattaactgagcgtatcggtgataaagtacaattagttggtgacgatttattcgtaactaacactcaaaaacttgctgaaggtatcgaaaaaggtatctctaactcaatcttaattaaagttaaccaaatcggtactttaactgagactttcgaagctatcgaaatggctaaacgtgctggttacacagcagttgtatctcaccgttctggtgaaactgaagatgctacaattgctgacatcgcagttgcaactaacgctggccaaatcaaaactggttctatgagccgtactgaccgtattgctaagtacaaccaattattacgcatcgaagacgaactaggcgaaatcgctgtttacgatggtatcaaatctttttataacatcaaacga

SEQ ID NO: 9984 - DNA, 1482 bp, Bacillus anthracis
ttggaatcaatgacctttgttttatttggagcgacaggggacttagcgaaacgcaaaatttaccccgcactatataacttatatagagatcaaaagcttccaaagcaaatatccgttatcgggcttgggagacgtgaagtatctcatgtagattttcaaaaaagaataaaagaatcaatagagacgttttctcgtcatagagaagaaggtactccagaactcgaaggttttttagataattttcgctattgtccattagatgtgagtaagccggaagactatgagagattattacaagtcgttcgtgaaagggaagaagagctacatataaaagggaatagaatgttctatctttccggtgctcctgaattttttgagacaatcgctttaaatattaaggaaagcggacttgataaaacggatggatggaaacgcctaatgattgagaaaccgttcgggcacgaccttacatctgctcgtgagctgaatgataagcttagtcgcacgtttgaagaagacgagatataccgtattgatcattatttaggtaagccgatgattcaaaaccttgaagcactagagtttgcaaatcctgttttacaatcgatttggaataaagaacatatagcgaatgtacaaatcacagcgagtgaaacagttggtgttgaagaaagggcaggatattatgatcaggcaggagccattcgagatatggttcaaaatcatatgttacaaatattaatgatgactgctatgaatttgccggaaaaggttaatgcatgtgaaattcgagaggaaaagcgaaaggtaatggaggcgcttcgtaaagtgaaaaaagaagacgttcaaaaccatatcattcgcggacaatatggtgcaggtgagataaatggcgggcaagttgtagcatataaagaggagccaggagtaaatccctcttctaatatagacacatttattgctgctcgcttgtggatcgataatccattttggactggcgttcccttttatatacgaacaggcaaacgaatgaaagaaaagtctactcgtattgtaatcgaatttaaaaatacgttaaaacagcaatatcaagatagtaatccaaatgcagcacctaacttgttaataattgaaattagcccaggtgagaacgtttcattacagttaaatagtaaaaatccattgaaaaatggagaaattgaaccgatccgtattaactttacttgtgagcaagcggatgtgggagtacctgaagcgtatgaaagactcattcatgatgctgtgagtggagacgctacattctttgcacattggagagaagttgaattgtcatgggaatgggtacaaccaattcttgaagcattcgaggaaaacttattaccacttcatgaatatgagtctggttcatatggtccagaggcatctaatgaattattgcaagaaagtggatttaaatggtggttagatcaagaaacgaaaaaa

SEQ ID NO: 9985 - DNA, 1437 bp, Bacillus anthracis
atgactattcacatttataatacgttaacacgtcaaaaggaaggagtttactccattagaagaaaattgggtaaagatgtaggtaggcggacctccagttttatagctatatccacattgggaatgcaagaccacctatggtatttgatacggtgcgtcgttatttagaatataaagggtacgatgtgcagtatgtatctaactttactgacgtagatgataaattaattaaagcagcaaatgaattaggtgaagatgtgcggacaattgcggaccgttttgtagaagcgtattttgaagatgtaacggcactaggttgcaaccatgcaacagttcacccgcgtgtaacggaaaatatggatatcattatgaaatttattcaagaacttgtgaataaaggatatgcatatgaatccgaaggggatgtgtactttagaacgaaggaattcgaagggtacggtaaattatcacatcaaccaattgcggacttacgtcacggcgcgcgtattgaagtaggagaaaagaaacaagaccctcctgattttgctttatggaaagctgccaaagaaggagaaatcttctgggaaaagcccttgggggtcaggtccgcccaagctggcatatcgagtgctccggcaatggcccgtaaataccttaagggaatacacttgatattcatgcctggtggccaagacttggccatttcctcatcatgagaatgaaatcgcgcagtctgaggcgttaacaggaaaaacatttgcacgttattggatgcaccatggatatattaatatttaataatgagaaaagtgggtaagtcacttgggaacttcattttagttcacgatattattaagcaatatgatccgcagttaattagattctttatgctatcagtacattatcgtcacccaattaatttcagtgaagagttattacaaagcacaaataacggattggaaagattaaaaacggctaccggtattttaaaccacggtatggaaagtagtacggatttaccagatcataatgagaatggtttagttgacctagaaaaaattccaaactgcatttgaagaagcgatgaatgatgacttcaatactgctaatgcaatcactgagttatataatgtgcaaaatcatgcgaatcaatatttactggaagaacatacgtcaccagtggtaatgaaagcatatgtaaaacagcttgaaacattatttgatattttaggatttagaattagcgcaagaaagagttgctgatgaaagaaatgagggcacttattcaaaaaacgcattgaagctcgtaaaaatcgtgattttgcattatcggatcaaattcgcgatgatttaaaagaccgcaacattattttagaagataccgctcaaggtacaagatggaaaagaggataagaatgattgatgcaaagcaattaa

SEQ ID NO: 9986 - DNA, 857 bp, Bacillus anthracis
aaaatggcgttattagcaatggtactagtcgttacttctgtactatttgcagcttgttctaacaaagagaaaaagaaagcagatgcgaaggatgcgaaagactgagagcgcactgtacaacatgcaaaaaggggaaatttaaatcccctgcaaatccaaagaaaaattgctgacccttagtggttcaccagaagaattataattcttgggtatgaaaccaattattactgctaatacatctcaagaaaaaaattgatgcacatatttgaaaagaaattaaaagacgtaaaaccagttggttctgcttggggcgataaaattaacatcgaagcagtagctgctgcaaaaccagacttaattcttgtaaacaatcgtcaagaaaagatttatgatcaattatctaaaattgcaccaacagttatgttaaaaactccattagaccaatggcgtccaaaattcgaagaagtaggtcaaatcttcggtaaagagaaagaaacaaaagaatggttcaaacagtatgatgaaaaagcaagcaaattacatgacaaaatcgttggcgaaactggcgatgctaaattcctgaaaaatggctgcctatccaaatggctttccgggtatatggggactacgggtaccggaacgaaatcttttattgatttaaaattaccagcagttaaaggtacaccaactgataaaccgttagtacaagtgcaaaaagaagctttaattgattacaacccagaattacttattcgtatttacgactggtgacggttctcagcgcctaaaagaattccaagaagaatcaattttggaaaaatatgaacgctgttaaaaacaaccacgtatttacaatt

SEQ ID NO: 9987 - DNA, 307 bp, Bacillus anthracis
atgatggagcaaaagcaagagattcatgctacggtgagcattaataatgtgcagtacgaagtaattaaaaacttttcgtgacgggtttagtgaagaagcatttaaagagcgctatgcagaaattttaaataaatatgattacatcgttggagactggggatatgagcaacttagattgcgcggtttctttgatgatagtaaccaacgtgcgacatatgatacaaaaattagtacgttatcggagtatttatacgagtattgtaacttcggttgtgcacacttcgtattacgaaaagtgaagaagtaa

SEQ ID NO: 9988 - DNA, 549 bp, Bacillus anthracis; identical to SEQ ID NO: 9145

SEQ ID NO: 9989 - DNA, 1769 bp, Bacillus anthracis
ttgtttacaaaagcacaagaacttttagcgtcttattcgggttattcgtcattccgaagaggacaagatgaaacaattaaaaatgtattagatgggaaagatacagtttgtattatgcctacaggtggtggtaagtcaatttgttatcaaattcctgcattagtatttgaaggaacaacgttagttatatcgcctttaatatcacttatgaaagatcaagtagatacattggtacaaaacggtatttcagctctctatattaatagttctatttcgattactgaagcgaatcaacgaattcaattagcgaaacaaggacattataagttattttatgtagcgcctgagcgacttgattcaatggagtttgttgatcaacttatcgatatgaaaatcccgatgattgccattgatgaggcgcactgtatttctcagtggggacacgatttccgtccaagttatttacatatacatcgcatattagactaccttccagaggagccgcttgtattagcattaacagcaacagcaacaccacaagttcgtgatgatatttgcaacacgcttggaattaatcaagaaaacacgattatgacaacgtttgagcgcgagaacttatcattttctgttattaaaggacaagatcgtaatgcgtatttagcggattatatccgtcaaaatcaaaaggaatccggaattatttatgcagctactagaaaagtagtcgatcagttgtatgaagatttaatgaaagcgggagtttcggtttcaaaatatcacgctggtatgagcgatcatgatcgaaatgagcagcaagaactctttttacgtgatgaagtgagtgtaatggtagctacatctgcgtttggtatggggattgataaatcgaatattcgttacgttattcattatcacctgccaaaaaatattggaaagttattatcagaaagcagcccgtgcagcccgtgacggattagatagtgcatgtatatgtggatatgcttctcaagatgtgcaagtacagcgctttttaattgatcaatcgatccgggaatctcgttttttcaatgaacctggaaaatttgcaaatattgactgattactgtcatacagaacaatgtttacaatcctttattttgcaatactttggagaagaaccgaaagaggattgcggtcgctgtggtaattgtacggataaccgagaaagtatcgatgtgacgagagaatcacaaatggttctatcttgtatgattaggacgaatcaacgatttggtaaacaaatgattgcacaagtactaactggatctaaaaataagaaagtcattgaatttaattttcatactttgccaacttacggacttttatcaaatcgtagtgtaaaagaagttagtgagtttattgagtttttaatttcagacgaattaattgcagttgaacatggtacttacccgacactaaaagtgacggaaaaagggaaagaagtgttactaggtaaagagaatgtattacgtaaagaacgagtagagacaagacaaatcgttcaagatcatcctttatttgaagtacttcgtgaagtacgtaaagaaaatgcccaaggaagaaggtggacctccattcgttattttctcggcccaaccgttgaaagatatgggcgcaaaaatgcgccaaagtgactctgaactcttaactgtaaaaggattggagaccataaacttgtgaagtatggttcgcacttctaacaagcggtgcagcactttattgaggaaaac

SEQ ID NO: 9990 - DNA, 931 bp, Bacillus anthracis
aggattttgattgacccaattccaatggaagtaataaagtggggaaggaagaatttcatcgtccggattgatacaagtgattttatccacgacctgggaatggaatggcagggattttttacatattatcccagctgatcgcgtgcagccttcttggaaagacggacctttaacttctttgacacgttaacgtcagatcaaaaacaagagagaatgaaagcgctttgtactgaggagacgccatgtattattgtaactcgtaatcaagatgtaccagatgagttactgcaagcatcacgtgaatcaggcatgcctttattacgttcttctcaaacgacaacaagactatcaagtcgtttaacaaattatttagaaggtaagttagcgccaacaactgccggtcatggtgtggtagtagatatttaccgcggtggtgttttaattacccgacaaaatggtgtccggaaaagtgagacagctcttgagcctgtaaaaaatggtcatccccttgttgcggaatgaaaatgaaaaaattccccaaaagattaaaaacatgttattccgaagctccccacaatttattggaccattttttttaaaattcctggcctatggtttattaacgttttgacggtatttcgggcgaggagcacggggaaaatataaaccggattaaccttgttttttaaccttcaaaatttgggatcaaaagaaaaattatgatcgcttaggtcttgatgaagagaagatgaagattattgatacagaacttacgaagattacacttccagttcgtcctggtcgaaacttagctgttattattgaagtggcagcgatgaacttccgtttaaaacgtatgggagtcaatgcagcacagcagttctcagaacgattaatgagtgcgattgagttaggaaatcaggagtaaaca

SEQ ID NO: 9991 - DNA, 1113 bp, Bacillus anthracis
atgactgttattcgaggtttagaaggggtagtagcaacaacatcatctgtgagctctattattgatgatacattaacttatgctgggtataatattgatgatttagctgagaatgctacatttgaagaagtagtgtacttattatggcatcgcaagcttcctaacgagcaagaactagcgaaatttaatgagattgtatcggaatactataaagttccaggtgagattttagcatatttgaaacaagtagatttaaaaatcgcacatccgatgtctgttttacgaactgcaatttccatgctatcattatacgatgagagcgctgaaattatggatgaaaagtccaattatttgaaagcggttaaattacaggctcaagtgggtactttagttgctgcttatgcaagaatccgtaaaggtttagatgttgttgagcctagaaatgatttatcattagctgcaaacttcttgtacatgttaaatgatcgcgagccaaatgaagttgaaattgaagcttttgataaggcgcttgtacttcacgcagatcatgagttaaacgcttctacatttactgcacgcgtttgtgtagctacactttcagatgtatattctggtattacagcagcaatcggtgcgttaaaaggtcctcttcacggcggggcaaatgaaaatgtaatgaagatgctaactgaaattggcgaagaagaaaatgtagaatcatatattcataatgctcttcaaaataaagtgaaaatcatgggctttggccaccgtgtatatgagcagggtgatccgcgtgcaaaacatttacgcgaaatgtctaagagattatgcgtgcttttaggagaagagaaatggtataatatgtctatcaaaattgaagacattgtaacaaaagaaaaaggtcttccaccaaatgttgatttctattcagcttctgtataccattgtttaggaattgaccatgacttatttacacctatttttgcaattagccgtatgtcaggctggttagctcatattctagaacaatatgaaaataaccgtttaatccgtccgcgtgctgattataatggaccaacacatcaagtgtatgttccaattgcacaacga

SEQ ID NO: 9992 - DNA, 1239 bp, Bacillus anthracis
atgggatattacgacggaccaaatttaaatgaagagcatagtgaaacgagagaagtgagaaaatcgggcagtaaaaaaggctattttttcacaggtttagtcggagctgtagttggggctgtttcaattagttttgcggcaccatatatgccatgggctcaaaataatggagcgactgtatcatcttttagttcagattcaaaagttgaaggtactgtagttcctgttgtcaataaagcaaaaaatgaaacggatttacctggtatgattgaaggcgcgaaagatgttgttgtaggtgttattaacatgcaacaaagcattgatccatttgcaatgcaaccgacaggtcaagagcaacaagctggttcaggatcaggtgttatttataaaaaggcaggaaataaagcatatattgtaacgaacaatcatgtagtagatggtgcaaataaacttgctgtaaaactgagtgatggcaagaaggtagatgcaaagcttgtagggaaagacccttggttagatttagctgttgttgaaattgatggtgctaatgttaataaagttgccactttaggtgattctagtaaaatccgtgcgggtgaaaaagcaattgcaatcggtaacccattaggatttgacggaagtgtaacggaaggtattattagtagtaaagaacgtgaaattccagtagatatcgatggcgataagcgtgcagattggaatgctcaagttattcaaacagatgcagcaattaaccctgggaacagtggtggtgcgttatttaaccaaaacggagaaataattgggattaattcaagtaaaattgcacaacaagaagttgaaggaattggatttgctattccaattaatatcgcaaaaccagttattgaatcacttgaaaaagacggagtagtgaaacgtccagctcttggagtaggtgtcgtttcattagaagatgtgcaagcttatgcagtaaatcaattgaaagtgccaaaagaagtaacaaacggtgttgtattaggtaaaatttacccaatatcacctgcagaaaaagctggtttagagcaatatgatattgtagtagcattagataatcaaaaagtagaaaactcacttcaattccgtaaatatttatatgagaagaaaaaagtaggcgagaaagtggaagttacattctaccgtaacggtcaaaaaatgacgaaaacagctactttagcagataactcagctacaaagaatcaa

SEQ ID NO: 9993 - DNA, 798 bp, Bacillus anthracis
atgaaagaaatgaaagtaattatcgctggaccaagaggacgtatgggacatgaagcagttcttcttatggaaagaacggaacattttaatttagtagcagcagtggattataagcatggtggagagaaaatctctgatttaccgggaatgccagcgctagatgcaactatttacgcagatttacatacttgtttagaggaagtagaagcagatgtgttgttagatttaacaacgccagaagttgggaaacaacacgttacactagcagttgagcgtggacttcgttctgttattggtacaactgggtttacagaagaagagctaaaacaattaaccgagactgcgaaagaaaaagcagtaggaacaattatcgctccaaactttgcaattggtgcagttctgatgatgaaattctcacaaatggcagcgaaatatttccaagatgttgaagtaattgaattgcatcatgatcaaaaactagatgcaccatctggtacagcggtaaaaacagtagaattgattcgtcaaaatcgtgaatcaaagcagcaaggtcatccaaatgaagtagagcaactagaaggggctcgtggtgcaaatgtagatggcattcatattcatagtgtgcgcttaccaggacttattgcacatcaagaagtaatgtttggtggagacggacaaatgttaacagttcgtcatgattcattcaatcgtgcatcatttatgtctggtgtaaaactatcaattgagacagtaatgaatctagatcatcttgtgtacggtttagaaaatattatcgac

SEQ ID NO: 9994 - DNA, 1753 bp, Bacillus anthracis
tcggcaaaggcgaaaggtgagattgaggaatcatttttacaaattgccttgtctcgttggcttgattcacaatcttttcatatgccgcgagagacagcggagcgtttttgtcaagaagctttaaagttagaaagattaccttctagtctattatcatcgccagaattaaataaattggcagaagaaataaattatgtaaatacagggagtatgaaagactcttctatgcaaccaataagctcgcttatagagaatcaaaatggtgacaacctatcggatattcttaattatcatattattaaatggtgtaaattatatcttgatgacccccggggcaagttgggcgatgccaaatcgagagaaaggtttttatcgtgcgtggcaacaccttattacatttgatccagcgctcagtaaaactgaaccgtaaagttttaaaagattggccagaagatgcccttatagctttaacaaaagcattatctgaattaggaatttctgaatctaacatgcaagcttaccttgaagggcacttactttctttgctgggatgggcaggaatgatacgatggcgctcgcaacaatcaattgaggaacaggaacttctcatagaatatttagcagttcgactttctatggagctagccattgtaaaaccgtatttacctttaaaaaatcaaaaggttgagaaaaaagtttcgatcgtcccacttatagcttcttggatctattggggggatatttcaatagagaaatggttacaaatgtctgcaactgaacaaagtgaattattggcattcgcttatcgctttgaagaaaaattttcgcaaagaaacttttggttagaagcttgggaaccagacgcattcagagcaatttaagggaggaagatttgctttttaggcaacgggcaaattcatgataaaaaggcgtgtagtaggtcaattaagcattttggtattgatgtacggtccagaaaccgtttcgtcgccacccttgaaaaattagggtccgttcgaaaacgtttggaatagctggtttctttgggttaccaattgcgactactgaactaggtagtaatgacagccatccttctttgccagttatattaaaaccgaaacatcaaataaaagagctaacagatgaaaatgaatgtaaatcttatgaacaacgtaagatggtaggcagttcggtacgttatacatttaaaacgatgaaacagaacgtactgacaagtatgttgctacctgaagtaagtggtcctttacttggtttacaaatggtgacaaggagttttgtgccaagaagagtaggtgggctcatttcgtaccttcgtaaaaatatgttgccaaaagcctgatacaacttttctcgcttaatcatgttcatgatacaaactgtgagatacggatcggttttacgaaagaagaaaaagtgaactatgtgcgtcaaactttaaaaatggtggggattaacagaaggtttcgctcctttagttgtaatgtgcggccacagtagtcaaagtacgaacaatccttatgctgcaacgcttgaatgtggtgcctgtggcgggagccccgggaggaatttatgccaaagttttcgctactttaatgaaccttccaaaataaaaaagggttttctgctgtagggattaaattttccatgaacccattttttgcccaccttgaaataaaaaacaagggatgaattaaaagggaatttagtttcccaaattttggaaaatgggcaa

SEQ ID NO: 9995 - DNA, 945 bp, Bacillus anthracis
atgaaaaaatctattacgctattcacagcgattttatctatttttttcttattaataggttgcagtgcaaaaggagacgaaaaagcatcggcaacaaaaacagaaaaaggaaaagagaaaatagaagttaccgacctgtcaggaagaaaggtgacattcgataaagtgccagagagttttgcgacattaagtatgggagacatgaatattattcatgctttaggcggaaaaatagtaggtcgtccggatgcaaaaataactcttccagaggatataaagaaaatacaagtaatcgggaatgcacatcagccaaattttgagcaaattgctagcttaaagcctgatgtacttattgctaacaatggatttcaaaagaacattccaacggtggaaggacaaggaacgaaagtaatgatttcttctgcgaattctgtacaagatattcaaaagaatattgagctatatggaacgataatgaagaaagaagataaagcaaacgaacttaatcaaaaaattaatgttcaaatgaagaaatatgagaaaaagagcgatgtgaaagcactgctagtgtatggagcaccaggtacatatttagccgcattaccaacctctttatcaggtgatattttagaaaagacaggcggaaaaaatatcgctgctgattttccagaaatgaaggaatatccgcaatatgcgcagctaagcgtagaacgcattattgaggcaaatccagatgtgatttatttaattacacatggagatccaaatagtgttaaaaaagcatttgaaggtgaaatgatgaaaaatgaagcatggaaaaatttagatgcagtaaaacaaaatcgtgtagttattttgccacctgacttatttggatcaaatcctggaacaaaagttacagaagcgatggactttatgtataaaagtatacaagatgtaaggaaa

SEQ ID NO: 9996 - DNA, 1351 bp, Bacillus anthracis
ggaggaaacatattttaacgctacagcggttacacgcctttataaaaaccacaataggaatatgattcgcctttacccgctggtttgggttaaaagggggaattctcacattttaaaaacataaccggcgggcccattggttttttcttgtaagaatgaaaatgcaagaatcgcagcggttatgtttgcggggcataatcgtaatattaaattcagaccctgaaatggggatgaaggtactcgtgaagggggaaatctctgtttacgaaggggagtggttcttatcaaatttatattcaagacatgcaacctgacggaattggaaacctacatttagcttacgaacaattaaaggttcgtttagaggaagaaggattgttttctcaagtttataaaaaaacaatccctccttatgcgaaaacaataggtgtgattacgtcaccaacaggagcagcgattcgtgatattataacaacgattaaacgtcgttatccaattggaaatgttattgtgtttccagtacttgtacagggggagtcagcagctccctcaattgtacaagcgattcgtacagcgaatgaaatggaagaaatagatgtcctaatcgttgggcgtggtggaggttctattgaagaattgtgggcgtttaacgaagaaatggttgcaagagctattttcaagagtgaaatccctattatttcagcagtaggccatgaaacagactttacaattgcggattttgttgccgatttaagagcgccaacgccaactgcagcggctgagctggcagcgcctaatattatagagttacaagaaaaggtattgcagacgaactttaagattgcaaagagcaatgagagagttagtacataaaaaagaagaaaaactacaagtattgcaaaaatcttatgcgttccgttatccaagacaagtatatgagcaaaaagaagagcaattggatagagcgttagaacagcttgttttagcgaaagagcgctatatttgataaaaaggtaaatcagttaaaacagctttcattttattttagagaagcaccacccatctcaaaaaattatgcaaacgaaggtagcagttgaaacattacaaaagcaattgcaacgtgaaatgcaaacattactccaagcgaaagaatttgcctttgtaagagctgctcaaaaacttgaagcgctaagtccgcttaaagtaatgatgagagggtacgggcttgtatatgatgaagagaagcaagtgttaaaaagtgtgaaagatgtcagccttgggagatgctgtttcagttcaattacaagatggaatactagattgtagcgtatcaggcatagaggagcgtgaa

SEQ ID NO: 9997 - DNA, 3661 bp, Bacillus anthracis
ttgacaggtcaactagttcaatacggacgccaccgccaacgaagaagttatgcccgtattagtgaagtattagagttaccaaatcttatcgaaattcaaacctcttcttatcagtggtttcttgatgagggtttggcgagaaatgttctaagacatttctccgattgaagactttacgggaaatctatcgcttgaatttatcgactacagcttaggtgaacctaaatactctgtagacgaatgctaagagcgtgatgtgacgtatgcagcaccacttcgtgtaaaagtgcgtctaatcaacaaggaaactgggtgaagtaaggaaacagaatgtgttcatgggagatttcccactcatgacagagactggaacattcgtaattaacggtgcagaacgtgttatcgtttcccagttagttcgctctcccaggcgtatactatagtggcaaagtggataaaaacggaaaacgtggttttactgctactgtaaatcccaacccgcggagcttggttagagtatgagacagatgctaaggatgtttgtatatgtgcgtattgccccgtacgggaaaacttcctgtaactgttttgttacgcgcatctagggtttggctctgatcaagaaatcaccgagcttttaggtgataacgaatacttaagcaacacattagaaaaagacaacacagatagcacagaaaaagcattgcttgaaatttatgagcgtctacgtcctggtgaaccaccaacagtagaaaatgccccagaggctactttgtgtctcgttttctcgatccaaagcgctatgatttagcaaatgtaggtcgctacaagatcaacaagaagttacacattaaaaacagattgtttaaccaacgtttagctgaaacattagtagatccagaaactgggtgaaattttagcggcagaaggaacaatcttagatcgtcgtacacttggatcgcatttcaccttacttagagaaaaaccttggatttcaaaccagggaaaccaaatgggtgagtggtaggaaggtgatgttgagctgcaatctattaagatttatgctcttgagtcagaaggcgagcgcgtaattaatgtaattgggtaatgcaaacattactcgtgatgtaaaacacatcacaccacgtgatatccttgcttctatcaggtacttcttcaacttactataccaagtaggggatacagatgatttcggccctcttggaaacctgtcgttgcgtttctgttggagacttattacaaaatcatttcggtatcgttctttctcgtaaggaacgtgttgttcgtgagagaatttcgatccaagatacaaatgcaattacaccaccaggcatttaattaaatattcgtcctgggtattgcagcttattaagaggttcttcggaagttctcagttatctcagttcatgggaccaaacaaatcccattagcagagttaactcacaaacgaagattatctgcattaggacctggtggggtttacgcgtgagcgcgcaggctttgaagtacgtgacgttcactactctcactatggtcgtatgtgtccgatgaaaaccaccagagggacccaacatcgggttgatttaactcattatcttccgttcccgaaagcaaatgagatctgggttcattgaaaacacccctaccgtcgtgttgtaccccgaaaactggtcttgtaacagggcatgttgattatttaacagcagatgaagaagataattatgttgtagccccaagcgaaatatgaaaatatctgaagaaggagaattccttgatgaagatatcgtagctcgtttccgtggatgaaaacattgtcacaaataaagaacgcatcgactacatggatgtatcaccaaaacaagtagtgtcggcagcgacagcttgtattccgttcttagaaaacgatgactctaaccgcgcacttatggggagcgaacatgcaacgtcaggcggttccgttaatgaatccggaatccccggattgtaggtaccggtaatggattcgtatccagcaaaaagcctcaagtgctgccagtaattctgtaacacccctggttattgtgaagcgcgtagaagcccgtaaagtttggggtacgtcgctatgtagaaagtgacggtcaaaacagtaaaaggcgacttagatcgctacaaaatgcaaaaattcattcgttctaaccaaggaaacttgctacaaccaacgtccaatcgtaagtgttgggaaatgaagttgtaaaaggtgaaaatccttgcgggatggtctttctatggaattaggtgaactagcacttggacgtaacgtgcttggtggctttcatgacttgggacggttataactacgaggatgcgatcattatgagtgagcgccttgtaaaagatgatgtgtacacttctattcatattgaagaatatgagtcagaagctcgtgatacgaagcttggaccagaagaaattacacgtgacatttccaaacgttggggaagatgcattacgcaaacttggaccagcgcgggatcatttcccggtggggcgggaagtaaaagatggaaaataacttgtgtggtaaagtaacgcctaaaggtgtaacagaaataacaagcttgaaaaacgtctattacatgctatctttggagaaaaagcgcgtgaagtacgtgatacatcactacgtgtacccacacggtgggtggcggtattatcttaggacgtaaaagtattcacccgtgaagatggcgatgaattgccacccaggcgtgaatcaacttgtacgtgcatatatcgttcaaaaacgtaaaatttctgaaggtgacaagatggccggacgtcacggtaacaaaggtgttatctctcgtattttaccagaagaagatatgccttacttaccagacggtacgccaatcgatatcatgttaaacccattaggggtaccatctcgtatgaatatcgggcagggattaaagctttctcttgggattggcagcaaggataccttgggtattcccattgccaacccagtatttcaagggtgctcgtggaggaaaaaggttggggggcacattggaaaaacctgggattggccaaatgacccccaaacaaatctggattgacaggacctactgggtgaaaccattcgataaccgtgtatctgttggtgtcatgtatatgatcaaacttgcgcacatggtctgacgataaacttcatgctcgttctactggaccatactcacttgtaacgcagcagcctcttggaggtaaagctcagttcggtggacagcgtttcggtgagatggaggtttgggcactttgaagcttacggtgctgcttatactctccaagaaatctacccagtgaagtctgatgatgttattggacgtgtaaggacgtatgaagcaattgttaaaggcgaaaatgtttccaggacccaggggttcccggaaccaatcaaagtattgattaaagaggctgcaaagtttaggttagggcgttaaaatgatgtctagcgacgatacagaaattgaaaatgcgtgatacgaaagatgacgatgatcatcagaacagcagaataaattaatgtcgaagttgagacaactaaggaataattgggataacctgtagacttaaaggggaggtagcgccccttgataga

SEQ ID NO: 9998 - DNA, 1744 bp, Bacillus anthracis
atggcattcgatggattatttacaagagcgattacacatgaaattgcaaattctcttacgcgtggaagaatttcaaagatatatcagccttcaaaatacgagattttattacatattcgagcaaacggaaaaaatcaaaaactcattgtttccgctcatcagacatatgcacgtttacacttaacaaatcaaaattacgattcacctgcacttccaccaatgttctgtatgcttcttcgtaagcatttagaaggtggattcattgaaaaaatcgaacaaattgatttagaacgtattattcaaattaccgtccgtagcaaaaaagaaaatggtggatgaaccgctcaaaacatttataatttgaaattatgggacgacatagtaacattattttagtagacacgaaaaccaaacaatattttagatagcttaaacacgttttctttagcagtaaaccgacatcgaactgtatacgctggagctgaatatattgcaccaccagtacacataaaaattaacccacttcagatcgaacacaaatgatgaatttattagaccgctagactttctatctggaaacatggataaacaacttgtcggcacctttacaggaatatcacccttattcgcaaaagaagtcgtgaaaaaagctggtatggtaaatgaaaaagcattagctgatgcatttttctccatacaaaaaccattattaactcatacatattcgccaacaatgactacttcaaatgggaaagaattcttttatcttttccctcttgcgcacttagcaggagagaacaagacattctcatctgttagtgaattgctagaccgtttctttttcggaaaagcagagcgtgaccgtgtaaaacaacaagctcacgatttagagcgctttatgcaaaacgaaaaaaataaaaatgagaaaaaacctcattatcctagaaaaaccattccaagatgctggaaaagcagataaatatcaactatttggagaactacttacagccaatatgtacgctttgaaaaaaggcgataaagacattgaagtcgttaactattacgatgaaaatggtggaactgtaaagattgcattagatcctttaaaaacgccatctgaaaatgcacaacgctatttccaaaagtaccaaaaagcgaaaaattcaattgttgttgttgaagaacaaatcgaaaaaacaaaggaagaaattctttatttcgatagcttacttcaacaaatggaagctgcttcttcaaaagatatgaaagaaaattcgtgaggaattagctgaagaaggttatatgcgcaatcgtaaaacgaaaaacgcaaagaaaaagcctactaaaccagtattagataaatatgtagcaagtgatggtacagaaattttcgtcggtaaaaataataaacaaaatgattatttaacaacgaaatttgcccgtcgtgatgaaatttggttacatacgaaagacatacctggttctcacgttgtcattcgttctttagaacctgctgaagaaactttactagaaaactgccaaaaattgctgcttattatagtaaagcctaaagagtctagttctgtacctgttgatttcacaaaaaatacgccatgtgaaaaaaccgagtggtgcaaaacttggttttgttacttatgacaatcaacaaactgtatatgtaacaccagatgcagatactgtaatgaaattaaaagcttaaatacaaaaatgcgttgcttataag

SEQ ID NO: 9999 - DNA, 2598 bp, Bacillus anthracis
atggacttaaatcaaatgacaacaaaaacacaagaggcgattatgagtgcccaatctttagcggtatctcatcaccatcaagaagtagatactgttcatctcttgtttacattattagaagagcaggatgggctagcagtacgtatttttcaaaaaatgaatgtcgatatagaagcattaaaacaaggcgtagaaaatttaattaagaaaaagccttccgtaacgggaagcggtgcagaagcaggtaaattatatataacaggtgccctgcaacaactgcttgtaagagcaggaaaagaagcagagaaattgcaagatgattacatttcagtggaacatgtattacttgcttttactgaagaaaaaggcgatataagccaattgtttacaagatttcatattacgaaagacaacttattacagtctttaatgacagttcgggggaatcaaagagtgactagccaaaatccagaagcaacttatgaagcgttagaaaaatatggtcgtgatttagtggcggaagtgaaagcagggaaaattgaccctgttatcggccgcgatagtgaaattcgccgcgtaatccgcattctttcacgtaaaacgaaaaataaccctgttttaattggtgagccaggtgttggtaaaacagcaatcgttgaagggttagcacagcgtattgtgaagaaggatgtacctgaaggattaaaagatagaacaatctttgcgttagatatgagtgcgcttgtagctggtgcgaaattccgtggtgagttcgaagagcgtttgcaagctgtattaaatgaaattaaaaagagtgaaggtcgcattttactattcattgatgaacttcacacaatcgtcggcgctggaaaaacagaaggtgcgatggatgcagggaatatgttaaaaccgatgcttgcgcgtggtgaactgcattgtattggggcgacaaccctagatgaatatcgtaaatatattgagaaagatccagcactagaaagacgtttccaacaagtattagcagaagaaccaactgttgaagatacaatttctattttacgtggtttaaaagagcgttttgaaatttatcacggtgtaaatattcatgaccgcgcaattgtagcagcatcagttttatcagatcgatatatttcagatcgtttcttaccggataaagcaattgatcttgttgacgaagcgtgcgcaacaattcgtacagaaattgattctatgccgacagaattagatgaagtaacgcgccgcattatgcagctagaaattgaagaagcggctcttggaaaagagaaggactttggtagccaagaacgcctcaaaacattgcaacgtgaattatcggatttaaaagaagtggcaagtagcatgagagcgaaatgggagaaagaaaaagaagatattcacaaagttcgtgacttacgtgaacatttagagcgtctgcgccgtgaattagaagaagcagaaggtaattacgatttaaatagagcagcggaacttcgccacggaaaaattcctgcaattgaaaaagagttaaaagaagcagaagaaatgggcgcaaataataaacaagaaaatcgtttattacgtgaggaagtaagtgaagaagagattgctgatattgtttcacgctggactggtattcctgtcgcaaaactcgttgaaggtgaacgtgagaaattattacgcttagagcaaattttatcagaacgtgttatcggacaagaggaagcggtaagcttagtatcagatgcagttcttcgtgcgcgcgctggtattaaagacccgaaccgtccaattggttccttcatcttcttaggaccgactggtgttggtaaaacagagcttgccaaaacgttagcacagtctttatttgatagtgaagagcaaatgattcgtatcgatatgtctgagtatatggagaaacacgctgtgtcacgcttaattggtgcccctcctggatatgttggatatgaagagggcggtcaattaacagaagcagtaagacgtaaaccgtattccgttattttattagacgaaatcgaaaaagcgcatccagaagtattcaatattttattacaaatgttagatgacggacgcattacagattcgcaaggtcgtacagtggactttaaaaatacagttattattatgacttcaaatattggatctgctcatttattagatggattagaagaagatggctccattaaagaagaatcaagagaacttgtaatgggacaattgagaggacatttccgaccagagttcttaaaccgcgtcgacgaaattattttattcaaacctcttacaacgaatgaaattaaaggtattgttgataaaattgtaaaagaattacaaggtcgtttagctgaccgtcatattacggtaaaattaacagaagcagcgaaagaatttgttgtagaagctggctttgatccgatgtacggagctcgtccattaaaacgatatgtacagcgtcaagttgaaacgaaattagcgagagaattaattgcaggtacgattactgacaatagtcatgtagtggttgatgtagaaaataacgaattagtcgttcatgtgaaa

SEQ ID NO: 10000 - DNA, 1519 bp, Bacillus anthracis
atgtgtggaattacaggttgggtagattggaaagaagacctttcaaatcaacatgttattttaaaaaagatggcaaatcgtattcagcatcgcggtcctgatgctgaaggattttggttttcacctcgtgcggcctttgcacaccgtcgtttaattgtaattgatccagaaggcggggcacagccgaagacatttcgtgctggtgattatacgtatgctcttacttataatggagaaatttataatttccgtgagctgagggaacaacttcaaaaatgtggtcatacatttgaaacgcattcagatacagaagtgttactacatgcttatttagaatggaaagaagactgcgtgcaacatttaaacggcattttcgctttcgccttatgggatgatcagaagcaacgactgtttttagcacgtgatcatttaggtgtaaaaccgctcttttatacagaaagaaatgacagtattattttcggatctgaaataaaagcattattagctcatccatctgttcctgctgaaattgatgcggatggcataaatgaaatatttggattagggctatttcgaactccaggatgtggcgtctttaaacatattgaagaagtgcgtgccggacattctatcacatttacacgtgataaaaaagtagttacgaagtattggaatttagaaagtaaggtccatacagattctatagaagatacatcatcacatattttatctattttatcagatacagtaaaaagaccattaattgccgacgtccctctcgtttgcatggtatcacgagggatagaatctagcggtatttctgcactagcaggaaaagaatttgctgctgaaaataaaacacttcatacgtattccgttgactttgtaaatagcgcaaaagatttcgagctgacatttgctcgcactggtttagacgctccttgggtaaaacgcgtttctgaacatgtagggacatctcatcatgatattattgtgaatgctgaagaattagctaatcacttattcgttcccctccgtgcaaaagatttaccgagtgctggcgaaatggaaacttcactatatttactattttgcgaaatgaaaaaagatgcgaccgtagctttatccggcgaatctgctgatgaagtattctcgtggatacccttggtttcatcaagaagaattactatatgtcgataagtttccttggctaacaaattggaagaatacatctcctcttctactacatgaaataagtaaccaatgtaatctagaaaactatattgatacacgcttccaagaagcgatacttgaagtacctactcttgaaggcgaaagtaaaaaatccgcgaaacaacgtcaaatgttttatttatttttaacgagatttcttccgttcttacttgaccgtaaagatcgtatgagtatggctgtaggatttggagttcgtgtaccgttttgcgattatcgattagttgaatatttatggaacgttccctttcaacataaaaagcatttg

SEQ ID NO: 10001 - DNA, 577 bp, Bacillus anthracis
ttgaatgtactaattgtatacgctcatcctagtccttccagttttaacgcggcgattttaaagcatgtacaaaaaggattacaagaaacaaaccattcggttacggtacttgatttatataaagaacaatttaatcccgtccttgtatttaatgaagagaagaaaaggcgtgatttagtaaatgaagaagaaacagctcggtacagagcattagtagaagaagcggatactcttctcttcatttatccaatatggtggtgggggatgccagctattttaaaaggatttattgatcgcattttcgttgctggttttgcttataaatatgaaggtgccctgccgaatttgtgtactaaaaggtaagaaggcatggggaattaatacgttagactcaccgttatggtacgtcgcactactatatcgatcagccgattggattataatgaagagaggtgttttacgtttttgcggcattcgcgatataaaacgatctgtttttcaatctgtgaaaacgagtaaacgagagaagcgggaaaagtggttattacaaatagaagaaaaggctcgtacgttatga

SEQ ID NO: 10002 - DNA, 1810 bp, Bacillus anthracis
atgaatatggaattatgggcggcgacgttttttgcgttttgccgcattacttcatttttatattttttaccgtttttctcaggtcgatccattccagcaatggcgaaggttacatttggacttgctctttccattacagtggccgatcaagttgatgtctctcacataaagacagtttgggacgttgcagcatatgcaggaacgcaaattgtaattggactatcgctttcaaaaattgtagaaatgctgtggaacattccaaaaatggccgggcatattttagactttgatatcggtttatcacaagcaagtttgtttgatgtaaacgcaggttcacagtctactttactatcaaccatttttgatatattttttctcattatttttatttcacttggcggcattaattatttcgttgccacgattttaaagtcgrttcaatatacagaggcgatttcaaaattgctgacgactagttttttagatagtctactcgcaacgttattatttgcgatcacatcagcggttgaaattgctcttccgctcatgggaagtttgttcatcattaactttgttttaattttaatcgcaaaaaacgctccgcaattaaacgtttttatgaatgcgtatgttattaaaattacatgtggtattttgtttattgcgatgagtgtaccgatgctcggttatgtgtttaaaaatatgacggacgtattgcttgaggaatatacgaaactatttaactttttcttwacgaagtagggggacgcacatggsaaaggataataaaacagaaaaggccaccccgcagaagcgtaagaaatcgcgtgaagaagggaatattgcccggagtaaagatttaaataatttattttctattcttgtattagcagttgtcgtttacttttttggagattggctaggatttgagattgccaattctgtatcggtgctgtttgatcaaattggaaaaaatacagattcaaccgagtatttttatatgatggggattttactactaaaagtatcagctccgatattaatactcgtatacgcttttcatttattcaattatatgattcaagttggtttcttattttcttctaaagttattaagccgaaagcatcacgtattaacccaaaaaactattttacgagactgtttagtcgtaaaagtttagtagatattttgaaatcactgttttatatgggattaatcggttacgttgcttacgtgctatttaaaaagaatttagagaaaatcgtgagtatgattggatttaactggactgcgtcacttactgaaattattaggcaaattaaatttatcttcttagctattttaattatattaattgttctttctattattgatttcatttatcaaaagtgggagtacgaacaagatattaagatgaaaaaagaagaagtaaaacaagagcataaagataatgaaggggacccgcaagtaaaggggaaacgaaaaaactttatgcacgccatattgcaaggaacaattgcgaagaagatggatggtgcaacgtttattgtaaacaacccaactcatatttcggtcgtacttcggtacaataaacacgttgatgcagcaccaattgtcgttgcaaaaggggaagatgaactcgcattatatatacgaacgcttgcccgtgaacaagaaataccaatggtggaaaaccgtccgcttgctcgttctttatattatcaagtcgaggaagatgagacgattccagaagatttatacgtagctgtaattgaagttatgcgctatttaattcaaacgaacgaactt

SEQ ID NO: 10003 - DNA, 950 bp, Bacillus anthracis
atgaaaaaagcaaagggaatagctaaaagtgttgccgtagcgtccgttataatgtctggatcacttggtttacaagcaacatctgcatttgcagattctaaaggaactgtagaaaatcttcaaaatggtgggaaagtctataatagttttaaaactacttatgacatgaagcagaatatcaaaaattcaataaaggtttcttttattgaggatccttacgcagataaaaaattgcaattgttaccactgatggtagtaatatagatgcgaaatatacaattaatgggggatactataacgcaggtttaaaatggccatcggcgtatcatacggaagcagaaataactagtggcgatagcgctcaattccataaagctgccccagttaatacaatgacttcagcaaaggttacttctgaggtagggtatacacttggtgggagtgttaaagttggagtaaacgataaagggccaaatgccgatgcaagtattacaggtagctttgcttggaaagaaagtgtatcttatgatcaggtagactataaaacggtattagagactcacacagataaaaaattaaattggaaagtaggattccaatcgtttaatttcccagagtggggaatttataatcgtgattcattcaatactttctatggtaatcaactatttatgaaatcacgtagttataatgaaggaacgaataattttgtttcaaaagacacagtaccagctttaacaggatatggtttttctcctaatgtagtagcggttatcactgctgataaaacagaatctacatcagatttaaaaataacaaatcgtagaatttcagatcagtacaatattgaatgggtaagttcaaaatggtggggaacaaataataaggatacatataatgagttctttacaaacaactataaattagactggaaaaaccatcaagttact

SEQ ID NO: 10004 - DNA, 1320 bp, Bacillus anthracis
atggcaaaacaaaagcaaagagggacgaaggcaaaggcaagacgtacgataaagccaactttgtattatgaaatcgtcggtttaactctttttgcactttcaatcattacgattttacagctaggcgttgtagggaaactcgatttgtgttattttttcgcttcttctttggtgagtggtacataattggtgtgttaggtgtaatagctttatcagtttcattcgttataaaacgtggatggccgacccttttaaataaacggttaatcggtttttatttaatagtattggcgatattaatgtttagtcatattacattatttaaccttcttacgaaagatggagcagtgcaaaatacttctgttattgtgagtacgaaagataatttctttcttgaaatgaaaaaaggcccagatagcgttcatttaggtggtggcatgtttggtgcgcttatgtttgcgacatgttacttcttatttgacgaagtaggagcttatattattggtattattttagttattctcggtatactttgtataacaaataagcatattggagaagtgttagatccagttggtagaattcttagaagtcaatttcaagtgatgcaaggggactatgaggattggagagccaaaagaacggctgaacaaacagaaaagaaaaagacaacaagaagcacaaggagcaaacgtgctacagaacaagaggaaattattgagccgatggaagaaatttcaattgaccctccgattatttcaaatttcactgagaattatccagtaaatgaacaagaagataaacgaattgaagtagagcaagaagagttaatcacttcaccgtttattgaagaggctccaccagttgaagagccgaagaaaaagcgtggagaaaaaatcgttgaatcactagagggtgaaaacacaagcacctcctatgcaattttcaaatgtagaaaataaagattataagcttcctgcacttgatatattgaagtttccaaagaataagcaagttacaaatgaaaatgcggaaatttatgagaatgctcgtaaattagaacgcactttccaaagctttggagtgaaagcgaaagtaacaaaagtacatagaggtcctgcagttacaaaatatgaagtatatcctgatatgggagtaaaggtaagcaaaatcgtcggttctagtgacgatctagcgcttgctttagctgcaaaggacattcgtattgaagctccaattcccgggaaatcagctgtagggattgaagttccgaactcagaagtttctatggtaacgcttagagaagttcttgatcctttc

SEQ ID NO: 10005 - DNA, 1140 bp, Bacillus anthracis
aggataaaaattatattctggaaattaatggacgagggtatggatgtcaagatataaccttctgatcttagttatcccaatcgttaattaatacaaagaattggagttatttggtatgatgaaattatagaaaagatattagtgcgtatccatccaaaacccggaaattatcaaagaaatctttttggagggttattttggtaccataggaagtgcccttaaggttaattttggcaatatgtaaagataagggggaattttggttatatatttgtttcgcacacacatccattctttatacctgtagcagggatgtttgcgaaacgaaaaatgaaggcgaaattaattgtagatgtaagggatttatggccggagtccttaataggcataggtttttttaataaaaattggatactaaaatttgcttataaattagagtataaaatatatcatgctgccgataacattattattaatagtaaaggtttttattcttatatttcctctacaggtattgcccctaatcgcatttcatttatgcctaattctttaacggaaaaagaattatctactgttccaaagaagaacattagtgatcaattaacagtgatttatacagggaatataggattagcgcaagatatagaaaaattaattttgattgcagagcatttgaaagagtataagaatatttcatttaagaatattggatatggttatcaaaagaaagagcttggagagagtattgaagcaaagccactttcaaatatgcaattgacttcgcccaaaaatcgtgaagataccctcgttgcaattgttgatgcagatatagcatatgtgagtttagtagaaaaagatgtatttaaaaaggttctcccaaggaaagtaatggattatatgagtatgagaaaaccgattgttgcagatgttgctggttatgcaaaagaggttattgaagacgctcagtgtggttttgtcactgaagatagaacggttgctgaactaagcgattacattatcaagttagcacaggataagcagttacgaaatcgactaggggagaatggatatcaatatgcatttcgaacattacgctggaaaacaaatattgaaactttattgaaaatattggaggaaaga

SEQ ID NO: 10006 - DNA, 1716 bp, Bacillus anthracis
atgaaagtagaaacgcttcctgtcattaaaggagaaaataatttgccgaattatgatgaggcatacgcgaattttaactgggaagaggttaataaaaactttacttggaatgaagcaggccgagtaaatatggcgtatgaagcaattgataagcatgcgaaatccgatcgaaagaataaagtagccctttattatcaagatggatctcgaaaagagaagtatacatttaaggaaatgaaggatttttctaataaagcaggaaatgtcctgaaaaattatggcgatgtagaaaaaggcgatcgcgtttttatttttatgccgcgttccccagagttatatttcgcccttcttggtgcagtgaaattgggagcaattgttggtccgctatttgaagcatttatggaaggcgcagttcgcgatcgtttagaagatagcgaagcaaaagtgttaattacaacacctgaattgttagagcgtgtaccattaaatgatttacctgctttaaaaacagtcttccttgttggggatcatgtagaagaaggcggtaaaacggtagcgttcaatcctttatttgaacaagcttcaaaagaattacatattgaatggttaggccgtgaagacggtttgattctacattacacgtctggttctactggtaagccaaaaggtgtgcttcatgcgcaaaacgcaatggttcagcactatcaaacggcgaagtgggtattagatttaaaagaagacgatgtatattggtgcacagctgacccaggctgggtaacgggaactgcttacggtatttttgcaccgtggttagtcggggcatcaaatgttattttaggcggacgctttagtccagaagcgtggtatgaagcactgcaagattacggtgtaacagtttggtatagtgcaccaacagcgttccgtatgttaatgggtgctggacaagatgcaattaaaaaatacgatttatcacaagtgcgtcacgtattaagcgttggtgaaccgttaaatccagaagtaattcgctggggtatgaacgcctttggacttcgtattcatgatacgtggtggatgacagaaacaggtggacaagttatttgtaactacccttgtatggaaatccgtccaggttcaatgggtaagccaattccaggtgtaaaagcagcgattgttgataatgaaggaaatgaagtgccaccatacacaatgggtaacttagcaattggcaaaggttggccagctatgatgcgcggaatttggaataacaagcaaaagtatgagtcttacttcatgccaggcgattggtacgtatcaggtgactctgcatacatggacgaggatggatacttctggttccaagggcgtattgacgatgtaattatgacgtcaggtgagcgcgttggtccgtttgaagtggaaagcaaattaatcgagcatgctgctgttgcagaagctggtgtaattggtattcctgatccggtgcgcggcgaaattattaaagcatttatcgcgcttcgtgcagggtacgaaccatctgaagaattaaaagaagaaattcgtcaatttgtaaagaaaggtctagcagctcatgcagcgccaagacaaattgaatttagagataaattaccgaaaacgagaagcggtaaaattatgcgccgcgtattaaaagcgtgggagttaaacttaccaacaggtgacttatcaacgatggaagat

SEQ ID NO: 10007 - DNA, 765 bp, Bacillus anthracis
atgttgtttgatacacattcacatttgaatgcagagcaatttgaagaagacttgcaagaagttattgcccgaatgaaagaagcgggggttacttatacagttgttgttggttttgatgaagcaacgataaaaaaggcgattgaattagctgaagcctatgattttatttacgctgcggttggatggcatccagttgatgcaatcgacatgacagaagagcatttagcttggttagaagaacttgcttctcatcctaaggtcgttgcacttggagaaatgggcttagattatcactgggataagtcgccaaaagaaatacagaaagaagtattccgtaaacaaattacgttggcgaaaaaggtaaagttgccgattattatacataaccgcgatgcaacgcaagatattgttgatattctagaagaagagaatgcagctgaagtaggaggtattatgcattgctttagcggcagtgtagaagtagcagagcgatgtgttgatatgaactttttaatttcattaggtggaccagttacatttaaaaacgctaagaagccgaaagaagttgctacggagattccattagagaaattgttaatagagaccgattgtccgtatttaacaccacatccatttcgaggaaaacgaaatgaaccgagttatgtaaaactcgtagcagaagaaattgcgaacttaaaaggaatttcttatgaagaagtagcggaaataacaacaaaaaatgcaaaagctttatttggtgttgaa

SEQ ID NO: 10008 - DNA, 1209 bp, Bacillus anthracis
ttggtgaagactccaaaaatcgtagttttaggtgcaggttatggcgggatgattacgactgttcgtctgcaaaaagcattatctgtaaatgaagctgaaattacgttagtaaacaacaacagctatcactaccaagcgacttggttacatgagagcgcagctggtacattacaagatgaaaaaatctgtctagatattcaagacgttattgatacaaataaagtgaactttgtacaagacacagtagtagaaattaaagctgctgaaaaacgtattatcttaaaagatggcgagttagagtatgactacttagtaatcggtcttggtttcgaatcagaaacgttcggaattacaggactaaaagagcatgcattctcaatcgctaacattaatgcaactcgtcaaattcgtgagcatatggaagctagtttcgctaaatatgcaactgaaaagcgcgatgagttagtaacaatcgttgttggtggtgctggatttactggtatcgagtacgtaggtgagcttgcaaaccgtgttcctgaactttgcaaagagtacaatgtaccacgtgaaaaagcacgtatcatctgtgtagaagctgctccaacagcacttccaggtttcgatccagcgttagtggaatatgctgtaaaacaacttgagaaaaaaggtgtagaattccgcatcggtacagcaattaaagaagcaactgaagaaggcattatcgttgcaaacggtgatgatactgaattaattaagtctgaaacagtagtttgggctgcaggtgttcgtggtaatggtattgtggaagagtctggctttgaagcaatgcgcggacgtgtaaaagttgatgagtacatgcacgctccaggatacgaagatgtattcatggttggtgacgcagcgttaatcattaacgaagaaattaaccgtccatacccaccaacagcacaaatcgcaattcaacaaggttacaacattgcacacaacttaactgtgttagttcgtggtaaaggcgaaatgaagaaattcgtatttgataataaaggctctgtatgttctttaggtcatgacgatgcaatgggcgttgttatgggtaaaaagttaacaggttggaaagcttctttcatgaagaaagttatcgataaccgttacctattcttattaggtggacctttattagttcttaaaaaaggtaaattaaagttcttt

SEQ ID NO: 10009 - DNA, 796 bp, Bacillus anthracis
tttgaatgggtatattcagaagacttattagcacttggtgttcagccagtagggatggcagacattaagaattataataaatgggtaaatacaaaaacaaaaccgagtaaagatgttgtagatgtcgggacacgtcaacaaccaaacttagaagaaattagccgtttaaaaccagatttaattatcacagcttcattccgtggtaaagcaattaaaaatgaattagaacaaattgcaccaacagttatgtttgatccatcaacaagcaataacgatcactttgctgaaatgacagaaacatttaaacaaattgcaaaagcagttggaaaagaagaagaaggtaaaaaagtattagctgatatggataaagcattcgctgatgcaaaagcaaaaattgaaaaagcagacttaaaagataaaaacatcgcaatggcacaagcatttactgctaaaaatgtgccaacattccgtatcttaactgacaattctttagctttacaagttacaaaaaaattaggtttaacaaatacttttgaagcaggaaaatctgagcctgatggtttcaaacaaacaactgtggaatcattacaaagtgtacaagattcaaacttcatttacattgtagcggatgaagataacatttttgacacgcaactaaaagggcaccctgcttgggaagaattaaagtttaaaaaagaaaacaaaatgtataaatttaaaaggcgacacttggattttcggtggtcctgagtctgcaacatctttagcaacacaagtagcagatgtaatgacagcg

SEQ ID NO: 10010 - DNA, 611 bp, Bacillus anthracis
aatcaaaacgtccattttattaaaaatacattaacaaaagcttatatactcgttgggagactattcatattatgatgcgaagatgggagaaacattggaggatcgagtattacatcattaggaatttctgggagatcccccttattattggaaagttttgttgtattgcaagtggagttacctttattatgaacggagcgaatcatcggatggatgggttttcggcatatccatttaatatatttggaaatgtggggagaagagagtatacacctaatttgtctgatttaccttacaaaggcgatacagttataggaaatgacgtttggatcggtatggatgcaaccattatgcctggaataaaaataggggatggtgcaataatagcagctaaatctgttgtgacgagagacgtcgcacccatatacaattgttggcggaaaccctgcaaataaaataagggagagattttcaaatgcaataatagaaggaattattacaaattcaatgggtggcattttgatattgaaaaaataactgaaaatataggtgctattgtacaaggaaatatagagccattaagaaagctaaaaagggaataaaaaatgcat

SEQ ID NO: 10011 - DNA, 345 bp, Bacillus anthracis
gtgccaacagttcgattaaatacaacgagtacaaatcatattccgttacaagcaggagcacaaacaaaaaacgcatctgttactggtgcacagtcgacagctcaacaagcaaacggagtatcagcaagtactcaaaaaacacccggtattatggataaagatgatttcctgaaacttttcttagcaagctttcaacatcaagatccgtttaatgcgatggatatgaccgaaatgatgagccaacagcatcagctatcgtttatggagcacgtacagaatatgacgaaagcagtagataaactgcaatcatcgatgtattcgacggctcttgatggagggatgaag

SEQ ID NO: 10012 - DNA, 802 bp, Bacillus anthracis
tatttatttattgatccactttggtaaagaatgctgggaaactgaagccctttattattaaactatggcttgaatacgggaaatacttttctattcgtcatatcgtaacaggaaaagtggacggaacgaacgcttcctcacacaaatggaataaacctgctaatattcgatttgtgtgggaaaagacgacaagtttacacggtttttcatatgatgggaaggtacatatgcaagaggcatcatcaacaccatatttagtttcgatggcaattaaggcagcggagttgcagggtcgaaaagcaggttcgaagtttttgctaaaactccaagaatacattttttccttgaaaatgtatcaaatcccgactgcgaattattacttgcatgcgcaaaagatagcgatattgatgtagaagaatttaaaaaagacctatattccgctagcgcaaaaaaagctttccaatgtgacttgaaattcacaaatgagatgcatattaccgaaataccttctctcgtattttttcatgcgaattcagatgaagaaagtattaaaatcgctggaacttattcctatgatgtgtacgtacaattattaaaagaacttgttaaatgtgaaattgagccagaaccattaccatctttagaagtattactagaagcgacgcaatttatatcttctaaagaagtagcatttatatatgactgctcgaagcaagaaattgagcgtgaattaaaaaaattacaactgaaacgaaaaggtcaaatgattgacgtaaaatgtgagcgttattgggaaatggat

SEQ ID NO: 10013 - DNA, 1063 bp, Bacillus anthracis
ttaaaagagcttaagcaaaaaacgttaaagctttttgaaaaaaccaaaaaacctaaaaggcttaaacgacgtacgcgtagcgtatttaggaaaaaaaggcccaattacagaagtattacgcggcatgggaaaattatcagcagaagagcgtccacgtatgggagcatttagtaatgaagtacgtgaagcgattcaaacgcgtctagatgagcaaatcagtaactttagaaaaagcagtaaattgaagcgaaattagctactgaaacaattgatggtacatttgccagtcgtcctgttgaaacaaggttgttccccaaccgtttaaaaggctgtggtggaaccaattggaggagttattcatcggtagtgtttatgaaagtagcggaaggaaccgaagtgagaaaaagcttactcccatcttggaagcattaaactttccggaaagatcccccagcgccgtgatatgcaagatacatttttcatttcagaagaaacgttactacgtacacatacatcttctgtgcaagcacgtacgatggaaaaataataaaggaaaagggcccaattaaaattatttgtcctggtaaagtgtatccccgtgatgacgatgatgcgacgcattcacacccagttcatgcaaatttgaaggtcttgtaatcgataaaaacattcgcatgagtgacttaaaaggtacactgcaagtattcgtgaaaaagatgttccggtgaagatcgtgaaaatccgtcttcgtccaagtttcttcccattcacagagccatctgtagagacggatatttatggatgcatgtgtcccggcaaaggttgcggcacttgtaagggaactcggtaggattgatattataggcgcaggtagtgttcatcatgaatgtactcgaaatggctggttatgattcaaaagaatatcaaggtttcgcattcggctatgggcgcagagcgtatcgcaatgttgaaatacggcgtagatgacattcgtcatttctatacaaatgatgtacgtttcttacaacaattcaaacgagcgtaagggaaggagaggataagt

SEQ ID NO: 10014 - DNA, 1443 bp, Bacillus anthracis
aaaatggtacgggatttagcagagccagtatgaggggaatttactatacaagggggtgtctatttgatacgatcaactctcgaaaaaaggaaaccctatatgtcccgattcaagggtgaacgtttcgatggacatgcttttgtagataaaggctgttgaaaaatgaagctgtggcgacattatgggtgaaagaatgtagcaaatccacctgagaatctttccggttatttttgtagaagacacgctatcagcattacaaatgttagcgaaaaactatcgcgatcaattgggtgttaaaagtgattgggtgtgacagggtagtaacgggtaaaaccttctcaaaaggattttgtaacaggtctttctcgcacttaaattcaaaggtccaaaaaccggaaggaaacttcaaatatcatattcggggctacctctttctttttttaaccctagaaggaaaatccagaagtaggctgtatagaaaatgggatgttcaagccgccgagaaattggaatttcctatcttaggttagctcgtccaaatgcagctatcattacgaacattggttgaagccaatttaatggacttagggctctcgtgaggcatttgcggaagcgaaaattagaaattcgtgacaggatttccaagaagggtggagtgttcgtatataacggagacgagccattattaacgaatcgtgttcttgaaatgaatttaatagctgaaacagttacgtttggtgatgctagagcaaatgattatattccaacgactgtaacgttacaagcaactgggacgcattttaaaatgaatagagaagaaaacattttcattctatctacccgtaattaaggaaacacaaatgtgtataattacccttgccttctatggcaaattgccaaattacttttggtgtaacctggggaaaaaaatgaaaaaaagtttaattaacccctttcaaatgacggggcatgtccgtattgaaaatttgtaaaaaacagacaaggggaattaaccaatccctcaatggatggcctataatgcaagtccaacagctatggaagcggcattccaccctaatgaatggtttagatggattctctaaaaaaattgttgttctcggggatatgttataacttgtgagatccagaagtgcaggttttttttgaagtaggggaattaatttgttccaccaaaatactcccttgtgttcacatatggtaaattggggggttcaaattgggggggggggggaaaatttatttcccacaccaagcgggtaaagggttttagatttttaaggaagacttactaaaaagagtgccaggcagtggtggatacgaagggaggttccatcataaaaagcatctcgcggtataaaatgggaagaagtaattgggatgttgaaataattggtggtatataaataggggatgatagctacg

SEQ ID NO: 10015 - DNA, 1191 bp, Bacillus anthracis
atgtttcatcgtattgaagaagctctagaagatttaaaacaaggaaaagtcgttatcgtatgtgatgatgaaaaccgtgaaaacgaaggcgattttatcgctttagcagagtatattacgcccgaaacaattaactttatgattacacatggacgcggtctcgtttgtgtaccgattacggaaggatacgcagaacgtctacaattagaaccaatggtatctcataatacagattcgcatcatactgcatttacagtgagcattgaccatgtttctacaacaacaggcattagcgctcacgaacgtgcaactacaatacaacaattgttaaatcctgcatcaaaaggtgctgatttcaatcgacctggacatatctttccattaatcgcgaaagaaggcggtgtcctgcgtcgtgctggtcatacagaagctgctgtcgatttagcacagctttgcggagcagaaccagctggagtcatttgcgagattatcaatgaggacggtacgatggcacgcgtccctgatttactacagtgtgcaaaacaatttgatataaaaatgattacaatagaagatttaattgcttatcgccgccatcatgaaacacttgtgacgagagaagtggaaattacattacctacagatttcggtacttttcaagcaattggctattctaactcattagatacgaaagaacatattgcactcgtaaaaggtgatatttcaacaggtgagcctgtacttgtacgcgttcattcagagtgcttaacaggagatgtatttggctcgtgccgctgtgattgcggaccacaactccatgctgcacttgctcaaattgaacgtgaaggaaaaggcgttcttctttatatgagacaagaaggacgaggcattggccttcttaataagcttcgcgcttataagttacaagaagaaggcttcgatactgtagaagcaaacgaaaaacttgggtttcccgctgaccttcgtgattacggtatcggcgctcaaatattaaaagatttaggtttacaacatttacgattattaacgaataatccaagaaaaatcgctggcttacaaggttacgatttaaccgttacggagcgcgtaccgttgcaaatgccagcaaaagaagagaataaaacgtatttacaaacgaaagtaaacaaattaggacatttattaaactta

SEQ ID NO: 10016 - DNA, 1278 bp, Bacillus anthracis
gtggaatatgatatagatgatgagattttaaatgcaaaagcatcaaatcaaccacttacagtagcgcatgaacaaagtgaaccatcagctttttcgacatggtggaaaaagaataaaaaacggattttgattattggctcaactgtagttgttgtgataggtggttcaacgttattttatttctatacaacaaacgcgaaatatcaaaagtttatggaacaagcacgacaagcttatgataataaaaaatatacaaaagcagaagaggctgttggacatgcaattgctgtgaaggggaaagacgaggcatatctccaattagcaacgatttacgttgctgaaggaaaaaataaaattgcaatcgactatattacaaaactaataaaagatcgagaaatagataaagaaaataatgaagctgcttatttattagcttcagcaaatttccgcattggaaaatatcaagaagcagtgcaaaattttgaacaagcgttagcaaataatgcaaaaggaattgaaccatacaaaaaagatgcaatgcgagatttagctgtaagtcatatgaaaatgaaagaatttgaaaaggcagaagatgttattgtcaaaatgagcacgaaaacaaatgaggataaggcaattgtttcgtatttaaaaggtcaactttcaacagcaactgtacagttagaaaaagcagaatctttctttaaagaagctattatgcaagattcaaagaattcgatatatacaattgaactttcaaatttatatgtgctttggaataaaacaaacttaattgatagtgcgaagaaagaaatgaattatcaacaagcatctcacattttacaagtagcgattcaaaaagatatgaaaaatattgagttgttaaatcaattaggaattgtgtattacgaagcgggccaattttatgaaacgcgagatggcgcaaagagtactgctgcatatcagcaagcgttagaagcttacaatagagttgttagcagtggaacacgcgacataaatacacttgtaaatatagggattttatacgataaagtgggacaaggaaatgaagcagagaagcttttcacagaagcatactcacaaaacgatgaaaatccgcatgtgaattttgcatttgggatgtttaaaattaaacagaaaaaatacgaggaagcaagtcgcttcttaagaaaaacagtgcaggcaaatgaaaatgaatccgaagtaagagccgcccaagaaaaactaacagaaatgaaaacaaacggttggattcaa

SEQ ID NO: 10017 - DNA, 915 bp, Bacillus anthracis
aagggggatacgaaattggagaatgtattatgctgtgaccaaattaaatgtttctgtggtaaaacacaaacacaagtccgaaagttagttgcaggtccaggtgtttacatttgtgacgagtgtatcgaactttgtactgaaattgtacaagaggagcttgcgaaagacgaagaagtagaattcaaagatgtaccgaaaccggtagaaattcgtgaaattttagatgagtatgtcatcggacaagataacgcgaaaaaagcactagcggtagcggtatataaccattacaaacgcattaattctaacagcaaaattgatgatgtagaattagcgaagagtaatatcgcacttatcgggccaacaggtagtggtaaaacattactggcacaaacgttagcgcgtattttaaatgttccatttgcaatcgcggacgcaacatctttaactgaagctggatacgttggggaagatgtagaaaacatcttacttaaattaatccaagcagcggattatgatgtagaaaaagcggaaaaaggaatcatttatattgatgagattgataaagtggcacgtaagtccgaaaatccatcaattacacgtgatgtatctggtgaaggtgtgcagcaggcacttctgaaaattttagaaggtactgtagcaagcgttccacctcaaggtggtcgtaagcatccgcaccaagagtttattcaaattgatacaacgaatatcttattcatctgtggtggagcgtttgatggcatcgagccaattattaaacgccgtcttggtgaaaaggtaattggatttggttctgagaagaaaaatgctgatgtaaatgagaagcatgttttatctcacgtattaccagaagaccttttaagatttggtttaattccagagtttatcgaagagaga

SEQ ID NO: 10018 - DNA, 129 bp, Bacillus anthracis
atggataaaagaatttcaattgctatagatggtccagcagctgctggaaaaagtacagttgcgaaagttgtagcgaagaagctttcttacgtttatattgatacaggcgcaatgtttcgtacgattcat

SEQ ID NO: 10019 - DNA, 1297 bp, Bacillus anthracis
atggagaaaattgtttatgagcaattaaaagagacactctattatgaaaaacttcctaatggattagatgtatatattttaccgaagcaaggatttaataaaacatttgcaacgtctacgacaaaatatgggtctgtggataatacattcgtaccactaggtaaagaagaaatgattcgtgtacctgatgtgcattgctcattttcttgagcataaattatttgaaaaagaagatcatgacgctttccaattgtttagtaaacaaggggcttccgcgaatgctttcacgtctttcacaagaacagcttatcttttttcgtgtacatcacatgtagaacaaaatttaaatacattggtaaacttcgtacaagagccttacttttctgaaaaaacagtcgaaaaagagaaggggattatcggacaagaaattcaaatgtatcaagataatccagattggcgcttgtactttggattaattgatagtttgtttgtaaagcacccgattaaaattgatattgcagggacgatcgagtctattagtaaaattacgaaagacctactatatgaatgttatgaaacgttttatcatccaagcaatatgttaatgtttgttgtgggtgcaattgatccagagaaaacaatggatttagtacatgaaaatcaagcgaaaaaagattataaaaaccagccggaaaattgtacgttcatttgagaagaccccagatgaggtaaatgaaaagaagaaaatatttcccatgcctgtacaaactcagaaatgtttagttggtattaaagcgacaaacttaaaagaaaagggagaagccctttttaaaaccagaaattgcgcttacgttacttttagaataattatttgggaaaagctccgctcattacgaatctttatataatgaagggctcatcgatgatacgttctcgtatgattatacagaagagaataacttcggttttgcaatgggttgggggcgatacgaagcaacctgatgagctggaagagcgtttgaaaagtattttattaaacacaaattataatcaattagatgaggcggcattagaacgagtaaagaaaaagaaaataggtggctttttacgttccttgaattcaccggaatatattgcaaatcaatttacacgatatgcgtttaatgaatcgagtctgtttgatgcattgactgtattagaaagtctaacggttcaagatttacaagaagtagctcaattactattatcagaagagaaaatgagtgtttgccaagtttttacggaaaaaataaaaggg

SEQ ID NO: 10020 - DNA, 792 bp, Bacillus anthracis
atgagaatattatttgttggagatgtagtaggatctcctggtagaggtatgattcaacaatacgtaccggcactaaagaaaaaatatacacctacagtaaccattattaatggagaaaatgcagcaggtggacgtggaattacggaaaaaatataccgaaactttttagaatgcggagcacaagcggttacactaggaaatcacgcttgggataaccgtgaagtatttgaatttattgatgatgcaaaatatcttgcaagaccagctaacttcccagaaggaactctaggaaaagggcttatttttgtgaactgtaatggaacagaagttgcagttattaacttacaaggacgtacattccttcctccaattgattgtccattccgtaaagtggatgaattaattgacattgcgaaaaaacgtacgaatattatctttgttgatttccatgcggaaacgacaagtgaaaaacaagcgttaggttggtatgtagatggtcgtgctacagcggtagtaggtacacatacgcatgttcctacagcagataatcgcattttaccgagcggaacggcatatatcacagatgttggtatgacaggaccgtacgatggaattttaggtatggaccgagaagcagtattgaagaagtttttaacaaacttaccagtgcgatttgaagtgacaaatggtagaacacaattaagtgcagtgctaattgatgtggatcctaatacaggaaaagctaagaaaattgagcgtatcttaattaatgatgatcagccattttttgag

SEQ ID NO: 10021 - DNA, 642 bp, Bacillus anthracis
gtgaaacgatatcgacatttatacttgttaagttttacgctactcatttgttttgtcgtattatcactttcgtatcataccgcttgtattgagaaatttgacaatatagtcgcgcattttattcaaagttttcgaaacgactacttgacaacctattttacttggatgtcttttatcggttccaaaagaatatattttccattactcatcattcttgtaatgtattttctcgttagaaaaaaattgcttagtgcattacttctaacaattaattattatggatctcgttatttaaacagtatgcttaaactatggtacgaacgagcaagacctgatgtaacacaacttgttactgcaactggatatagttttccgagcggtcatacgatgaatgctactggtttttttaggattttttggatatcgtcccaattaccaaaagaacgtattacattgcccaacaaaattggcgggttatttttaaaaccgcagcttgggtggattcatctaatttcagttagccgaatatatcttggcgttcactatccatctgacatattagcaggatgggcagcgggcggtagctggctcgttttatgtgttatatttcataaaacgttcattaaaaaagaacctatgtca

SEQ ID NO: 10022 - DNA, 264 bp, Bacillus anthracis
gtgttctttgaagtattcaaaccatatgatcgttccttctatttagcagatacgttattaacgcagccgctgcaaattattgtcggtagcaagcaaggcgcattcggttcttataaagatggtcatgagctttatgagaaagcagcttcagagaagaaagatttacttgttgtggaaggtgcgagtcactacgatttatatgaccaaccagaaccagtaaaaattgcagttgaaaaattaacaagcttctataacgacaatctg

SEQ ID NO: 10023 - DNA, 828 bp, Bacillus anthracis
atggaaagtacgatcggtatcgatgctggaggaacattaacaaaaattgcttatttgaataaaaaaatgcaattagcttttgaaaaagtttattcaaatgaacaaaataaaataatagattggcttaagaaccaaactggtataaaacaaatatgtattactggtggtaaagcgaaacaattacaacaactactttcagcctcatataaaatagtggaactaaatgaatttgaagctactcttgtaggtgtccgttacatattaaaaaaagaaaaatatgatataaacaactttgttttaacaaatatcggtacaggtacttccattcattacatttataatgaccaatatattcgcgctggtggaaccggtgttggcggtggtactattatggggctttcaaaattgttaacaaatatagatcattttgaagatgtgattcctttaacaaaagtaggatctagaaaagaacttgatattacggttggagatatttatggtggtattctctctcctattgataatagtttaactgcaagcaattttggtaaagccgctattacagactcaaattataatagctcagatatacttgctactatacaaggacttgtcggtgaagtcgttactgcattaagccttcaattcgccgaaacaaaaaacattgaccatattatttatattggttcgactctatgtaataacatacatcttcaaaatattattagtagttacacaaaataccaaaataaaacacccatctttttacgagatggtggtaatagcggtgcgattggtgctttactttatgctacgaataaaaaaagc

SEQ ID NO: 10024 - DNA, 240 bp, Bacillus anthracis
gtgaatggaatggcagatgttttagagcgtgtaacaaaaattatcgttgatcgtttaggagtagaagaaacagaagtagtaccagctgcgagcttcaaggaagatttaggagcagactccctagatgtagtagaacttgtaatgcaattagaagacgaattcgaaatggaaatttctgatgaagatgctgaaaagattgctactgttggcgatgctgtgacttacatagagagtcatcta

SEQ ID NO: 10025 - DNA, 1356 bp, Bacillus anthracis
atggagaaacaatatttaaccgttacagcgttaacacgctatataaaaacaaaaatagaatatgatccgcatttacagtctgtttggttaaaaggtgaaatttccaactttaaaaatcatagccgtggccacatgtattttacattgaaagatgaaaatgcaagaatcgcagcggttatgtttgcggggcataatcgtaatattaaattcagacctgaaaatgggatgaaggtactcgtgaaggggaaaatctctgtttacgaggcgagtggttcttatcaaatttatattcaagacatgcaacctgacggaattggaaacctacatttagcttacgaacaattaaaggttcgtttagaggaagaaggattgttttctcaagtttataaaaaaacaatccctccttatgcgaaaacaataggtgtgattacgtcaccaacaggagcagcgattcgtgatattataacaacgattaaacgtcgttatccaattggaaatgttattgtgtttccagtacttgtacagggggagtcagcagctccctcaattgtacaagcgattcgtacagcgaatgaaatggaagaaatagatgtcctaatcgttgggcgtggtggaggttctattgaagaattgtgggcgtttaacgaagaaatggttgcaagagctattttcaagagtgaaatccctattatttcagcagtaggccatgaaacagactttacaattgcggattttgttgccgatttaagagcgccaacgccaactgcagcggctgagctggcagcgcctaatattatagagttacaagaaaaggtattacaaagaactttaagattgcaaagagcaatgagagagttagtacataaaaaagaagaaaaactacaagtattgcaaaaatcttatgcgttccgttatccaagacaagtatatgagcaaaaagaagagcaattggatagagcgttagaacagcttgttttagcgaaagagcgctatattgataaaaaggtaaatcagttaaaacagctttcattttatttagagaagcaccacccatctcaaaaaattatgcaaacgaaggtagcagttgaaacattacaaaagcaattgcaacgtgaaatgcaaacattactccaagcgaaagaatttgcctttgtaagagctgctcaaaaacttgaagcgctaagtccgcttaaagtaatgatgagagggtacgggcttgtatatgatgaagagaagcaagtgttaaaaagtgtgaaagatgtcagccttggagatgctgtttcagttcaattacaagatggaatactagattgtagcgtatcaggcatagaggagcgtgaattgaataatggaaaa

SEQ ID NO: 10026 - DNA, 1131 bp, Bacillus anthracis
atgcgtattggggtaccagcagaaattaaaaacaacgaaaaccgtgtggcaatgacaccagcaggtgttgtacatttaattcgtaacaatcacgaagtattcattcaaaagggtgcaggtttaggatctggtttcacagatgctcagtatgttgaagcaggagcgaaaattgttgatacagctgaagaagcttggaacatggaaatggttatgaaagttaaggaaccaattgaaagcgaatacaaacacttcagcgaaggtttgatcttattcacatacttacacttagctccagaaccagaattaacaaaagcattaatcgaaaagaaagttgtttctattgcatatgaaacagtacaattagaaaaccgttctctaccattacttgcacctatgagtgaagtagctggtcgtatggctgcacaaattggtgcacaattccttgagaaaaacaaaggcggtaaaggtatcttacttgcaggtgttccaggggttaaacgtggtaaagtaacaatcatcggtggtggacaagctggtacaaatgctgctaaaattgcagttggactaggtgcggatgtaacaatcatcgacttaagtgcagaacgtcttcgtcaattagatgatattttcggaaatcaagtaaaaactttaatgtctaatccttacaatattgcagaagctgtaaaagagtctgatcttgtaatcggtgcagtattaatcccaggtgcaaaagctccaaaacttgtaacagaagaaatgattaaatcaatggaaccaggttctgttgttgtagatatcgcgattgaccaaggtggtattttcgaaacaactgaccgtattacaactcatgataacccaacttacgaaaaacacggcgttgttcattatgcagttgcaaacatgccaggtgcggttccacgtacatcaactcttgcattaacaaacgtaacagtaccatatgcagtgcaaattgctaacaaaggctacaaagaagcttgcctaggcaactctgcattactaaaaggtattaacacattagatggctatgtaacattcgaagcagttgcagaagctcacggtgtagagtacaaaggtgctaaagaattattagaagcagaaacagtatcttgc

SEQ ID NO: 10027 - DNA, 1031 bp, Bacillus anthracis
atgaaagcaattggtttacatgaatatttacctattgaaaaagaaaacagtttaattgatatgggaaattgaaagacctgttgctacaggaagagatatactcgctaaaattaacgctatttccgttaatccagttgatacaaaagttcgctctcccgaagataaaaaagaagaagtagcgaaaatacttggcctggatgcaagtggtgttgttgtacaaaccggcgaaagttgtacgttattttaaagaaagcgatgaattgttttacgcttgaagcattacgaaacagggtacctatagtggaataccacctaattgatgaaaggattggtgggtaaaaaaccacaaaccgtaagtaatgctgaatcaccagccacttcggttaacagctattacagcttggggaagtttatttgaaacgttaggtattgattttatatagaaagatacgaactccctttaaaacattttaattatagggcgtgctggtggtgtaggttcaattgccattcaacttgcgaaatgggctggactaaatgttatcacaactgcatcccgcaatgaaacgatacactaggttgaaaaatttggtgccgattatattattaaccatcaccaacctttacaagatcaaatattagaattcgggataaaagatgtagattatattttttgcttaaacaatacagatcagcattggcaagcaatatgtgagctcattaaaccacaaggaaaaatttgctctatcgtagaaaatgaacaccctcttgaaatgggtattttaaaaagtaaaagtgctacattcgtttgggagtttatgttcacaaaagcgatgtatgaaactggcgatatgattacgcagcacgaattattaaataaagtaagtgaactattagatgaaggtattttaaagactacattaaatgaaacattcacaccaattaacgctcaaaatgtaaaaaaagcacatgctctgcttgaaagcggaagtacaattgggaaaatcgttttagaaaaagtttttaataca

SEQ ID NO: 10028 - DNA, 510 bp, Bacillus anthracis
atgaacgatattttaatcgttgacggttacaacattattggagcttggggagacttgaaaaaactacgggatgtagatttgcaatcatcaagagatgcactgattgataagatggcggattaccaaggttacacaggtacaaaggtaatgatagtttttgatgcttatacagtccacggtattgaaaaaaagatgaaacaatcgcgtgtggaagttatattcacgaggaagaatcaaactgcagatgaaaagatagagcaacttgcaattgagcttagaaatataaatacgcaaatatatgttgcgacttctgattatacggaacaatgggttatatttgctcaaggtgcgctccggaaatctgcacgggaattagagctggaagtacaagcgatggagcaacaagtaagaaggcgtacacaagacacaaaagaaaagcaacctgctatgcgaaagatatttagtaaagatattacagaaaagttagaaaaattaagaagaggagagcgt

SEQ ID NO: 10029 - DNA, 937 bp, Bacillus anthracis
gaagagttaaacatttatagctgggctgacaattttgatgagcaagtgctaagagattttgaaaagaaatataacgtgaaaattaactatgataagtatgcaagtaatgaagaaatgcttgcgaaattacaagctggtggcgcgaagtatgatttaattcagccgtctgactacatggttaaaacaatggcaaaaatggatttattagcgccgttagataaaaagaatatcccaaatatcgaaaacatggtttctaatttcaaaacacctgcgtttgatccagagaataaatattctttagtatacacttgggggtgtaaactgggattgcataacataaaaagtatgttgaaagaagcacctacaagttggactgacttatgggaatgagaaatataaggggcattgtactttatttaatgattctcgtgaagtattaggtatgggtcttaagaaaaaacggcttctcaaacagtacgaaagatgatgcacagttaaagacagcagcaactgatttacagaagctacttccaaacttattagcatttgatacagataatattaaaccaaagttcattacagaagatgcttggatcggaacaatttggtctggagatgcagcatttatcgcaaaagataataaggatgtagagtccgttgtaccaaagaaagggcggcacaatttggggctgataccgtagcaatttccaaaaggtgcgaaaaaataaagagcttgcagagaagtttatgaactacttattagatgaaaaagtcagtgtgaaaaactacgagtcaattggatacagtaatccaaaatgaaaaagcgcatcctcttcatagtaaagaatatcgtgaaaaccatatgattttcttaacgaaagaagaattagatcgtacagaatggcttgttgatgtagatgataagttaaaagattat

SEQ ID NO: 10030 - DNA, 798 bp, Bacillus anthracis
aagtttttttttaaagttcttccaaagtttgaaggagtcaggagttagttattttccgggatgcctaggaattggacagtaatttacgttcaggattctcgcttggggcttgcaaggtattcgtgaagtatcaatcggtcttgaagaatatagtccgtatttagatcgtgaactagaagaggtaaaatattttgatgcgggtgatatccccattaccatttggaaatgcacaacgcagcttagacatgattgaagaatatgtatcaaaacttttagatgccgggaaggttccactaagtctccggcggtgacaacctattgtcttgggccattttttaaggcaatggcaaaaaaatatccggattttagcatccatccatatggatgctcatacctgattacgtgaatccgaatgaaggggagcctttatcccactctacacctattcgtaaagtgtgtgatttaattggtccggaaaacgtatattctttcggaattcgttctggaatgaaggaagaatttgaatgggcgaaaagaagtaggtatgaacttatacaattttgacgtattagaaacgttaaaagaagtattaccgaaacttgagggacgcccagtctatgtcacaatcgacattgatgtattagacccagcttccgcttccaggaacaggaacgttaaaaagctggtgggatcccatctaaagaaatattagaatccatcgtagcaaatgcacattccaaatataaaggaggtggggggcgacttattaaaagtaccttctggtctcccaccatagtg

SEQ ID NO: 10031 - DNA, 804 bp, Bacillus anthracis
atgaatacgaaagaaattagcaaagtagtggatttggtgagagaatctaatccgctcgttcataatattacaaatgttgttgtaacaaattttacagctaacggtttattagcattaggggcatcgcctgtaatggcgtatgcaaaagaagaagtagcagaaatggctagcattgctggagcgttagtattaaatatggggacacttcgtcctgacgaggtagaagcgatgttacttgctggtaagtcggctaataggaatgatgtaccggtactgtttgatccggttggcgcaggggcaacttcgtatcgaacagaagttgcgagacatattccggctgaaatcgaattagcaattattcgcggaaatgcagctgaaatagcgaacgttattaatgaaaaatgggaaattaaaggggtagacgctggtgctggaaatggtaatgtcgtaagtattgcaaagcaggcagcagatgaactaaatacagttgcggtgattactggaaaagaagatgttgttacagatggagagcgaactattgttattcgaaatggtcactctattttaacgaaaattacgggaactggttgtttactaacttctgtaataggagcatttgtagcggtagaaaaggattatgtaaaggctgcagtagcggcattaacgttttatggtgtagccgcggaactagcagctgctaagacagtagaaaaaggacctggtagtttccaaattgaatttttaaatcagttagccaatacgacttcgggtgatatagaaaagtatgggaagattgaggttata

SEQ ID NO: 10032 - DNA, 1878 bp, Bacillus anthracis
atgcctagcttaatggagcaacaactagatacgaaagccgcttctctactgcgtgaagatttagaagcacaaggcatgaagtttctcatggaaaagaaaactgtaaaaattcttggtacaaaccatgttgagggcattcaatttgaagatggtgaagttgtagattgtgatttaatcgtaatggctgtcggaatccgaccaaatacgcaaatagcaagagatgctggtttaattgtcaatcgcggcattgtagtcaatgactatatgctaacaaatgatgagtccatttatgcagttggcgaatgtgcagaacatgacggtatcgcatatggacttgttgcccctctttatgaacaaggtgcaatattagcgaaacatatatcgaatttacaaactgatggatattcgggcagtatcgtcggtacgcaattaaaagttgctggttgtgatttattctctgcaggccaaatttatgaagatgatcaaacgaaagcaatatccatctttaatgaatgcaaacgttcctataaaaaagtattaattcgtgacaataaagtcgtcggtatcgttttatatggtgacacagctgatggtacacgcctctttagcatgttaaagaaagaagaagatatacaagaatatacaccagcgtccattcttcacaaagctggtgaagaaagtgaacttgatgttgctacaatgagtgcggatgacacgatttgtggatgtaatggtgttacgaaaggaacaatcgttcatgccattttagaacaagagttaacgacttttgaagaagttaaaggctgtacgaaagccgcagggtcttgtggtaaatgtcgtccgcttgtagaacaagttttatctcatacactcggagatgcttttgatgcctcagcccagtctgctggtatgtgcggatgtacacctttatcacgtgatgaagtcgtagcggcaattcatgaaaaaggcttaaaatcaccaaaagaagtacgaaatgttcttggttttgtacatgaagatggctgttcaaaatgtcgtcctgctttgaactactatttacgtatggcgattccagaagaatatgaagatgataaagcctcccgtttcgttaatgaaagaatgaatggtaacatccagcacgatggtacattctctgttattccacgtatgtacggaggcgttacaacagcagatgatttaatgaaaattgctgaagttgcgaaaaagtatgatgttccacttgtgaaaattaccggtgcaagtcgaattggcttatacggtgttaagaaacaagatttacctaacgtatgggctgacttaaatatgacttctggatatgcgtattcaaaatctcttcgtaatgtaaaatcatgtgttggctctcgtttctgccgtttcggtacgaaagattcattaggacttggtatgctccttgaacaatcattagaaatggtagatacacctcataaaatgaagatgggtgtaacgggctgtccgcgtaactgtgcggaagtacttacgaaagattttggcgttgtttgtgtcgaaaatggataccaactttatattggtggaaatggtggtacagaagtacgtgaagctgattttgtaatgattgtccctactgaagatgatgttcttcacatcgctacagcttacatgcaatattatcgtgaaactggtatttacggagagcgtactgcctactggacagaacgattagacttcgatcacataaaagaaatactgcaagatgcaaatatggtcactaagttaaatgaacgtttccaaacggcccgtggcacatataaagaagcttggggacaagcactagaaacgaaatcattaaaagcgatgtatgaagtagaaactgtgaaa

SEQ ID NO: 10033 - DNA, 1305 bp, Bacillus anthracis
atgattagtcgttatacacgcccagaaatgggtgcgatttggacggaagagaacaaatttaaagcgtggttagaagttgagattttagcttgtgaagcatgggctgagcttggcgatattcctaaagaagatgttaagaaaattcgtgagcatgcatcatttgatattgatcgtatttatgaaattgaaaaagagacacgtcatgacgtagttgcattcactcgtgctgtatcagaaacaccagcattaggtgaggaacgtaaatgggttcattacggtttaacatctacagacgtagtagatacagcgttatcttacatcttaaaacaagcgaatgaaatcatattaaaagacttagaaaacttcgtaagcattttagctaacaaagcgaaagagcataaatacacgattatgatgggaagaacacacggtgtccatgcagaaccaacaacatttggtctaaaacttggtctttggtatgaagaaatgaaacgtaacgtagagcgtttcaaacaagctgctaatacagttcgtgtgggtaaactatctggtgcggttggtacatatgcaaatattgatccattcgtagaaaaatatgtttgtgaaaatttaggattagaagcagcaccaatttcaacacaaacattgcaacgtgatcgccatgctcattacatgtcaacacttgcattaatcgcaacatctatcgaaaagatggcagttgagattcgtggtttacaaaagagtgaaacacgtgaagttgaagaagctttcgcaaaaggtcaaaaaggttcttctgcaatgccacataagcgtaatccaattggatctgaaaatatgactggtttagctcgtgttatccgcggttatatgatgacagcttatgagaatgttccattatggcatgagcgtgatatttctcactcttcagcagaacgcgtaattttaccagatgctacaatcgcgttaaattacatgctaaatcgctttggtaatatcgttaaaaacttaactgtatacccagagaatatgaaacgcaatatgacaagaacatacggcttaatttattctcagcgcgtaatgcttacattaatcgataaaggtatggtgcgtgaagaagcttacgatatcgtacaacctaaagcgatggaagcttgggaaacacaagtacaatttaaagagcttgtagaagctgatgagcgtattacgagcaagttaacacaagaagaaattaatgaatgctttaactatgagcatcatatgcaacacgttgatacaatctttgaacgcctaggattaaacgaagcg

SEQ ID NO: 10034 - DNA, 927 bp, Bacillus anthracis
ttggatttcaagcagctagaaaataaatttgaaaagaaaaaagtaaatacatttcttgtttatcaaaaaggggaattaacaactgagtattataaaacacccgaatgtgcaaataacttatataaaataaattcgattacaaaaagcattgtatctatattaataggtattgcaatcgataaaggatatataaatgatatacatacaccgattacagaatggattgaaaatgtatctgaggaaaagcaggatttgactctttatcatttattaacgatgactacaggagaagattggaaagagttcggaaatggagtagtgttcccaaatgattttgtagaatctgataactgggtgcagtacatattagaaaaaccaatgattgaagaaccggctacaaaaatgaattataactcaggctcttcgcatttacttagttacattatccaaaaagctactggaatgccgacagaacagtttgcgaaaaaatatgtatttgatccattagaaattaccgaatatgagtggcagcaagatccgcaaggaatacatgtcggcggcttcggaatgaaaatgaagtctaaagatttattaaagttaggaatattatgtttacaaaatgggtattggcaagagaatgaaatcatatcatcaaaatggttagaagaatcaagtacggctctatttgaaacgtatgaacatgtcggggcgtatggatatcactggtgggtattgaataacgaaagatttcacataccgtactgtatgtactttgctatgggatatggcggacaatatatcattatcattccgcagttagagctcgttgcagtaataagtagtcatatgccaaaacgtggacttgttccattaaaattatttattgaacatatacaagagaattgtaattttcaacaagggcacaaa

SEQ ID NO: 10035 - DNA, 303 bp, Bacillus anthracis
gtggatgccatggcaaaggaatatgcaaagaagttttataagtccacagcatggaagaagtgtagggattcatattttaaatttagatatggattatgtgagaggtgtaaggggacagggaagattgttcatcacaaggattacataacaccagagaatataaataacccagagattacattgagctttcataacttggaacttttatgtcaggattgccacaaccgtgaacatcatgagaagaatagtccagttgttgaaggagtaatgtttgatgagaatggggatttaatacaaaaagaa

SEQ ID NO: 10036 - DNA, 772 bp, Bacillus anthracis
atgttaaaagggaaagtagcattagtaacgtataataacacgtggaattggtcgtgcgattgtgattgatttagcgatacaaggggcaaaagtggtagtcaattatgctggtaatgagcaaaaggcaaatgaagtagttgatgaaataaagatattaggttcggatgccattgctagtacgagcagatgttgcaaatgctgaagacgttccaaatatggtgaaacaaactgtagatgtatttggaacaagttgactattcttagttggatgatgcgtggtgataacagaaagtataatctattaatgcgtatgaaagaagaagaatgggatacagttattaatacaaacttaaaaggtgtattcttatgtacgaaggcagtatctcgttttatgatgcgtcaacgccatgggcgaattgttaatatcgcctctgttgttggagtaacgggtaaatcaagacaagcaaactatgttgctgcttaaacaaggggtaaatgggattaacaaaaacatccggcaaaagagttagcgagccgcaatattactgtaaatgcaattgctcctggatttattgcgacggatatgacagacgtattagatgaaaatataaaagctgaaatgtaaaatttattccccgcagctcagttggggaaagcccaagatttcgcaaatggtggaaccttttttgctttcgaacaaagcaaatatattccaggtcaaacgttaaatgttgatggcgttagggtaatgtaaataaaagattcgatttca

SEQ ID NO: 10037 - DNA, 2738 bp, Bacillus anthracis
atgtcagataattatcgatctcgtacagaacgaaatccctgtaaaaaatcaaaagcaagaaacaaataaagaaaaaaaaccaaagaaaaaaggctccttttttaaaaaattccttataggttgtctacttcttggtatcgttggtcttgtagctggcgtttcccgctttcttggtatgggtgaaggacgctccaaaatttagccaaatcaaaaccttgtcatcccttatctaccaaaagtttcttgaataagaccgggaacttttttctatgaatacgggtgctaaaaagcgaccccccgttacgtatgatcaaatcccaaagttagttgaaaatgcattccttgcaactgaggactcacgtttctacgatcataatggaattgattttaaacgaactacaaaagcagttatggaaaatgtcactggaggtttcggatctcaaggtggtagtacgattacacaacaagtagtcaaaaactattttctaacgatggacaaaactgcaaagagaaaagtacaagaatggtacttatcttacaaattagagcaacaatactctaaaccatgagattttagaaatgtacttaaataagattaatttaggtacccgttcatatgggattgcgaccagcagcgcaaaaattttttggataaagattggaaagctctgcaaattacaggaagctgctatgctcgctggtttaccccaaggtccaaacatttacgatccaacgaaaaaggaaaatgttgaacgagcaacaaatcgtcgtaatgtcgtattgtcattaatgaatcgacatggttatataaccaaaggaggaaatgaatagcgcagttaagatcccagtaacagaggttcttcaaccgtcttcaagaaataagtggttatgaagtatcaagcatttctagatgcggttgtaaaagaagttgaaaaagaatatcctgatgtaaatattggttcagaatggtttaacgatttcatacgaacacttgatcaagatgctcaagattatggtgaaaaaaattaggggggccaattttataaggttcccaaacggacaatttccaagggtcatttggtttttatggatacaccaactggaggaaagccgacctactcgaagctggggcgtaaaggaagtaagtctactttcaaaaggtcataatatggccccccgatttaaaacgccaagtcggttcaacaatgaaaccaaatttttgactacgggcccagcaattgaaaaatttcaatggtctacataccatcaattaaatgactcagagtatacgtattccaatggttaaaaagttcggaaatccacaaaattgtttccaagggggacgtttccctacggaaagctttggaaaaagtcattaaacatcccagctttaaaaacagccccaaagcggttggtcttcctaagtcacaagcgtttgctgaaggtttaggtatgacatttaaagatggcaaaacatttgaatcaacagcaatttggtagtaacgatagtcccccattacaataggcgggtgcatatgcagccttttggtaatggtggggactacaataaaccgcactttcgtaaaagaaagtaccttcccagaatgggaaaaagaaaagttttaaaccgaaagaacaacgtgcgatgcaagactacacagcttacatggtgcactgacgttattcgtgatgtggtaaaacgtggttctggcggtactggtccaacagcatacgtttcaggtgttgatgttgccggtaaaccaagaaccacaaaactttggatgcagacgttataaaaagaatatggtcattccacgctgatgcaaaacagagatagctggttcgctggatatacagccgcaatatacaatggcagtatggactgggtacgaaaaaaatggctcagaaaactacattagtgatcgttatactagaatttgcacagcaaatgttccaagtaatgatgagcaaattcgctacagataaaactcgtttcgaacgcccttcttctgtacaagaaataaacggagagttatatgtaaaaggtgcgaagaaagatgccaattaaacaaattaaagtagatgcacctagtggtcttaatgtcactttcgatggcgctagcacagttacactaaactggtctggaccaacagaagttgatgcgtatgcagcaagctataaagcaactgacggttcaagtggtagtttatcagtaaaaggtacaacagctactcctggtgggatttaaaccaggcggtacttcagcttcctttgtattaccgaaaaaagtacttggaacaacccctgccagttggaacttccttcactgcggcttgggggaactccgaagcccaaaaaagccggggaagaagctaaaaagaaggctgaagaagaagctaagaaaaaagctgatgaggaagctcataaaaaggccaatgaagataaactaaaacaagaagaagctactaaaaaaagctgaaagaagaagctaggaaacaaccagaacaacaacgtaaacagcaagaagaagctcaaaagaaagctggaaaaggaagctagaaaaaaagctgaaaaagaaagctatgaaaaacgaagaaagaggctccaaaagaaagctgaagaagaaagctaaaaaaaaagctgtagaaagaagctaaaaaacaacaagagcatcagcagcaagaacaacaactaaataccggagggaatacccctccccgccgacggaaattttgtt

SEQ ID NO: 10038 - DNA, 2003 bp, Bacillus anthracis
atgaatcgtatcttcagaaaataccatcttttatttactgatattcctagtagtaattggaatcgtgagctattttaatggttcgacacaaaaaacgacatcagttagctacgataaattcattactaaactagaaaaaaggtgaagtgcgtaatgtgcactttcaacgggaaaaatggtgtgttggaagtaaaagggccatttaatacctctagccagggagaacaattctgttacttatgcaccaaatacttgaggaattacaaaagaaaattaatggataaagcgcaaggtgctgaagttaagtatcaaccagcagaagaaacaagtgcttgggtaaccttctttacttctatcatcccgtttgtcattatcttcattttattcttcttcttattaaaccaagctcaaggcggcggtagccgataccatgaactttgggaaaagtaaggcgaagttatataatgtcaacatcgaaaagagttcgtttcagagatgtttctcggagcggatgaagagaaacaagagcttgttgaggtagttgaattcttgaaagatcctcgcaagtttgctgaagttggtgcccgtattccgaagggtgttctattagtgggacctccaggtacaggtaaaactttactagctcacattcgatggaggttaggcaggcgttctcatactctctatcagtggttctgatttccgtagagatggtcgtcggtgtcggtgcatcacgtgtacgtggatttatttaaaaacgccaaaaaaaaggctccctggaaccatttcattgaagaaaattaatgcggaacgggggtcacctggcgcagggccttgggtgggggccatgatgaacggggacaaaaagttaaaaccataacttggtttaaaaggagggattcggtgcaaacgaaggtattattatcatcgctgcgacaaaccgtcctgatattcttgacccagcattattacgtccaggtcgttttgaccgtcaaattacagtagatcgtccagatgtaaatggccgtgaagctgtactgaaagtacatgctcgtaataaaccgcttgatgagaatattaacttaagagcaattgcaactcgtacaccgggattctctggtgccgatcttgaaaacttattaaacgaagctgctttagtagctgcgcgtcaagataagaagaaaattgatatgagtgacattgatgaggcgacggatcgtgttattgcaggtccagctaagaaaagtcgtgttatctctgaaaaagaacgtaatatcgttgctttccatgaagcgggccacactgtaattggtgttgttcttgatgaagctgatgtcgttcataaagtaacaatcgtccctcgtggtcaagctggtggttttgccgtatttgcttccgaaagaagatcgttacttcatgacaaaaccagagttacttgataaaatcactggtttacttggtggtcgagtagctgaagaaattgtatttggtgaagtgagtacaggtgctcataatgacttccaacgtgcgactggtattgcaagacgtatggttacggaatttggtatgagtgataagcttggaccaatgtcaatttggtagctcacaaggtggtcaagtgttcttaggaagattgtaaccattcagaaacaaaactatagtgatgcgattgccccacgaaatcgatatggaaatgcaaacgattatgaaagaatgtctccgctcgtgccaccccccacttcttctgcccatcgtgataaactagttcttatttgcgaaaacgttacttgaagtagaaacgttagatgcagagcaaatcaatcatttatgtgattatggcagatttgccagaacgtccaacatcttcagctgatgtggaaagtaaaccatcacatgaaagaaggacgatgaagaatcagaaagataagtaagagatgaaggagtgacgatagtcactccttttttatttgtagaagggaactaagtagaaaaagaatttaaat

SEQ ID NO: 10039 - DNA, 849 bp, Bacillus anthracis
atgggtgtacaaaaaattgttgtaattggtgcaggacaaatggggtcaggaattgcgcaagtatgtgcaatggcaggatatgacgtgaaggtacaagatttaaaacaagagcaattagatagaggattggctatcactacgaaaaacttagcgcgccaagtagaaaaaggacgcatgaaggaagaagagaaagaagccactttaaatcgtcttacagtaacgcttgatttagattgtgtgaaggaagcggatcttattattgaagcagctgttgagaaaatggatattaaaaagaaaatctttgcgaatctagatgaaattgctccagaacacgcaattttagcgacgaatacgtcatccctgccaattacagaaattgccgcagtaacgaagcgcccggaaaaagtaatcggtatgcactttatgaatcccgttccggttatgaaacttgttgaaatcattcgtggtttggctacagatgatgcggtatacgaaacaattgaagatattacgaagaagattgggaaagtaccagttgaagtgaatgattttccaggatttgtatcgaaccgtattttattaccgatgattaacgaagcgatctatacgttatatgaaggtgtagcgacgaaagaagcgattgatgaagtaatgaaacttggtatgaatcacccgatgggccctttaacgctcgctgattttatcggtttagatacatgtttatacattatggaagtgttgcatgaaggcttaggtgatagtaaatatcgtccatgtccattgctacgcaagtacgtaaatgcaggatggttaggtcgtaaaacaggtcgtggtttctacgtttacgaa

SEQ ID NO: 10040 - DNA, 966 bp, Bacillus anthracis
aaaccagcaattccttttccggggccagggtcacaagcagttggaatggggtaaacagttacccgagaaattataaagaagtttggcaatgttttttgcaaaaaccacaatgaaatgtttgccacaatcacttttcacagagaattttttaaaggggcgccggaaaaaactttccgttaacgaacaaatgcggcaacccggctttattaacaacgagttttgctattttgacagcttttaaagaggatgatattacacccagactttgttcccagggccatagattaagtgaggataacgctcttgtagcaacgggtgcattaaacttttgaagatgcagtatatgctgtaaggaaacgtggggaatatatggaagaagctgttcctggcggagaaggtgcaatgacgactatttagttgtctgatccgcatctgctgaagcgagtatcagacgaggtaacaggtgaagtggtatgcggtacagatctctaatatgaatagtacgaagcaaattgtaatttctggaacaaagcaaggggtcgagattgcttctcaaagagcgaaagaaaatggtgcaaagagagcgattccggtttaaagtaagtgggaaccgttccactctggcggttatgaagcccagcagcggagaaaattccaaagtgtctttaaatgaaattacaattcaagatacaaatattccggtaatcgcaaatgtaacagcagacgttattacaagtggtgcgcatattcaagaaaagctaatcgaacagctctactcgcctgtcttatggtacccatccattgaatatatggtgaatcaaggggtcgatacatttattggaattgggacctggaaaaagtacttgctggacttatgaagtcaattgattcatcagtgaaagcatacgcgatatacgatgaagagacattaaaagataccatttcaaatttgagaggagaaaactg

SEQ ID NO: 10041 - DNA, 1350 bp, Bacillus anthracis
agacaaaatgttcgtgaattagctcttgatggtttaattcaagtagaaaaaagtggtgcatacagtaacttacttttaaataatctaattgaaaaaagtacaattgatagaaaagatattggtttattaactgaaattgtatatggaacaatccaacgtcgtgacacattagattattatttacagccttttttaaaaaagaaagttgaagcatgggtaagagtattacttcgcttatctttatatcaaatgatttatttagaccgagtgcccgaaagagcggctattcatgaagcggttgagattgcaaagcgtcgcggacataaaggcattgctgggatggtaaacggtgtattacgttcgattcaaagagaaggtgtaccttctgtagatgaaatcaaagatccagtagaacgtttggcaattgcaacaagtcatccacgtttggcttgttcaagaagtggactgctgaatatggtttagaaactgctgagaaaatgtgtgaagtgaacatgttaccgcctgtaccaacagcgcgtgtaaatgttgataaaataacagtagaagaagcaattacattattggctagtgaaggtatagaagcgaagcgtggcgatttatcagatgatgcaattcaaattgaaaaaggaaatgtagcgcacactctcgacgattaaaaaaggttttctttctattcaagatgaaagttctatgctggtagcacgcgctctagaaccagatgagggagatgtaattcttgatagttgtgctgctccaggcggaaaaacaacgcatattgcagagcgattaaaaggaactggtcaagtcatgtcccttgatttacatgcacacaaagtacgcttaattaaacaacaagcagagcgacttggtctagaaaatgtcgaaactaaggcattagatgctagaaaagtgcaagaacactttgcaaatgaaacatttgataaaatattagtagatgccccatgttctggatttggtgtaattagacgtaagcctgatattaagttaggtaaagataagggcgatagtgaaagattatcgatgatccaatttgcaatactagaaaaaaatcgcaccgttattaaaacaagggtggtcgcctttgtttatagtacgtgcacaatggggaaataggaaattgaccaagtattggacggatttttccaagagcatccgaagttgagttggaatactacgataaagaagcgtatgccagaaaagctaagtccgtatatgaatgaaggtcagttacaaattttccgccattatttggcaccagatgcctttaatatggttggtttaaggaggaaggtgtagcttggtggaaag

SEQ ID NO: 10042 - DNA, 758 bp, Bacillus anthracis
atgagtaaaccgaaatataatcgtgtcgttttaaagctgagtgggagaagctttaactggcgagccaggatttgggattaaccccagctgttattaaatcagttgcgggaccagtgaaagaaattgcacaacttgatgtaaaagttgctgttgttgttggtgggccgtaacaattggccgtgggaaaattggaaatgaaatgggcatggatcgtgcaggagcagattacatgggcatgttagcgacagttatgaattcattagctcttcaagatagcttggagaatatcggaattcaaactcgcgtacaaacttcaattgagatgcgtcaagtggcagagccttacattcgtcgtaaagcagttcgtcacttagagaagaaacgtgttgttatctttgcagcaggtacaggtaatccatacttctctacagatacaacagcagcattacgtgcagcagaaattgaagcagacgtaattttaatggcgaaaaacaatgtagatggcgtatataatgcggatccatctattgacccaacagctacgaaatacgaaacgcttacttacttaagatgtaataaaaaagaaggttttaggttaaatggatttctccagcttctttctctatgtatgggataaatgatattcccattaattgtattctcagttatggaaaaaggtaaatattaaacgtgccgttttagttgaaaatatcggaacagttgtaagggggaaataaatatggaccaacaagtattaa

SEQ ID NO: 10043 - DNA, 2740 bp, Bacillus anthracis
atgtcaaacacggaaaagaatttaccaactaaatatgatcatatgtccgttgaagaaggcctttatcagtggtggctagaaggcaaatattttgaaagcacaggagacgagaagaaaccaccggataccatggtaatcccacctccgaacgtaactggtaagttccccttaggtcatgcctggggaatacactccttcagaatattttaactcctaccaaacggattgcagggtacgatgtattatgggcttcaggaatgggaccatgcgggtatcgcaacacaagcgatagtagaagggaacttctcgtgaagaaggtatttcacgttacgatcttggccgtgagaaattccttgaaaaaggcttgggaatggaaggaagaatacgcttctcatattcgtcaacaatgggggaaagttggtttaggactagactattctcgcgaacgcttcacattagacaaaggtttatctgatgcggttaataaagtattcgttcaattatacgaaaaaggcttaatttaccgcggtgaatatattatcaactgggatccagcaacacgcacagctctttctgatatcgaagtaattcataaagaagttcaaggtgcattctaccatatgaactatccgttaacagatggttctggacacattcgtcttgcaacaactcgtccagaaacgatgcttggtgatacagcagtagcggttcatccagaagacgatcgttacaaacatttaattgggaaaaaccagtttacccttcccaattggaggtcgggagatttccggattttggcggaagaggtacgagaaaaaaggctttgggaccaggtgtggtaaaaatttacaccgccacatggccccgaatgtctttgaagtaggtaacggtcacgacttcccaacgctttttagtaatgaccgaagatggatcgatgaacgaaaaaagctgtaaagtataccggcatggatcgtttcgaatgccgtaaagcgttagtaaaagacttacaagaagcgggcgtattagtagaaaatcgaggctcatatgcattcaataggtcataatgagcgtaatggtgcaagtgtgggacctttactttgtcaccacaatgggttcgtaaaaatggcttccacttgccgaaaaaagcaattgagctttcaccaaaaagaagaaagagaagtaacgttcgtacccgatcgttttgaaaacacatacttacgcctggatggaaaatatccaccgactgggtgtatttctcgtccattatggtgggggacaccgcattccagcttgggtaatcataaagaaaactggtgaaagtatacgtagggtacagaaagcaccagcagatatttggaaacgtgaattcaagataaccgacggtacttgatacatggttcagttcagcgttatggccattctcaacacttggttggccaaatgaagatgcagcagactttaaacgttactattcaacagatgcgttagtaactggttatgacattatcttcttctgggtatctcgtatgatttttccagggtttagagtttacaggcgagcgtccatttaaagatgtattaattcacgggttagttcgtgatgagcaggggacgtagatgagtaaatctctttggtacggtattgatccaatggacgttatcgagaagtacggtgcagatgcaatgcgtttgatcttatcaacaggaagtgcaccaggtcaagatttacgtttcagcatggagaaagtagaatctacttggaacttcattaataaaatttggaatgcatcacgtttcgtattaatgaatatggatgacatgaagtatgaagaaatcgatttaactggtgaaaaatcagttgcggataagtggattttaactcgtttaaatgaaacaatcgaaagcgtaacacgtaacatggataaatatgagttcggtgaaagctggtcgttcataatacactttcatttgggacgatttctgtgactggtacatgaaaatggcgaaacttcctctatacggtgaagacgaagcagctaagaaaacaactcgttctattttagcttacgtattagaccaaacaatgcgtctattacacccattcatgccattcgtaacagagaaaatttggcaacatttaccgcacgaaggcgaatctattacagtagcagcgtggccaacagttcgcgaagatttacaagatacagaagctgcggcagaaatgcaccttctagttgatatcattcgctctgttcgtaacatccgtgcagaagttaatacgccaatgagcaaaaaagttcaaatgcaaattaaagcaaaagatgaggctgtacttgctcaacttacgaaaaacagttcttacattgagcgtttctgtaacccaagtgaattaacaattcaaacggatttacaagcgccagaaaaagcgatgactgcaatcgtaacaggtgcagagttattcttaccgttagctgatcttatcaatcttgatgaagagagagcgcgtcttgagaaagagcttgagaagttcgataaagaagtagaacgtgtaccagaaggaaactttcaaacccaaggtttcgtagcgaaagctcctgcagcagttattgaaggagagcgtgcgaaagagcaagattacctagaaaaacgcgaagcagttcgccaacgtctagcggatcttgagaaataaaaatgttttttagagactcactatattggtgaagtctcttttctttgggta

SEQ ID NO: 10044 - DNA, 1017 bp, Bacillus anthracis
ttgaataatcgatattctcgccaagaattattttctccgattggggaggaaggccagcaaaagataagaaaaaagcatgtactcattatcggtgcaggcgcactaggtagtgcaaatgcagaaatgtttgtaagagcaggtgttggcacagtaacgattgttgatcgtgattatgtcgattggagtaatttacaaaggcagcaattgtatgtagagagtgatgtggaaaataatcttccgaaggctgtagcagcaaagaagcgtctagaagagattaatagtgaagtaagagtaaaagcgctcgttcaagatgtaacagctgaggaattagaagagcttgttacaaacgttaatgtaatgattgatgcaactgataatttcgaaacgcgtttcattgtgaatgatatagcacaaaaatattctattccatggatttacggagcatgtgtagggagttacggcctttcttacacaatccttcctagtaaaacgccatgtttatcttgtttattacaatcgattccgcttggcggggcgacatgtgatacagcggggattatatcgcctgctgtatctctcgtcgtttctcatcaagtaacggaagctcttaaactattagtggaagattacgaatcacttcgagatggacttgtatcgtttgatgtatggaagaatgaatattcatgtatgaatgtgcaaaagcttcgtaaacataattgcccttcgtgcggagagaatgcattatatccttatttaaacaaagaaaatacatcgaaaacagcagttttatgcgggagaaatacagttcaaattagaccaccttataaagaggaaatggattttgaacgatacaaagagctgctgaatgatcgtgtaaatgatttaaatgtaaatccatatttattatcattttctgtggaagaaaagagattagttgcttttaaagatggtcgcgtacttgtacatggaacgaaagatataagtgaagcaaaaacagtttatcatcgttattttgga

SEQ ID NO: 10045 - DNA, 357 bp, Bacillus anthracis
atgattgtagggattggaatcgatattattgaattgaatcgaattgaaaaaatgctagatggaaagcttaaatttatggaacgtattttaactgaaaatgaacgtaatgttgctaagggactgaagggaagccgccttacagagtttgtagctggaagatttgcagcgaaagaggcgtattcaaaagcggtaggaactggtattgggaaagaagtgagttttttagatattgaagtaagaaatgatgatagagggaagccgattcttattacgagtacagaacatattgttcatttatcgattagtcatagtaaggaatttgctgttgctcaagttgttttagaaagctcgtcaagc

SEQ ID NO: 10046 - DNA, 3514 bp, Bacillus anthracis
atgtcacttcgatttgtgattggtagagcgggaagtggaaaaagtacactttgtttacacgaagtgcaagaagaattaaaacagcgcccaagaggggaaacaatattatatcttgtgccagaacagatgacattccagacgcagcaggcgttaattggcagtgaggatgttagaggttctattcgggcacaagtttttagtttttcacgattagcgtggaaggtattgcaagaagttggcggagcgagtcgtcttcacattgatgaagcgggcgtacatatgttacttcgtaaaattgtagagtctcgtaaagatggattatcggtgttccaaaaagcagcggagcaaaacggtttctttgaacatcttggcagtatgattgcggaatttaaacgatataacgtaacgccatcaaacgtatatgaaatgtggcaacaattagatgcgcatagtagcagtgccgaacaaaagctactggcgaataaagtgtatgatttacaactattatatgatgattttgagcgtgccttaatcggaaagtatttagattcagaagactatctgcaattgctagtcgaaaagcttcctcaatctgaatatgtaaagggagctgaagtttatatagatggatttcactcattttcaccgcaagagttagaaattgtaagacagcttatgatttgcggagcgagagttacgatcacgttaacgatagatgaaaaaacgttagcgcagccagtaaatgaattagatttattttatgaaacgacattaacgtatgaaaaaataaaacaagtagcgcgtgaagagaaaatagaaattgaaaaaacgattccacttatggaacagccgcgttttcattctccggcattagcgcatttagaaatgcattacgaagcgcgtccaaatgaaaagtttcacggtgaagcaagtgtaacgattcatacagcagctaatttacgagcggaagtagaaggcgttgctcgtgaaattcgtagacttgtggctgaagaaaactatcgttaccgagatattgcggttcttcttcgtaacggggaaagttattacgatgtaatgcggacactatttacagattataatatcccgcacttcatcgatgaaaaacgcccgatgtcacatcatccgttagtagaatgcattcgttctgcactcgagattattagcgggaattggcgttatgatgcagtctttcgctgcgtgaaaacagagcttttatatccactagacgtaagaaaagaaacgatgcgcgaagagatggatgagtttgaaaactattgcttagcatacggtgtacaagggaagagatggacttctgaggatccgtggatgtatcgtcgctatcgttctcttgacgatacgaacgggatgatcacagacagtgaacgtgaaatggaagagaaaataaatcgattgcgtgacgttgtaagaacgccagttattcgtatgcaaaaaagactgaagcgcgcgggaacagttatgcaaatgtgcgaagctgtttacttatttttagaagagctggacgttccaaaaaaattagaagcattacgtattcgtgcagaagagaatggggatttcttatttgcgacagatcatgaacaagtatgggaagaagttatgagtcttcttgatacgttcgttgagatgcttggcgaagagaaaatgtcactttctatgttcacagacgttatgtcgacaggtcttgaggcgcttcaattcgcaaacattccgccgtcattagaccaagtgttgattgctaatattgatcgttcaagattatcaaatgtgaaagcaacatttgttattggcgtgaatgaaggtgtcattccagcagcaccgatggatgaaggtatgctttctgatgaggaaagagatgttttgagcgctgcaggtattgaactcgcaccaacgacgagacaaactttattagaagaacagttcgttatgtaccaaatggtaacgagagcaactgagaaattatatatttcatgcccgcttgcagatgaggaagggaagacgttacttgcgtctagctttattaagaaaataaaaagaatgttccctgatgtgaaagatacatttattacgaatgacgtaaatgatttatcacgtttggaacaaatttcatacgtagcaacgccggaagtaacactgtcatatgttatgcagcaactgcaaacgtggaagcgatatggatttgaagggaatttagacttttggtgggatgtatataatttctacgtaacttcggatgaatggaagcaaaaaagtagccgtgtattatcaagtttattctaccgaaatcgtgcgcaaaagctaagtacagctgtaagtagagatttatacggagacaaaataaaaggaagcgtttctcgtatggaactatttaatcgttgtgcgtacgctcatttcgcacagcacggtttatcgttaagagagcgtgatatttttaaacttgatgcgccagatatcggggagcttttccatgcagcgctgaagagaattgcagacaggctattacgtgaaaatcgtacttgggcagatttatcaataaaagagtgtgagcatctttctgctgtagtaatagaagaaatcgcaccgttattacaaagacaaattttattaagttcaaaccgtcatttctatttaaaacaaaaactacaacaaatcattttccgtacgtcaatcattcttcgtgaacatgcgaagtctagcggtttcgtaccagttgatttagaagttccattcggtatgggcggtacaggatcacttccgccgatggaattctcgttacctaatggtgtaaagatggaagtagttggccgtattgaccgcgttgataaggcagaagatgaaaacggaacattcctccgtattattgactataaatcgagctcaaaggcgttagacttaacagaagtgtattacgggttggcacttcaaatgttaacgtatttagatgttgttacttcaaatgcacagacgtggatgaaaaaaggcggtacagcatcaccagctggtgtattatatttccacattcataacccaattgttgaggtgaaaggtgacgcatctgaagcagaaattgaaaaggaaattttaaagaaattcaaaatgaaaggtctcgtactaggagatgctgacgttgttcgtttaatggataacaaactttcaacaggaagttcagatattatttctgctggtctgaaaaaagacggtagttttagtgcgcgttcaagtattgccagtgaacaagagtttaacgtcctgcaaaaatacgtacaccatacgtttgaaaatatcggaaaagacattacagagggtgttattgatattgctccatacaaaaaggggaataaagcagcgtgtacgttctgtaacttcaaatcagtttgtcagttcgatgaatcacttgaagataaccagttccgtacgctaaaagatatgaaagatagcgaagcgatggagaaaattagagaggaggttggcggagaat

SEQ ID NO: 10047 - DNA, 898 bp, Bacillus anthracis
aaggatatcgcaacgccaaatcgtacgaaagacattgttgaaaagtatggattttcattcaaaaaaagtttaggacaaaattttttaattgatacgaatgtattaaatcgtatcgttgatcacgctgaaattggttcagaaagtggtgcaattggaaattggaccaggtatcggtgcattaacagaacaattagcgaagcgtgccaaaaaagtagtggcttttgaaattgatcaaaggctattaccaattttagatgagacgttagctccatatggaaacgttacagttattcataaagatgtactaaaggcagatgtacatgagggtgtttagtgagcaatttgaagaaggacaagatgtaatggtagtagctaacttgccatactatattacaacgcgcaatcttatttaaattgctggaaaagaaattaccggttcgtggattcgttggtatgatgcaaaaagaggttgggggatcgtttagcgggctaacccttgaacgaaagaagaccggtccttaatccattgcctattccggattaatacgaaaggtagaaacagttatgactgtaccgcgtacagtgtttgtgccacaaccaaatggtgattctgcaattatttcgcctcctaaagcgtccgaaaccagtagtagaagtaacagatgagacattcttctttgaagtagtacgagcaagttttgcacaacgccgtaaaactttaatgaataatttatcaaataatttaaatgggttccccgaaagaaaaagagctgttggatcgaatttttacaccaagtaggaattgattcaaaacgaagaagggaaacgctatctattgaaaaagtttgcgacattaaagtatggctttatttcttcctatagtatcctaaagaatacc

SEQ ID NO: 10048 - DNA, 930 bp, Bacillus anthracis
atgtttaatcacgtaacagtgcttttgaaggaaacagtagatggcttagatataaagccagatggtacatatgtagattgtacactggggggaggaggacatagttcttatttattatcccaattaactgaaggcggaagattaatcgcgtttgatcaagatgagatagcaattcaaaatgcgaaagaaaaattctcttcatacggtgagcagttcataacagtaaaaagtaatttccgttacctatctgaaaaactacaggaattaggtataacagaagtagacggtattttatttgatttaggtgtttcatccccgcaattagatacaccagagcgcggctttagttaccatcatgatgcaccgttagatatgcgaatggatcaagatgccccattaacagcctatgatgttgtaaatagctggtcatatgaacaacttgtaagaattttcttccagtatggcgaagagaaattttcaaaacaaatagcaagaaaaattgaagcgtatcgtgaaaataaagctattgaaacgacaggggaattagtagaactaattaaagagggtattccagctcctgctcgtagaacgggtggacatcctgcgaagcgagtgttccaggcaatccgtattgcggtaaatgatgaattgaaagtgtttgaagaagcgttggaatctgcaattgagatggtcaagccaggcggaagagttagtgttataacattccattctttagaagaccgtatttgcaaaacgacgtttaaacgaaatagtacaacgccgcaattgccgccaggattaccaattattcctgatgaatttaagccgaagttaaagcttattacaagaaaaccgattttaccttctgatatagagttagaagaaaataatcgagcgcgttctgcgaaattgagaatcgctgaaaaacga

SEQ ID NO: 10049 - DNA, 1114 bp, Bacillus anthracis
gtgcgtgtattagtaagtggtgggggcactggaggtcatatttatccggctcttgctttaataagagaaataaaaaaattaaatccggaagcaaggtttttatatattggtacggaaaatggattagagagtacaatcgttccaaaagcaggtataccgtttcaatctattgttataagtggatttaagcgtaaaatatcgttagataaacgtgaaaacgggtgatgcgtttcctaaaaggtgtacaagacagtaagcgatatattcgtcgtttcaatccagatattgtaattggaacgggtggatatgtatgtggacctgttgtatatgctgcggcaaaattaggtattccaacgattgtacatgaacaaaatagtgtacctggtgtaacgaataaatttttaagccgctatgttgataaagttgcagtttgttttgaagcggctgcagaacattttccacagtcaaaattggtcctgacaaggaaatccccgagccgccacaattaattgaaccaaaaatggaaatgaaagggaaaccggtccgatagggttattcccctttcctaaaaaatccgtgcttatttttggtggaagcggatggggctagaccaattaacgatgctttcgtagaggcgatgacccagtttgaaaataaaagttacgaaatattgtatgtaccaggtgaagttcattatgacaaagtgatggaagcagtgaagcaaaaagggaatccgaataatgttattattaaacctttcattcataatatgccagaagtacttacaggtgtagatcttgttgtttcaagagctggggcaacaacacttgcagaattaacagcgttaggtaagccgagtgtgttaattccgagtccgtatgtaacaaataaccatcaggaaaaaaatgcacgttctgttgtcgataaaggagcagcaaaaatgttgcttgaaaaagatttaacagctgaaacacttattcgtgatattgatgagattttattagatgcacaaacattacaaaatatgaagcttgctgctgggcaattaggtattccagatgcagcaaataagctgtatgaagtcatgaataagcttgtaaaaaaataacgttag

SEQ ID NO: 10050 - DNA, 529 bp, Bacillus anthracis
tcaaatgaaaaaatggaaaaagcagttgctgcttattctcgtgaattagcaacagttcgtgctggccgtgcaagcgcgtctgtattagataaagtacaagttgattactatggtgcaccaaccaccagttgtgcaattagcgaacattacagttccagaagcacgtttacttgtatttcaaccttatgataaaacttctatcggtgatatcgaaaaagcaattttaaaagcagatttaggcttaaacccttctaatgacggaactgtaattcgtattgcattccctgcattaacagaagagcgtcgtcgtgatcttgtaaaagttgtgaaaaaatatgctgaagaagcaaaagttgctgttcgtaacgtacgtcgtgacggtaacgacgatcttaaaaagcttgaaaaagctggcgagattacagaagatgatttaagaggatatactgaagatatccaaaaagaaacagataaatatattgcaaaagttgacgaaatcgcaaaaaacaaagaaaaagaaatcatggga

SEQ ID NO: 10051 - DNA, 885 bp, Bacillus anthracis
atgacaaatgtaacagggacagaacgtgtaaaacgtggaatggcagaaatgcaaaaaggcggcgttattatggacgtaattaacgctgaacaagcaaaaattgcagaagaggcaggcgcagttgccattatggcattagagcgcgtaccagcagatattcgtgcagcaggtggcgtttctcgtatggcagatccaacaatcgttgaagaagttatgggtgctgtgtcaattccggttatggcaaaatgccgtatcggtcaccttgtagaagcacgtgtattagaatcattaggggtagactatatcgatgagagtgaagtattaactcctgccgatgaagtataccatttaaataaacgtgattacactgttccatttgtatgtggttgccgtgatatcggagaagctgcacgtcgtattgcagaaggtgcatctatgcttcgtacaaaaggtgaaccaggaacagggaacattgtagaggcagttcgtcatatgcgtcaagtcaatgcagaaatccgtcaagttgcaagtctacgtgaagatgagttaatgacatatgcaaaaaatactggtgctccttatgaagtactacttgaaattaaacgtcttggtcgtttgccggttgtaaactttgcagcaggtggtgtagcaacaccagcagatgcagcgttaatgatgcaattaggtgcggatggtgtatttgttggatctggtatctttaaatcagagaacccagcgaaatttgcacgtgcaatcgttgaagcaacaactcattatgaagattacgaactaattgcaagcctttcaaaaggattaggtaatgcgatgaagggtatcgaaatttcaacgttattaccagaacaacgcatgcaagagcgtggatgg

SEQ ID NO: 10052 - DNA, 412 bp, Bacillus anthracis; identical to SEQ ID NO: 9411

SEQ ID NO: 10053 - DNA, 231 bp, Bacillus anthracis
atggtgtgtttcctcgcccatcaaataaacgggaaattatatacaacagtctatgctcacatgaaagatcgcactgtacaagctggtgatcaagtacaagctggacaattagtaggtcatatgggaaacacaggtcattcatacgggcaacatcttcattttgaattgcacaatggagaatggaattttgaaaagacaaatgcagtaaacccactgccatatttagttagg

SEQ ID NO: 10054 - DNA, 1932 bp, Bacillus anthracis
gtgaagcttgatgaattctttgtcacaggtgacccgattatttacggtgcagacgcttctatcgttcttgtgacattagcaatcattttcgtactaacaaagtataaaaaatggaaatggctttgggacgaatggttaacaactgttgaccataaaaagattggggccatgtatattatctctgcggttattatgttattccgtggtggtatggacggtttaatgatccgtgcacagttaacattcccagaaacaacttatttaaacgctgaacactataacggaatcttcacaacacacggtacagttatgattcttttcatggcgatgccattcgttatgggattaatgaaccttgtagtaccattacaaattggtgctcgtgacgttgcatatccgttcttaaatgctttaagtttctggttattctttgtcggagcaatgttattcaacatcgctttcgtaatcggtggttctccagacgctgggtggacttcttacttcccaatggcaggtacagagtttacttctggtgtaggaaataactactacgcaattgcattacagatttcaggtctcggtacgttaatgacaggtattaacttccttgttactatcttaaaaatgcgtacacctggtatgactttaatgagaatgccaatgtttacttggtcaatcttaattacaacaattatcattattttcgctttcccagtattaacagttgctcttgcattaatgacatttgaccgtctattcgatgctcacttctttacgatggcgagcggcggtatgccaatgttatgggccaacctattctgggtatggggtcaccctgaagtatatatcgttattttaccggcattcggtattttctctgaaatcattagtacattctcacgtaagcgtctattcggttacagtgcgatggtatactcaatggttgcaatttctttactaagtttcgtcgtatggcttcaccacttcttcacgatgggtgcaggtccagcggttaactcattcttctcgatttcgacaatggcgatttcgattccaaccggtgttaagatctttaactggttgtttacactgtataaaggacgtattcgttttacagttccaatgctttggtcattggcatttattccaaacttcgtagtcggtggagttacaggggttatgcttggaatggcagcagctgattatcagtaccataacagctacttcctaattgctcacttccactacgtattaatcgcaggtacagtattcgctatgcttgctggattcacattctggtatccaaaaatgactggtcatatgttaaatgaacgcctaggtaaatggacattctggatctttatgagcggattcaacatctgtttcttcccaatgtacttcttaggtttagacggtatgactcgtcgtatgtacacttactctgaaagtcttggatggggatggctaaaccaaatcgcatctgttggtgcggtaatgatgggtatcggcttcctacttctttgctacaacgtaatttggagtgctcgtcacggtgaacgtgacacaactggagatccatgggacggccgtacacttgaatgggcaactcaatctcctgtacaacattacaacttcgcgaaacttcctgaaatcaaagaagctgatgctttctggtacatgaagaaacgtggagaaacagttacaccagcagcagaagacatcaaaccaattcacatgccaagtaactctggtgtgcctattattgcgtctggattcttcggtcttgcaggtttcgcattagtatttagctggttctggcttgcagcaatcggcggcattggtattttagcttgcttaatctatcgttcattcgattacgatgaaggttactatattagtgttgatgaaattaaaaaatcagaacatgtagca

SEQ ID NO: 10055 - DNA, 1671 bp, Bacillus anthracis
atgagaagtgacatgattaaaaaaggttttgataaagcgccgcatcgtagtttattaaaagcaactggtttgaaagatgaagactttgataaaccgtttatagcgatctgtaattcttttattgaaattattccaggtcataagcacttaaatgagtttgggaagcttgttaaagaagcagtacgtgcagcaggtatggttccatttgaatttaatacaattggagtagatgacggtattgcgatggggcatatcggtatgcgctattcgcttccgagtcgagaaattattgcagattcagtagaaacggttgtaaatgcccattggtttgatggcatgatttgcattccaaactgtgacaaaatcacacccggtatgatgatggctgcacttcgtattaacattccaactgtttttgtttcaggtggtccgatggcggctggaaaaacatctaaaggagacgttgttgatttaagttctgttttcgaaggagtaggggcttatcaatctgggaaaatttcagaagaagaattaaaggatattgaagatcatggctgtccatcttgtggttcttgttctggtatgtttacagcgaactctatgaactgtttatgtgaagtgttaggtttagctcttcctggtaacggaagtattttggctattgatccaagacgcgaagaattaattaaacaagcagcagaaaaattaaagattttaattgaaagagatattaaaccgagagacattgtaacggaagaagcaattgatgatgcgttcgcgcttgatatggcaatgggcggttcaacaaatacagtgttgcatacattggcgctcgcgcaagaggctggattagattacgatatgaaccgtattgatgccgtttcaagacgtgtaccacatttatgtaaagtaagccctgcttccaattggcatatggaagacattgatcgtgcaggcgggattagtgcaattttgaaagagatgagccgaaaagaaggggtacttcatttagaccgtattactgctacggggcaaacattaagagaaaatattgctcatgcagagattaaagataaggaagtgattcattctcttgaaaatcctcatagtgaagaaggtggattacgtatattaaaaggaaaccttgcgaaagacggagcagttattaaaagcggggcaactgaagtaaaacgatttgaaggaccttgtgttatttttaattcacaagatgaggcgcttgccggcattatgcttgggaaggttaagaaaggagatgtagttgttattcgttatgaaggaccaagaggcggtcctggtatgccggaaatgttagcaccaacgtcagcgattgctggcatgggattaggtgcagatgttgcgttattaaccgatggtcgtttctctggtgcttcacgtggtatttcagtaggtcatatttcgccagaagcagctgcgggcggaacgattgcacttcttgaacaaggggatatcgtttgtatcgatgttgaggaaaggttgttagaagtaagagttagtgacgaagaattaggtaagcgtaaaaaagaatggaaacgaccagaaccgaaagtgaaaacgggctggcttggacgttatgcacaaatggtaacatcggcgaatacaggtgcagtcctaaaaatcccgaattttgat

SEQ ID NO: 10056 - DNA, 1632 bp, Bacillus anthracis
ttgaaacacataaaactttacgataaacaattacagttaaaagcatatctcgaaaacgcatttaaaataaagtacagcccgccactcaatgaactttggacggcgggtttttcattaccttttaccgatcctaagcgagaggaaattgaaacgtttgattatgtggaaatatttgataacggtaaacgtatcggattgttccgtattatggatagcgaggaagaaagggaagtaagtcaaaaaataataacttatgactgtgagcatgttttatctactttaatggatagcgtgctttttggttatcacgaaagaattaatttaacgacaagggagaatattgagtatctcttaagcaaacaaagaataaagcattggaaacttggtcaatgtgattttgtaaaatattttcaatatagttgggaaaatgaagatacgatattaggaccgatatatagtattgcaaaaccgtttgatgagaaattccaatggacatgggacgatacttcctatccttggactttaaatctcgtgaaatattccgatgaaattacaggtgagcttcgatatagaaagaacatgaaaggcattaagcgaaaggtagaagctaaggatgtcatgactagaatttatccactaggttatggtgaaggtgttaatcaacttaatatcaaaagtgtgaacaatggtcttccttatatagatgctcctgattttgtcagagagttacaggatgggtttgattatatttgggtggatagacgatttgaggacccaaaaacgctttatgcttcagcaaaagcgatgttattaaaagcgtgtatgccaaaagttacatatgaaattgatgcaattgattatgaattgattgacccatacaaaatagaaaaatatgaaacaggcaagttagtacgtctatatgatgaggattttaatatatctgttgatttacgagtaatggaccgttcaaaagatgatgttactggtaatccacttgatgtaaagcttgtattagaaaataaagtcactgatattgggacaatacaagcagatattgaaaagcgacagaaagtaaacgaagtgtattctcaaggaacaactaatattgatagtcaacctttccaagataattgcgacccagatcatccagccatcataaggtttcaaatacctaacgatgttaagaatgtgaatcaactgatactgacatttgagacattacggtttagagcatatgagcgggctattaaaggcggcggagctgtcgttgcttcaacttctgccggtggtgcgaatgtatcttcaacaagttccggtggtggtacggttggttcgacgtcatcaggcggaagttctgtgcaagcaagtagttccggtggtggtacggttaaagcttcaagtagtggaggagatcatgttcataaaatgtttcatggtggcggaattgttcctgctgaaccatcaacaataggattatatacagctttttctgatccaggaagaaatacatcagcttcattttacgcaaaaggaacgggatctagtttctacacatatggttctagtgggaatcacactcatgatatatcaatacctaaccatactcacagtattaatataaatcataaaata

SEQ ID NO: 10057 - DNA, 1434 bp, Bacillus anthracis
atgatgcagccattaacgatggaaagaatgctccatattattaatgtggggctcgttaaaacgaagaatccaaagcagattattattgttggtgcaggaatttcaggattagttgcagcatcgttattgaaagaagcagggcataaagtaacaattttagaagcgaataatcgaataggcggaagaatatatacgatccgtgaaccgtttagcagaggtttatattttaatgcaggaccaatgcgaattcctgatacacacaagttaactttagcttacattcgtaaattcaaattaccgttaaatctttttataaataaaaccgcttcagatattatttatacgaataatattaaaaagagattaagcatattcgaaaaaaacccaagtatacttggatatcctattttagagagggaaaaaggtaaaacggcagaagagttaatgttagaggtattagaaccgattctaaattatattaagaaagatcctaataagaattggagtattgttgagaaaaagtataaagcatattcgctcggcacatttttaactgaatattattcagacggtgcaatagatatgatcggtgtacttcttgatatggaagcgtatatgggaatgtctttaattgaagtattacgagaaatggtcttctttacttcaacgacgaaatattatgagataacgggcgggatggatgcattaccaaaagcatttttatcgcagttaaatgagaatatatttatgcggtataaggttgaaaaaattatacaagaaaatagcaaagtgatgatacaagtaaaccatgaacaaactattgagagatttatggttacaggtgatgttgcaattgttacgatcccattttcagctttacgttttgttgaaattcagccttacaatctattctcttattataaaagacgagcaattcgtgaattaaattatattgctgcaacgaaaattgcgatagagtttaaaagtagattttgggagaaagcgggacagtatggcggtaaatctattaccgatttacctatacggtttacatattatccgagttatggkattcatacaccaggggcagctaccgttttagcaagttatacgtgggcagatgaggcgttaacatgggatagtttaccggatagagaacgcattcgttacgcattaaaaaatttagcagaaatatacggtgagatcgtctatagtgagtttgtcactggaacatcttttagctggagtaaaaatccgtattcttgcggtgcatttacagctttcgaaccaggccaagagctcgagttatttccgtatattacatcaccatctggaaaagtacattttgcaggagagcatacgacattaacacatggatggatgcaaggagcaatagagtstggaattygagttgctcatgaagtaaacgaaaag

SEQ ID NO: 10058 - DNA, 788 bp, Bacillus anthracis
atgctagaacaaggattggattatgttgtcaaactggctaaaagcaaaaaacaaatactagatgcaaacccgatgcaatatttcattcgtgcagcacttgcgggtatttatatcggttttattattgttctatgctttaaattaggtaacttttttcacattgcagattcaccagcaacttatttagctgcttctatgttttttcggaattgctctcgtacttattatatatggtggggctgaaattgtttactgggaaacaacatgtacttccctggtaccacactttttgaaaagaaaacaccatattctgatacacttctctaactggggttggtttgtttatgcaaggaaactttacggggggctttatatctttgccttactattttactataactggcattttcgaagcaatcgatcacggtcatttaatgaataaagtcgttgagggaaaaatgaatacacctacgatgcaattattctttaaagcaattttatgtaactggcttgtatgtcttgcctgcttcttaccttcccaagttagaggggatactgcaagcataatgatcatgatgctactcgttttcacatttttcttatctggttacgaccatagcatcgcaaacctttactagatttagtctatctttaagtatcgccgcatccctgagacaatttcttttgcaggtgctattcatactaattttccagttacaatcggtaacatattgggtgggtcagtatttgtcggtatggtataccactacttaacaaagaaagtacct

SEQ ID NO: 10059 - DNA, 1953 bp, Bacillus anthracis
gtgagaggaagagctatgacaaaggtgcatcagcgattaatttctattttagaggagtttttagaagagaaatcgatgttaaatcgagcttttttagcgagccgtttacatgtatcaacgaagacgattcaaaaagatataaaattattaaatgatatattggaagaaaacggagcgaaaattgaatcgcaaagagggactggatacgagctagaaattatacaaacgaagaagtttgaagagttttgtgtgagtctatttcaaaaacagacggaaaaaatcccaacttcttatgaagaaaggatagcgtacattctgcaacgtattttaaccaccgagggatatgtgaagctttcacagttagcagaggagatttatgtaagtaaatcgactgtaaatttaattatgaaagatgttacagatatatgtgggcgctatcaattacaaattgaaaagagaccgtattatggtatacgtattgtgggagaggagtttcatattcgttcttgtttatcacaatatggtttaccgcgttatgaccatactccgtttcatgagcaatttgagcagagtgatacatatgtatcgttacctcatataccgcttatccgttcggttatattaaagtatatcgagggagggacgatatatttatcagatatagaaattgataatttagtcattcatattgcaattgcattaaagcgttgtgaagatcagcattatatgaaaggactaaatgaggaacaagctgaacttataataaagaaagaatatgcaattgcgaaacagattgtaggggatttagagaaagagttgcatctttcatttccagaagaagaagttttatatgtgacaatgcatttattaagtactgctgtcacatcgaaagatcgttatgaaaatgtggaagaactattagggaaagatttatatgcattcatgcaacatattctttttaaagtagcggaagaacggaatcttgttttttattatgatgaagaattattatttggatttggtgttcatttaaaaacgttattaaaccgtttgaagtataagttaaatacgagaaaccctcttttggcagaagtgaaaaagaattatccgtatgcttttgaaattgcggttctcgttggggatataattggtgaatatacaggtgagtcgattccggaaagtgaaattggttatattgccattcacttcggcggagcaatgagccgtttacaggaacaaaatcaaaagaagagatgtttattagtttgtgcgactggtcaaggaagcgcccagctattgaaatataaaattttatcacagttccgagataaattagaaattgtagggattacaggttactatcaattgaaagtggaagatctgtataaagaaaagatagattgtattattagtacgattcatataccaagtggtttacctgtacctattataaaagtaaactcaatatttgatgataaagagattaagtcaattggtcagcagttgtttacgcacgtgaataatagtgtacagcaatatatgaaggaagatttaatctttttaaatcatagtgcttctacgaaggaagaggttatccaatttttatgtgagaaagctgctgagaaaaactatgtgccagaacacttttatgactctgttatggaaagagagaatacatctcctacagcggttggaaatttagttgcaattccacatccgatgcagttattaagtgcggaaacatttttgatgttttgtacacttgaaaaagctgttgattggggagataagaaagtacaagttattattttatttagtgtaaagcgcaataataatgaggatttacaacgtctttatgattttttatatgatattatgtctagtcaaagtacgatagagaaattaacgcatgctgaaggtattgaagatttccaagaggtattactatctata

SEQ ID NO: 10060 - DNA, 666 bp, Bacillus anthracis
atgtaaaaatatatttctttcattagaccaaggaacaactagctcacgcgcaattcttttcaataaaaaaggtgaaattgttcattcagctcaaaaagaatttacacaacattttccaaagccaggctggggtagagcataacgcgcaagaaatttggggatctattttagcggttatcgcaacttgcttaagtgaagcagatgtaaagccagaacaaatcgctggtatcggtattacgaaccaacgtgaaacagcgggtgtatggggataaacgactggtaaacccatttataacgcaattgtaatggcaatctcgccaaacagctgaaatttgtgatgaattaaaagaaaaaggttatagcgaaatggttcgcgaaaaaacaagtcttttaattgacgcatacttctctggtacgaaagtaaaatggattttagataacggtgaaagtgccagagaaaagcagaaaacggcgatctattattcggaaccattgatacgtggcttgtatgggaaatatcttgtggtaaagcgcacgtaaccgattactcaatggctcacgtacattaatggttaacactcccgacataaggtgggatgatgaacttctagacatgtaaacatacaaagagcctgcttccagagtacgttcatcatctgaagggaa

SEQ ID NO: 10061 - DNA, 1632 bp, Bacillus anthracis
atggcaaaagatattaaatttagtgaagaagcacgtcgttcgatgcttcgcggtgtcgacactcttgcaaatgcagtaaaagtaacgcttggaccaaaaggtcgtaacgttgttcttgagaaaaaattcggttcaccacttattacaaatgacggtgtaacaatcgcaaaagaaattgaattagaagatgcattcgaaaacatgggtgcgaaattagtagcagaagttgctagcaaaacaaatgatgtagctggtgacggaacaacaactgcaactgtattagcacaagctatgattcgtgaaggtcttaaaaacgtaacagctggtgcgaacccaatgggtcttcgtaaaggtatcgaaaaagctgtagttgctgcagtagaagaattaaaaacgatttctaaaccaatcgaaggtaaatcttctatcgcacaagtagctgctatttctgctgctgacgaagaagtaggtcaattaatcgctgaagcaatggagcgcgttggtaacgacggcgttattactttagaagaatctaaaggtttcacaacagaattagacgtagtagaaggtatgcaatttgatcgtggatatgcatctccttacatgattactgattctgacaaaatggaagcagttcttgataacccatacatcttaatcactgacaaaaagatttctaacattcaagaaatcttaccagtattagagcaagtggtacaacaaggtaaaccgcttcttatcattgctgaagatgtagaaggcgaagcattagctacattagtagtgaacaaacttcgtggtacattcaatgtagtagctgttaaagctcctggatttggtgaccgtcgtaaagcaatgctagaagatatcgcaatcttaactggtggcgaagtaatcactgaagaattaggccgtgacttaaaatctgctacagttgaatctttaggacgcgctggtaaagttgttgtaacgaaagaaaacacaactgtagttgaaggtgtaggaagcacagaacaaatcgaagctcgcatcggtcaaatccgtgcgcaattagaagaaacaacttctgaattcgatcgtgaaaaattacaagagcgtcttgcaaaacttgtaggtggcgtagcagtaattaaagtaggtgcagcaactgaaactgagttgaaagagcgcaaacttcgcattgaagatgcacttaactcaactcgtgcagcagtagaagaaggtatcgttgcaggtggtggtacttcacttatgaacgtatacacaaaagtagcttctatcgtagctgaaggtgacgaagcaacaggtatcaacatcgtacttcgtgcactagaagagccagttcgtcaaatcgcaatcaacgctggtctagaaggatctgtagttgtagagcgtctaaaaggcgaaaaagtaggcgttggtttcaacgcagctactggcgaatgggttaacatgcttgaaactggtatcgtagatccagccaaagtaactcgctctgcacttcaaaacgcagcatctgttgcagctatgttcttaacaactgaagctgtagtagctgacaagccagaaccaaatgcaccagcaatgcctgacatgggcggcatgggcatgggcggtatgggcggaatgatg

SEQ ID NO: 10062 - DNA, 1448 bp, Bacillus anthracis
tggttttaaaaaggaatctcattactattggcgtgtatgctttttatgtcagcgactttaactgaaaaaaatacgacatcgggggatattaccttttgcaaatgatgcgaaagaaacactaactaattatgctattaacgttaagtatgatgaagagaaatatattgtaagtggtattccggcagagggcgttaaggtgaagttagaaggtccaaaagcagcagttgctacagcaaaggcgaaaaaacaatttgatatacccagttgatttgatcacattctaaaaaagggaacttatgaagtttctttgaaaacgaccggacttccagatgatgtgaaaggaacagtttcaccatcaacaaattaaagtactccttcatgaaaaagcgaaaaaaaattgttcatggaagatttgaaattatcccaatgggggctcgaatgccaaccgggggctatttctccaaaaaatcaagccttaaaccggatactgttcaggtagttgggacgaaagaagaaattgaaagtatttcatctgccaaagcgtatgttgatttaaaaggtgttaataaaactgttacaaaaacgcccgaagttacattatacaataaagaagggaaaacgtttaaatgtaagaacgagtccatctaaaattagtgtaacgttgaatgtggcgacgcaagctacggccaataatactgaaaaaactgttcctatagcatatacgaaaaaggggagtttaccggaaggattggccgttacaaatattagcgttgagccgagagaagtaacgatagcaggtccaaaagatatattagaatatatacaatcgatagagggggtcgaagtagatcttagtcaattgacagagtctacaacattcgatacctctgttttattaccaaagggtgtaaccagtgcgaaaacaaatcaagtgaaggtttcagtaagcgtaccgaaaaccaaaccaacgaaaacaagaacgattgatggttatatcattccaaaaaatggactttcaaaagaaacgtaccgcccagttactttcgcccccaagatgggaagataagccgttgatatttccggagaaaacagtttagtaaaataaataattagctaatccaaatacagccgtggataaatcctacaaaatgtggtctcctgggacgaagggatgttgccattcaagtgagtggccctagtaatatttcaatagagccaaaacaaaaaagtgctaaagtcacaattgtgaagaaagaaaatcccgataaaaaagttacagggtaatggtgaccaccccaaattcaaataataatcaagataatcaagataatcaaactgaaaaaccaaaaaatcctgaaccagaacctaatcctgatcctgatccggaaaaggagaaggaaccggaacaaaataaagataaagaaactagccaagagccaacagtagat

SEQ ID NO: 10063 - DNA, 992 bp, Bacillus anthracis
ttgaaaatcgaaaagccgaaaatcgaaacggttgaactttaacgagatgcgtaatatgggtaaattcgtaattgaaacgcttgagcgtggatatggtactacgctgggtaactccttacgtcgtattcttttatcttcactccctggtgtccgctgttactgctatccaaatcgatggcgtattacatgaattttcaacagttgagggcgtagtagaagacgttacaacgatcatcttaaacttgaaaaagttagctcttaaaatctactctgaagaagagaagacgttggaaattgatgtgcagggcgaaggtattgtcacagctgctgatattactcacgatagtgatgtagaaatcttaaatccagatttacacattgcaacgttagcaaaagatggcgcatttccgcgtgcgtttaactggcaaagcgtgggcctggggtatacgccacctgatgccaataaaagcgaagatctacccattaggaggaattcccattggattcatttatacctcccggatcacgggggacttaccaagggggaaaaaacacctggtcggacaaaggggctaattttgaaaaacctacccctttttgttttggccggattggaaccatcccggcccaaaaaaagctttctccttttggggcgccaaatctttaccggggattttaaaaatctttgttggtttaactgatgaagcacaaaatgctgagattatggtcgagaaggaagaagatcaaaaagagaaagttcttgagatgactatcgaagaactagaacctttctgttcggtctttataattgcctaaaacgtgcaggaaataatactgtaccagaagcttgcgacaaaacagaagaagatatgatgaaaagtcgtaacttaggacgtaatcccttagagaaagttaaacctaactttgaggaattaggttaaggtttacgtaaagacgactgaggatttaaacccactccacaaggggaggga

SEQ ID NO: 10064 - DNA, 531 bp, Bacillus anthracis
atggaaaaaagttggtatgttgtccatacttattctggatatgaaaataaagtaaaagcaaacctagagaaacgtgtagaatcaatgggtatgcaagataaaattttccgtgttgttgtcccagaagaagtagaagtagaaatgaaaaacggtaaagaaaaattaatgaaaagaaaagtgttcccaggttatgtattagtagaattaatcatgactgatgactcttggtatgttgtacgtaacacgccgggtgtaactgggttcgttggctcttctggttctggatctaaaccatcacctctattagaagaggaagttgttaccattatgaaacatatgggaatggacaacgaagtggttgatttcgactttgaacttcatgagacagtacgtgtaaatgagggaccattcgcagattatacaggtgctatcgaagaaattgatgtggagaagaagaaggttagcgtacttgtggacatgtttggtcgcgagactccagttgaacttgacttccatcaaattgaaaaatta

SEQ ID NO: 10065 - DNA, 1374 bp, Bacillus anthracis
atggctaaaaagaaaacaaaattcacatgtcaagagtgtggttatcagtcaccaaaatatatggggaaatgtcctggatgtggtcaatggaatacgcttgttgaagagatggaaccggttgtatcatcaagacgccttaattatgccaatgcaattcaaacagaagtaacaaaaccaaggcgcctaacagaagtggaaacaaagtctgaggcgcgtattgaaacaaaattccaagaatttaaccgtgtacttggtggtgggattgtagatggatccttagtacttattggtggagaccccgggattggaaaatcaacgttactattacaaatatcatcgcaattagcggattcttcatatgatgtactatatatatcgggtgaggaatcagcaaaacagattaaactgcgtgccgatcgtctacatgtaaatggtagtaatctatttgttgtatcagagacggatttacagcgaattgcaacacacattgaagagatgaacccagcctttgttgttattgactctattcaaacaatacatttacctgaggtaacatcagcgccggggagtgtggcacaagttcgtgaatgtacagcggaattaatgaaacttgcaaaaacgaaaggaatccctatttttatcgttggacatgtgacaaaagagggagcaattgcaggacctcgtatgttagaacatatggtcgatgcagttctttattttgaaggagaccgtcatcatacataccgtattttgcgagcagtaaagaatcgctttggttctacgaatgaaatgggtatttttgaaatgaaagaacttggtcttgcagaagtattaaacccttctgagattttccttgaggaaagaccagtgggggttgcgggatcaacagtggttgcttcaatggaaggaacaagaccagttttagtagaaatacaagcattaatctctcctactagttttggaaaccctcgaagaatggcaacgggaattgatcataaccgtgtatcgcttattatggcggtgttagaaaaaagaacaggcttattattgcaaaatcaggacgcatatttaaaagtagcaggtggtttgaagttagatgaaccagctattgatttagctgtcgctttaagtatagcttcaagtttcagagataaatctacagcaccaaccgatgcagtaataggagaagtaggattaactggagaaataagaagagtatcaagaattgaacaacgtgtacaagaagcagctaaattaggatttcaacgtgctattattcctagaaaaaatttgggaggatggacaattccggatgggattgaggtagtcggtgtatctaatttaggagaagcgcttcgtttgacattaggaggc

SEQ ID NO: 10066 - DNA, 1743 bp, Bacillus anthracis
atgatcgattatgtatggctcataccgcttttcccgcttgtttcgtttttgttattaattatattcgggaagaaaattagagaaggaagcagtgtacttagtattttctcgtcttttctctcctttaataggggcggtacttgtattaatagaaagacttttcgacagtaccagtgaaagcataaagtggggatggcttataactgggagatattgatatatccgtttggctttgaagtgacagcattaggggctttaatgttgtttatcgttacacttgtgagtttacttgtacatgtgtattcgaaaggttatatgaaaagtgaggaaaagattaccaaccttttatgcctatttagggctctttacatttgcgatgctcgggctcgttatatcaccaaatttattacagctttatatattttgggagttagttggccttggctcatttttactcatcggtttttatttctttaaagaagaagcgagggctgccgcgaagaaggcttttattatgacacgtattggagatatcggtttatttattgggatgatcttaattttctggcatgcaggtagttttgaatatgacgcaatatttagggcgattcatacgggtgatcttacccctacgatgattacaataacggcgatattaatttttatcggggcgatgtcttcaatcaggtcagttcccccttcatacgtggttaccggatgcgatggaagggccgacgcctgtttcggcactcattcatgcggcgacgatggtcgcagctggcgtatatttagtggcaacgatgtttccgctattttcagcaagtgcggtggcgatgcaaacggtggcaatcgttggagctttcaccgcgatctttgcggcttccatcggtctggtgcaaccggatataaaggggagtgcttgcttatatctacagttagtcagcttgggtatatgatgcttgcattaggatctgccggttatgtagctggtgtggttccatttaacgacacacgccctttttttaagcgttgctattttttggcggcaggaagtgtcattcatgccgtgcatacgcaaaacattaattaaaatgggcggccttacagaagaaagatgaaagtaactgctgcgctatttttaatcggtaccccctgcaataagtggtgtgccgctcctttccggtttctttagtaaagatgaaattttggcggcgacttggatgaacggcaattacgttttattcatattagcagtaattgcagcattcctaacagcgttctacatggtccgcttatacttttcttcgtctttacggggggaagcgaagacgaaagtagatgtgcatgaatcgcctcgcatcatgacatatccgatgattgtcccttggcgtcctggcagtcggggcaggttatataaatacacccgtgtttggaaacttttctccgaaggttggcttcggaaagatgtagcattttaaagtgcaagaagcacaccggcccagtttggggatatgatggttgcgacgctcgtttcttttggctgggattgctcttgcatatttcatatatggcaagaaatctattgctagagattgggctggtggcgaggaagcacctctttataaaatttttgcagaaaaatattatgtggatgaactatacaatatgacagtcattcctatcacgaaaggaatcgctcatgtgctttcactttattttgaaagtgtatgtagtcgaaaggga

SEQ ID NO: 10067 - DNA, 756 bp, Bacillus anthracis
tcttctcaagaacagcggaaacaaaagaaagatcgagatgaaatcatgaaaaaagccatattaaaagcacttcgatttagaaccagaaagaacagggctcgtgaaataaagatgtcattggcgagtcagtttcaagttgtctacaatttaaagagtatccgtagaagcatgaagaaatacgagattgtctgtccggttcgcaaagcgaatccttataaaaaaatgctgaaagctacaaaagaacatcgaaagataccgaatcaattaaatcgggaatttaaacaaaatacgccagggaaaccacttcttacagatatcacctatttagtttacggtaaaattcaaaaggcttatttatctacaattttagatggccaatcaatgaaattttagcttactatgttttagaacagatgatgacattagaacgacacctcttcttaaactaaaaaggaaccagaggattctattgactcaaggtggctggattcattcaaatcaaggagcccactactcaagccctacctattaaaagctagtcaaaaagctaaatctcgggcaatccatgtcaagagaaggaaaccgttgggataaggtcctacaagaatcgtttttggtcatctgaaagatgaagcgcatataaaaccttgtgcatccttttttgagttgaaatcaagagattaagaaatatatgacatactataatcactatagatattaatgaaattaaaaaagatgactcctgttgaatacaga

SEQ ID NO: 10068 - DNA, 657 bp, Bacillus anthracis
atgtcaaacaaacttgaaacaggtattcaatatatgcaagaaggaaactgggaagaagctgctaaaaatttcacagaagcaattgaagaaaatccgaaagatgcgcttggatatattaattttgcaaacttattagatgtattaggtgacagtgagagagcaattttattttataaacgtgcattagagttagatgataaatctgcggctgcttattatggattagggaacgtatattacggtcaagagcaatttgcagaggcgaaagctgtatttgaacaagcgatgcaagctggattacaatcagctgatgtaacatttatgttaggtattacgcatgtgcaacttggaaatgatcgtcttgcactgccgtttttacaaagagcaacagaattagatgaaaacgatgtagaagctgtgttccagtgcggactttgttttgcacgattagaacatattcaagaggcgaaaccttattttgaaaaggtattagaaatggatgaagagcatgcggatgcgtattataatttaggtgttgcgtacgtgtttgaagaaaataacgagaaggctcttgctttatttaagaaagcaactgaaattcagccagatcactttttagctggtaatggtgttcgtttattagagcaagaagctgaa

SEQ ID NO: 10069 - DNA, 2379 bp, Bacillus anthracis
atgttccaaattaaaaaggctgctgttctagggtcaggcgtaatgggttcaggaattgcggcacacttagctaatattggtattccgacattattgcttgatattgtaccacctgcgcttacgaaagaagaagaggcgaagggacttacattagaacataaaagtgtgagaaatcgttttagtaatacggctgtgcaaaaactattaaagcaaaaaccagctcctctgacagtgaaaggaaatttagcactgattgaagcaggtaacttagaagatgatcttgagcgtctagctgatgtagattggattattgaagtagtagttgaaaacttagatattaaaaaaaaactatttgaaaaagtagatgctgttcgtaaaccgggttctatcgtaagctcgaatacgtcaggcatttcagttgaaaaaatggcagaaggtcgttcagacgacttccagaaacacttcttaggcacacacttttttaacccaccacgatatttaaaacttctagaggtaataccgacgaaaaaaactgatccacaagtattaagcttcatgaaactatttggcgaagacgttcttggaaaaggcgttgttatcgcaaaagacacaccaaactttattggaaaccgcatcggtacgtacggtttattagtaactcttcaagagatggtaaaacgcggctatagcattggagaagttgattcagtaacaggcccacttattggtcgtccgaagagcgcaacgttccgtactttagatgttgtcggtttagatacattcgtatacgttgcaaataacgtatatgaaaacgtacaagaaaaagagcgcgatgtatttaaagtaccagctttcatgcatgacatgcttgataaaaaatggcttggaagcaaaacaggtcaaggcttcttcttaaaacaaggaaaagaaattttagaattaaatccagaaacgatggagtacgaagctcgtaaaaaattaaaagctgcatcgattgagttaagtaaacaagaaaaaggtttatcgaataaattgaaagcgcttgtatatgcgaaagaccgcgcaggagagttgttatggaatatcatcacaccgactcttttatattctgcaaaacttcataaagagattgctgacgatatcgttgcaattgaccaagcgatgaagtggggcttcggctgggagcaaggcccatttgaagtttgggatgcaattggcgttgaaaagtccgttcaaaagatggaagaaagcggcgcagttattccggcttgggtgaaagaaatgttagagaaaggtttcactactttctacaaacatgataacggagatagctattattacgataatggcgaatataagctaattgagtgtaataaaaaggcaatttctcttaaacaattaaaagcgaaaaatggtgtattaaagaaaaatagcggagcgagcttaatcgatttaggcgacggtatcctttgcttagaattccattcgaagagcaatgcaatcggtatggatattacgcaaatgattaactacgctgttgatgaagtagaaaagaattataaaggtcttgttatcggtaaccaatcgaagaacttctgcgttggtgcgaatctagcaatgatcttaatggaagcacaagacgacaactactttgaaattgagtgggttgtgaaaaacttccaagatgcaatgatgaaaattaaatactcttctaagccagttgtagcagcgccatatggtatgacgcttggcggaggtacagaagtttgcttaccagcagcgagcattcaagcttctagtgaaacgtatatgggcttagtagaagttggtgttggcttaatccctggcggaggcggtaataaagagttatacattaaacacttgaataaaatggcaaacggcgtagaatttgatctacaaaaagttgcaaataaagtgttcgaaacagtcgcaatggcgaaagttttaacttcaggacaagaagcggtttctcataacttcttaggtgataaagacggtattagtgtgaatggtgatcacttactatacgatgcaaaacagaaagcacttgctttatatgaagctggttacaaagcaccgattcgtaaaaagataccggttgttggtgaaacaggatatgcaactcttgcacttggtgcagaagcaatgcatttatctggttacatttcagagtacgaccttcacattgcgaagaaacttgcatatgtcattgcgggcggaaaagtgccgtacggaacagaagttgatgagcagtatttattagatgtagaacgtgaagcatttattagcttagtaagtgagatgaaatcacaagcaagaatgcagcacatgcttgtaaaaggaaagccattacgtaac

SEQ ID NO: 10070 - DNA, 348 bp, Bacillus anthracis
ttgattgtaaaacgcggcgacgtgtattttgcagacctttccccagttgttggttctgagcaaggaggtgttcgtccggttcttgtcattcaaaatgacatcggaaatcgttttagtccaacggtgattgtagcggctattactgcacagattcaaaaagcgaaattacccactcatgtggaaattgatgcgaaaaagtacggttttgagagagattctgttattttacttgagcagattcgaacaatcgataagcagcgcttaacggacaaaatcactcacttagatgaagtgatgatgattcgtgtagatgaagcgctacaaattagtttaggactaatagatttt

SEQ ID NO: 10071 - DNA, 1731 bp, Bacillus anthracis
ttagcgtcttatttcggttattcgtcattccgaagaggacaagatgaaacaattaaaaatgtattagatgggaaagatacagtttgtattatgcctacaggtggtggtaagtcaatttgttatcaaattcctgcattagtatttgaaggaacaacgttagttatatcgcctttaatatcacttatgaaagatcaagtagatacattggtacaaaacggtatttcagctacttatattaatagttctatttcgattacagaagcgaatcaacgaattcaattagcgaaacaaggacattataagttattttatgtagcgcctgagcgacttgattcaatggagtttgttgatcaacttatcgatatgaaaatcccgatgattgccattgatgaggcgcactgtatttctcagtggggacacgatttccgtccaagttatttacatatacatcgcatattagactaccttccagaggagccgcttgtattagcattaacagcaacagcaacaccacaagttcgtgatgatatttgcaacacgcttggaattaatcaagaaaacacgattatgacaacgtttgagcgcgagaacttatcattttctgttattaaaggacaagatcgtaatgcgtatttagcggattatatccgtcaaaatcaaaaggaatccggaattatttatgcagctactagaaaagtagtcgatcagttgtatgaagatttaatgaaagcgggagtttcggtttcaaaatatcacgctggtatgagcgatcatgatcgaaatgagcagcaagaactctttttacgtgatgaagtgagtgtaatggtagctacatctgcgtttggtatggggattgataaatcgaatattcgttacgttattcattatcaactgccaaaaaatatggaaagttattatcaagaagcaggccgtgcaggccgtgacggattagatagtgcatgtatattgttgtatgcttctcaagatgtgcaagtacagcgctttttaattgatcaatcgatcggagaatctcgtttttcaaatgaacttgaaaaattgcaaaatatgactgattactgtcatacagaacaatgtttacaatcctttattttgcaatactttggagaagaaccgaaagaggattgcggtcgctgtggtaattgtacggataaccgagaaagtatcgatgtgacgagagaatcacaaatggttctatcttgtatgattaggacgaatcaacgatttggtaaacaaatgattgcacaagtactaactggatctaaaaataagaaagtcattgaatttaattttcatactttgccaacttacggacttttatcaaatcgtagtgtaaaagaagttagtgagtttattgagtttttaatttcagacgaattaattgcagttgaacatggtacttacccgacactaaaagtgacggaaaaagggaaagaagtgttactaggtaaagagaatgtattacgtaaagaacgagtagagacaagacaaatcgttcaagatcatcctttatttgaagtacttcgtgaagtacgtaaagaaattgcacaaggagaaggtgtacctccattcgttattttctctgaccaaacgttgaaagatatgtgcgcaaaaatgccgcaaagtgactctgaactcttaactgtaaaagggattggagaacataaacttgtgaagtatggttcgcacttcttacaagcggtgcagcacttt

SEQ ID NO: 10072 - DNA, 845 bp, Bacillus anthracis
ttaaatgtatataacggtgtgcctcaattggtaaccaccggtgtgtaactgattcggaaaaagcctccccaggggtgaaaaaaattgttagtgaaaaggaaggttggtaagaagtatattggttaagaggcgccggggaattatggaggaatatatggtttatataaaggaccttattatccattgggaggggaaccaccggaaattccttaatatgttggtaatggtggaggagtaagcagatttaatgatggttgcttcgtcgaatgtagaggatgcgattatgcttctagcgcaaatggctcgtgctgccggtattcatttaattattgcaacgcaacgtccatcagttgatgtaattacaggagttattaaagcgaatattccgtcacgtattgcattcgctgtatcatctcaaacagattctcgtacaattcttgacggcggtggtgcagagaaactgctaggtcgtggggatatgctatttataccaattggtgcatcgaagcctgtacgtgtacaaggtgcgtttttatcagaggaaaaagttgagagagttgtagaatatgttattggtcagcaaaaagcgcaatatcaagaagatatgattccgcaagatgttcctgatacgaagcaggaagtagaagatgaattatatgatgaagcagttcagctcgtagtggaaatgcaaacagcctctgtttctttgttgccccgtgggtttggggttggttttaccccgtgctgcccgattaattgatgcaatggaaatgaatggtgtaggtgggcccgtccgagggtaggtacccccgcgagtgctccattctcgctgtcccaggaaaaag

SEQ ID NO: 10073 - DNA, 1047 bp, Bacillus anthracis
gtggtaagggcaaaacgtaaattagatcatattgaatacgctctttctactggtcagtctcgtacgcatggctttcatgatattgaatttgtgcatcaaagcttgccaaattcaagttatgaaacaataacatgtgaaacaaaaatcggcgaactttcactaagttcgccgatttttatcaatgcgatgactggtggtggaggagagaaaacgttacatattaatgagcaattagcatatgtagcgaaacatcataaccttgctatggctgtaggttcgcaaatggcggcgttaaaagatgaaagtgaagctgcttcttataagattattagaaaggtaaatccaaatggtattttctttgctaatttaggtagtgaggcaactgttgaacaggcagagcgtgctgttgatatggttggagcgaatgcattgcaaattcatttaaatgtcatacaggagttaacgatgccagaaggagaccgtgactttactggtgtacttcagcgtattgaggaaattgttttaaatagtaaagttcctgtcattgtaaaagaagttggatttgggatgagtaaggaaacaatgcaacagttagcgagcgtaggtgtaacggcaattgatattggcggacaaggtggtacgaattttgctgctgttgaaaatgaaagaagacagcgaatgctttcttattttaataactggggcatacaaacagctacctcgattattgaagcaacctctacaaataataacctctcttttattgcatctgggggtatacaaacagcgcttgacgtagcgaaagcaatcgcattaggggcgaatacaactgcgtttgctggatactttttacgcattttaatggaagatggtatcgagaagttggtggacgaaattgaccttttacatacagatttgaaatttattatgacagctctcggtgcaaagacgatagaagagttacagtccgtacctcttgttataaagggtgaaacgtatcattggttaacgcagcgtggcattgatacgacgcattatagtagaaga

SEQ ID NO: 10074 - DNA, 729 bp, Bacillus anthracis
atgttaactccacaacaaataaatcaatttaaatccgttttagaaaaacaaaaacaagaactagagcaaacgatacaaacacatgaaaatgaagatcgtgcatctgaacgcgaatctgttggagaattgtctagctatgacaatcaccccgctgatatggctactgaattatatgagcgtcaaaaggacttcggacttattgagctttggcataaacagctagaagatacgaaacatgccctgcaaaaaatagaagcgggtacgtacggcatttgcgaagtgtctggcgaagaaattccatttgaaagattagaagcaatgccgactgctacaacatgcatacagcacacgacaaacaaattaaatatggaaacgcgaccagttgaggaagaagtattatccccttcttttcataagcacgatgaagatcattctgttgagtacgatgcagaagttgcgtggcaagatgttgccaattatggaacgtctgaaacgccgtctgatttagaaagacaagattcaaaaaactacaatggcatgtacgtaaatagcgaagagaatgtaggctacgtagaggattttgaaaactttatcggtacagatatgtatgggaaaaatccgcaagttttcgctacggaagagcatgaagaatatgaacaaatgcttgatgactttgaagagcgtacgtttaagggcgaattatcttcaaatgagtcgagttccaaagaa

SEQ ID NO: 10075 - DNA, 2187 bp, Bacillus anthracis
atggcaaaaagcgttgtaatcgctgaaaaaccttccgttgcacgagatattgcgcgtgtactgaagtgcgacaaaaaaggaaacggctaccttgaaggtagtaaatatattgtaacttgggctttaggtcatcttgttacattagctgatccagaaagctatgatgtgaaatataaaaagtggaatttagaagatttaccgatgctacctgagcgtttgaaattaactgttattaaacaaacagggaaacaatttaatgctgtgaagagtcagcttcttagaaaagatgtaaatgaaatcattgtagcgacagacgctggacgtgaaggagaattggttgctcgttggattattgataaggttcgaattaacaaaccaattaaacgtctatggatttcatctgttactgataaagcaattaaagatggtttcgcaaatttaaaaccaggtaaagcatatgacaatttatacgcttcagctgtcgcacgttcagaagctgactggtatatcggtcttaacgcgactcgagctttaacgactcgctttaatgcccagcttaactgtggccgtgtgcaaacacctactgttgctatgatcgctaatcgtgaagatgaaataaagaacttcaaagctcaaacttactacggcattgaagctcaaacaacaaatcaattaaaactaacgtggcaagatgcaaatggcaatagccgcagttttaataaagaaaaaattgatggtattgtaaaaggtttagataaacataatgctactgttttagaaattgataaaaaacagaagaagtcattctctcctggtctttacgatttaactgaattgcaacgtgatgccaataaaaagttcggttactctgcgaaagaaacattgaatattatgcagaaattgtatgaacaacataaagtgctaacataccctcgtacagattcgcgttacatttcatctgatatcgttggaacacttccagaacgtctaaaggcgtgcggcgttggggaatatcgtcctttagcacataaagtattacaaaagcctatcaaggctaataaatcatttgttgatgatagtaaagtaagcgatcaccacgcaattattccgacagaaggatacgttaacttctcagccttcacagataaagaacgtaaaatttatgatttagttgtcaaacgtttcttagctgttttattcccagcattcgaatacgaacaactaacgttacgcacaaaggtcggcaatgaaacattcattgcacgcggaaagacaattttacatgccggttggaaagaagtatatgaaaatcgctttgaagatgatgatgtaactgatgacgtaaaagagcaacttttacctcgcattgaaaaaggcgatacattaactgtaaagttaattatgcaaacatcaggtcaaacgaaagcacctgcacgttttaacgaagcgactttactttcagcaatggaaaatcctacaaaatatatggatacgcaaaataaacaacttgctgatacgttaaaatcaactggtggattaggtactgtggcaacacgagctgatattatcgacaaactattcaattcattcttaattgaaaaacgcgggaaagatattcacattacttcaaaaggccgtcagttacttgatttagtaccagaagagttaaaatcacctacactaactggtgagtgggaacaaaaactagaggcaattgcaaaaggtaaactgaaaaaagaagtattcatttccgaaatgaagaactatacgaaagaaattgtttctgaaattaaatcgagtgataaaaaatataaacatgacaacatttcaacaaagtcttgtccagattgcgggaaaccaatgctagaggtaaacggcaaaaaaggaaaaatgctcgtttgccaagaccgtgaatgtggtcatcgtaaaaatgtatctcgtacaacaaacgctcgttgccctcagtgtaagaagaagttagaattacgtggtgaaggtgcaggacaaatctttgcatgtaaatgtggctatcgcgagaaattatccacattccaagaaagacgtaaaaaggaatctggaaacaaagctgataagcgtgacgttcaaaaatatatgaaacagcagaaaaaagaggaagaaccattaaataacccattcgcagaagcattaaagaaattaaaatttgat

SEQ ID NO: 10076 - DNA, 985 bp, Bacillus anthracis
atgtttaatcacgtaacagtgcttttgaaggaaacagtagatggattagatataaagccagtatggtacatatgtagattgtacactggggggaggaggacatagttcttatttattatcccaattaactgaaggcgggaagattaatcgcgtttgatcaagatgagatagcaattcaaaatgcgaaagaaaaattctcttcatacggtgagcagttcataacagtaaaaagtaatttccgttacctatctgaaaaactacaggaattaggtataacagaagtagacggtattttatttgatttagggtgtttcatccccgcaattagatacacccagaaagcgcggcttttagttaccaatcattgatgcaccggtagatatgcgaatggatcaagatgccccattaacagcctatgatgttgtaaatagctggtcatatgaacaacttgtaagaattttcttccagtatggcgaagagaaattttcaaaaccaaatagcaagaaaaattgaagcgtatcgtgaaaataaagctattgaaaccgccaggggaaattggtagaacttattaaagagggttattccaggctctgcttggtagaacggggtggacatccttgcgaaggcgagtgtttccaggccaatcggttatggcggtaaatgatgaattgaaagtgtttgaagaagccgttggaatctgcaattgagatgtcaaagccaggccggaagagttagtgttataacattccattctttagaaagaccgtatttgcaaaacgacgtttaaacgaaatagtacaacgccgcaattgccggccggaataccaattattcctgatgaattttagccgaagttaaagcttattacaaagaaaaacgattttaccttctgatatagagttaggaggaaaataatcgagcgcgttctgcgaaattgagaatcgctgaaaacggataaaaaggggagaggaggtatgagtacctt

SEQ ID NO: 10077 - DNA, 1113 bp, Bacillus anthracis
atgaacaaactacctcacgaaacacgcgttgtcatcgggatgtccggtggcgtcgattcatctgtagcggctcttttattaaaagagcaaggttatgatgtaatcggaatttttatgaaaaactgggatgatacagatgagaatggtgtctgcacagcaacagaagattacaatgatgtaattgaagtgtgtaaccaaattggtattccgtattatgcagtaaactttgaaaaacaatactgggataaagtatttacgtacttcttagatgagtaccgagctggtcgtacaccaaacccagatgtaatgtgtaacaaagaaattaaatttaaagcatttttagagcatgcaattgcacttggtgctgattatgtagcgacaggtcattatgcacgcgttgcttatatggacggcgaatataaaatgcttcgcggcgttgacgacaataaagaccaaacgtatttcttaaatcaattaagtcaagagcaattatcaaaaacaatgttcccgctgggtgaactgaagaaaccacaaattcgtgaaatggcgaaagaagctggtttagcgacagcggcgaagaaagatagtactggtatttgcttcattggtgagcgtaactttaaagatttcttaagtaactatttaccagcacaaccaggtgtgatgcaaacattatctggcgaagtgaaagggaagcatgacggtttaatgtactatacaattggacaacgtcatggtcttggtattggcggtaacggtgatccgtggtttgctgttgggaaaaacttgaaagaaaacattttatatgttgatcaaggattccataacgaacttctatatggcgacgaagttattgctaccaatgttggctgggtaagtaatgaagcgaaagaaaaagaatttaagtgcacagcgaaattccgttatcgtcaagaagacaataaagtaacggttcaaatcgttgatgaaaatacagttcgtattctttgtgacgagccaattcgtgcaattacaccaggacaagcagttgttttctatgatggagatgagtgcttaggcggtgctacaattgatgaagtgtaccgtagcggtaagaaattggattgtttagga

SEQ ID NO: 10078 - DNA, 1909 bp, Bacillus anthracis
atgtgcgggattacaggatgggtggattataaacgctcattagaaggagaacgggacgtcgttacgaagatggctgagacgttagcgaagcgtggttccagatgataataaagtttggattaaaggcaatgtcgcatttgggcataaacgggttaatcgttgtgatccctgaagggtgtaaacagccgatgacttgtttaaaggatgaagcaaattatgcaatttgctatagcggcgacctgtttacccgcggagccatttcgaaagggattatttagaaggaggatatacgttcaaaggtcacttctgatacgggaagtatgtttagcttcttatatcgatggaaagaaagaatgtgtcgatcattaaaccggtatatatgcgtttgctgtatgggatgaacagaaaggaccaagtgtttattgcgcgcgatcgattagggggtaaaaccactatttataaattatgacagtggcgatttactattgggctcagagttaaaaggcgattatggcccatccaagatgggaaggcggaaaggcacgttagaagattattctgaaatatttggccttggaccatatagaacgcctggtcacggttatttatactgcaataaaagaattacgtccaggtcatgaggaagacattttcgaagaaccggtttatgtatatggagatatttggaatgtgaaaaggaaaaagcatgagaattcttttgtagaaacaagagaaaaaaaacggctttttatttccagatgcgattacaaggcagctcgtttctgatgtaccattatgcacttttttatcaggcggtgtagattcaagcgctataacagcaattgctgcgaaagaatacgaaaaatcgggaaaaggtcaattacacacgtattcggttgattacgaagataatgacaaatactttaaagcaaatgcgtttcagccaaattcggatgcaccatttattcatttgatgactgagacgtgtcaaacgatccatcatcgttgcgtcatttcaaatgaacaattagcgcagtatttaacagaagcagtactcgttcgtgatttgcctggtatggcagatattgattcgtcattattatggttttgtcgtgaaattaaacaagattttgtcgttggtttatctgggggatgtgcagatgaaatatttggtggttatccctggttttatagagaagatgatttacaatccaggggcatttcccgtggatgcgttctacagaagcgcgtgaacaagtgctaaagaaagaatggaggaatgaattaaattttacaccatatgtacagccgcgcctatgaagaatcctttcagaaagttcctatgttagatggggaaaagtcccctagaaagcaaaaagacgccaattattttatttaaatatggtatggtttatgacaacattattagacagaaaagaccgcatgagtatgggggcaagcttagaagtgcgcgttccatttgcagatcaacgacttgtcgaatatgcgtggaaatattccttgggaaaatgaaaatgtataaaacccgcgaaaaaggttctattgcgtaaagcgttagaagggttacttcccaatgacaatctatatagaaagaagaagcccgtatccaaaaacacataatccgcactatacgaaagcagtaacagtatggatacaagatttattaacggataaaggctcaattttacacgagctatttgataaagaacagctgagtggattaattgagtcaggcggcagtgcattccaaacgccatggtatggtgccaattaaatgagtgagacccacagcttttgagctcattttagcaacaaagttcatgtctggtgtcaaagaatatcggagtaaatcttaaagcactggaggtagagcgacttcctttataag

SEQ ID NO: 10079 - DNA, 356 bp, Bacillus anthracis
aaaaaagtacaggaatttaatgatatgatacgaaaacttcggaaaggaacttttcggaaaaagaccaaaacgcattcatactggttttgcagaaaatatggcgattgcgaccctttatggaaacttaacacctacggaaaaattcatttcaagtacgatggacggtgcggaaatggttcatatggctagaacgaaaatgattcaagaagtgtatgctgcaaattcccgtgaacatttggaggaacttgttggagcgaaattagtgaatttgttttcagatatgaaagtagaagaagatattgcagtttctcgtatttgtttttgataaaaatataacgtgagagaaggatactgat

SEQ ID NO: 10080 - DNA, 306 bp, Bacillus anthracis
atgtacgcaattatcgaaacaggtggaaaacaaattaaagttgaagctggtcaagcaatctacattgaaaaattagatgttgaagctggtgaaactgttacttttgacaaagttcttttcgttggtggcgaaaacgttaaagttggtagcccagttgtagaaggtgcaacagttactgcgaaagttgaaaaacaaggtcgcgctaagaaaattatcgttttcaaatacaaagcgaaaaagaacaatcgtaagaaacaaggtcatcgtcaaccttacactaagctagttgttgaagctatcaacgct

SEQ ID NO: 10081 - DNA, 1287 bp, Bacillus anthracis
atggaaaaattgctaattgaaggcggaagagctttaaatggaacaattcgcgtgagtggtgcaaagaacagcgccgttgcattaattccagcgacaattttagcagatactccagtaactattggtggtgtccctaatatttcggacgtgaaaatgttaggagacttactagaggaaattggaggaagagtaacgtatggacaggaggaagagatggtagtcgatccttctaacatggttgcaatgcctttaccaaacggaaaagtgaaaaaattgcgtgcttcttattatttaatgggtgcgatgcttggccgttttaaaaaagctgttattgggcttccaggtggatgtcacttaggaccgaggccaattgatcagcatattaaagggtttgaagcgttaggtgcacatgttacgaatgaacaaggtgctatctatttaagagcagatgaactacgcggggctcgtatttatttagatgttgttagtgtaggagctacgattaatattatgctagcagctgtacgagcgaaaggtagaactgttattgaaaacgcagcgaaagaaccagagattattgatgtagctacactgttaactagcatgggagcacgtattaaaggtgctggtacagatgtaatccgaattgatggtgtggattcattgcacggttgtcatcatacgatcattccagatcgtattgaagcgggtacgtatatgattttaggtgctgcatcaggaggagaagtaacagttgataatgttattcctcagcacttagagtcagttacggcgaagctccgagaagctggtgtccaggttgaaacgaatgatgaccagattacagtgaacggtgatagaagattaaaagtagttgatataaaaacgcttgtatatccaggtttcccaacagacttacaacagccgtttacaacacttttaacaaaggcgcatggaacgggtgttgtaacggatacgatttatggtgcacgttttaaacatattgatgaattacgtcgtatgaatgcacaaattaaagtagaaggtcgatcagctatcgtaactggtcctgttttattgcaaggtgcaaaagtgaaagcgagtgatttgcgagctggagcagcacttgttatcgcaggattaatggcggatggaattacagaagtaaccggacttgagcatattgatcgaggttatgaaaatatagtagacaagcttaaagggcttggtgcaaacatttggcgagaacaaatgacaaagcaagaaattgaagaaatgaagaacgca

SEQ ID NO: 10082 - DNA, 3775 bp, Bacillus anthracis
aatgtaataccttttgaatatatgaaagaatggaacttgcttttcacctgacaagaaatcgttcttggttcatacggtgaagttaagaaaccagaaacaattaactatcgtacgttaaagcctgaaaaagatggcttgttctgtgagcgtattttcggaccacaaaaggactgggaatgtctattgcggaaaatacaaacgtgtacgttataaagggtgtagtttgtaatcgaagtggcgtgaagttacggcgtgggaaggtacgtcgtgaacgtatggttcatatggaattagctgctcctgtatctcatatttggtatttcaaaggtatcccgagccgcatgggacttgtcttagacatgtccccctcgcgcgcttgaagaagtaatttatttcgaatacttatgttgtattcttgaaagtggcaatgtatacccacttgataagaagcaattactttctgaaaaagaataccgtgcatatcgtgatcgatatggtagcacattccaagctgctatggggtgcagaagcgattaaaaagtttattccagcccttggattaagataaaggaagatgtcttcctaaaaggagaatttaaaacccggcacaaggccaacccggttctggtggtattaaactttttagaagtttaaaagcattccgtactttggaaaatgagccatctgggatgttcttagatgttctaccagtaatccccaccagaactacgacccatggtacagttagatgggtggacgttttgctacttctgacttaaacgacttataccgtcgtgtaattaaccgtaacaaccgtttaagagcgtctaattgagacttaggggccccccaaccatattcgttcataacggaaaagacttatgttacaaggaaacagtaggcgcaataaatcgataatgatagtcggggcccgtccaagtaactggaccggggtaacggtccattaaattctctatctcccaggctaaaaggtaaaacaggggacgtttccgtcaaaacttattaaggtaagcgtggttgactacatctggtcgcgtcctgtaatccgttgtagggaccgaactttaagatgtatcaatgtgggataacgaaaaaaaagggggcttgaactgttcaaacctttttctaatgaaaagagttagttgaaaaaggattagcacacaacattaagagtgcgaaacgtaaaatcgagcgtgtacaacctgaagtttgggacgttttagaatctgtgattaaagaacatccagtacttttaaaccggggcaccaacatttccccgttttgggtatccaggcggttgaacctttcattagtagaggttgcgcgcaatccgtctttcacccacttgtatgtacggagatacaacgcgggactttgacctgtttgaattttaccgttcaccgtacctttatcatcagaagcgcaagcagaagctcgtcttcttatgttagcggcacaaaacatcttgaacccgaaagaccggtaaaccagtggttactccatctcaggatatggtattaggtaactactacttaacacttgagcgtgaaggtgcaatcggtgaaggtatggtcttcaaagatgcgaacgaagcattacttgcatatcaaaatggatatgtacatcttcatacgcgtgttgcagtagctgcaagtgcagtaaacaacgtaacatttactgaagagcaaaagaatatgcttctattaacaacagttggtaaattaatatttaacgaaatcttaccagagtcgttcccttatattaatgaaccaacaaattcaaaccttgaaaaagaaacaccagcgaaatatttcgttgaaaaagggtgcgaacattaaagagattattgctagtcgcgaagaagtggcaccattcagcaagaaaatccttggtaacatcattgcggaagtgtttaaacgtttcaaaattacagaaacgtctcgcatgcttgaccgtatgaaaaacttaggattcaagtactctacaaaagctggtattacagttggggtatctgacattcttgtattaggtgagaaagatggaaatcttccacgaagcacaagcaaaagtagataatgtaattaaacaattccgtcgcggtttaatcacggaagaagaacgttacgatcgcgttatctctatttggagtaatgcaaaagatgttatccaagggaaaactgatgaagtccttgaataaacgcaacccaatctttcatgatgagtgattccggtgcccgtggtaacgcatcgaactttactcagcttgctggtatgcgtggtctgatggcccaatcccttatggtggtatcattcgaacttccaatcaaatcaagtttccgtaaaggttaaccagttcttgagtacttcatctttacgcatggtggcgcgtaaaggtcttgccgatacagcactgaaaacagcatgattctggttacttaacacgtcgtctgtttgacgttgcacaaagatgtaatcgttcgtgaagatgattgtggaacagatcgcggtttattaattggtgcgattaaagagggtaaatgaggttatggagtcattatatgatcgtcttgttggacgttttgcaagaaaaactgtaaaacatcctgaaacaggtgaagtattagttgctgaaaatcaattaattactgaagatatcgctcatattgttgaaaactcgggtgttgaaactgtaaacattcgttcagcgtttacgtgtaacactcgcccatggtgtatgtaagaagtgttacaggtcgtaacttagcaactggaacagacgtagaagtaggggaggcggtaggtattatcgcagctcaatctatcggtgagccaggtacacagttaacgatgcgtacgttccatacaggtggggttgccggagatgatatcactcaaggtttacctcgtatccaagagatcttcgaagctcgtaatccgaaaggtcaggctgttatcagtgaaatcgacggtgtggtacaagcgatcaacgatgttaaagatcgccaagaagtagttgtacagggtgaagttgaagctcgtacgtatgctattccttatggtgctcgtctgaaagtaattccaggacagaaaattagccacggtaaagagttaacagaaggttctattgatccgaaagaattactaaaagtaacagacattacggcagttcaagaatacttattacgtgaagttcaaaaagtataccgtatgcaaggggtagattttgtagattaacacgtagaagtaatggtacgccaaatgttacgtaaagtacgtgtgagtgatgcaggtgaaacagatgtattacctaggaacattactagatatccatcagtttactgatgcgaatgcgaaggtgttactgcaaggtaaacaaccagcaacagctagacctgttctacttggtattacaaaagcttcacttgaaacagattcattcttatctgcagcatcgttccaagaaacaactcgtgtcttaactgatgcagcgattaagggtaaacgcgatgagcttctaggattgaaagaaaatgttattatcggtaactttgttcctgctggaacaggtatgaatcgttatcgcaaagtggatcttgttaaaactacacaagatgacatgaatgtagaaaacgatgaagtttatgtggaacagtaaaattttccgtcgtaaattttgtataaaaacagttaatcctagttgacattgtatgagtcaaaatgttactataagcaaggttgctcctgaacgatgctt

SEQ ID NO: 10083 - DNA, 1086 bp, Bacillus anthracis
atgaaacttggtgctcgcattttaaaaacgggtattgccatcactttagctttatttgcttgtattttacttaacttaccgagtccggtatttgcgggaatctcagctatcttcgctgttcaaccgtctgtataccgttcgtatttaactgcacttgaacaaattcaagcaaacgtcattggtgcggtattcgctatcgcattcgctactgcttttggacataatccttttattattggattaacatgtatattagtaattgctcttacattgcaattacgattagaaaacacaatatcaatcgctttagtaactgttatcgctattatggaatatcagggcgaagatttctttagttttgccttacttcgatttgcgacgattatggttggtattattgccgcttcacttgtaaatttagtatttatgccgccaaaatacgaaacaaagctatatcatcgcatcgttgataacacagaagaaattgtaaaatggattcgaatgaatagcaggcaagcttctgattttacaacgttaaaaactgatattgatcgtatgaaagaaaaaatgatcaaattaaaccattactatttgctgtataaagaagaaagaagttacacgaaaaaagtacagttcgcaaaaattcgtaagctcgttttattcagacaaatgttagcgacgacaagccgtgctttaagtacgttaaaatcattacatcgtactgaaaatgaattgcgctatatgccagaagaatttcaagaatctatccaaaacgaacttgattcattaacgcattaccatgaacaagttttattaaaatttattggtaaagcaaaaaaacaacaatccgttgaaatgcttgatgaagttgaaacaggtaaacaagaattaattgatatctttatggaatatcaaaacaaggacgatgaagaagcatataaaacatggctacatctcttccctcttatttctgccattattaactatagtgaagaagtagagcatttagatttacttgtggatagcttctacacataccataaaccagaagcagaacttaaaatcgatgataaaaaagaagacgaa

SEQ ID NO: 10084 - DNA, 1035 bp, Bacillus anthracis
atgaaattaacgaagagattagctggcgcagcaattagctttagccttgttgctggttgtggtgaaaagaaagaagagttaaacatttatagctgggctgacaattttgatgagcaagtgctaagagattttgaaaagaaatataacgtgaaaattaactatgataagtatgcaagtaatgaagaaatgcttgcgaaattacaagctggtggcgcgaagtatgatttaattcagccgtctgactacatggttaaaacaatggcaaaaatggatttattagcgccgttagataaaaagaatatcccaaatatcgaaaacatggtttctaatttcaaaacacctgcgtttgatccagagaataaatattctttagtatacacttggggtgtaactgggattgcatacaataaaaagtatgtgaaagaagcacctacaagttggactgacttatggaatgagaaatataaagggcatgtaactttattaaatgattctcgtgaagtattaggtatgggtcttaagaaaaacggcttctcaaacagtacgaaagatgatgcacagttaaagacagcagcaactgatttacagaagctacttccaaacttattagcatttgatacagataatattaaacaaaagttcattacagaagatgcttggatcggaacagtttggtctggagatgcagcatttatcgcaaaagataataaagatgtagagtacgttgtaccaaaagaaggcggcacaatttgggctgatacgttagcaattccaaaaggtgcgaaaaataaagagcttgcagagaagtttatgaactacttattagatgaaaaagtaagtgtgaaaaactacgagtcaattggatacagtaatccaaatgaaaaagcgcatcctcttcatagtaaagaatatcgtgaaaaccatatgattttcttaacgaaagaagaattagatcgtacagaatggcttgttgatgtagatgataagttaaaagattatgatcgttactggacagagttaaaaacaaaaggtaaa

SEQ ID NO: 10085 - DNA, 1318 bp, Bacillus anthracis
cggttaatatccccaagccccgttggggggtttatgtttttctaaccagtaacaataaacggggctccgcccataataatggatcttatcgaaccagggattcggactccggttccaaccgccgtacctaattacccactactggttataataatgggggcaatttatccgttttatacgaaaaaatggaatgtatccctcgtagacatttgtttttctattttaaaagtagtcggcgtcgttttatggcgtactatattgtttgaaaaaaggacccacctgggtttctttcccccacacattgggccgtttttgtatgaaaaattagtaatatcggtaagttatctggttcacaattgcctgggcttttttagctttattagtcggggtacgatttcctagaatttatcgggtacgttttgtagcccccattatgagccccttatggaaaacacggggacggtcagcaatcgatgcggttgcttccttcgttgggagttattctttagctttattaattacgaatcgtgtttataaagaaggaaagtatacaacaaaagaagctgctattatcgctacaggtgtttctacagtatccgctacatttatgattatcatcgcaaaaacattagacattatgcatttatggaatgtttatttttggactactctcgttgtaacattcatcgtaactgctatcaccgtaagaatcccgccacttagtagaaaaccagatacatatgtaacagaagaaggattcccagagcctgtttataaagagaaaatgctagaacgcgcttgggaagatgcgttagaagtatcaaagtctgcaccgggtattatgaaaaatatcgcggtgaattttaaaagatgggatttattatgacaatgggaattttacccatctattatgtcagtaggtttaaatggggtatcgtctaggcagaaaattcacgccaatattttgatgtggatcagctatattttttctatcctttacccatgggttttaccaattaccagaaagcaggcttagctgctaaagcagcatcccgttgggtattgcggaaaatgttttacccatcattgttagttgtaagtgcaccacttgtgacaaagtttgtttattgcggtggtttcggtatcatctatattgtttttctcagcttctattccttgtattttatcgacagatattccgttaaaagtatcggaacttattattctttacgtacaaagaacgattttaacgttacttattattacgccgattgcttatttgttactttaaagctttaaaaagataaagctataacaa

SEQ ID NO: 10086 - DNA, 900 bp, Bacillus anthracis
atgagcgtattagttaataaagatacaaaagttattgttcaaggtattacaggttctcaaggattattccacacaaaacaaatgattgaatacggtacgaaaattgtcggtggtgtaacgccaggtaaaggtggcactgacattgaaggtgtaccagtatttgatactgtagaagatgcagtgaaagcaacaggcgcaaacgcttcagttgtatacgttccacccgcttttgcggctgatgcaattatggaagcagttgatgcagaaattgatttagtagtatgtattaccgaaggaattcctgtattagatatggtaaacgtaaagagatatatggctggtaaacatacacgtttacttggaccaaactgcccaggtgttattacgcctgatgaatgtaaaatcggtattatgccaggatacattcataaaaaaggtcatgtaggtatcgtatctcgctctggtacattaacgtatgaggctgtacatcagttaacacaagaaggtattggccaatctactgctgtaggtatcggcggagacccagttaacggtacagactttattgatgcattaaaagcatttaatgaagatgaagaaacacatgctgtaattatgattggtgaaatcggtggtacagcggaagaagaggcagctgaatgggtgaaagctaatatgacaaaacctgttgtaggcttcattggtggccaaacagcgcctgctggcaaacgtatgggccatgctggtgcaatcatttctggcggtaaaggaactgctgcagaaaagattaaaacgatggaagcttgtggtattaaagtagcggaaactccagcagttatgggagaaacgctaatctctgtcttaaaagaaaaaggtctatttgagacttgtaaaaactac

SEQ ID NO: 10087 - DNA, 460 bp, Bacillus anthracis
aaagtaaaatacttcttttttgatacacctgaagaaaaagaagcagctcaatatagttatgaaaaggagcaaacagacatgaagaagcagcaagatccgccagaacaacaagatgttacgtttccaaaagcgcaaccgaaacaaaatgttgtgagcattgaaacagcaaagcaatcttcaaaagttggtttatttagaaccacgcacatattcagaagcgcaaggaattgcggaccatttaaaaggtagacgagctgttgtaattaatttacaacgaatgtctactgatcaagctgtacgtatcgttgactttttaagtggtactgtatacgctataggcggggacattcaaaaaataggaccgaaaacatttatgtgtacgcctgaaaatgtagatattgttggtgcaatttcagagttattcggtgaagaagacgacacaaatataaagaggtggtaa

SEQ ID NO: 10088 - DNA, 1456 bp, Bacillus anthracis
atgatgaatcaaaaccaaggattaaaaagagaattgaagagcaggcacatatttatgattgcacttggaggagttattggtactggcctttttttaggatctgggtatacaattcatgaagctgggcctgagggagcgattgtagcgtatcttgtcggagggatttgttatgtatttaacgatgctctgtcttggagagttagctgttgcaatgcctgacgcagggtcttatcaaacgtatgcaactaagccacatttcccctgcagcgggttatgtagtcggatggatgtcgtggttgaactggtcagctacgataggtattgaactaattgcagttagtattttaatgaaacgatggtttcccagatgtaccgtcatggatttggtgcgtagtgtttgcgggtaccgctttttgcatattaaggggtatctccagagagttttgcagaaggtggaattttggtttgcaagtattaaagtcattacaatcattgcatttattattttgggcgggggcagcaatgtttggttttctagatatgaaaggaaatgaaccagcaccaatgttctctagttttactgattatggtggattgtttccaaatggattatccgctattttaattacgatgattgctgttaacttttccttccaaggaacagaactagtcggtattgcagcaggtgagagtgaaaatccagagaaaacaatcccgaaggcaattaataatacagtttgggcgtatactcgcggttctttgtattatctattttcattcttgcagggattattcccttggcaacaggcgggagtaatagaaagtccattcgtagttgtatttgataaaattggtattccttatgcagccgatattatcaatttcgttattattacagcggttctatccgttgcgaattcaggattatacgcaacttctcgtatgctatggtctatgtctaatcaaggaatgattaatccgattttttggtagttatctaaaaatggtgttcctatttatgcattgattgtaagtacaattgtaaggttgcctttcattactatcacggatttatgccgaagatacagtttatttatggctacttttctatgccggggtcggagcgatattagtttggggcatctattggtctatcctacttatttacctagaagggcttatattaaagcagggcgggaaaatgtgaagaacttgaaatttaaaacaccactgtatccattcgtaccgctgcttggcattagtattaaatgtaacagtaattgttggtatggcctttattccagaacaaagaatggcgttatattgtggaattccatttatgattgtttgcttactgttttaccgtgcgacaagaaataaggcacataaagtagaacatattgaaaagacagatacaacagaagtagacagtttataatattgagtaatttagaga

SEQ ID NO: 10089 - DNA, 1398 bp, Bacillus anthracis
ttttttcatacaaaggatatacatagtcattttgaaaattggccgcaaatttctcggtttgtacaaggagagaaaaagcgaagacaggaagcaggagagaccgttttaactgtagatattggcgatcatgtggatcgttttcatagtatttcggaagcgacgaatggacttggcaatacgaagcttttaaatgaggcgttatatgattatgtaacgatcggaaataatggaggaaattaccttagcgaaggagcatttgaatcatctatatgatgatgctgaatttgaggtgctcgttgcgaatttattttgaaaaagaaggggtacgtccagagtgggcgaagccttataaattacatacaacgacagatgggattacgattgcttttatcggattaacagttgcgtatccagagttttatcaaatgttagattggcatattgaagatccaatcgagcatttagagtctattttaaaagaagtgagagagaaaaactcatataacggttgtcctttctcatcttggaaaaagtatggatgagcatatgagcggatcattatgatatagatgtgattttatgggcacatacgcatcatttatttgatcgcggtgttcttatgaataatacgtaccttggtggtgggaaaaatgggggacgcttttgttgggccctcccgttttcgggggaataaaaaaacaaaaaaacctgttaaaaaaggacggtagagcgattaagacagaccgtttaggtgcttatagtaaaccgttatccacaattgaagcgctgcaggaagaaagtacacatattatggaagaccctgtcgttcatttgaaggaatcattaccggttgattggtttcatgagacagcttttctctcacatgttagcaaatgcgctgataacgtggtggcggtgcagagattggcatggtgaacgctggtgtacttcttgaaggattagatgaaggtgttgtgacgcgcggagatatttcacagaattggtccacatccaaataatccatgtttattaaaggtgccgggggaaaaccgttaagaagaggttttttataaggggcccgtcgcccgaattatggagacccctggagtaaaagggatccgggtttcgcggagaaagtgaggggaaaaatgatttacgctggtgtagaagtcatcccagatacgattcccggggaataaaattttactcgaagatgtaaataattagtcggagaatacgccggattagatgtatatatatacagtaggaacgattgatatgtttacatttggctacttatacccagagctatccacactttctaacaaacaatattatatgccagaactacttagagatgtgttaacggacgtgttaataactcatacatcttctgcc

SEQ ID NO: 10090 - DNA, 2937 bp, Bacillus anthracis
atgaagaacaacatggttcatattacaattgacggaaaaaagtatacagcggagcccagttcaacgatattgggtgtgataaatgagaacgggattgaacatccgcaaatttgttacgtgccagaagtagatcctattcaaacatgtgacacttgtattgtagaagttgacgggaagttaatgcgctcttgttcgacagtagtgacagaaggtatgaacattgaacgtaattctactcgtgcgaaagaagcacaaacagaggcgatggatcggttattagaaaatcatttattatactgtactgtatgtgacaacaataatgggaactgtaagctgcataatacagcagaattaatggaaatcgaacatcaaaaatatccatatgaaccgaaagtggatgtaagtgaagtggatatgacacatccgttttatcgttatgatcctaaccaatgtattgcatgtggtcaatgtgttgaggtatgtcaaaacttacaagtaaatgaaacgttatcaatagactgggaagcggaacgcccgcgagtgatttgggatgaaggagtaagtattaatgattcttcatgcgtgagctgtggtcaatgtgtaacgatttgtccttgtaacgctttaatggagaaaacgatgctcggtgaagctggatttatgacgggattaaaaccagatattcttgaaccgatggtagacttaattaaagaagttgagcctggatatagcggtatttttgcggtatcagaagtggaagcggccatgcgtgatactcgtacgaagaaaacgaaaacagtatgtacattttgtggtgtagggtgttcatttgaagtgtggacgaaagggcgtaaaatccttaaagtacagccctcttctgatgcgccagttaacgcaatttctacttgtgtaaaaggaaaatttggctgggatttcgtaaattctaaagaacgaattacgaaacctttaattcgtaaaaatggaacgtttgttgaatctacatgggaagaagcgttgaatgtagttgcaaataaattaggatcgattaaagaagagtacggtaaagatgctatcggttttatttcttcttctaaaattacgaatgaagacaattatgtaattcaaaaattagctcgacaagtatttgaaacgaataatattgataactgctcacgttattgtcaatcgccagcaacagacggattattccgtacgattggtatgggcggagatgctgggacgattaaagatatcgcgcaatctggtctagttattattgtaggttgtaatccaacagaaggtcatcctgttttagctacacgtattaaacgtgcacataaattacacggacaaaaattaattgtagctgatcttcgtaaaacagaaatggcagagcgttcagacgtctttattagtccaaaacaaggaacagatcaagtctggttaatggcagttacgaaatatatgattgatcaaggctggcacgatcaacaatttattgatgagaatgtaaacttctttgaagatttcaaagagagtcttacggaatatacacttgaatatgctgaagaagtgactggtatttcaaaagaaacgcttattcaaatggctgaaatgattcgtgatgcagatggtacatgtatcctttggggcatgggtgtaacgcaaaatacaggtggatctgatacttctgctgcgatttcaaacttacttcttgctacaggtaattatcgtcgtccaggtgctggtgcatatccgcttcgaggtcataataacgtacaaggtgcttgtgatatgggtactttaccaggatggctcccaggatatcagcacgttacgaatgatatggaacgtgcgaaatttgaaatggcttatggagtgaaaattaatagtgaaccaggtcttaataatattgaaatgctgcacgcaattgacgaaggggaaatgaaagctatgtatcttgtcggagaggatatggctcttgtagactcgaatgcgaaccatgtacatgaggtgttatcgagccttgatttcttcgttgtgcaagatgttttcttatctaaaacggctcaatatgcagatgttgtattaccagcagcgccgtctcttgagaaagaaggtacgttcacaaatacagagcgtcgtgttcaaagactgtatcaagtgcttcctacgctgggagatgcgaaaccagactggtggattgtgcaggcgattgcgaataaattaggtgcaaactggaattatagtcatccaagtgaaatttttgctgaaatggcaagtttatcaccactattctcacaagcaaactatgaagtgcttgaaggatggaatagtttccattggggaagttttgatggaacgaatacaccgctccttttccaagatggatttaacttcccagataaaaaagctcgttttgcgattgctgactgggtacgcccagctgaattcccagcggagtttgatcttcacattaataacggtcgtatgcttgagcatttccatgaagggaatatgacaaataaatcaacaggtattcaaacgaaagtgcctggcgttttcgttgaagtttctccagcacttgcaaaagaacgtggagtgaaaactggttcattagtccgtcttgtttctccgtttggagcgttaaaattacgtgtacttgtaacagaccgtgtaaaagcaaatgagttatatttaccgatgaattctacagataatgaaacagcgattaatttcttaacaggtcctgcggttgatacgcgtacgaacacacctgcttataaacagacgaaagtacgtatggaagtactagaagttgatggcgaaaatccgatgccaaaagcgaacccgcgtaataaaaaacgtcatcctcaatccggtattgaggtacatcgtaagtgggcacgtccagggtatgtgcatttaacggataag

SEQ ID NO: 10091 - DNA, 512 bp, Bacillus anthracis
atgactacaattgatttgaattgtaatttaggagaaagttttggcgcttataaaatggggaatgatgatgaaattcttccgttcgtttcctctataaacgttgcatgtggttttcatgcgggtgatccgtccgttatgcggcaaacggtgaaaaaggcaatgcagcataatgtagcgataggggcacacccaggatttcctgatttaattggatttggtagaagaaacatgaacgtttcagcaaatgaagtatacgattatgttttatatcaaattggtgcattagacgcttttgtaaaagcagctggtgggaagatgcagcatgtgaaaccgcacggagccctatataatatggcggcaactaatccggaaattgcagatgcaatcgcaaaggcaatttatcatatgaattcaagtctatcactttacggattagcaaatagcgaggcgtttatacaggctgcggaaaaatacaatataactctcgtacaagaagctttgcagatcgtctt

SEQ ID NO: 10092 - DNA, 1185 bp, Bacillus anthracis
tttaaaaaagctagttctattattgagactttaaagcagcaaggacatgaggcttactttgtcggtggaagcgtaagagaccttattatcgataggccgattggagatattgatattgcgacatctgctttacccgaagaagtgatggctatatttccaagacatgttcctgttggtcttgaacatggaactgtaattgtagtagaaaatggtgagccttatgaggtaaccacttttcgaacagagagtgaatatgaagattttcgaagacctagtagtgttcaatttgttcgttcattagaagaggatttaaaacgtcgtgatttcacaatgaatgcaattgccatgacagaagaaggcgaaatggtcgatttatttgcaggacaggaagcgattcaaaagagagaaattgtgacagtgggaaatgctgcggatcgttttcaagaagatgcccctgcgaatgatgcgtggtattcggttcgtaagtacgttaggtttttctttagagacgaaaacgaaacaagcaattgaaacatatggacatttgctggaacatatagcaattgagagaattacagtggagtttgaaaaactgttaactggcacatattgcgtgaagggtctcaaagaattagtggaaacgaaactattttctcatctgccatatctacaaatgtcagaagagagattattaaaagctacgcagtataactgggattcttttgaaacagacattgaggcatgggcgtttttcttatattgtattggagaagaacatccatctgtctttttacgtcaatggaagttttcaaataaaaaaataaaagattatcgtcgcagttttattaacgaatccgtaagagaaaggagaaaggattgggatacagtctttctttataaaacgggaatttcatatagctgaaatggcagaaagagtatatgaagcgatgattgaaagctatgatcatacatctgttgaacgggtacaaacgttgtttcaagcattaccaattaaaagtcgacaagagatggatgtgactgggaatgatttgttaaactgggcaagtaaaaagcccgggtcatgggttgctgaaatgatttcaaagatttgaggaagcaatcgtacaaggaaacgtagttaatgagaaagagtgtataagggagtggctgcaagaatgcaatcta

SEQ ID NO: 10093 - DNA, 855 bp, Bacillus anthracis
atgcctttagtttctatgaaagaaatgctaaacaaagcactagaaggaaaatacgcagttggtcaattcaacatgaacaacttagagtggactcaagctatcttagctgctgcggaagaagaaaaatctcctgtaatcctaggtgtatctgagggtgcagctcgtcatatgactggtttcaaaacagttgtagctatggttaaagctttaatcgaagaaatgaacatcactgttcctgtagcgattcaccttgaccatggttcaagcttcgaaaaatgtaaagaagcaatcgatgcaggtttcacatctgtaatgatcgacgcttctcaccacccattcgaagaaaacgtagaaactactaaaaaagtagtagaatacgcacacgctcgtaacgtatctgttgaagctgagcttggaacagttggcggacaagaagacgacgtaatcgctgaaggcgtaatttacgctgacccagctgagtgtaagcaccttgttgaagcaacaggtatcgattgcctagctccagctttaggttctgtacacggtccttacaaaggtgagcctaacttaggattcgctgaaatggaacaagttcgtgacttcactggtgtacctttagtattacacggtggtactggtatcccaactgctgatatcgaaaaagctatctctttaggtacttcaaaaatcaacgtaaacactgagaaccaaatcgagtttacaaaagctgttcgtgaagtattaaacaaagaccaagaagtttacgatcctcgtaaatttatcggacctggccgcgacgctatcaaagctactgttattggtaaaattcgcgaattcggttctaacggtaaagcg

SEQ ID NO: 10094 - DNA, 1400 bp, Bacillus anthracis
cgtttggactatttctaaagcgttatcctttcatcgggggaacatggaattcacttatttccgtgatgcagggaaagttacacatcacgcaatcccggaaaaaaactggagctgggaacgatttccttgggtgggtagaccttcggcttcaataggacaaaggaagaattcgttcgcattcaaaaatgccgcagaaaaaaattaaaaatgcctcggacattttacctggtggtaggtatcgggtggtcctaccctaggacgcacgtgcagcaattgaaattgttaacccatcttttctacattccgctatctaaagacccactgtaaaactcccacaagtgctatttgttggacaaaacattagctccacttacatgaaagattaatgggatgtatagaaaggtaaagactcctctattaacgtattttccaaatcaggtacagcgacagagcctgcactagcatttccgtattttccgtaagttattagaagaaaagtacgaaaaagaagaagctcgcaaacgtatttatgcaacgacagataaagcacgtggtgcattaaaaacattagctgataatgaaggttacgtaaacattcgttattccagagtgatgttggaggacgtttctctgtattgacgccagattggtttattaccaatcgcagtaagtggcttaaatattgaagagatgatgcaaaggtgcaggtaactggtcgtgatggcttcgtagcatacaagtactagaagaaaacccagcttaccaatatgcagtagttcgtaacgctttatacaataaaggaaaaacaaattgaaaatgcttattaacttatgagcccagcactttcaatactttcgctgagtggtggaaaacagttatttggtgaaaagtgaaggaaaaagatcaaaaagggtattttttcccatcttctccaaactttctcaactgacttacactcattaggtcaatacgttcaagaaggtcgtcgtgatttatttgaaacagttctgaaagtaggtaaatctacacatgaactaacaatcgaatcagaagaaaacgatttagatggattaaactaccttgctggtgaaactgtagacttcgtaaacacgaaagcatacgaaggtacattacttgcacatagcgatggcggagtaccaaacttaatcgtaaatattcctgaattaaatgagtacacattcggttaccttgtatacttcttcgaaaaagcatgtgcgatgagcggctacttattaggtgtaaatccatttgaccaaccaggagtagaagcatacaagaaaaacatgtttgcttttccttggtaaaccccggatttggaagaattaaaagcccgaattgggaggggggtttaaaaataaaaaaaaggggcccggaatccg

SEQ ID NO: 10095 - DNA, 2651 bp, Bacillus anthracis
aaagagaaagttgtaaatgaaatgcaggaagtaaaagagatgattgatacgttagtgaataacggtcggaaggctttacagcattttagaaagtttacaccaggagcaaatgaccaccatgtttcatgaaatggcattagcaggtgttgatcaacatatgcctcttgcgaagttggctgttgaagaaacaggtcgtggtgtatacgaaggataaatgcattaaaaatatttatgctactgaaatatatttggcatagcataaagaaagataaaacagtagggattattcacgagacccttcatgagaataaaatagaatttgcggagcccgtcggtgtagtagctggggtaccaccagtaacgaatccaacatcgacaacaatgtttaaagcattaaatagcgataaaaacgagaaatccaaattattttcgcatttcatctttcagcacaaaactgttctgttgcagccgcgaaaacagtatacgatgcagcggtgaaggcgggggcaccaaaacattgtattcagtggaattgaaaagccttctgtcgaagcaacgaaccatttatggaccctgaaggggttgccgctgttttaacaacctggaagggctggtatggtgaaatcagcttattctactggaaaaccagcgctaggtgtaggtcctggtaatgtaccatgttatatagagaaatcagcgcatataaaacgagcggttaatgatttgattttatcaaaaacgtttgataacgggatgatttgtgcatcagaacaagcaatcattgtagacaagggaaatttatgatgatgtgaaaacagaaatgattacaaatgattgttactttgtaacagaggaagagagaagaaaattagaaaagcttgttattaatgaaaatacatgtgcagtaaatagtgatattgtagggaaatctgcacagtatattgccgaaattagtggaattactgtacctaaaaatacaaaaatgcttgtagctggaaatacaaggcatcggagccgcatatccactatctcgtgagaagttaagtccagtattagcttgtgtaaaagcaaattcattagaagaaggatttacatattgtgaagaaatgttaaacctcggtggcttagggcattcagcagttatccattctgtaaataaagaagtgcaaaagcaatttggattacgtatgaaagcttgccgccttattgtaaatgctccttcatcacaaggtggaatttcggtgacatatataatggatttattcccatcccttacggtttggtgcgcgttcttacgggaaaaactcggttttcaaaaacgttacagggacgcatttattaaatataaaaaggttggcaaatagaaaaaagaatatgcagtggttcaaattaccaccaaaaatttattttgaaaaacatgcgacagcatatttagcaaatatgcctaacatttcacgtgcgtttattgtaacggatccaggaatggttgagcatggatatgtagatacggtcgcgcattatttacgtaaacatgcaaatgatgtgaaagtagaagttttctttgaggttgagccagatccatcagatgaaactgtttttaaaggtgcggaaatgatgagatgcctctcagcctgatgtcatcatcgcacttggtggtggttcagcgatggatgcagcgaaagggatgtggcttttctatgagtacccagaaacaacattctatgggaattaaacagaagtttttagatataagaaaacgtacatgtaaatatccggaattaggaagtaaggcgcagtttgttgccattccaacaacatcttggaacaggatcagaagtgacaccatttgcggttattacagataagaaaaataatataaagtatccacttgccgattatgaattaacgccagatgtagcaattgttgatccgcaaatttgtaatgacagtaaaaaccacattaacagcagatactgggatggacgtattaacgcatgcaatcgaggcatatgtgtctgttttagcaaatgattatacagatggattagcattaaaaggccattgatctcgtatttaaatatttaccaagagcatttaaagatggacatggatggagaagcacgagaaaaaaagcataatgctttctgcaattgccagggatgggattttgccaatgcttccctaggattaatcacagttttagcgcttaaatttggaccagaatttccatattccgcatggacgtgcgaatgctattcttatgccgcccgcaaattcgttataatggtattaaagccagaaaacatgcatttgttcccaaaatatgagcactttgtggctgatgaacgctatgcacatattgcgagaatggctcgggctaccagcaagttcggtggcagaaggtgtagaatcactcgacaaagcaattattgatctcggaaaaagtttaaatataaatatgagtattgcgggacaaggagttgctaaagacccaatttgaaggaggtgttgggattattagcagaaaagagcttttgaagatccaatgtacaccagctaatcggaaattacttctcatttcagagctgaaaggaaatttttagggaaggcatttaagggtggttaatggttataaaagattcccagtaaac

SEQ ID NO: 10096 - DNA, 585 bp, Bacillus anthracis
atgcccgcactttttttgtcgggttctatgactacaaactatgttctgagaaaaccttggaggtggcttactattagcaaggatatgatgattaacgagcaaattcgtgcacgtgaagtacgtttagttggcgcaaatggcgatcaacttggaatcaagtctcgtaatgacgctttagacttagctgcaaatcttaatcttgatttagtattagttgctccaaatgcgaaaccgccagtatgccgcattatggactacggtaaattccgctttgagcaacagaagaaagaaaaagaacagcgcaaaaatcaaaaagtaattagcatgaaagaagttcgtttaagtccaacaattgatgaacacgactttaacacaaaacttcgtaatgctatcaagtttttagagaaaggcgacaaggttaaagcgtcaattcgctttaaaggacgtgccattactcataaagaaatcggtcaacgtgttttagatcgcttctcagaagcttgtgctgaagttagtacaatcgaatctaagcctaaaatggaaggacgcagtatgttcttagttttagcaccgaaaaacgataag

SEQ ID NO: 10097 - DNA, 1990 bp, Bacillus anthracis
gtgcatcagcgattaatttctatttttagaggagtttttagaagagaaatcgatgttaaatcgagcttttttagcgagccgtttacatgtatcaacgaagacgattcaaaaagatataaaattattaaatgatatattggaagaaaacggagcgaaaattgaatcgcaaagagggactggatacgagctagaaattatacaaacgaagaagtttgaagagttttgggtgagtccatttcaaaaacagaacggaaaaaatccccactttcttatgaagaaagccatagcgtacattctgcaacgtattttaaccaccgagggatatgtgaagctttcacagttagcagaggatatttatgtaagtaaatcgaactgtaaatttaattatgaaagaatgttacagcatatatgtgggcgccttatcaattacaaatgtggaaacagagaccagctattatgcgtatacagatattgtgggagaggaggttttcatattcgttttcttgtttatcacaatatggtttaccgcgttatgaccatactccgtttcatgagcaatttgagcagagtgatacatatgtatcgttacctcatataccgctttatccgttcggttatattaaagtatatcgagggagggacgatatatttatcagatatagaaattgataatttagtcattcataaaggcaattgcattaaagcgttgtgaagatcagcattatatgaaaggactaaatgaggaacaagctgaacttataataaagaaagaatatgcaattgcgaaacagattgtaggggatttagagaaagagttgcatctttcatttccagaagaagaagttttatatgtgacaatgcatttattaagtactgctgtcacatcgaaagattcgttaggaaaaatgtggaagaactattaggggaaagattttatatgcttttctgcgcaccatattctttttaaaggaggcggaaggaccggaatctttgttttttattatgatgaagaattaatatttgggatttggtgtttcatttaaaaaacgttattaaaccccgttgaaagtataagtttaattacgagaacaccttcttttggcagaagtgaaaaagaattatccgtatgcttttgaaattgcggtttctcgttggggatataattggtgaatatacaggtgagtcgattccggaaagtgaaattggttatattgccattcacttcggcggagcaatgagccgtttacaggaacaaattcaaaagaagagatgtttattagtttgtgcgactggtcaaggaagcgcccagctattgaaatataaaattttatcacagttccgagataaattagaaattgtagtgtgctacaggttactatcaattgaaagtggaagatctgtataaagaaaagatagattgtattattagtacgattcatataccaagtggtttacctgtacctattataaaagtaaactcaatatttgatgataaagagattaagtcaattggtcagcagttgtttacgcacgtgaataatagtgtacagcaatatatgaaggaagatttaatctttttaaatcatagtgcttctacgaaggaagaggttatccaatttttatgtgagaaagctgctgagaaaaactatgtgccagaacacttttatgactctgttatggaaagagagaatacatctcctacagcggttggaaatttagttgcaattccacatccgatgcagttattaagtgcggaaacatttttgatgttttgtacactgaaaaaagctgttgattggggagataggaaagtacaaagttattattttatttagtgtaaagccgcaataataatgaggatttacaacgtctttatgattttttatatgatattatgtctagtcaaagtacgatagagaaattaacgcatgctgaaggtattgaagatttccaagaggtattactatctatataagaaaagtatgtaaaa

SEQ ID NO: 10098 - DNA, 644 bp, Bacillus anthracis
atgttaaaacgatatgtatttcgcattatgatgacttgtttacttgccaattgcattatgcgtaccatggaatgctttcacaggagtttctttattagagatgtaccagaagtatgagggaacgagtgcaaaaagaagtacatgcagcagaagttaagagaaatgtttgctccgagtaaagaagtgataaatgctttagagcaagcaaacgactggtctaaatatcgttcaattgaaatgacagcaacaggttatacgtcgggaattgagtccactggtaagaagccgggacatccggagtatggtattacatattcaggtgttaaggcgaaaagggattttatttcccccattcgacagcggacttaggggtattcccaaatgggaacaatcttattcgtacccagttatgggttagggtgtagtagctgataagggccggtgcataaaaaggaaactgtctgattttgtactatgatacggggaaaagatgtttatagccaatgggggtaagaaaaaagtaaatgtatatgtagttaagataggaaatggtaagttttcagaagaagagttaacgatgttaaaccaagatgagacgattgcagtggtttcgcgggacatatttaaaacaaagatagtctagt

SEQ ID NO: 10099 - DNA, 942 bp, Bacillus anthracis
atgaaacgtaagctatttattttatttactattatgctagttgttctttctatcgttggctgttcttctcaaaaagaagaatcaaaagcaaaagaacaaccgaaaacaaaagttgtaaaacacgctaaaggggaagctacaattccagtaaatccaaagagaattgttgacttatctggatcaacagaagaattattacttcttggacacaaacctgttggtacagcaaatacatacaaagataaaatccaaaagcatttgacagaaaagctagatggagtaaaggcagtaggttggtactgggcacctaaagttgatttagaagctgttactgctttgaaaccagacttaattattttgaacaatcgtcaattaaaaatttatgatcaactagaaaaggttgcaccgacagttgttctagaaacaaacttagaagactggcgcggtaagtttaaagaagtaggtaaactatttgacgaagagaaaaaggcagacaaatggattgcagactacgataaaaaagccgactctttatctaaaaagattaaagagaaaacaaaagatgacagctttatgttcgtcgcagttacaccacaaaacttccgtgtatacggtagcttcgggtacggtgacatcatctttaacgacttaaaacttccagcaacaaaaggtacagatttaaaacaaacgatggcgcaagtatcgctagaaggtcttgttgcattccaacctgaccaaatgtttattgtaaactttggcggcgaagctgataaagtttacgaagactacaaaaatagtgctgtttggaaagacaataaagcagtaaaaaataatcacgtatatgaagtatcgaatgaagtcttcaatacgaaagctttcaatccaatcggaaaagatatgctaattgatgaaatcgcaaaagaaattttagctaagaataaa

SEQ ID NO: 10100 - DNA, 750 bp, Bacillus anthracis
atgaacgctctcgctggcaaaacggtattgattacacgtgctcagcaccaagcaaaacaaatgagtgtagcggtgaaagaaaagagcggaattccattggaaattccgcttttgcgtatggaaggtatgtttcataggcaaattcaacatatagcagggcagttacattcgtatgattgggttatttttacgagtaaaaatggggtagctttttttctagattgtttaggaaagaagctacccgtaacgactaaaattgctgcagtaggcgtgaaaacaaagttagagttagaaaagcgaggctatcatgtagactttgttccaacttcatttgttgcagaagcatttgcagaagagtttgtaaaaagattaagtggaaacgaacgtattttatttccgaaagggaatttagcaagagaggtaattccggttgcacttcgggaaattggtgtttctctagatgagctaatcgtatacggtacgaaagtgaatatagaaaaaaagcaagagcttatagcagcattgaagttagggaaagtagacattattacatttacgagcccttcaactgttactagttttgttcgtttacttgagggtacaaactggagagaatggacaaaaaaatgtacaattgcttgtatagggcctattacggaaaaagaggcgagcctttattttccgcatgttattatgccgaaagagtacactgtagaagcattactacaatgcgtttgtgaatctataaaa

SEQ ID NO: 10101 - DNA, 1236 bp, Bacillus anthracis
atggaaaaaaagagggtcgtaattacaggactaggagctgttacaccggtcggtacagatgttgaaacagcgtgggaaaacattaaaaagggtgtatctggaatcggacgacttacaagaattgatccggaactatttccagcaaaagtagcagcagaaattaacgactttgaagtcgagaaatatattgataaaaaagaagcgcgccgtatggatcgctttacacaatatgcagtagcagcagcgaaaatggcagttgcagatgcaaagcttgagattacagaagaaaacggacctcgaattggtgtatggattggttctggtattggcggtatggaaacatacgaagaacaatttaaaatttttactgagaaaggcccgcgccgcgtgagcccattcttcgtaccgatgatgattccagatatggcagcaggccaagtatcaatcgcaacaggagcaaaaggaattaacacttgttctgtaacggcttgtgcatctggtgcaaactcaattggtgatgcatttaaagcgattcagcgtggggatgctgatgcaatgattacgggcggggcagaggcaccgttaacaagtatggcattcgcaggatttagctcagcgaaagcattaacattcaatgaagacccagcaacagcttgccgtccatttgataaaaaccgtagcggtttcgtaatgggtgaaggttcaggtattttaattcttgaagaattagagcacgcattagctcgtggtgctcatatttatgcggaaatcgctggttacggtgcaactggtgatgcattccatattacaatgcctgctcctggcggtgaaggcggcgtgcgcgcaatgcgtcaagctttagcggatgcaggtctacagccagaagatattgattacattaatgcgcatggtacaagtacggatgcgaatgaaaagtatgaaacgatggcaattaaagaaacgttcggtgagcacgcgtataaggtagcgatcagctcaacgaaatcaatgacaggtcacttattaggagcagcaggtgctgttgaagcgatcttctctattaaatcaattacagatggagtaattcctccaacaattaactatgaaacaccagatccagaatgtgacttagattacgtaccaaataacgcgagacatcaagaagtaaacgcagtgttaagtaattcattaggattcggtggtcataacgcagtattagtatttaaatcgtataaa

SEQ ID NO: 10102 - DNA, 868 bp, Bacillus anthracis
tacatcaggatgaaacgtaagctatttattttatttactattatgctagttggtctttctatcgttggctgttcttctcaaaaagaagaatcaaaagcaaaagaacaacccgaaaacaaaaagttgtaaaacacgctaaagggggaagctacaattccagtaaatccaaaaagaattgttgacttatctggatccacagaagaaatattactttcttggacacaaacctggtggtacggccaatacttaccaagattaaatcccaaagcatttggaagaaaaagctaaaagggagtaaaagcagtaaggttggtactggggcaccctaaagttgatttagaagcttggtactgctttgaaaccagacttaattattttgaacaatcgtcaattaaaaatttatgatcaactagaaaaggttgcaccgacagttgttctagaaacaaacttagaagactggcgcggtaagtttaaagaagtaggtaaactatttgacgaagagaaaaaggcagacaaatggattgcagactacgataaaaaagccgactctttatctaaaaagattaaagagaaaacaaaagatgacagctttatgttcgtcgcagttacaccacaaaacttccgtgtatacggtagcttcgggtacggtgacatcatctttaacgacttaaaacttccagcaacaaaaggtacagatttaaaacaaacgatggcgcaagtatcgctagaaggtcttgttgcattccaacctgaccaaatgtttattgtaaactttggcggcgaagctgataaagtttacgaagactacaaaaatagtgctgtttggaaagacaaataagcagtaaaaaataatcacgtatatgttcta

SEQ ID NO: 10103 - DNA, 906 bp, Bacillus anthracis
ttgattatagtagctgtgatgattccagcagcacaatggccttttcaaagatggttaattgaatcagctgttgctccaactcctgtttctgctattatgcatgcgggtttagtaaatgctggcggtatcatgttaactagattttcgccactttttcatgatgatattgcacaaatcattttactaattttctctagtatttctgtcttaataggaacaggaattagtttagttcaagttgattataaacgtcagctagtaggatctactattgcacaaatgggatttatgctgattcaatgtgcattaggcgcttatttagcagctgttattcatttaattttacatggtttatttaaagccacactgtttttacaagctggttcctcagtacaacgtgttgaggtagtgaagcagtctaataaaaagatgtccaatttatggatgatagtcgggcgtgttttagggttatttatagcaattgctttctggtttataacttctggagaggggtatcaattagttagtgcgttaatcttaggctggtcactatacttttcttggaaacagcttgttgtttttggagagggaagaatgggacgaattgctggcttaattgttttgattggattttctctcatttactttaccgttcataattctctttataaatggttgcacactgacatgtatcaaagtgttcaaccttcagctccagccgttatctttgttatatgtatcttactatttagtagtgttatttgtactttcgttactcgtaatcaatcttctactttatccgctgtactttatctttggtcagttcgagtaggtgaggcgagacgaaagtcagtagaaagtcatccaagctatctgaaacatgatgtatcaaagggaggtaattcg

SEQ ID NO: 10104 - DNA, 1728 bp, Bacillus anthracis
aagatgagaagtgacatgattaaaaaaggttttgataaagcgccgcatcgtagtttattaaaagcaactggtttgaaagatgaagactttgataaaccgtttatagcgatctgtaattcttttattgaaattattccaggtcataagcacttaaatgagtttgggaagcttgttaaagaagcagtacgtgcagcaggtatggttccatttgaatttaatcccaattgaagtagatgacggtattgcgatggggcatatcggtatgcgctattccctttccaagccaaaaattattggcgaatccataaaaaccggtggaaatggcccttgggttgaagggatgaattgccttcccaactgggaacaaattcccccccggatgaagaagggtggccctcctaattacctttccactggttttggtttcagggggcccaatgccggttgaaaaacctcctaaaggaaacgtggtgaattaaagtccggttttcaaagaagaaggggctaatcatcctgggaaatttctaaagagaatttaaggggattggaaaaccatgcctgtcccatctggggggtcttggttctggataggtttaccgcgaactccatgaacttgttatatggaaagggtaaggtttaccctcttcctgggaacggaaggaattttggttatgtgttcaagaaccccgagaatttaattaaccaggccgccgaaaaaatttaaaatttttatttggaaagaaattttaaaccgagagacattgtaacggaagaagcaattgatgatgcgttcgcgcttgagtgtagcaatgggcggttcaacaaataccagtgttgcatacattggcgctcgcgcaagagggctggattagattacgatatgaaccgtattgatgccgttttcaagacgtgtaccacatttatgtaaagttaagccctgctttccaattgcatatggaagacatgattcgtgcagcggggattagtgcaatttgaaaagagatgagccgaaaagaagggggtacttcatttagaccgtattactgctacggggcaaacattaagagaaaatattgctcatgcagagattaaagataaggaagtgattcattctcttgaaaatcctcatagtgaagaaggtggattacgtatattaaaaggaaaccttgcgaaagacggagcagttattaaaagcgggggcaactgaagtaaaacgatttgaaggaccttgtgttatttttaattcacaagatgaggcgcttgccggcattatgcttgggaaggttaagaaaggagatgtagttgttattcgttatgaaggacccagaggcggtcctggtatgccggaaaatgttagcaccaacgtcagcgattgctggcatgggattaggtgcagatgttgcgttattaaccgatggtcgtttctctggtgcttcacgtgggtattcagtaggtcatatttcgccagaagcagctgcggggcgaacgattgcacttctttgaacaaggggatatcgtttgtatcgatgttgaggaaaggttgttagaagtaagagttagtgacgaagaattaggtaagcgtaaaaaagaatggaaacgaccagaaccgaaagtgaaaacgggctgggcttggacgttatgcaccaaatggtaacatcggcgaatacaggtgcagtcctaaaaatcccgaattttgattgagtcaatataaaagagataaggatgata

SEQ ID NO: 10105 - DNA, 624 bp, Bacillus anthracis
atgagtgatcgtcaagcagcgttagatatggcgttaaaacaaatagagaagcaattcggtaaaggttcaattatgaaattaggagaacaagcagagcgcaaagtttctacggtttctagtggttctttagcacttgatgtggcattaggggtaggcggatacccacgcggccgtattatcgaaatttacggacctgaaagttcaggtaaaacaacagtttcattacacgcaattgcagaagtacagcgtcaaggtggacaagcagcgttcattgatgctgagcatgcaatggatcctgtatatgcacaaaaactaggtgttaacatcgatgaattactattatcacaacctgatacaggggagcaaggtttagaaatcgcagaagcacttgtacgaagtggtgcggttgatattatcgtaattgactctgtagcagctcttgtaccgaaagctgaaattgaaggagacatgggtgactcacacgtaggtttacaagctcgtctaatgtctcaagcacttcgtaaactttcaggtgcaatcaataaatcaaaaacaatcgcaatctttattaaccaaattcgtgaaaaagttggggttatgttcggaaatcaactacaagttgct

SEQ ID NO: 10106 - DNA, 1344 bp, Bacillus anthracis
atgggtaaatattttggtacagatggagtacgcggggttgcgaataaggagttaacacctgaattagcgttcaaaattggacgtttcggtggttatgtattaacaaaggatacagatcgcccaaaagtaattattggccgtgatacacgtatatcaggacatatgctagaaggagctttagtagcaggtctattatcaactggagcagaagtaatgcgtcttggtgttatttctacaccaggtgttgcttatttaacaaaagcgttagatgcacaagcaggtgttatgatttctgcatctcataatccagtacaagataacggaattaaattcttcggttcagacggtttcaaattaacagatgagcaagaagcagaaattgaagctttattagacaaagaagttgatgaattaccacgtccaacgggtactaaccttggacaagtgagtgattattttgaaggtggacaaaaatatttacaatacattaaacaaactgtagaggaagatttctctggtttacatatcgctttagattgtgcgcatggtgctacgtcttctttagctccgtacttatttgctgatttagaagctgatatctcaacaatgggaacttcaccaaacggtatgaacattaacgatggagtaggttctacacatccagaagtattagctgaattagtaaaagaaaaaggtgctgatattggtcttgctttcgatggtgatggtgaccgtttaatcgctgtagatgaaaaaggaaacatcgttgatggcgatcaaattatgtttatttgtgcaaagtacatgaaagaaactggtcaactaaagcacaatacagttgtttcaacagttatgagtaacttaggtttctacaaagcacttgaagctaacggtattacaagtgataaaacagcagttggtgaccgctacgtaatggaagagatgaaacgcgggggatataacctaggcggagaacaatcaggtcacattatcttacttgattacattacaactggtgatggaatgttaagtgcacttcaacttgtaaacatcatgaaaatgacgaaaaaaccattatctgagcttgcaggagaaatgacaaaattcccacaattactagtaaacgttcgtgtaacagataaaaaactagcattagaaaacgaaaaaattaaagaaattattcgtgttgtagaggaagaaatgaacggtgatggccgcattcttgttcgtccatctggaacagaaccacttattcgtgtaatggcagaagcaccaacacaagaagtttgtgatgcatatgtgcatcgcattgtagaagttgtgaaagcggaagttggcgctgaa

SEQ ID NO: 10107 - DNA, 366 bp, Bacillus anthracis
atgatccaacaagaatctcgtttgaaagttgctgacaactctggtgcacgtgaacttttaacaatcaaagtattaggcggctctggtcgtaaatatgctaacattggtgacattatcgttgctacggtaaaacaagcaacaccaggtggcgttgttaaaaaaggtgacgttgttaaagcagtagtagtacgtacgaagagcggagctcgtcgtccggacggttcttacatcaaatttgatgaaaacgcagcggttatcattaaagacgataagagcccacgtggtactcgtatcttcggaccagtagctcgtgaattacgtgatagcaacttcatgaagatcgtttctttagctccagaagttcta

SEQ ID NO: 10108 - DNA, 1296 bp, Bacillus anthracis
atggacactagatttactatttgtagtaaagtacggaaaaagaaaggatcgttatttgtgaaacaagtgaagtttatacatgcggctgatttgcatttggatagtccgtttaaaggaatggagatgaatgtaccgcagtctgtttgggagagaatgaagcagagtacgtttgaatcgttcgaacgtattattgataaagcgattcaagagcgcgttgatttcgtattgctagccggggatttgtatgatgcggagacgagaagtttgagggcgcaagtgtttgtgcgcgagcaaatgaagagactttcgcagtacgatatccctgtttttattattcacggtaaccacgatcatttagggggaagctgggcagcaattgagtttccggaaaatgttcatgtgtttacagagccttacgtagaagagaaatcattttataaaaatggtgagttattagcttctatttacggatttagttatttgcagcaagcggtaacggataatatgacagcgcaatatacgaaaatgagtgatgcgccttttcatattggcatgcttcacggaagtgtggaaggcgatgcagagcataatcgctatgcaccgtttcaaattcgtgagctgaaagaaaagcagtttgattattgggctcttggccatatacataaacgtgaaattttattagaagagccatacatcatttatccaggtaatatacaaggacgtcatcgtaaggaaacgggcgagaagggtgcatacctaattgaacttacgaaacaaggatcgcactgttcctttttccatacggcggatgttgtgtgggatgagatagaagtgaatattgatggacttgaaactgttgatgaacttatgacaagtgtgtcaactgcgatgaatgagtgccgaagagaagaagaaggtacgcaattaactgtcgtatttacaggacaagggccactttctccttatttacgtgatgaaaagcgcgtagaagagatttttcatattttagcagctggtgaagagcgaaaagatttcgtatatacgatgaagtggaaaaatgagacggtttcttttgcagaaatcgagcgtttgaaagaagaaaatcatttcgtcggtagtgtgctgaaggagttagaagctttcactaatatggacggcgtgttgcgcagtatttggacatctcctatagcgcgtaatagtattgaatcttttacagaagaagagaagaaagagattcaaaaggaagcggaaaatattattttagaacaattattccagcaagagagggataagaaa

SEQ ID NO: 10109 - DNA, 738 bp, Bacillus anthracis
ttgttaaaagtattagtagttgatgatgaaatgttagcacgtgatgaactaaagtatttattagagagaacgaaggaagttgagataattggtgaggctgattgtgtagaggacgcattagaagagttaatgaaaaacaaaccagatattgttttcctagatattcaattatcggatgataacggattcgaaatcgcgaatatattaaagaagatgaaaaatccacctgcaattgtatttgcgactgcctatgatcaatacgcgttgcaagcatttgaagtagatgcgttagactatattttaaagccatttgatgaagaacgtattgtacaaacattaaagaaatataaaaaacaaaaacaatcgcaaatagaaatgaagcaagaaataaaaggggcagatgtaacggcagagatgcataaattagcattaccaattgaggaatcgattgttcttgtaaatattgaagatattgtatatgtagggcttgtggacggaaaagtgacagtaaaaacagtgagggaaacatatgtaacacacgatacgcttgtaattttggaaaagaagttgccacaagcaagtttcatgcgtgtccatcgtagctttattgcaaatattaatcatattactgaaattcagccatggttcaactctacttataatttaattatgaaagaaggatcaaaagtacctgttagtcgtacatatgcaaaagaactcaagaagctgcttcgtatt

SEQ ID NO: 10110 - DNA, 570 bp, Bacillus anthracis
gtgccaacagttggattaaatacaacgagtacaaatcatattccgttacaagcaggagcacaaacaaaaaacgcatctgttactggtgcacagtcgacagctcaacaagcaaacggagtatcagcaagtactcaaaaaacacccggtattatggataaagatgatttcctgaaacttttcttagcaagctttcaacatcaagatccgtttaatgcgatggatatgaaccaaatgatgaaccaaacagcacagctatcgcttatggagcaagtacagaatatgacgaaagcagtagataaactgcaatcaacgatgtattcgacggctcttgatggagggatgaagtttttaggaaagtacgttagaggtgtaagcaataatggaaagcaagtgactggtcaagtggaaacagttcgacttgctgaaaataacgatgtgcaacttattgttgataatcaagttgtctcacttcgtttcatagaaagggtttctgataaaccgataacagaaactaatccggaagatgagaagaaagatgatatagaaaaaaatgaagaggttaagccagat

SEQ ID NO: 10111 - DNA, 4299 bp, Bacillus anthracis
atgtctttaacaaatgaacaaaaagagcgatttcaaattttgctccagcagttgcaaataccagacgaccttataaatcaatatttacaaggcggtggtattgaaagactcgttatcgataaagcgaataaaagttggcattttaatttacaagtgccacgtattttgcctacagaattatatgaattgctagaaacaaagcttaagcaatcattttctcatattgcaagaacaacatttgcattagaaacagagaataaacaatttactgaagaagaagtgagggcgtattggccactttgtacggaacgaattacattttcacctatgtttgcttatttaaagaagcagcttccgcaggtgaatggagtgaagttacttataaatgtgaataatgagctggaatctactgctttaaagaaaaacgttgcaaaaccagtaggggatcaatacgaggctttcggattcccgcgttttcagttagacacacatatacagcaaaatacagaagaaatgcaaaagtttcgtgagcaaacgcaacaagaagaccgcgagcgtgttatacaagctatggaagaaatggcaaagaagcaagctgaagaaagcagcgttgtgcatgaaggaccgattacacttgggtatcttattaagccggatgaagagattacaccgatgcgagaaattcaagatgaagaaagaagaaaaacagttcaaggatatgtcttccatgtggaaacaaaagaacttcgtagtggacgtacgttattaactttaaaaataacggattatacagattctattatgatcaaaatgttctcacgtgataaagaagatattccaatgctacaatccttaaaaaaaggaatgtgggtgaaggctcgtggttctgtccaaaatgatacatttgttcgagatttagtaatgattgcaaatgatattaatgaaataacaggaccgtctcgtaaagataaagcaccagaaggtgaaaaaagagtagagcttcatcttcatactccaatgagtcaaatggatgctgttactccagtttctaagcttgttgctcaagctggtaaatggggacatgaggctattgcggttacagaccatgctgtggctcagtcgttcccggaagcatattctgcggggaaaaaggctggagttaaagttatatatggtgtggaagcaaacttagtgaatgacggagtaccaattgcttataatgaagaacatcgtttactggctgatgaaacatatgttgttttcgacgttgagacgacaggtttatcagctgtgtatgatacagttattgagttagctgctgtaaaagtaaaaggtggcgaaattattgaccgctttgaatcttttgcaaatccacatcaaccattatcggcaacaatcattgagttaacaggtattacagatgatatgttaaccgacgcaccagaagtagatgaagtgtttaaaaagtttgaggaatggatgggtgaccatacacttgttgctcataacgcaagcttcgatatgggctttattaatgtaggattcaaaaaagctggtttagaaaaaacgaaaaatccggtaatagatacgttagagcttgcaagattcttattcccagaaatgaaaaatcatcgtttaaatacgttatgtaaaaagatggacattgaattaactcagcatcaccgtgcgatttatgatacagaagcaacgggatacttactagtgaaaatgttaaaagatgtaattgaaaaaggttttgaatatcacgatcaattaaacgatagtatgggacaaggggatgcatataagcgcgggcgtccaagtcatatgacattacttgctacatcggatgttggattgaaaaatttatataaacttgtttcatattctcatctaaattacttttaccgtgtaccgcgagtaccaagatcactattaaaaaaatatcgtgaaggtattttagtaggaacggcttgtgataaaggtgaagtgtttgaggcaatgatgcaaaaagctcctgaagaggtagaagaaattgcgcagttctacgattacattgaagtaatgccaccagaagtgttacgtcatttagtagagcgtgaacttgttcgggatgagggacaattaaaaacaattatttcaaacttagtaaaactaggtgagacgttagataaaccagttgtcgctaccggaaacgtgcattacttagatccagaagatgcaatgtatcgcaaaattttagttagttcgcagggcggagccaatccgttaaaccggcattcattaccacctgtacatttccgtacaaccgatgaaatgttagagtgtttctcattcttaggtgaagatgtagcgaaagaaattgtcgtaacgaatacacaaaagattgcatcattaattggcgatgttcatccagtaaaagatgatctatacacaccgaaaattgaaggtgcagatgatgaaacgcgtgatatgagttataaaatggcgcgtagcatttatggtgaagagttacctgaaattgtagaagcgcgtttagaaaaagaattaaaaagtatcatcgggcatggattcgccgtaatttatttaatttcacataagcttgtgaaaaaatcgttagtagacggatatctagtaggttcgcgtggatcggtaggttcatcattcgttgcaacgatgatggaaattacagaagtaaacccattaccaccacactatgtatgtccgaagtgtaagcaatcagaattctttaatgatggttctgtaggttctggttttgacttaccggataaagaatgtccaacttgtaatattccatatgtaaaagatggacatgacattccgttcgaaacgttccttgggtttaaaggagataaggtacccgatatcgatttgaatttctccggggaataccaaccacgtgcccataactatacgaaagtactattcggtgaagattatgtatatcgtgcaggaacgattggtacagttgcggaaaaaactgcttatggatatgtaaagggttatgcaaatgatcataacttaacgattcgaaatgcagaaattgaccgcttagtagcaggatgtaccggtgtaaaacgtacaacaggacagcatccaggtggtattatcgttgtgccagattatatggacatttttgatttctcaccaatacagtatccagcagattcaataggtgctgagtggagaacgacacactttgacttccactctattcatgataatttattgaagcttgatatactaggacacgatgatccgacagttattcgtatgttacaagatttaagtggtattgatccaaaaacaattccaacggatgatccagaagtaatgaaaattttctcagggccagaatcgttaggcgtaacggaagaacaaattaactgtaaaacaggtacacttggtataccagagtttggtacgaaattcgtaagacagatgttagaagagacgaaaccgacgacattctcagagttagtccaaatttctggattatcacatggtacggacgtatggcttggtaatgcaaacgagttaatttataacggtacatgtacgctgagtgaagttatcggttgtcgtgatgacatcatggtatatttaatctatcaaggtttagacccatcattagccttcaaaatcatggagtcagtacgtaaaggtaaaggtgtaccagaagaatgggaagaggacatgaaaagtaataatgtaccaggttggtatattgattcatgtaagaagattaagtacatgttcccgaaagcccatgcggctgcttacgtacttatggccgtgcgtatcgcatactttaaagtgcatttcgcgcttttattctatgcggcatactttacggttcgtgcagatgactttgacgtagaagcgatggcaaaaggttcagcatctatacgtgcaagaattgatgaaattgcgcaaaaaggtttagatgcagcaccgaaagagaagagtttattgacggtactagaaatgacacttgaaatgtgtgagcgtggatactcattccaaaaggtggatttatatcgctcacatgcaacagactttattattgatggagactcattaatccctccatttaatgcggtgcctggtcttggtacaaacgcagctttaagtattgtggaagcacgtaaaaatggagaattcttatcaaaagaagacttgcagcagcgtagtaaggtttcgaaaacaattattgagtatttagatagtcaaggttgtttaggtgatttgccggatcaaaaccagttatcgctgttc

SEQ ID NO: 10112 - DNA, 1347 bp, Bacillus anthracis
atgtccgacgttctgttactgagtcgttttcaatttgcaattactattttttatcactttttatttgtacctttgacaatcggacttgtcattttagtagcatgtatggaaactcaatacgcccgcacattgaatccaacataccgcaaaatggcaaatttctggggtaaattatttacaattaacttcgtaatggggattataaccgggattacgatggaattccaatttggaacaaactggtctgagtactccaaatatatgggagatattttcggatcccctctcgcaatcgaagcactcgttgccttcttcttagaatctactttcatgggaatatggttattcggtaaagacaaaatttcaccaaagttccgtgccttctgtatgtggatggttgcacttggaacaaatatttccgccctttggattattacagcaaacggctttatgcaaaaccctgttggctacgtcgtacgtaacggccgcgctgaattaaatgatttctgggcactcgttacgaatccatacgcttggaacatgttcttccatactgtaattggttgttatattgttggtgctttcttcgttatggcaattagtgcctatcacttattacgaaaaaatgaagttgaattcttcaaaaagtcatttaagtttggtttaatgttaggcttattcgccgcaacaattacaccgtttataggacatcaatctggtgtatcagcagctaaatatcaaccagctaaaggtgctgcgatggaagctgtttgggaaactggaaaaggacaaggcttctcgattgttcaaattcctgatgtaaaaaacgaaaagaactttgaattccttacgattccaaagttaggaagtttcttctatacaaattcatttgatggcgaaattgttggtttaaaagatattccgaaagaagatcgtccaaatgttaaccttgtgtactatagcttccgcttaatggttgcacttggtatgttctttatggcattaacttggtacggtttctacttaaaccgaaaaggaaaactggaaaactcaaaacgttacttaaaaattacaatatggtctgttttactaccatatatcgcaattaacgctggttggattgttgccgaagtaggtcgtcaaccatggacagtttataaactaatgcgtacagcagaatctgtatcacctatatctgtcccgcaaatttggttctctttaattagtttaatcttgttctatactttacttttaatcgcagacgtatatttaatgctgaagttcgcgaaaaaaggaccagcagcattagaagaacctgctactaagggaggcgtggctcatgtctca

SEQ ID NO: 10113 - DNA, 909 bp, Bacillus anthracis
gaaggaaacggcgggaaaatcatcggcaaggacttagggtttcaacattcgcgaggagagatcatgttcactttagatgcggatactattatggcgcaagacgccatttcttctcatggttagacacttgaaagatcaaaatgtagcagcagttcaggtaatgtcaaagtgggaatagacgaacttgtttatctacgtggcaacatgtgaaatatataccaggatttaaatttagaacgtagagcttttgatgagttaaattgtataccagtagttccaggggctattggggcgtggcgtaagaagaatgtagttgaatctggatatttaagcgaagatacattagcagaagatacagatcttactattacatttttacgtcaaggacatagaattgtatatgaagaaaaagcgtatgcttttacggagtcacctgaagatgtgaaaagtctcataaaacagcgatatcgttggtcatatggtacacttcaatgtctttgaaaacatcgaaaaggcgttatgtaattcaaagcataaaacgttaggatttattgcattgcctaacatgtggttatcccaatatgttctgcaattcattgctccttttgcagatatattaatgattatagggttatttagtagtgatccgctaaaaagtttttaggattttattttgtattctttttaatggatcttctcgcatctctatttgcatttaaattagaggaagagaatccgaaaccattagtatggttaattttacaacgctttatttatcgtcaatttatgacttatgttgtcgttaaatctatattctcatcgattcgaggagtagcggtaggttggaataagctaaagagagtggggaagtgtagaacattctacggaacataaggaggcatcttaaga

SEQ ID NO: 10114 - DNA, 435 bp, Bacillus anthracis
atgcgtaatttatttccagaaataacaaaacgtcaaaatggtatttttgattttggaccttctttattagaagggatgacagatgctttctttaaaccgatgaacatggatatttttaaagtagatgttcatgaacaatctgataaatatacagtgaaagcagatttaccaggttttcaaaaagaaaacattcaagttgaatttgaacaagatgtattaacgattcaagcaactaatcataatgaagtagaagaaaaaaatgagaatggcacatatattcgtaaagaacgttctataggttctgtaactcgacgttttagttttaaacaagttgaggaagaaaatgttagagcgaattacaaagatggcgtgttgacaattgaattgccaaaattgaaagaagaaaaaaacagtaaaacaacaattaatattgaa

SEQ ID NO: 10115 - DNA, 231 bp, Bacillus anthracis
atgagcataccgtcaatattaaggaaagagactttaaaaaagaaagataaaaatattgatctacaagaaaataatataaatgatttagttgtatcggctagccgagtgattgcgccactttggcctatctctacatttgcagctcatcacccttggatggggctggaaaagcaatcatttgaacaagttgcaaattggttaaaagaagctcgtaatgtggatatttatcaa

SEQ ID NO: 10116 - DNA, 584 bp, Bacillus anthracis
acgaaacaaaaagtaattgatgcggcaatatcgttgtttaacacgaaaggttatgatggaacgtcggtgcgagacattgcaaagcgagcggatgtgaatgtagcgaatatttcatattattttgctggaaagcaaggtttattagagcagcttattactgattttttggaagggtatattcatgtgattgaaacgtcgtttgaacagagagaatatttgtcggctaaagatgtgatggtgcaaatggtacgcgggattttacgatatcaatttgaaaatagggaactgacacgtttttttaccgagagctttcgcttgatacgacattaattcgcgaagtgatgaccgtttatttttctaaagaaagatattatatagagcaaatgattagacagggacaaatgaaacaagaatttaaaaaggtatcttttacaatgtttatgacgcaattaaaaggcatgatgaatatgccgtttttatatccgcaatatatatcagaagtgttgcattcttttccatctgagacttttttcttagaaatgtacacgaaagagattgaacaatggatggaacaaacattatgt

SEQ ID NO: 10117 - DNA, 411 bp, Bacillus anthracis
atgcggatattaggtttagatgtaggtacaaaaacagtcggagttgcaattagtgacgaaatgggctggacagcgcaagggcttgaaacaatcaagattaacgaagaacgaggtcaatttggatttgatcgcatttctgagttagtaaaacagtatgatgtggacaagatagtagtaggtttacctaaaaatatgaatggtacaattggcccgcgtggtgaagcatgccaacaatttgcagaaaacctacgagagctgttacaattagacgttgtaatgtgggacgagcgtttgtcaacgatggcagcggaacgtctactcatttcagcggatgtaagccgtaagaagcgaaagcaagtaattgataagatggctgcagtcgtaatcttacaaggatttttagatagtaaa

SEQ ID NO: 10118 - DNA, 1197 bp, Bacillus anthracis
atgacaaaaaaacgtcatctgttcacatctgagtctgtaactgaaggacatccagataaaatttgtgaccaaatttctgattcaattttagatgcgatcttatcaaaagacgcaaatgcacgtgtagcttgtgaaacaactgtaacaactggtttagtattggtagcgggggaaattacgacttctacttacgtagatattccaaaaatcgttcgtgaaacaattcaaggcattggttacacacgcgcaaaatacggattcgatgcagaaacttgtgcagttttaacatctatcgatgagcaatctgctgacatcgctatgggtgttgaccaagcgctagaagcacgcgaaggtcaaatgactgacgctgagattgaggcaattggtgcaggagaccaaggtttaatgtttggtttcgcatgtaatgaaacacaagagttaatgccacttccaatctcgcttgctcacaaattagctcgccgtttaactgaagtacgtaaaaatgatacattatcatacctacgtccggatggaaaaacgcaagttacagttgagtatgatgaaaatggtaaaccagtacgtgttgatactatcgtaatttctacacaacatcacccagatgttacatgggaagaaatcgatcgcgacttaaaagagcacgtaattaaagctgtagtaccagcagaattaatcgatggagaaacgaaattcttcattaacccaactggccgcttcgtaattggtggaccacaaggtgatgctggtttaacaggacgtaaaatcatcgttgatacttacggtggatacgctcgccacggtggcggtgcattctctggtaaagatgcaacgaaagttgaccgttctgcagcatatgcagctcgttatgttgcgaaaaacatcgtagcagctggtcttgctgaaaaagcagaagtacaacttgcatacgcaatcggtgtagcacaaccagtatcaatttcagttgatacattcggcactggtaaagtatctgaagacgtattagtagaactagttcgtaacaacttcgatcttcgcccagctggtattattaaaatgctagacttacgtcgcccaatttacaaacaaacagcagcttacggtcacttcggacgtactgatgtagatctatcatgggaacgtacagacaaagctgcagctttaaaagagcaagctggtcta

SEQ ID NO: 10119 - DNA, 642 bp, Bacillus anthracis
atgattgtagaagaaattatgaatcaagatgtggtgacactacgtccaaacgatacaatcgaaacagcaatccgaacgatacgcacgaaaggcattcggcacattccaattgtcgatcaaaataatcatgtcgtaggcattatttctgatcgggatgtaagagatgcaagtccgtctattttagatgaacaagtttcactcgatatgctgaagcaaccacttgaacttattatgaaacaccctgttatgacttgccatcctctcgatttcgttgaggaaattgctactttattttttgaaaataaaattggctgtctccctgttacaaaggcaggaaagttagttggaattatttctgaatctactgtactgcacacgttagtgaaattaacaggagcacatcaaccgagttcacaaattgaaattcaagtaaaaaatgaacctggcattctcggaaaagtcgttgctatttttagtgagttacaaattaatatcgtgagcgttctcgtctacccagcaaaagatgagaatgataaagtactcgttttccgcattcaaacgatgaatccactaaaagtgattgatgcacttgaagcagaaggctaccgcgtattatggccaaacattatggggatgcaagca

SEQ ID NO: 10120 - DNA, 1517 bp, Bacillus anthracis
attatcgttttagattttggaagtcaatacaatcagttaatagcacgtcgaattcgtgagttcggtgtatacagtgagcttcatccacatacaattactgcggaagaaattaaagcaatgaatccaaaagggattatcttctctggtggaccaaatagtgtatacggtgaaggcgcattacattgtgatgaaaaaatctttgacctaggattaccgatcttcggtatttgttacggtatgcaacttatgacgcaacaattcggtggtacagtagagcgtgcaaaccaccgtgagtacggaaaagctgttctgaaagtagagaacgagtcaaaattatatgcgaaccttccagaagagcaagttgtatggatgagtcatggcgacttagtaactggtttacctgaaggattcgtagtagacgcgacaagtgagtcttgcccaattgctggtatgagcaatgaagcgaaaaacttatacggtgtacaattccacccagaagtacgtcactctgagcacggtaacgatttaattaaaaacttcgtattcggcgtatgtggctgttctgaaggatggaacatggagaactttattgaagtagaactagagaaaatccgtgaaactgttggagacaaaaaagtactatgtgcgcttagcggcggtgtagattcttctgttgtagcagtattaattcataaagcaatcggcgatcagttaacatgtattttcgttgaccatggtttacttcgtaaaggcgaagcagaaggtgttatgaaaacatttagcgaaggcttccacatgaacgttattaaagtggatgcaaaagaacgcttcatgaacaagttaaaaggtgtagaagatccagaacaaaaacgtaaaattatcggtaacgaattcatttacgtatttgatgatgaagcttctaaattagaaggaatggacttcttagcacaaggtacactgtacacagatatcgttgaaagtggtacagcaactgcacaaacaattaaatctcaccataacgttggtggacttccagaagacatgcagttcaaattaattgagcctttaaacacgttatttaaagatgaagtacgtgtattaggatctgaactaggaattcctgatgagatcgtatggcgtcaaccattcccagtcctggtcttggtattcgtgtactaggtgaaatcacggaagagaaattagaaatcgttcgtgaatctgatgcgattttacgtgaagaaattattaaagcaggcttagaccgcgaaatctggcaatacttcactgcgcttcctggtatgcgtagcgtaggtgttatgggtgacgagcgtacttacgattacacagtgggtatccgtgcagtaacatctatcgacggtatgacagctgactgggcacgtatcccttgggacgtattagagaaaatctctgtacgtatcgtaaacgaagtgaaacacgttaaccgtatcgtgtatgatgtaacgagtaagccaccagcaactattgagtgggaatag

SEQ ID NO: 10121 - DNA, 907 bp, Bacillus anthracis
ttagagaatttatcgacagacctttcccatgggagggggatgaatttagatgagatgaacataatagaagtttctgcaaagtatgaatgaagaagattcgaattgttgcattagcagtggaaaaaagagatagaacatattgaaaaagttgtgcgggttgttattcaatctttttgaagaagagggccgattaatttacattggggctggcacgagtggccgtttatgtattttggacgcaatggaatgcccgccgacattttgcacagatgataaaatggtgccaggatttatagcaggtgggattgaaagcgtttactaaagcggtggaaggtgctgaagatcgcgaagagttagcagaagaagatttaaaaagtattggattaaatgagaaagatactgtaattggaattgcggcaagtggccgaactccttatgtaattggcggcttgaagtacgcgaatagcgtgggagcgagtacagctagtatctcttgtaataaaaatgctgaaataagtaaatatgcaaaactaaatgtggaagtagaaacaggcgcagaaattttaacaggttcaacgcggttgaaggctggtacagcgcaaaaattagtactgaatatgatttcaacagcttctatggattggtggttggaaaagtatataaaaatttaatggtagatgtgcaatctacgaatgaaaagttagtagaacgatcaaaacgaattattgtggaagcaacaggggttagttatgaagtagcagcagagcattatgaaaaagcagaacgtaacgtgaaagctgcgattgttatggtgctattgcagtgtgagtatggggaagcactggagaaactaaaacaagcaaaagggtttgtgaagaaggcattataaaataatagggagggggat

SEQ ID NO: 10122 - DNA, 1225 bp, Bacillus anthracis
atggaaacgattgtacaaaaatttggtggcacttctgtcgggaagcgttgaacgcattcaacatgtagcaaatttaattattgaagaatatgaacgaggacatagtatcgtctctgtcgtttcagcaatggggaaaagtacagacgaacttgtagcacttgctaacgcgattacagaaaatccgagtaaacgcgaaatggatatgcttctatcaacaggagagcaagtcactatttcattattaacgatggcattacaagcaaaaggttataacgcaatttcattaacaggatggcaagctggtattacgacagaatctgtacatagtagtgcacggattactgaaattaatacggatcgaattcagtcttatcttactaaaggcacgattgttattgtagctggtttccaaggagttagtgaagaccttgaaattacaacgctttggacgtggtggttctgatacaactgctgttgcattagctgcggcactgaacgcaaaaaaatgtgatatttacacagatgtgaccggcgtatatacgacggatccacgagttgtaaaagatgcttataaattagatgaaatttcttatgacgaaatgttagaacttgcaaatcgccgggggctggtgttataccacccgcggtgcgtgtggagttcgcaaaaaaatcataatgtccttttaaaaaagttcgctccagtatgggaaaccagaaaatgggaacaattggtaaaagggagaatgtaaccatggaacaacaatcaatccgttaaaagggattggcattttgaagaaaatattccccgccctcccacgggaaaggattggaacaaggatcgctttcaactgttttctctacattagcagcggcacatattaatgtagacatcatcattcaaagtattacaaatgaaggaactgttcatctctccttctccatccattctaatgatttaagagaaacgttagcagtgttggaacaaaatcaagaggcacttcactatgaatcagtagaatatgaaaatcatttagcaaaagtatcaattgtaggatctggtatggtctctaatccaggtgtcgctgcgaatatgttcactactttaaaagaagaagatattcatattaaaatggtaagtacatcagaaattaaagtgtctgtcgttattgaccgccttcatttagtaacaggtgtcgaggcgctgcatcaatcatttatggcgaaa

SEQ ID NO: 10123 - DNA, 957 bp, Bacillus anthracis
ttggcaactacaaaaccatacagagtattactatattacatgtacacaacaattgaaaacccagaagaattcgcggcagagcatttagaattttgtaattcacttgagttaaaaggaagaatccttgtagctaaagaaggtattaacggaacttgttctggtactgtagaacaaacagagaaatacatggaagcaatgaacaacgatccacgttttgacggtatcgtatttaaaatagatgaagcggatggtcatgcattcaagaaaatgcacgtgcgtcctcgtccagagttagttacacttcgtctagaagatgacattaacccacacgaaataactgggaagtatttagagccaaaagatttttatgaagcaatgaaacaagaagatacagttatcattgatgcacgaaatgattatgagtttgatttaggtcactttaaaggtgcgattaaacctgatatcgaatcattccgtgaattaccagattggattcgtgaaaataaagaagtacttgaaggcaaaaagattttaacttattgtacaggtggaattcgttgcgagaagttttctggttggttagttcgtgaaggctatgaagatgtaagtcagcttcacggcggtattgtaacgtacggaaaagacccagaagtacaaggtgagctttgggatggacaatgttatgtgttcgatgagcgtatcgctgtaccagtaaatcaaaaagaacatgttatcgttggtaaagaccactttacgggtgaaccttgtgagcgatatgtaaactgtgcaaatccagaatgtaacaagaaaattttatgttctgaagaaaacgaagcgaaatatttacgtgcatgttctcacgaatgtcgtgtaagcccacgtaaccgctacgtaatacaacatgaattaacggaagaacaagtagctgctgcattagagaaaatcgaagcagggaag

SEQ ID NO: 10124 - DNA, 318 bp, Bacillus anthracis
atggctgatatgcaaactccatttgcattaattttacatggtggcaacgcgagaagtatagcgcttgaagcaattgcttttgcaagacaaggagattttgagaatgcgagtgaaaagatgacacttgctagtgaagaaatttcagcagctcatcgcattcaaacggacttaattcaagaagaagcaagaggaaatcatgcagaaatcagtttactgttagtacatgcacaagatcatttaatgaatgcaattacagtgaaagaacttgcggaagaatttattactcttcataaacgaatggaagagaaagtgatagca

SEQ ID NO: 10125 - DNA, 900 bp, Bacillus anthracis
atgcagaaattaattgtctttgctattattggattttccgctcaattaatcgatggagcacttggaatggcgtacggggtaacatctacctcacttttactaatgtttggtatcgcaccggctgtagcttccgcttctgttcatttagctgaagttgttacaaccgccgcttctggtgcatctcacctcaaatttggaaacgttgataaatataccgtttccaggcttacattaccaggagcaattggtgcatttgttggggcatgttttttaagtaatttacctggcgatgtcattaaaccgtacatttccttatttttatttactttaggagtttatattttattacgatttattattcaaaaacaaattgttacttcaaataaacgtatgtcagctaaacaacttgtgccgcttggcttattcgctggattcgttgattcaactggtggcggtggttggggaccgattacgacacctgttcttctagcaagaggaaatgaagcgagaaaagttattggatctgtagatacgagtgaatttcctgttgcattagctgcaacaattggcttcttcatctcgcttggctgggaacaagtaagctggttttgggtatttgcgttaatgcttggtggtattgtcgcagctccaattgctgcatggctagtacgcatcgtaccatctcatttacttggcgtattagttggtggtcttattatctttacaaatatacgtacactacttactacttttaaagtagatccaactattatctcactttcttacgtggcagttggtcttgtcgttattatttctattttcattgctgttcgtaatcattccaatcgttctaacgcatcaacagcccaatatccgaatgatcaaaaacagatgctacct

SEQ ID NO: 10126 - DNA, 871 bp, Bacillus anthracis
gaaaaaggtgtaccgaaaaatacagtagtatcttatgaacgtgatttgaaaagttatgtaaagtatttgcaaaaagtagaacaagcgaaaagctttcacgaagtgacacgcttgcacattgttaattttctgcagcacttaaaagaaaacggaaaatcttcgaaaacattaacacggcatattgcatcgattcggtcggttcatcaatttttacttcgcgaacgagcagtaaagcacgaatcctccgtacataatgaaaacgcgccaaggagaaccgaattaccccaagtatttgtcctttgatgaaaaaaaagggttacctcctacacccaaaaagaacaagggttttgggggtcctggataaaacgaggcttaaatttctgttttccaaagggacttcccggtttccaaatataattgcgcttaaattaaaaaaagggacatttaaccaaggggaatttgttcccttgccccggggaaaagggaataaagaaaaaattattcccccctagaacttttccgaccggaacggattccaaaggatttttgaaaaggggaaaaaaaaattgttggggaaaaaaaaagtaaaatgccacccttttttaaccatcatggaaatcgattatcaagacaaggattttggaagattttaaaacgattagcgaaagaagcaaatattgaaaaagagcttacacctcatacgttgcgccattcttttgcaacgcatttattagaaaatggagcagacttgcgtgctgtgcaagaaatgcttgggcatgcagatatttcaacgacacaaatttatacgcatgtttcaaaaactagattaaaagatgtatataaacagtttcatcccagagcataattacta

SEQ ID NO: 10127 - DNA, 1047 bp, Bacillus anthracis
atgaatcgagaagaattgtttgatgtaactgtgataggcggaggacctgcagggctttattcagctttttatagtggactcagagaaatgaaaacaaaaataatagaatttcaaccacagttaggtgggaraatacatgtttatccggagaaaatgatttgggatattggcggattattaccggttactggcgaaaagttaattgagcaacttgtacaacaagggttaacatttcagccagaagttgtattgaatacaaaaatagaatcaattattcgtaataaagatggtatttttacgttaaaaacaagcactggagaagaacacttttcaaaaacagtgatcgttgcaactggaagtggtatattgaatccacaaaagttatcaattgaaggtgcggagcgatttgaagtatcgaacttaaattatacagttaaatcgttaaaacgtttcaaaaataaaacggtcattatttcaggcggaggtaactctgcaattgattgggcaaatgagttagaaccaattgcgaaaaaagtctatttaacatatagaaaagaagaattatctgggcatgaggcacaagtaaaacaacttatgaacagttctgcagaatgtttctttaatacatcgattacaacattaattgctggcgataaccatgaagcgattgaatatgtagaattaacaaatcacgaaacgggagaggtttctcagttagctatcgatgaagttattattaatcatggatatgaacgtgacattacattattagaaaatagtgagttagacgttgcgattatagataattattatattgcaggtaatgcaaatagtgaatcttcagtagacggattatatgctgctggagatattttaaagcatgaaggaaaattacacttaattgcgggagcattccaagatgctggaaatgctgtaaataaagcgaaacaatttattcaaccagatgcaagtgagtatggaatggtttcttcgcataatgaagtatttaagaagagaaatcgtgaattgattaagcagatgatgaaa

SEQ ID NO: 10128 - DNA, 1095 bp, Bacillus anthracis
atgactgaaaatcattacttattattaacgccaggaccattaacgacaacaaagacggtaaaagaagttatgttatacgattggtgtacgtgggatgttgaatataacacgatggtacaaaaagtaagagctaaacttgtatcgttagcaacgaaggaagaagagaaatatacaacagtattaatgcaaggaagcggtacgttttcagtggaagcagtaatcggttctgtcattccaaaaaacggaaagcttcttgtttgtacaaatggtgcatacggtaaacgaattgtacaaatggcagagatgttacatatagatgtggtggtcagtcaaacagaagagtgggagcctactaatattgtagaagtagaaaagatattacaacaagataaagagattacacatattgcagttgttcattgtgaaacaacaacaggtattatcaatccaattgtagacgtatgtaaattagggaagcaatacggaaaagtaacactagttgatgcaatgagtagttttggtggtattgaaatagatattgctgagttgcaaattgactttctaattagtagtgcgaataaatgtattcaaggagttccagggttcggatttgttattgcacagcgtgatgaattattgaaatgtaaagggcaggcacgttcattatctttagatttatacgatcagtgggaaacgatggaaaatcaaaatgggaaatggcgttttacgtcacctacacatgttgtacacgctttttatcaagcattacttgaattagaaaaagaaggcggagtaagagcacgttacaatcgatattacaacaatcaaaaactattagtgaatagaatgggggaaattggttttaagccactcgtaaatgaaaaatatcaatctcctattattacatcttttatttatccggaagggaacttcgaatttcaacagttatataatgagttaaaacgctacggatttgttatttatcctgggaaaatttcgaaagtagatacgttccgcattggaaatattggtgatgtacatgaggaagacataaatcgtttagtagatagtattgctaaaggggttgttataggt

SEQ ID NO: 10129 - DNA, 750 bp, Bacillus anthracis
atggaagaagtattacacataaaaaacgtctcgaaagtgtatgaaggaaaagtccctcatactgctttaaaaaatataaatttacatgtagataaaggagaattcgttgccattatgggtccatctggcagtggaaaatctacatttttaaacgttatctctacaattgattcgcccacttctggggaagtcgttattaacggcaaaaagccacacacatttcgtagagaaaaattagctgttttccgtcgtcaagagttagggtttgttttccaaaactttaacttactcgatacattaacgatcggagaaaatatcgtattacctttaacattagacaatgttcctttaaaagagatggacaaaaagctcgatagcatctcaacaaaactaggaatcgatcatattttaaacaaacgtatttttgaagtttcaggaggacaagcacagcgtactgcagtagcacgcgccgttattcatcatccgtcccttctccttgctgatgaaccgacaggaaacctagactcgaaagcagctattgatgtaatggagttatttacgaaattaaataaagaagaagatgcaacgattttaatggttacccacgatccgtttgcagcaagttattgtaatcgcgttatttttattaaagatggggagctttacaacgaactgcaccgaggattgtatcgtgagaagttttatcaagaaatattagatgttttagcattactaggaggaagacgtgga

SEQ ID NO: 10130 - DNA, 1036 bp, Bacillus anthracis
atggcatttgaaggawtagccgaccgacttcaacagacgatgcaaaaaatccgcggcaaaggaaaagtttctgaagccgatgtgaaagaaatgatgagagaagttcgtctagctcttttagaagcggacgttaactttaaagtagtaaaagattttgtaaagcgtgtgtctgaacgtgctgtcggacaagatgtaatgaaaagtttgacacctggacaacaagtaattaaagttgtacaggaagaacttacagaacttatgggcggagagcaaagcaaaattgctattgctaataagccaccgactgttattatgatggttggtctgcaaggtgcaggtaaaacaacgacgacaggtaaactggcgaatttgcttcgtaaaaagcataatcgtaaaccgatgcttgttgcagcggatatttaccgtcctgcagcgattaaacagcttgaaacattagggaagcaattggacatgcctgtattctctttaggagatcaagtaagtcctgttgaaattgcgaaacaagcgattgcaaaagcgaaagaagatcatcatgattatgttttaattgatacagcaggtcacctgcatattgatgaagaactaatggatgaattagcgaaagtgaaagaagttgcgaaaccggatgaaattttccttgttgtcgatgcgatgacaggacaagacgcggtaaatgttgcacaaagtttccatgaacagttaggtttaacaggggttgtattaacgaaattagatggtgatacgcgcggtggtgctgcattatctattaaagctgttacaaatacgccaattaaatttgctggtatgggtgaaaaactagatgcacttgaagcgttccatccagaacgtatggcatcccgtattttagggatgggagacgtcttaacattaattgaaaaagcgcaagctacagttgatgaagagaaagcaaaagaacttgagcaaaaaatgcgtacgctttcgtttacgcttgacgatttcctagaacaacttggacaagtgcgtcaacttggac

SEQ ID NO: 10131 - DNA, 349 bp, Bacillus anthracis
agaaaaaacatacgtataaaaaagaatgatgaattccagacggtttttcaaaaaggaaaatcgggagagaatcgtcaatttgttgtctatcaactagataaagaagagcagccaaactttcgtattggcctttctgtcagcaagaagataggaaatgcagtagtgcgtaaccgaattaaacgtatgattcgccagtcgatcacagaattaaaagatgagatagaattctggaaaagattttgttataatagcaaggaagccttgtgcagagatgacatatgaagaattaaagaaaagcttaattcatgtctttaaacgctctggtatgaaaagaataaaaagtagcgta

SEQ ID NO: 10132 - DNA, 2097 bp, Bacillus anthracis
atggaaggagcaagacaccaaatggcaagagagttctctttagaaaacactcgtaatattggtatcatggctcacatcgatgctggtaaaacaacagctactgagcgtattctgtactacacaggacgtattcacaaaatcggtgaaactcacgaaggtgcatctcagatggactggatggagcaagagcaagagcgtggtatcacaattacttctgctgcaactacagcacaatggaaaggtcaccgtgtaaacatcattgacactccaggtcacgtagatttcacagtagaagtagaacgttctttacgcgtacttgatggcgcagtagcagtacttgatgcacaatctggtgtagaaccacaaacagaaactgtttggcgtcaggctactacttacggcgtacctcgtatcgtattcgttaacaaaatggataaaatcggtgcagatttcttatactctgtaggaacaatccacgatcgtttacaagcaaacgcacacccaattcagttaccaatcggtgctgaagatgagttcaatggtatcattgaccttgttgaagaatgtgcttacatgtacggtaacgatttaggaacagacattcaacgtgttgaaattcctgaagagcataaagaactagctgaagaataccgtggaaaacttattgaagcggtagctgagcttgatgaagaaatgatgatgaagtacctagaaggtgaagaaatcactgtagaagagcttaaagctggtatccgtaaggctacaacttctgtagaattcttcccagtaatctgtggttctgcattcaaaaacaaaggtgttcaaattctgttagacgcagttatcgactacctaccatctccattagacgtacctgctattaaaggtatcgttcctgatacagatgaagaagtagaacgtaagtctagcgatgaagaaccattcgcagctctagcattcaaaatcatgactgacccttatgttggtaagttaacattcttccgtgtgtactctggtgtgttaaactctggatcatacgtgaaaaactcaactaaaggtaagcgtgagcgtgtaggtcgtatcctacaaatgcacgctaacagccgtgaagagatctcaacagtttacgctggtgatatcgctgctgctgtaggtttaaaagatactactactggtgatactctttgtgacgagaagagccttgttatccttgagtctatggaattcccagagccagttatctctgtagctatcgaaccaaaatcaaaagctgaccaagataaaatgggtacagcattatctaagctttctgaagaagatccaacattccgtgctcacactgaccaagaaactggccaaacaatcatcgctggtatgggtgaacttcaccttgatatcatcgttgaccgtatgcgccgtgaattcaaagttgaagcaaacgttggtgctcctcaggtagcataccgtgagactttccgcgctgctgcgaaagttgaaggtaagttcgctcgtcaatctggtggacgtggacaattcggtcacgtttggattgagtttgaacctaatgaagaaggtaaaggattcgaattcgaaaacaagatcgtcggtggtgttgttccacgtgaatacatcccagctgtaggcgcaggtcttgaagatgcacttaaaaatggtgtacttgctggatatccagtagtagacattaaagctgcattagttgacggatcttaccatgatgtcgattcatctgagatggcgttcaaaatcgctgcatctatggcacttaaagctgcggtttctaaatgtaacccagtaattcttgagccaatgatgaaagttgaagttgtaattcctgaagagtacatgggtgacattatgggtgacgtaacatctcgtcgtggacgtgtagaaggtatggaagctcgcggtaacgctcaagttgttcgcgctatggttccactttctgaaatgttcggttatgcaacgtcattacgttctaacactcaaggacgcggaacattctctatggtgtttgaccactatgaagaagtaccaaagtctgtttctgaagaaattatcaaaaaaaataaaggtgaa

SEQ ID NO: 10133 - DNA, 342 bp, Bacillus anthracis; identical to SEQ ID NO: 9155

SEQ ID NO: 10134 - DNA, 396 bp, Bacillus anthracis
atgagcaagcaaccgatgacaccatttgaagcaattggcggtgaacaatgcattgaaatattagtagacacattttattcctatgtcagtaagcaccctgacctatctcccatcttcccggatgatttaacagaaacagctaggaagcagaaacaatttttaacacaatatttaggtggtcctaatttgtacactgaagaacacggtcatcctatgttaagagcacgccatctcccgtttgagattactccaaaacgagcagaggcttggctatcatgcatggagcaagcaatggatgacacaggagtgcacggtcatataagagagttcgtttttgaacgtttagcattaactgctcagcatatggttaatactccaaatgaaacaggtgaaata

SEQ ID NO: 10135 - DNA, 1149 bp, Bacillus anthracis
ttatttgcagtgcaacaacgtatggacgcaatgagtgtgtgggaagcaaatgcgaacgcaaaatcgttattaacgaaattaggaattacggatttcacagcaactgttggaaatttatctggtgggcagaaaaaacgtattgcgatggcgcagtgttttattgaaacaccggatctattaattttagatgagcctacgaaccatcttgaccatgagacagttgagtggttagaggaatatttagcaaggtacacaggtgcggtattacttgtaacccatgatcgttatttctttagatcgtgggacggaatcgtattttcgaattagataatggaaaattgtatagttatgaaggggaattacagtacgtttttagaagcgaaagcatttcgtgaagaacaagaactggcacaagaatcaaaacgtcaaaacttatatcgccgtgaactagcgtggattcgccgtggtgcaaaagctcgttcgacaaagcaaaaggcacgtattcaacgatttgaagagttaaaaggtcaagaaggtccagctgcaaaacagtcagttgatattgcgcttagcggtagtcgccttggaaaaaaagtacttgagttaaaagatgtaacgaaaaaatttggcgataaaacagtattaaacaacttcaatcatatcgtgaaaccaggcgatcgtataggaattatgggtccttcagggagcgggaaaacaacgcttttaaatttattagcaacaattgataagcaaacttcaggtcatgtgcttgtaaatggagaagaaattaatcaaatgcgtgctgcaaaattagcggaatttcgccgtacacatttaggtttcattttccaagattttaacttacttgatacattatcgattaaagaaaatattattttaccgcttgtaatggcgaagaaatctgtaaatgaaatcgatgcgaaagtactggaaattgcgaagtttttaaatatcgaagaaattttaaataaaaaggtttatgaagtatcaggcgggcaacaacaacgtgcagcagctgcgagagcgatcattcatgaaccgactttaattttagcggatgagcctactggaaacttagattctaagtcagcaaaatcgttaatgagcgcgttgcaagacttacatgaa

SEQ ID NO: 10136 - DNA, 1173 bp, Bacillus anthracis
ggtgttataaaaccgaatcatgttacacaagaaagtttaaatgcttctgtaagaagttactacgataattggaaaaagaaatatttgaaaaatgatttatcttctttacctggtggttattacgtaaaaggagagattacaggtgatgcggatgggtttaagccacttggaacttcagaaggtcaagggtatgggatgataattacagtattaatggctggttatgattcgaatgctcaaaaaatctatgacggtttatttaaaacagcaagaacttttaaaagctctcaaaatcctaatttaatgggatgggttgtcgcagatagtaaaaaagcacaaggtcattttgattctgctactgatggggatttagatattgcgtattctcttcttcttgctcacaagcagtggggatcaaatggagcagttaattatttaaaagaagcacaagacatgattacaaaaggtattaaagctagtaatgttacaaataatagccgactaaatttaggagattgggattctaaaagttcacttgatacgagaccatctgattggatgatgtcacaccttagagcattttatgaatttacaggtgataaaacttggctcactgttattaataatttgtacgatgtttatacgcaatttagtaataagtactctccaaatacaggacttatttcagattttgttgtaaaaaacccaccacaacccgcacctaaaggcttcttaaatgagtcagaatatacaaatgtatattattataatgctagtcgagtacctttaagaattgtaatggactatgcgatgtacggcgagaagcgaagtaaagtcatttctgataaagtatcttcatggattcaaaataaaacgaatggaaatccttctaaaattgtggatggttatcaattaaacggatccaatattggtaattatccaactgctgtattcgtttcgccatttattgctgcaagtataacaaatagcaataatcaaaagtgggtaaatagcggttgggattggatgaagaataagagagaaagctattttagtgatagttataatttattaactatgttatttattacaggaaattggtggaaacctatacctgataataaaaagacacaaaatcaaataaatgatgcaatttatgaaggatacgataat

SEQ ID NO: 10137 - DNA, 814 bp, Bacillus anthracis
cttcaatttttgggttagctgccctgcggggggaaagataacgatgaaaagaaactagttgttggagcttctaacgtaccgcacgctgaaattttagaaaaagcaaaaaccgttacttgagaaaaaaggaattgaattagaagtgaaaaattctccaagattacgtggtgcccaaataaatcgttagcggataaggatttagacgctaactacttccagcacatccggtatttagaaaaagaaatttaagattaaaagttttaattttgaataaccaggaagaattcttttaaacccattggtggattctccccaaaatattagaaccttaaagaaccttccgaacggaccgccattaatattaagtatttcatttgctgaccatggacgtggtttagcaattttacaaaaagaaggtattttaaaaattaaagacggagtagatccagttaaagcaactccgaaagatatcgcggataatccgaaaaacttaaaattcaaaacggtcaaatcagcactgggttattaccacaagtgtttatccataaagaaggcgacgctgttttaattaactcaaactatggcatccataccaaggtaaattccccaaaaaaaatgcaatgccattggaaagcaatgattccccctacccccaacctattaactgtttccaaaagggggtaaagataaaaaagaaattaaagagctagtagaagtgctacattcaaaagaaattgaagactttattaaataaagaatataaagggggcagttgttccctgtaaaagaataattgctggggaagggctggtgt

SEQ ID NO: 10138 - DNA, 1548 bp, Bacillus anthracis
ttacattatattttcaagggggttatacaatgagtcaactagctgtaaatcttcatgaaaaggtagaaaagtttcttcaaggtacgaaaaagttatatgtgaatggatcattcattgaaagcgcttccggtaagacgtttaatacacctaatccagcaactggcgaaacacttgccgtcgtttctgaagccggtcgcgaagatattcataaagctgtagttgcagctcgcatggcttttgacgaaggtccttggtctcgcatgagcactgcggagcgaagccgtcttatgtacaagttagctgatttaatggaagaacataaagaagagcttgcacagctcgagacgttagataacggaaagccaatccgtgaaacaatggcagcagacataccacttgcaattgagcacatgcgctattatgctggctgggcgacgaaaatcgttggtcaaacaatccctgtttccggtgatttctttaactatacacgccatgaagctgttggtgtcgttggtcaaattatcccttggaacttcccgcttcttatggccatgtggaaaatgggagcagcgcttgctacaagatgtaccaatcgtttttaaacctgcagaacaaactccactatctgctctatacttagctgaattaattgaagaaactggattcccgaaaagcggtattaatatcgctcctggattcggggaatcagctgggacagctctcggtaatcatccactcgctgataaaaatgcattttacccggtctactcccgtcgggagaaaaattatgcgacaagcatctgaatcccttgaaaggggtacttttataacatggtgggaaaatcccccaacacaatttttcccgacgcctgattttatctcgcgccaatcccgggtggcactttctggggggttatggtttaaccaagggcaagtatgctctgctggatcacgcctatttgttccgaagaaaatgtatgataatgtcatggctgatctcgtcctctattctaaaaaactaaatcaaggtgtcggtcttgacccctgaaacgacaattggtcctctcgtttccgaagaacaacaaaaacgtgtaatgggctacattgaaaaagggattgaagaaggcgctgaagtactttgcggaggaaataatccattcgatcaaggctacttcatttctcctacagtattcgctgacgtaaatgacgaaatgaccatcccaaaagaaaaaatttttcggccagttaattcctgccataccttttttacgaaattgatggaggtatttgaccgagcaaataaatcacaattcggcttagcggctggtgtgtggacagaaaatgttaaaacagcacactatgttgcaagtaaagtacgtgcaggtacagtatgggttaactgttacaacgtctttgatacagcatctccatttggaggatttaaacagtataggtctcggccgtgaaatgggatcttacgcattaaataactatacagaagtgaagagcgtttgggcttaacttaaattaacaaaaaagaacctgacc

SEQ ID NO: 10139 - DNA, 288 bp, Bacillus anthracis
gtgtcaagaatttccgttgagaatgtaaagcacgtagcacatttagcacgtcttgcaattactgatcaagaagcagaaaaatttcaaaaacaactagatgcaattgttacatttgcagaacagttaaatgaattagatacaacagatgtaaaaccaacaactcatgtattaactatgaaaaatgttatgcgtgaagatgtaccagaaaaaggtttaccagttgaagaagtattaaaaaatgcaccggatcacaaagataatcaaatccgtgttccagcagtattagaa

SEQ ID NO: 10140 - DNA, 1047 bp, Bacillus anthracis
atggcacatcatgcgaaagaaacgatggaacttattaaggagcttgtctctattccgagtccgtctggaaatacagagaaaatcattcgttttattgaaaactatgtaagtgagtggaatgtagaaacgaagcgtaacaataaaggcgctcttattttaacggtaaaagggaaaaatgatgcacagcaccgcttattaacagcgcacgttgatacgttaggtgcgatggtaaaagaaattaagcctgacggtcgtctgagtctttctatgattggcggatttcgctggaactctgtagaaggggaatattgtgaaattgaaacatcaagtggtaagacgtatacaggaacgattttaatgcatcaaacgtctgtacatgtatataaagatgcaggtgaagcgaaacgcgatgagaaaaatattgaggttcgcattgatgagcgcgtattttcagctgatgaagtacgtgaattaggaattgaagtaggagacttcgtttcatttgatccacgcgttcaaattacagagagtggatacataaaatcacgtcatttagatgacaaagtaagtgttgcgattctattaaaattaattaagagattacaagatgaaaatgtaacattaccatatacaactcatttcttaatctctaacaatgaagagattgggtacggcggaaactctaatattccagaagaaacggttgaatatttagcagtagatatgggagcgttaggtgatggacaagcatctgacgagtatacagtatctatttgtgcaaaagactctagcggtccgtatcattatgcactgcgtaaacatttagtagagcttgcgaaaacgaacaatattgaatataaagtagatatttatccgtactatggatcggatgcatcagctgcaattcgagctggatttgatgtgaaacacgcattaattggagcaggtattgattcttctcatgcatttgagcgcacgcatgaaagttcgattgctcatacagaagcgcttgtttatgcatatgtattatcagagatgattgcagaa

SEQ ID NO: 10141 - DNA, 1089 bp, Bacillus anthracis
atgaagaaaacgcctgattttattctcatcatcgttacacttgcgttgttaacaatcggaatgattatggtttatagtgcgagtgcggtttgggcctcttataaaatgggggactcattcttttttgcaaaaaggcaattgctattcgcaggtcttggtgtagtggctatgttttttattatgaaaattgattattgggtgtggcgtacgtattcaaaagtaattttgctagtttgcttcattcttcttattctcgttcttattcctggagtaggtcttgttcgaggaggagcgcgaagttggattggaatcggggcattttccattcaaccgtccgaatttatgaagtttgcgatgattattttcttagcgaaatttttagcggaacgacaaaaattaattacctcttttaaacgtggtttactaccagctctaggttttgtatttcttgctttcggaatgattatgttacagccagatcttggtacaggaacggtaatggtcgggacatgtatcattatgatatttatctcgggagcaagggtctttcactttgcaatgtttggtttgcttggtgtagcaggatttgtagggctaattgcatcagcaccgtatcggatgaaacgtattacatcatatttagatccgtggtcagatccgcttggaagtggatttcaaattattcaatcgttactcgcaattggaccgggtggattattcgggcttggacttggacaaagtcgacaaaagtttctttatttacctgaaccccaaacagactttatatttgcaatcttatccgaggaattaggttttattggtggttcatttgtgttattattatttagtctattattatggcgtgggattcgtatagctttaggagcgccagatttatatggtacgtttttagcagtaggtattgtggcgatgattgcgattcaagtaatgattaatgttggtgttgtaacaggattgatgcctgttacgggtattactttaccgtttttaagttatggtggatcaagtttgacattaatgttaatggcagtaggtgtattattaaatataagtcgccattctcgctac

SEQ ID NO: 10142 - DNA, 1086 bp, Bacillus anthracis
atgcgctcatggattcagaacacaaaaaaattattaccctgatctgctacctgttatgcaaacgagaatgcaaattccttcaatacattagggcttttgcagccgaattggaagaagaaacttattcagcagtctcggtatgacagaacgagtattgcgaagtgaaaagtcagtttttgaaagaacaaaacttagtttcacgtcgcttcttctggaatgacattgacagaagaagggacagctttaattcttgctttggaagactttataaaaaaaattcccgggttaacaggttttaaacacgcacttatgggaacatttaaatctggtatgaagttttcgttgtccctggtgatagtgatgaatcgccttgggtcaaactggagatgggccgtgcttgtgtgacttgtataaaagaccgtctgacagcgaataatatcgttgctgtggctggaggaactacgctagctgctgttgcggacatgatgcagcttgattgccaagatttacatatgctatttgtcccagcacgtggtggaattggaagaaagggttgaattaaaagccaattaccatttgtgcccaaatgggcgcaaatacgatgagtaattatcgcttattgtatgtcccagaccatgttagcagcgaagcatatgcgtctattgtgacagaaccttccgtgaaagaagttctttgagtgattcgatcttcccatatcgtcattccatggaataagtgatgcgttaacaatggcaccgccgcagaaatacttcacaagcagattggttaaagattcacgcaagcgaaagcagttggcggaagctttcggttatttactttaatgaacaaggaaatgttggtcataaagaagcaacaggtggggatgctaacttgaggatttaccaaatgtatctcacgttggttgcacccgcttggagggtcttccaaagggcaaaggcaatacaggctgtaattaaacaagggcacacttcaattctaattacagatgaaggtgagagaaaaacagttaacaaagggtattacctctttaatataatcccccaaggaggaaattcgaatggacta

SEQ ID NO: 10143 - DNA, 1458 bp, Bacillus anthracis
gtgagtggaatcattactattttaggattaggtgctggtgaattagatcagttaacgatgggtgtatatcgaaaaataaaagaagcagatcacatgtttgttagaacgaaggaacatcccgttatagaagagttggagaaagaaggtatacaatatactgcctttgacaatgtatatgaagcgcatgatacatttgaaattgtatatgaaacaattgcgaatacattgatagaaaaagctgaaggcacagaaatcatctatgctgttccagggcatccgcttgtagcggaaagaacggttcagctactgttggaaaaaggtgaagtagcgaatattgaggtgcgaattgaaggtggacaaagtttccttgatcctatgtttgccagtctaaagattgatccgattgaaggatttcaattaattgacgccacatcatttgaaagaggacaattagaattacgtcaacatttaatcttttgccaagtatatgacgcattcgttgcatctgatgtgaaattaacattaatggagatgctgccagatgattatgaagtgtatatcgtaacagctgcgggaacttcatttgaacaagttaaaaaggtaccgttgtacatgttagatcatgaaacggagttgaataacttaacgagtgtgtatgtaccaccagttcaggaacgtgcgtccttgtatcaacagtttgatgtgcttagagaaattattgcagacctgcgtggaccgaatggttgcccgtgggataaaaagcaaacacatcaatctttaaagaagtatttaattgaggaagcttatgaagtattggaagcaattgatgaagaggatgatgatcacttagtagaagaactgggtgatatcttattacaagttatgctgcatgcccaaatcggagaagatgaaggttggttctctatagatgatattattcgaactttatctgagaaaatggttcgtcgccacccgcatgtatttgggaatacagatgtagataatgccgatgaagtaattgccaattgggaagaaattaaaaaacaagaaaaaggattcgtgaaagaatctgttttagatggagttccaaaaagtttgccacagttactacgtgcttatgaaatccagaaaaaagctggcaaggttggttttgattgggttgatgtacaaccgatgatagagaaagctttagaagaatggcaagagttccaacaagaagttacaaacatggatgaggcgaagatgttaagtgaatttggcgatttactatttgcatttgttaatatagctcgtcattataaaatagatccagaagaggcgttacattcaacgaatgagaaattcgtcggtcgttttttatacatggaagcaaaggtagctgaaatgaataaagagatgcaagatttatcattagagcagttagatgttttatgggaagaggcaaaacagacagagcgt

SEQ ID NO: 10144 - DNA, 1272 bp, Bacillus anthracis
gtgcatattcttgttgttagtgtaaattatcgaacagcccctgtagaatttcgtgagaaactcacatttcaggcagcagagctagagcgagcaatgacgacattacaaaatcaaaagagcgtgttagagaatgtcattgtatcaacttgtaatcgtactgagatttacgctgttgtcgatcaattacacacgggacggtattatattaagaaatttttagctgattggtttcagcttgaaatagaagaagtcgcaccatatttaactatttttgaaacagatggtgcaatagatcatttattccgcgtaacgtgcggtttagattctatgggtagtggagagacgcaatttttaggtcaaataaaagatagctttttagaagcacaacaagtaaaagcaacaggaacaatttttaatgaattgtttaagcaagtcattacattagcaaaacgcgcgcactcagaaacgacaattggtgaaagtgcgatgtctgttagttatgctgctgttgagttagggaagaaaatattcggcgagttaacagattgtcacgtgcttattctcggtgctggtaaaatgggtgaacttgcactgcagaacttatatggaagcggtgctcgtaaagtaacagttatgaataggacgctttcaaaagcagaaataatggctgagaaatatatgggacatgcaaaacctttaagtgaattacaatgtgcattattagaagctgatattttaattagttcaacgggtgcatcggattatgttattacgaaagagatgatgacaaaggtagagaaaatgcgctctggccgtccattatttatggttgatattgcagtgccgcgtgatattgatccagcgattgatgagctagaaggttctttcttatatgacattgatgatttgcaaggagtagtggaagcaaaccgtgctgaacgtttgaaagaagcagagaaaattcaatttatgattgaagaggaaattgttttatttaaaacgtggttaagtacacttggtgtcgttccgttaatatcagctcttcgtgataaggcacttgctaagtaaaagtgaaaacgatggaaagtctggaacgaaaaataccgaattcttagtgatcgtgagagaaaagtaattagtaagcatacgaaaagtattattaatcaattattaaaagacccaattttagtagcgaaagaaatagctgctgaagagggagcagacgaaaaattagcgttatttgcaaagattttcgatttagaaatggaagac

SEQ ID NO: 10145 - DNA, 264 bp, Bacillus anthracis
atggaaaaaatctttaaagtaactagcgactcaggaattcatgctcgtccagcaactctacttgtaaacactgcaagcaaatttggttctgacattaacttagagtataacggaaagaacgttaacttaaaatcaatcatgggcgttatgtctttaggcattcaccaaaacgcagaaattaaaaatcactgcaaatggtgatgatgcagctcaagcactagcagctatcgaagaaactatgaaaacgaagggattaggagaata

SEQ ID NO: 10146 - DNA, 2016 bp, Bacillus anthracis
aagcttgatgaattctttgtcacaggtgacccgattatttacggtgcagacgcttctatcgttcttgtgacattagcaaatcattttcgtactaacaaagtataaaaaatggaatatggctttgggacgaatggttaacaactgttgaccataaaaagattggggccatgtatattatctctgcggttattatgttattccgtgggtggtatggacggtttaatgatccgtgcacagttaacattcccagaaacaacttatttaaacgctgaacactataacggaatcttcacaacacacggtacagttatgattcttttcatggcgatgccattcgttatgggattaatgaaccttgtagtaccattacaaattggctgctcagtgacgtctgcatatccgcttcttaaatgctttaagtttctggttattctttgtcggagcaatgttatttcacatcgctttcgtaatcggtgggtctccagacgctgggtggacttcttactttcccaatggcaggtacagagtttacttctggtgtaggaaataactactacgcaattgcattacagatttcaggtctcggtacgttaatgacaggtattaacttccttgttactatcttaaaaatgcgtacacctggtatgactttaatgagaatgccaatgtttacttggtcaatcttaattacaacaattatcattattttcgctttcccgagtattaacagttgctcttgcattaatgacatttgaccgtctattcgatgctcacttctttacgatggcgagcggcggtatgccaatgttatgggccaacctatttctgggtatggggtcacccttgaagtatatatcgttattttaccggcattcggtattttctctgaaatcattagtacattctcacgtaagcgtctattcgggtacagtgcgatgggtatactcaatggttgcaatttctttactaagtttcgtcgtatggctcacccacttcttcacgatgggtgcagtgccagcggttaactcatctttctcgatttcgacaatgcgattttcgattccacccgggtgtaaagatctttaactggttgtttacactgtataaaggacgtattcgttttacagttccaatgctttggtcattggcatttattccaacttttgctgctcggtggagttacaggggttatgcttggaatggcagcagctgattatcagtaccataacagctacttcctaattgctcacttccactaggtaataatgcgcaggtacagtattcgctatgctttggctggatttcacatttgtggtatccaaaaatgactggttcatatgttaaaatgaccgccctaggtaaaatggacattctggattctttatgagcggagttcactatctgtttcttccccaatgtacttcttagggtttagacggtaaggacttgtggtatggacactttactctgaaagtttttggatgggggagggctaaaccaaaatcgcatctgttggtgcggtaatgatgggtatcggcttcctacttctttgctacaacgtaatttggagtgctcgtcacggtgaacgtgacacaactgggagatccatgggacggccgtacacttgaatgggcaactcaatctcctgtacaacattacaacttcgcgaaacttcctgaaatcaaagaagctgatgctttctggtacatgaagaaacgtggagaaacagtttacaccagcagcagaatgacatcagaccaattcacatgccaagtaactctggtgtgcctattattgcgtctggattcttcgggcttgcaaggttcgcattaatatttaactggttctggcttgcagcaatcggcggcattggaaatttaacttgcttaatctatcggtcattcgattacgatgaagggtacctatattagtggtgttgaaattaaaaaatcagaacatgtttcctgacaagtgaaattgatatggcggcttttagataaagcttacctttggaat

SEQ ID NO: 10147 - DNA, 1308 bp, Bacillus anthracis
atgacagtttaccattttgtaggaattaaaggaacaggaatgagttcattagcgcaaattcttcatgacatgaagcatactgttcaagggtctgattatgaaaagcgtttctttacacaaacagcgttggaaaagcgtaatatctcgattcttccttttgataaaagtaatgtaaaagaaggacaagtgattattgcaggaaatgcatttcctgatacgcatgaagaaatcgtagcagcaaaagaattaaacatcccagtacatcgttaccatcacttcttaggtgatcttatgaaccaatacacaagtgttgctgtaactggtgcgcatggaaaaacatcaacaactggtttgttagcccatgtaatgcaaggtgcacaccctacatcttaccttattggagatggaacagggcatggggtagaaaatagtaagtattttgtatttgaagcttgtgagtatcgtcgtcatttcttgtcttacaatccagactatgcaattatgacaaacattgattttgatcatccagattatttcacagatatcaatgatgtattcagtgcattccaagagatggcattgcaagtgaaaaaaggcattattgcatgtggagatgatgaagaacttcaaaaaattcaagcgaaagtacctgttattttctatggatttggagaagataatgatttccaagcacgtaacattcaaaagagaactgacggtactattttcgatgtattcgttcgtaatacgtactatgacacgttcaaaattacaggctacggcaaccacagcgtattaaatgcattagcagtaatcgcactttgccattatgaaaacgttgatgtagaagcagttaagcatcagttaacaacttttgaaggcgtaaaacgtcgctttaatgaaaagccaatgggagagcaagttattattgatgactacgcacaccatccgacagaaattaatgcaacgattgaagcagctcgtcaaaaacatccagagcgtgaaattgtcgctgtattccagccgcacacattctcacgtacagaaaagttcttagatgagttcgctgaaagcctaagcaaagctgaccaagtatacttatgtgatattttcggatcagcgcgcgaaaacaaaggtgaattaacaatcgaagatctgcaaaagcgtattgacggtgcagaactaattacagatacaacaacggatgtattaaagaaacataaaaacggcgttctcattttcatgggcgcaggagacatccaaaaattcgaagcagcttacgtaaaagaagttcaagttgcagagaag

SEQ ID NO: 10148 - DNA, 310 bp, Bacillus anthracis
atgtacgcaattatcgaaacaggtggaaaacaaattaaagttgaagctggtcaagcaatctacattgaaaaattagatgttgaagctggtgaaactgttacttttgacaaagttcttttcgttggtggcgaaaacgttaaagttggtagcccagttgtagaaggtgcaacagttactgcgaaagttgaaaaacaaggtcgcgctaagaaaaattatcgttttcaaatacaaagcgaaaaagaacaatcgtaagaaacaaggtcatcgtcaaccttacactaagctagttgttgaagctatcaacgcttaa

SEQ ID NO: 10149 - DNA, 892 bp, Bacillus anthracis
gttagagaatttttaaaaacaaaagggatctccaaagctgcattaacgggatataaggtttcaccgcggaactattggaagtaaatgggcaacattgcgagtggtcgtcatccagttgcaaaatgggggaagaaatacctatccttttttccaggggaggaaaaaagtgaagggatgattgcagaagatattcctttatgtattgtatatgaagatgatgcagttcttgtcataaacaaagaggcgaacatgtcaacgattccgtctagagaacatccgtccggaagtgttgcgaatgcgcttttatctcattatgataagcaatatcttccaagtacagtgcacatcgtaacgaggttagatcgtgatacttcagggcttatgcttattgcaaaaaatcgtttcgtgcatcatcttttatcgaaacagcatcaacaaaaaagctgtgaaaagaacgtatgaagcgatcgttcacggtgagatggtagaacgagaaggaacgattgacgcaccgattggacgaaaatcggatagcattattgagcgcaccgtttgtgaggaggggcaaagagccgttactcattttagagtgattgatagtgccaatcataagatcgcatgtatcgcttgagcttgatacagaaggaacgcatcaaattcgtgtgcatctgacacatataggacacccgctgcttggcgataatttatatggtggaaaaagggaatgaaattttttccacaagcacttcacagtacatcttttgacgttttatcacccctatttttagagaaaggaaatgtcttttcgctgcaatgattccaaagtgatatgccagaggtatttagacagactttaaaaggggaccaaaattctttatgttatgaagaaatt

SEQ ID NO: 10150 - DNA, 4434 bp, Bacillus anthracis
atgctcaataaaacaaatacatggacaccgtctttatttcgagattataaaaatgcagaacatgatgcgtgtggaatcgtttccgttatggagaaacgaaaaattcctacaaaagaaaacattgacctctgcatacaatcgctcgtcaaaatgaatcatagagctggcttcattaatggcgaaggtgatggaatcggcattcacattgatgtaccaaaagctctttggaatgaaaaattaaaaagtagcggatataatccaacgatcgtggatcatccccactttatcgttggacatttttttctaaacaaaaacgagaatatagttgatttaaaaaatcatattcgtacacaactaaacaacgaaaactttgcaattcttttcgaaagtgacaatgtaataaactccgatgcactcggtccacttggtaaacaagaagaacctttattttggcaagttgcccttatcgcagaaaatgaagttgtaaatattgagcaaaccttattttcagtaacgataaaaatagaggaaaacgaagcgattcatgttgcttccttaagtcgtgatcacgttgtatataaagttctcggtgctggggatacacttgttgcctattacaatgatttacaacacccacttatcgcttcaactatgacactaggacacaatcgctattctactaatacattatctaatttttttcgtgtacaaccatttagtattctcggacataatggtgaaattaacacaattgcaaaattacgcgatcaagctgaaatgattcacgttccccttactgctgggggcagtgactcccaagatttaaaccgcaccttagaaactctacttgttcaatacggctacagtttatttgaagcaatggatatactattcccaccaattattaatgaaattaaactttatgaaacacatttacaagatttatatacgtatatacgtgaagcatggggccattttgcgcaaggtccagctggcattatttcacgttataaagatgaagctgttttcagcgtggattcccttggacttcgaccagtatggaaggttgaaatagaaagctcttatattttctcttctgaacctggagttgtatcaccaactgaatatgtagcagaaccaaaaccactcgctccaggagaaaaagtcggcctaaagtggaatgaacaagatgaacttgtactctacgaacatgacgactaccaaactcaagtatataaccgttttaaaaagaaagtggatgttaccaattatcatttacatttatctatccctaaaacgaaagaaattccagatgcatgtgattctatgcaagttgaaacgaaacaatatgttgctttcggatgggaccgagaacatattcagcttcttgaacagatggcaacaaaaggcgttgagccaatccgctcacttgggcatgactcaccacttgccgcactcgatactgatagacgaaatatcgctgacttcattaaggaaagtgtagctgttgttacaaacccagcaatcgatcgcgatcgagaggtcgaacacttctccacacgaacgatacttggagagcgaccaagtttattaagcgatgcgaaaaaaccatttgtagttgagatgctttcccccattattttagaaggaagcgtggcacaatctattgcacaggaattacacacaattacgtatgaacaacttatagaactattcaacactcatagctctatcgctaccatttctgctacattcagtcaggcagaaactttacaatgcgccttaagtcgaattagttctgaagcgataacagccgtgaacgatggagcttccctactattaatagacgatgccgatgctcatctaaatgaacggttatggattgatccacatttagttactgctaaagtacatcaagtattaagcgaaaataaattacgtcgaaactgctctctcgttatacgctcgggtgcccttcgctccttacacgatatcgtcacactgcatggattaggagcagatagtattaatccctatttattatttgcaaccgtaaatgatgggacaaaaacaccaattacgaatttatacaatgcacttaataaaggactggagaaagtcatttcaacaattggaattcatgaattgcgtggttacggtcgcctctattcttctattggattacatgaggaaatcgcaaatatattgcaaattacaaatttcttaggttcaaatgatttagccttttctcttgaatcacttgctgaagatgcacaaatgcgagcggatgattataacgatccgaaagttagaatacgaaaatcttttcatatattcccgcgaatttggaaagcaatcggtgatgtcgcaaaaggaaactcttatgatgattaccgtgacaagttaagtgaattagaagaaaataatccaattgcgattagacaccttattcaaacgaaagaaacaaaacatgtcattccaactgaagaggtatctatcagtattcaaaatcatgatttaccatttattattagttccatgtcatttggctctcaaaatgaaattgcctttcgtgcatatgcagaagcggccgaccagctaaatatgattagcttgaacggtgaaggcggcgaaattaaagatatgattggaaaatatccacatacacgtggacaacaagttgcatctgggcgatttggcgtaaacgccgaactactaaattcatcaaacttaattgaaataaaaattgggcaaggcgcaaagcctggtgaaggtggacatttgccaggttcaaaagtaacagccaaaatcgctgaagcacgcaatgcaacaattggctcagatttaatttcaccttctaacaaccatgatatttattccattgaagatttagctcaaatgattacagaaattaaaacggctaatcaacttgcgaaagtagctgtaaaggttcctgttgtccctaatattggaacaattgctgttggcatcgcaaaagctggtgctgattttattaatattagcggatttgatggtggtacaggggctgcacgtattcacgcattgcaacatgtaggccttcctgtagaaattggtgtgaaagccgctcacaatgctttattagaagcaaatatgagacataacgtagaaatttgggctgatggtggtattcgaagtgttaatgatgccttgaaaatcatgctcctcggagcaaatcgcattggatttggtacattatccatgattgcaatcggctgtacaacttgccgcggatgtcatctagatacttgtcacgttggaattgcaacacaaattgaatctgaagctcaggcaaaagaacacggattacgccgcttcgtcccacgcgaactagaaagtgccgtggctggattattacatttattcactacttttggtgaagaactaaaacgattaacaggaaatcttggctatacaaacttacaagaaattgtcgggcggtctgatttattagaacaagttcgaggcaaaaatttattaaacttatgtaatttactacaaacgatagaacatccatctgttataaaaacagaacacgtactagaaaaacaatttgaacccattcattcccctcattcaaaagaattagtaggcgttggtgtagagcaacgcgttatgggcggtctagaatcttgctatcgcgtgcgtagtaaattatatgaagatacaaaacttgaaccactgacattaaagtatacgaatggctcgattcctggaaatggattaggtgcttacaatagtgaaaatttatttatacatgtaaatggcggtgcacaagatggtattggtaaaacctcctttggtggtggtatttatataacaaaagcaaaaggaaaagatggcctatattataacggttctgtcggaaaaggttttggatacggtgcacaaaaaggagcgttatacgttcaaggtaacgctgatgctcgcgctggcattcgtctctctggagcagacatgataattggagggcgcatgacaaagccactccgtgaaaaagagcaagggaatataggagcatactctaatattaaaggttttgcttttgaatatatgacaaatgggcgagcgcttgttttaggggatcctggtccatggatctgtgctggtatgactggcggcgttgtttatttacgtcatgattcaagcttaggtttaacagaacaggccttaaaaagaagaatcgcaaaaggagcaaatgttacattgcaaccaattagtaaaaatggtgtgcgagatgtaaacgagttattactagattatatccgtgtattaaatgaacatgaacaatatgaagaagttgctttgttaacaccgttactcgatgatatgcagcaacagttttttgaaatcatcccgaagaaagagcaggctgatccatctatctcaacagag

SEQ ID NO: 10151 - DNA, 678 bp, Bacillus anthracis
atgtatacattaattattccagcagctggtcagggaaagcggatgggtgctggcaaaaataagttgttcttacttattaatgaagtaccgattattgtgcatacgttacgtgcttttgaaaaggataaagcatgtaaaaatattattatggcaattaacgaagaagagcgtccatattttgaagagttaatgcagaagtatccggttgaaaagccagtacaatttattcaaggtggagctgaaagacaagatagtgtatataatgcgattcagcatacgactgatgttgagtatgttcttgtacatgacggtgcgcgcccgttcgtaacgaataaagtaatccaagatgtattaactgcagcagaaaaatatggagcttccatttgtgcggtgccagtgaaagatactgttaagaaagtagagcagggtgttgttgtcgaaacggtagaaagatcgcaacttaaagctgtacaaacaccgcaagggttctctgtttcgcttttgttagaagctcatagaagtgcgaagcagagttgtttccttggtacagatgatgcaagtctcgtagaacgtatcgggaagcaagtaggtgtagtagaggggagttactataatattaaagtgacgaccccagaggatttactaattgctgaaagttttcttcacgttcaaaagaaa

SEQ ID NO: 10152 - DNA, 1344 bp, Bacillus anthracis
atggaaaaattgctaattgaaggcggaagagctttaaatggaacaattcgcgtgagtggtgcaaagaacagcgccgttgcattaattccagcgacaattttagcagatactccagtaactattggtggtgtccctaatatttcggacgtgaaaatgttatgagacttactagagggaattggaagaagaataacgtatggacaagaaggagaagatggtagtcgatccttctaccatgggtgcaatgccttttaccaaatcggaaaatgtgaaaaaatagcgtgcttcttattatttaatgggtgcgatgcttggccgttttaaaaaagctgttatctgggcttcacaggtggatgtcacttaggacccgaggccaattgatcagcatattaaagaggtttgtaagcgtataggtgtatcatgttacgaattgaacaaggtgctatctatttaagagcagatgagctacgcggggctggtatttatttagatgtcgttagtgtaggagttacgattagatattatgttagcacctgtacgagcgaaaggtagaactgttattgaaaacgcagcgaaagaaccagagattattgatgtagctacactgttcactagcatgggagcacgtattaaaggtgctggtacagatgtaatccgagattgatggtgtggattcattggcacggttgtcttcaatccattccttccaatttgttttaaaggcgggtacgtatatgattttaggtgctgcatcacgaggagaaagaacagttgattatgttattcctcagcacctagaagcattaaccgcaaacctccaaaaaactggtggtccaggttgaaaccaaatgatggccagattcccagtaaccgtggatagaagattaaaaagtagttgatataaaaaacgcttgtatattccagggtttccccaacagacttacaccagccgtttacaacacttttaccaaaggcgcatggaacgggtgttgtaacggatacgatttatggtgcacgttttaaccatattgatgaattacgtcgtatgaatgcacaaattaaagtagaaggtcgatcagctatcgtaactggtccctgttttattgcaaggtgcaaaagtgaaagcgagtgatttgcgagcttgtagccgcacaatagaatcgcaggattaatggcggatggaattccagaagtacccggactggagcatattgttggggggtttgaaaattttggtggcaaagcttaaaggggctggtgcaaaccattggccgggaccaaatgccaaagccagaaatttgaagaaatgaaggaacgcataagtgatacttccgcaagggggga

SEQ ID NO: 10153 - DNA, 317 bp, Bacillus anthracis
caatctttaaaagtatttattgcattatctcgtgtacatcgttctgttatggatactacaaataaatctatacaaagtaacgggttaaatccaactgagtttgctgtattagaactgctatatcataaaggcgggccaacacttcagcaaattggtgagcgtatttttatagctagtgggagccatacatatgttgtggataagctagagaaaaagggactagaaaaaaaattcccgtccccaaatgaacagacgtgttatttatgcccaattaactggagcctggagagaactttattgcttcaatttttcacggg

SEQ ID NO: 10154 - DNA, 706 bp, Bacillus anthracis
atgagtaagtatgaacaaatttatacagcaatcagcaagtctattgataataaacaattaaaagaaggaatgcaaatcccatcagaaactgaattaatgaaacagtatgaagcgagccgtggtactgtaagaaaagcagtggatttattacaagagcgaaggatatgttcaaaaaatacacggaaaaggtgtttttgttttaaagcgtaaaaacattgaattcaactttggtggcattgtaagtttccaagaagaaaatgaacgtttagggcgccattgtattacagaagtcgtggaaatagagaaaataaaagcgacaaaagagattgcaaagctattaaatgtgaaagagaaaacagaaatagatcatattaaacgcgtacgaaatattgatggagaaaaagtaattttggatattaatcattttgtatcggaacatatccctggattaacgagtgaaattgcagcggggtccatttataaatacatagagaaagaattaggtcttcatattagttactcacagagggtaattgaggtgcagtcatgtacagaggacgatagaaagtatttagatttaaatggaacagattatgttgtcgttgtgaaaaactttacgcatttttatgatggaagtcagttcgaatatactgaatcacgtcaccgcttagatatttttcatttttcggatgtggcgcggagaaaa

SEQ ID NO: 10155 - DNA, 191 bp, Bacillus anthracis
atggggaacagaattcctgaagaagttgttgaacagattcggacgtcatccgatattgtcgaagtgattggtgaatacgttcaacttagaaaacagggacgtaactatttcggcctttgtccgtttcatggtgagaattctccttcattctctgtttcatctgataagcaaatattcattgcttcggatgg

SEQ ID NO: 10156 - DNA, 474 bp, Bacillus anthracis
atgtttcgaattggacaaggttttgatgtgcatgaattcgcggaaggtagaccgttaattattggtggaattacaattccacatgagaaaggattaatcggtcactctgatgcagacgtattattacatacaatcgcggatgcgtgtttaggtgcaattgcagcaggagatatcgggaaacatttccctgatacagaccccgcctttaaagatgctgattcagctgtattgttgcaaaaggtttgggagtttgtgcgtgaacaaggttatgaattagggaatttagattgtacaattattgctcaaaagccaaaaatggcaccacatattgaaagtatgcgcaaacgcattagtgagctattagaaacgtctatcgataatatcaatgtaaaggcaacaacaacagaaaaattagggtttacaggtagagaagaaggaattgcttctcaagcagttgttttattacagaaaaaa

SEQ ID NO: 10157 - DNA, 1328 bp, Bacillus anthracis
atgtttatagatcaggtcaagatatatgtaaaaggcggcgacggtggtaacggaatggttgcgtatcgtcgtgagaagtatgtaccaaaaggtggcccaccaggtggcgacggtggtaaaggtgcagatgttgtttttattgttgaggaaagcttacgtacattaatggacttccgcctacaacgtcatttcaaagctgatcgcggtcagcacggaatgagtaaaggtcagcacggacgtaaatctgaagatttacttgtaaaggttccgccagggaacagtagtaaaagatgaaaaaactggtcaaattcttgcggatttagtaacgcatggacaaacggctgtaattgcaaaaggtggccgcggtggtcgtggtaactcacggtttcgcaacagctactaacccagcgccagaaatcgctgaaaacggggaaccaggtcaagagcgtgatgtcattctagaactgaaagtactggcagacgttggacttgttgggattcccaagtgtaggtaaatctacattatttatctgtcgtatcatcagcacgtccgaaaaattgcagagtatcacttcacaacaatcgttccaaacccttggtgttggttgaaactggtgataaccgcagcttcgttatggctgaccttctgcttcgtatcagggggcgcacatgcgtggcgttgccacttggacaccaattcttacgtcatattcaagcgtacacgtgtaatcgtgcatgttattgatatgtctggcttagaaggcctggatccatatgaagattacgtaacgattaataatgaattaatggaatacaatcttcgcttaacggagcgtcgacaagttgttgttgcaaacaaaatggatatgccagatgcagaagagaacttacaagcatttaaagagaaagtgggagacgaagtaaaaatcttcccaatctcagctgtaacgaaacaaggagttcgtgacttactgtttgaagtatcgaacttaatagaaacaacacctgaatttcccaatacatgaagttgtggatgagtctgacacaagtgtaatgtacaaatttgagactgaagggtggtaaatttgatattacacgtgaaagtgatggtacgtttgttatctctggttacgatatcgagaaaacattcaggatgacagacttctcccgtgatgaatctgtacgtcgtttcgcttcgccaaatgcgcggaatgggtattgatgaaacgcctcgtgcacgtggtgcaaaagacggagatattgtaaaaattcttgaatatgaaatttgatttattcgactaagactgccgaaatacggcagtcttttt

SEQ ID NO: 10158 - DNA, 693 bp, Bacillus anthracis
gtgaatgatcgtaaatccattgccatcgcaacagcaaaagcagggcttattgccgctactggtctcgtacttgtatatggtgcgcttggctggctcggtacaactagcgtctcgctcggatatgcaaaaaatggcggacagttacttactgttatcgtacaacaattattcgggccatacggcttacttctactagctctaatcgttacactcgcttgcttaacgacatgtgttggactcgtatctgcatgtagtcaatatttctcaacattattgactaaattttcatacaaaacatttgcaagtatcatttgtgctttagggttactagttgctaacttaggtttaacaaaaatcattgccatctctgttccaattctacttgttgtatatccaattgcaatcgtacttgttctactatcgttactgcataaatacttcgggggatatcgttctgtttatgtaggtgctttaattggagcagctatagtgagcgtatttgatggattaaaacaagggggtatttcagtttcatttatcacatcatattttgaatttatccctttatataatgaaggaataggctggctagtacctgcattaaccggagctcttatcggccttacaatcgctaaactaagcggtgcgaaaaaagttcctttactaaccgaatctcgtgaagtaaaagcatcc

SEQ ID NO: 10159 - DNA, 2823 bp, Bacillus anthracis
atgaaacaaatttggcgtatttataagacagatttacgaaatgtagccaaacattgggctgcaattgttattgttgtagggttaatgattttaccatcgttatatgcatggtttaacattaaagcttcctgggatccgtatggaaatacaaaagaggttcccattgcagtttctaaccaagatgcaggctctaatttaagagggaaagatattaatatcgggaacgagattgtagattctctgaagaaaaacaaaaatcttggttggaaatttgtagatgaaaagcaagcaatttacggagttgaacgcggggattactatgcgagcattacaatcccaaaagacttctctgaaaagattgcaacggttctggatgaaaatccacagaaaccagaacttgattactatgtaaatgaaaaggtaaacgcgattgcaccaaaaattacagcaaaaggtgcatcaggtattacagaagaaattagtaaaaactttgttaaaacagcaaatggtgagatttttaaaatcttcaatgaccttggaatcgatttagaaacaaacttaccaagtattgagaaagtaaaagatcttgtatttaagttagaagcgcagttcccagaaatgaatacactgatggataaggcgttagatgatgcgactcgagcagaggatctagtaaaagtagcgcaaaaagagttgccagttgtagaaagtgttattaatgatgggcaagaagcgttaacaaatttagataagttctttgcaaacaatgatcaaacattgcaaaatgcacctgggacgatacgaaatcatttaacagcggctaaaaatgtaatggataaagctaatgcttttacggattttttaatgcatccaggaatagacttttctggtatgaaaggattgcctgagtttccagcgcgtccggatctttcaaagttgaacgatgaaggttataaaaatattgcaagaaatattaatcaaacagtgaataacgttttaaactcggcacgtgcaggaacaacatacggtaaaagtgttgtaaacggattgcaaaatggtcaatttgatccagaaaaggcaaaacaagatcttaatgcggtttctgaaaatcttcaaggtcgtacagatagtattgcatatcttattaatgtatttactgaactacaaaaatcagcgacgactgattttggtcaaagctttttccaaggccgtgtggatcgcttaactaagcttaaaagcggtatggaaaatgcaaacaacggtattaaagacattgtaaatgttattggcacaggacaagaagtaaagaaagatgtaacagatgtagcaaatcaaaaattagatgcagcaaatggattaattgatcaagcagaaaaagattataatgaaacatttgtagcagattataaaaaagcagttagcacagtcgatcaagctaaagctgatgcaaatgaagcgtatgatagtgtgaaaaatgaatatgataagttcaaaaatggtgttgaagatgctaaagcaaacatatcaaataaaggtgtaactgatttagaatgggcaaaagtatctttaaacgatttaaatggtcaattacaagctactaataatctaattggtgatgcgattccggttttagaaagcacaaataaggtattagcagatgtaaatagcggaaaaaaccttaatggcggaattgcaaaattgaacaaaatacaaaattctgttcaaaaaggtatagatgcaacgaataaggcaactacactaattaacaatggacagaagcctacaaaagaggttgtagaaagtattaatgaagcaactcaaaatgcttcagctcaattaggagatttcttagcaacatatgattcagaaatcgttccaaactttaacacagcaattgaacgtacgaaacgtatgtctaaaaacacatctcaaattttaaaagaagcagacaaaaagcttccagatgttaaaaaattactagaagattcatcaaaaggtttagtagacggtagaaagaaattagcagatattaaagctgaaatgccagctactgagaaaaagattaaagaattagcagataaaattcgtgattttgaatctgaagaggatttaaaagacatcatccgtttgttgaaaaacgatgttgagaagcaaagtgattactttgcaaatccagtaaatttaaaagagaataaattatttgcaatgccgaactatggttcagcaatgtcaccattctatacagtgcttgcattatgggtaggcgcattattaatggtttcgttattaacagtagaagtacatgaagagggcgcgaattataagagccatgaaatttacttcggacgtttattaacattcttaacgatgggtctttcacaggcgtttatcgtatcgatgggagatatattcttactcggtacgtacgtagtcgataagttctggtttgtattatttagtttatttataggtggagtatttgtttgtatcgtgtactcactcgtttctattttcggaaacgtagggaaatcgatggcgatcattttacttgtactgcaagtagcaggatcgggcggaacattcccaattcaaatgacaccggcgttcttccaagcgatttatccgttcttaccgttcacatacgcaattagtgcaattcgtgaaacagtaggcggaatgctatgggatattgtaacgcgagatttacttgtgttaagtgctttcgtagtagttatgattgttgctgcgttattactgaaaacaccaattaacaaatcaagtgaaaaattcgttgagaatgcaaaaggaagtaaaatcattcac

SEQ ID NO: 10160 - DNA, 1442 bp, Bacillus anthracis
atttattgcctttcagtttttctacgcggggtgttcatctaatgcgaaaacaggaaatgaaggatcgagaagcaaagggacaaagggagggcgggcgttttaacaaattgttaggctttcagaatggtgaatatttaagatcccccatttatttaccaacattcctttccgccaagtgtgtgttatcataaagtgtataaaaacttgttacaacgagataaaaaacatggattttaagccgatgttagcaaaggaatggaaacaaattgatgatttaaattgggaatttaagttgcaacaaggcgtaacattccaagatggtgcaccatttaatgctgaggcagtaaagaaaaactttgaacgtgtattagacccgaaagtaggttcaaatcgagcaactgtttattctatgattcaaggaaaataaaagttatttgatgaatacacagtacaagtttcatattgaaataccccatactcacctctttttatctattttcggcaagtaatgaaggaagtattttaagtccgaaagcaattgatgaaaaagggaaggggcttagcgcagcatccagttgggaccaggtccatatacctttaagtcatggaaaccaggtgaagaaattcgacttgaaaaaataaagtactataagcggggagaaagcaaaggttgatgaagttgtattcaaagtagtaccagaagatgcaacacgtattggaatgatcgaaactagtgaagctcacattgcagagaatttaccctgtactgaagtagagcgagtgaaaaattcaccatccatggagttaatttgaaaatgaagggtttaggtgtagaatatattgggattttatgtagaggaaaaaagcccattgcaccatcccgcttttttcgtcaaggcgatttgcaccatgcaattgaaaccgaaaggggattttaaaaggggttatataaccaatgtggggactgaaataaactccggtaatgacacctaaagtgttcggttatacgaaagacgtaaaaggatataagtatgacattaatactgcgaaaaaattattagcagatgctggttatccaaatggatttaaaacaacaatttggacgaatgacagcaaagttagaatggcgttagtggaagtaattcaatctcaattaaaagggattggcgttgatgtagaaattaaagttatggaatatggtgcgtttttagctgcaacgaataaatcagaacatgcgatgtttgtttggaggagggggaaacccaacaagtgatgggggactataatcaatataatttattccattctagttcacacggagcaactggtaaccaatttttctatagtaatcccggaaggagataaattaatagaaagaagctagaaaagaaaaaagatgagacgaagagaaaaggatttattcaaacagttaccagaagatt

SEQ ID NO: 10161 - DNA, 942 bp, Bacillus anthracis
atgattgaaatcgaaaagccgaaaatcgaaacggttgaacttaacgaagatgctaaatatggtaaattcgtaattgaaccgcttgagcgtggatatggtactacgttgggtaactccttacgtcgtattcttttatcttcactccctggtgccgctgttactgctatccaaatcgatggcgtattacatgaattttcaacagttgagggcgtagtagaagacgttacaacgatcatcttaaacttgaaaaagttagctcttaaaatctactctgaagaagagaagacgttggaaattgatgtgcagggcgaaggtattgtcacagctgctgatattactcacgatagtgatgtagaaatcttaaatccagatttacacattgcaacgttagcaaaagatgcgcatttccgcgtgcgtttaactgcaaagcgtggccgtgggtatacgccagctgatgcaaataaaagcgaagatcaaccaataggagtaattcctattgattctatttatactccagtatcacgtgtgacttaccaagtggaaaagacacgtgtcggacaagtggctaattatgataagcttacgcttgatgtatggacggatggaagcatcgggccaaaagaagctatctctttaggtgccaaaatcttaactgagcatttaaatatctttgttggtttaactgatgaagcacaaaatgctgagattatggtcgagaaggaagaagatcaaaaagagaaagttcttgagatgactatcgaagaactagacctttctgttcgttcttataattgcctaaaacgtgcaggaattaatactgtacaagagcttgcgaacaaaacagaagaagatatgatgaaagttcgtaacttaggacgtaaatccttagaagaagttaaacataaacttgaggaattaggtttaggtttacgtaaagacgac

SEQ ID NO: 10162 - DNA, 1708 bp, Bacillus anthracis
aaaacaaagggagcagttcttgttgttgattgtttaattaaacaaggtgttacacatgtttccggtattccaggagcgaagattgactctgtatttgatgtactgcaagaaagaggaccagagttaattgtttgtcgtcatgaacaaaatgcagcatttatggcagctgcgattggtagattaacaggaaaaccggggcgtatgtcctggaactttcagggccagggacatcaaatttagcgacagttcttgttactgcgaatgcggagagtgatccccgttgttgcttaagctggtgcagttccgcgtacagatcgattaaaaacgtacgcacccaatctatggataatgctgcactattcgaaccaatcaccaaaatatagcgtagaagtagagcatcctgataatgtgccccgaagcatatccaatgccttctcgaagtgcactttctacaaatccaagcgctactttagtaagtttgccgcaagacgttatgactgcggaaacaactgtagagtctatcggtgcactttctaagccacagcttgggaatcgctcccacacatgatattacatacgtagtagaaaaaataaaagcagcgaaattaccagttattttactcggtatgagagcgagtacgaatgaagtgacgaaagctgttcgtgcattaattgcggatacagagcttcctgtcgttgaaacatatcaagcagctggtgcgatttcacgtgagttagaagatcatttcttcggccgcgttggattatttccgtaaccaaccaggtgatatttttactagaagaagcggaccttgttatttctatcggttatgaccccatttgagtatgatccggaattcctggattaacttgggggacagaacgattaattcatccttgatgaccactcaagcagatatccgatcttgattaccaaccccgagccgggaattaaattggtgaaattgcccttaacggtaaatagcatcgcagaaagattaccgaaaaattgtgttaagtacgaaatcagaagcagtgttagaacgattacgcgcgaaattatcagaacaagcagaagtttccaacccgtgatccagaaggtgttacgcatccacttcaagtgattcgtacacttcgttctttaattagtgacgatacaaccgttacatgtgacatcggttcccattctattgggatggcgagatgtttccgtttcttatgacccacgtagattattatttagtaacggtatgcaaacgttaggtgttgcactttccctggggcaatcgcagctactttagtagacccaggtaaaaaagtagtttctgtatcaggtgacggtgttttcttattctcagcgatggagttagaaacggcggtacgttaaatttctccaatcgtccatctcgtttggagagacggcacatatgatatggttgcattccaacaaatgatgaaatacggcagaacatcagctacagagtttggtgatgttgatcttgtgaaatatgcggaaagtttcggtgcgacaggtcttcgcgttaacacgcctgatgaattagaaggtgtattaaaatccgcattagcagcagacggtcctgtcattattgatattccaattgactatcgtgacaatattaaattaagcgaaaaattattaccaaaccaattaaactaatggaggcagatttgagatgaccgttgcgca

SEQ ID NO: 10163 - DNA, 786 bp, Bacillus anthracis
atggggattgttgaaactgctgaatggttacatctatattatggacggccagaaaagctgtgtgagaagtttacgaaatatatcccgctgccaaaagaaaggttgtatcgctttttaatttctaaaggtatgtatcgccctgttatgcgaggagaacgagaaattaaagagttagagaaaaaggaagtttggaaagagttacgtgcggagtatgagaaactgaaaaattggttaaaaggtccggatgtccctgtctttattttattatcagactcctataatcgaacggtacaagaagagtataacggcagggctggattatctatgcgccacgttattttcttattcgtatgtggacggaattcggtggaagaattaaaagtgctgttggcgcatgaatatcatcacatatgcaggttacatcaaattgagacgaaagaaacagaatatacattacttgatacgatgattatggaaggattagctgagcaagcggtaacggaaagatattcagaaaaaaacaatgcaccgtggacgacgtatctttcaaaggaagaggctatatattattggaaaaatgttgtacatgaaagaataagtataaagcgaggaacaagggagcacgacatcttattaaatggattgcactcttatccgaaattgcttggctatgcgcttggatttcatattgtcaaagattgtgtaactttgcaaggagaagatacactttctttattgcctatagatgcgaaagaaatattaaataaagccaatacatttcatata

SEQ ID NO: 10164 - DNA, 506 bp, Bacillus anthracis
aaatcccgtcattagatgacaagtagtgttgcgatctattaaatttatttagagattccagatggaaatgtacccattcccatatccacttcatttcttattctctaccaatgaagagatcgggtacgcgggaaactctatatttccagaagaaaacggtgaaatatttagcagtagatatgggagcgttaggtgatggacaagcatctgacgagtatacagtatctatttgtgcaaaagactctagcggtccgtatcattatgcactgcgtaaacatttagtagagcttgcgaaaacgaacaatattgaatataaagtagatatttatccgtactatggatcggatgcatcagctgcaattcgagctggatttgatgtgaaacacgcattaattggagcaggtattgattcttctcatgcatttgagcgcacgcatgaaagttcgattgctcatacagaagcgcttgtttatgcatatgtattatcagagatgattgcagaataa

SEQ ID NO: 10165 - DNA, 2457 bp, Bacillus anthracis
gtggacagaactgctttacgaaaagtaaaaggtcttattggattattaatggtttttgtattagcatttgtatcatttccgtggagtacatcagttaaagcggaagagaagaagcaagaaaaggtacctagtgaaaagaagatcgtttttccagttgtaagtgatgtacatattaaaaatagtggaacggatgatacgtttcgctggaaacgagcgattgaacagctcaatacgcttgcaccaaagcaagatgcatttgttatcgtaggtgatttcacagatacagggtcactgcagcaatatgatcgtttcatgcaagtgtataatgaaaatgaaaataaagatgcggtgcgaatgaattctcttggtaaccatgattattggaacggtttatctgtagagggcgcacagaagcgtttcttagaaaaaacaggaatggaatcgatttattatcataaagtggtgaaagggtatcacttccttgttatgtcgccagaaaatgggacaacacacggatattattcagacaagcaaattaattggttaaaagaagagatggcgaaagcacaaaaagatgacccagaaaaaccgattttcgtatttttacatcaacacattaaagagacagtatacggtagtcatgaatggggaacgcaagatagtgcaaaaattaatgcggtattaaaagaatatccgcaggctattacgttttcaggtcattcacattatccgctagatgatccaagatcgattcatcaaaaagactttacatccgttggtacatcttctataagttacatggaagttgaaggtggtaaagtacaggggaatatcccgccaggagctagtacattaagccaaggtttattagtagaagtagatgatgaagaagtaacgattaatcgtcgtgatttccatacaaattcttggacaggtgagccttggaaaattaaattaccagcaaagaaagaaacttttacacatgtagaagatcgtgataaagaaaaaccatctttttcgacagatgcgaagttatcagtatcaaatgtaacagaaaatgcagcaacagtaacattcccacaagcgttggataaccttcttgttcactcttatcgtgtacaagctagagataagcaaacgggcgaaataaagaataaattgttagcattctcagagttttatcgtgatccagtaccaaaagatcttacgtttacgcttgcaggattagatggtggaaaaacatatacgcttgaagtagttgcaatcgattcgttcggtaatgaaagcgcgcagcctttaacagcagaagttactacgaaaaaagataatattgatccgaatgtaaaagtgccaaaggcagatgtttttgatgtaaatttcttagatggtacatttaaagataattcatcgtttggaacgaagggcgatgtgaaagggaatgtatctatagcatacgataaagctttaaaaacaaatgtaatgaaattgaatggacaagctaatacatttggataccttccattttcagcagcacaaaaagagaaagtagcaaatacgttcacgctagaaactgtattttcaatgaatgaaattcgcggacaaggtattttacaaaatacagagagcggcggaattggctttgaatctacaggaagtggaaatgttgaattgtgggctcatattggtggcagttataaacgtgttggtgttcaattagaagcaaataaaacatatcacttaacaggaacgtataacggaagtgaagtagctatttatgtcgatggtaaaaaagcaaatagccaaccagctaaagggaaagtgtctcatccgaacgtaccgtttgcatttggagctgaccctgatagtaacggaaatggtggtattccgttgaacggacaaattgcgcttgcaagattatatagtaaagcgttaagttcttcggaagtattagcggcgtacaatgagttttctaaccgcacaaagttagagcaagtgaacgcgttatatgaagagcttgggaaagtgaaagaagtgttagctggtacgtatgagtttggtgataagccaggtcaatattcaaaggaagcatttcaagaattagagaaaagctataataatgcaaagcaagcatttgaaaatgtagggagtacgggagagcaaatcgttcaaacgtataacgaattaaaaacagctaatgtaacatttgtacaatctaaagtagtagaacaaccgaaaacaccgaaagaaaaattacaaatcaatattgaatctgcaaaagcagtagtgaaaaaagcgcaagatgcaaatgtaacggacggttcagtgaaagcactgagtcaaaaaattacagtggccgaaactgtagtgaaagatgtaaaagtaaaagatgcacaggtagaaacgatgaatcgtacattagagtatacgatttcacttgttgaaaaaagcataaacaaa

SEQ ID NO: 10166 - DNA, 237 bp, Bacillus anthracis
atgtcagatgtggaatttcaaacaaaggtagaacaatcccttgctacattttctagaagatctactgatgacgaatcaggagtagaagaatttcttagcacatttcgttattgtcaattaaatacagcgaatatagaggactatcaagatttgttgagtcttgtaaagagacgtgaaacagaattaaacattcctgaaaaccgtatgttttacctatctgttataccaaaaagtatt

SEQ ID NO: 10167 - DNA, 891 bp, Bacillus anthracis
gtgataccattaagtattcgtgttcctgctagtacagcgaatgttggacctggatttgattcagtaggaatagctttgtcattgtatttacatgtagtagtaaaagagaagtctgataaatggcaagtgatccattcctttgaagattcaattccgacagacgataaaaatttaattgttagcacggcatgtaaagtatgtccttctttatcaccccatataatagaagttactagtaacatcccgctaacaagaggtctaggaagtagtgcatcagcaattgtagctgggatagagcttgcgaatcaactaggcaaattgaacttaacgattgatcaaaaagttcaaattgctacaaattttgaaggtcatcctgataatgttgctgcttctatattaggaggaactgtaatcggagcacttgatggaaaaaatgtatcggttgtgagaattgaaagtaaggaattaggtgtaatttcacttattccaaatgaagagctaaatacagatgaaagtcgttctgtattaccagatgtatttccgtttcatgaagctgttaaggctagtgcaataagtaatgtattagtagctgctttatgtcaaaagaaatggaaagttgtaggggaaatgatggaaagggatcattttcacgaaccgtatcgtttagagcttgtaccgttattaccatctattcgtaaatgtgcaaaagaattcggtgcatacggtacagcgctaagcggtgcaggaccatctatttttatattaacgccgtatgagaaacgtcaagaaattgctgagcaattagcgagagtatttacgtctatgaaagtgtgtgagctagaaattgatcatagagggattactgtaaataagaaagaacatattggatta

SEQ ID NO: 10168 - DNA, 231 bp, Bacillus anthracis
atgattttgggaatgggattgtatattatggaatggattggatttgaaaaattgttagatggaaggcttaatattatggacgttattttacttgaaattgacgttattgttgttaagggattgaaggaaaccgcctttccggattttgtagttgaaagtttgccagagaaagagggttattcaaaagcggtaggaactggtattgggaaagaagtgcagttttttagatat

SEQ ID NO: 10169 - DNA, 880 bp, Bacillus anthracis
agacgaattggactcattatgattattacaggagctaccttatggggattatctggccctatgattcagtggctatttcaacatactaacgtatcatcagttgattttttaacaattcgcttgttgcttgcaggaatatttattttatctttcttactgataaagaaacaaaacatatttcaaatttgggaaacaccctagatattctatacaacttattatttttctctattctcggcatgctcggtggggccatatgcctttatcgaaacagttcatattagtaatgcggtcacagcgacactatttcaattttcaaaggcccggttcttattaccaggtatgtcgcattttgaacaacgaaaatccccctgctccatacaactactcgcaattataactgcactaacgggtacctaccttattattaccaaacggttccattgaaaatattgttttatcgaaagaagcgattatttttggcctattaacagcaattggatttgcattttatacccttcatccagcttctcttattaaagaatgtggaacaatttgtaataattggatggggggatggttaatccgagggcatgcccctggctatttgaaatcgcctcgctttgaatgggactcagctttccccaaactttttaacctaaaaaacttttttcaatgcttatttcctaatcatcataagtggcactctttctttccttctttatatcggtagtttgaaatatttagccgcaactgaaacaagcattttatctagcattgaaccacttgtagcagctatcgtttcaatcgcttggctgaatgaaatcctttggaagcctatcaattactaggcgggctatggatcggtctttctggttat

SEQ ID NO: 10170 - DNA, 2068 bp, Bacillus anthracis
gaaaacaaatccttttatattactacggacaatttattatccaaaagtggaaaattacacattggacatgcttatacaacagtagcaggagatgcgatggcacgatataagtgcatgcaaggatataatgttcattatttaacaggaactgatgagcatggacagaagatccaaaagaaagcagaagaattaaacgttacacccacaagcatatgtggataacatcgttgcaggaattaaagaactttgggaaaagatgggatatctcttatgatgattttattcgtacaacggaagatcgtcataaagatgttggtgaaaaaatctttcagcaactagtagatcagggtgatatttatcttgatgaatatgaaggttggtattctgtacaagatgagacattctatacggagcatcaattagtagatccaattatggaaggtgacaaagtagttggaggaaaaagtccagatagtggtcatgatgtagaacttgttcgtgaagaatcgtatttctttagaatgggtaaatatgtcgacagactattaaaattctatgaagataatccacatttcattcagccagagtctcgtaagaatgaaatgattaataacttcattaaaccaggcttagaagatttagcagtttctcgtacttcatttgactggggagttcgtgttccaggtaatccgaaacacgttatttacgtatgggttgacgcactatctaactacattacagcattaggctatggaacagaaaatgaagagatgtataagaagttctggccggcagatgtgcatttaattggaaaagaaatcgttcgtttccatacaatttattggccaatcattttaatggcattagatttacctcttccgaaaaaagtctttgctcaccggtggatttttatgaaggatgggaagatgagtaagtccaaaggaaatgtagtagatcccgttatattaatcgatcgctaccgattatatgcattaccttattacttacttcccgaagatccattccgatctgatggcggatttacacccaaaagatttgtggagcggaattaatttcgattttagcaaatgactttaggaaactttttaaaatcgtccgggacctaggatttgaaaggacctttaccggagaaataccctgcctttttaaacaattgtaacggaatttgatgaaacgttagtaacattttgcgaaagatacatttgaaaaaagttgaagaaagcaatggagaatatgggatttctctgtagctctaagctcaattttggcatttgggttacccgtaccaataaatattttggatgaaaacccaaccctggggtattagcgaaagatgaggatgatcgtgaaaagttgggcgtctgtaatgggctcatttagcagaagtactttcgtcaaacggggtattatgctttatgccctttctttaacagtagcacccaagcaaaaatgttttgctcagcttgggcctttactgggatgaaagcacatacatctttgggggaagccctatctaccaaatcggctgtatttccagctgggaacaaaagtagaaaaaaggacaacccatttttccctcgttttagaaatggacgtggaaagtggcgtacatttaaagaacaaaatgaaagcctcctgcctcctaagttgaggaagaaaaaagaagaagacccgaaagcagaagaaattacaattgatgatttctttaaagtagaattgcgtgtagctgaagtactattctgctgaacctgtaaaaaaggcagataagttgttgaaaattcaactagacttaggtacagaaaagcgtcaagttgtttctggaattgcaaaattctattcgccagaagacttaaaaggtaaaaaggttatttgtgtaacaaatttaaaacctgtaaaattacgcggtgaattatcgcaaggtatgattttagcgggtgaagagaatggtgtattgtcattagcatctattgaccaaaatataccaaatggtacaaaaatcaagtaattaagacaagaaaagagatgtttcacgtgtaacatgtgtgaa

SEQ ID NO: 10171 - DNA, 675 bp, Bacillus anthracis
aaacgaccgcaaaaggaatcgcccccttggaatgaccactttttaccgatttaccaaggttattattaactttctttgtattactagttgctacttcaaagcaggatgcagtaaaattgtcaaagttcgcttgaaaagtttagtgatacggagcaagtagatgcaaaaagtaatgggaaaatacaataccagatatttcgcatgaaacaaatcatgcaaaaatgatttcgaaagaaagaacggatgtattatataagaagttaatagcatatgtagataataacggtattagtcaagtgaatgtatatcgagagcacacgggagtaagcgtcgttatagtagatacatttaactatttgtacacaggtgacgcgaatgttataccagtagcgatagagataataagtcaattcgttgggtattatcaatcggtaccaaatcccattgttgtagaaggacatacagacagtagacctattcataacgacaaaatccctttcaactggggattatcttctgcgcgagcagcaatatgatttcaccacttaatcgaaagtgtataatgtggatgataaaaggccagttccggtaggatagcaatcaccaaagccagttgtaccaaaatagattcacccaaatttggaagaaaacccgtcgcgtgtcatttaatataaa

SEQ ID NO: 10172 - DNA, 837 bp, Bacillus anthracis
atgaaaaacttacaaagtaaagcagtattaaataacggtgtagaaatgccttggttcggtttaggtgtatttaaagtagaagaaggaccagaacttgtagaagctgtaaaatcagcaattaaagcaggataccgcagcatcgatacagctgcaatttacggaaatgaaaaagctgtaggtgaaggaatccgtgcaggtatcgaagcaactggtatttcaagagaagatttattcatcacttcaaaagtatggaacgcagatcaaggatatgaagaaacaattgctgcatatgaagagagcttaaaaaaattagaactagattatttagatctgtatcttgttcactggcctgtagaaggaaaatataaagatacatggagagcgttagaaacactttataaagaaaagcgcgtacgtgcaattggtgtaagtaacttccaagtacatcacttacaagatgtaatgaaagatgcagaaattaaaccaatgattaaccaagtagaataccaccctcgtttaacacaaaaagaagtacaagctttctgtaaagaacaaggtattcaaatggaagcatggtcaccattaatgcaaggtcaattattagataacgaaacattacaagagattgctgagaaacacggtaaaacaacagcgcaagttattttacgttgggatcttcaaaatggagtaattacaattccaaaatcaacgaaagaacaccgcattattgcaaacgctgatgtatttaactttgaattaacgaaagaagatatggaaaaaatcgatgcgttaaaccaaaatcaccgcgtgggtccagatcctgataacttcgatttc

SEQ ID NO: 10173 - DNA, 620 bp, Bacillus anthracis
aaaaaagaaatcgcatcgcatttattagaaattggagcagtatttttacaaccaaatgatccattcacatggtcttcaggtaagaatccccccatttttttgggaaaccccggttaactttttttttttcggaaaagtacgccaacaatttgcagctggattagaggagtaaataaaagagcacttccccaactgtagaagttattgcaggaacagcaactgctggtattgcgcacgctgcatgggtaaagcgattggtatggatttcaccaaggtgctacgtacgtagtaaagcaaagagtcaatggtaaaggggacccaattcgaaggaaaaagctgaaaaaggtcaaaaagtagtagtagtagaagacttaatttcaactggtggtagtgctattacatgtgtagaagcacttcgcgaagctggctgtgaagtattaggaatcgtatcaatcttcacatacgagctagaagcaggaaaagaaaagctagaagcagctaacgtagcatcatattctttaagtgattacagtgcattaactgaagttgcggcagaaaaaggtataatcggacaagctgaaacgaaaaaattacaagagtggcgtaaaaatccagctgac

SEQ ID NO: 10174 - DNA, 839 bp, Bacillus anthracis
atgacaaaacaaacagaatataagcggcaagcccgaatggttgaaaattaagttaaacacgaatgaaaactatacaggcttaaagaaaatgatgcgttctaagaatcttcatacagtttgtgaagaagcgaaatgtccgaatattcatgaatgctgggctgtaagaaaaacagcaacatttatgattttaggagcagtatgtacacgtgcttgtcgtttctgtgcggttaaaacaggcttaccaacagagcttgatttacaagagccagaacgcgtagcagattctgtagtacaaatgggcttaaagcacgttgttataacagcggttgcacgtgatgatttaaaagacgggggagcagctgtttttgctgaaacagtacgcgctgtacgtcgtaaaaatccatgtacgtcaatcgaagtattaccatctgatatgggtggagtagaagaaaacttaaaaatgttaatggatgcaaaaccagatattttaaaccataacattgaaacagtacgtcgattatctaaccgagttcgcgctagagcaaaatatgaccgttcattagagtttttacgtcgagcgaaagaaatgcagcctgatattccaactaaatcgagcattatggtcggcttaggggaaacgagagaagatttaattgaagccaatggatgacttacgtgcaaaccaatgtggatattttatttctttggacaatcctatccaacctgttaagaagcatttcccagtttttaattatttccccccagcagaatttgcagaacttaaaagaaattgccacttagcaaaggaatttagccccttggaaggtggcccccattgg

SEQ ID NO: 10175 - DNA, 316 bp, Bacillus anthracis
ttgtacgagctgttatgataaaggataaataaattgatagtagctgaatatattggccatcattattttctaccaggtggtcatgttgaagttggcgaatcagctgagagtgcattaataagagaactacaagaagaacttggagtaaattgtagtataaaacaatttttaggagtcatagaaaaccaatggcaagataaagaaatgcttcatcatgaaatcaatcatatttttgttcactctacgagagagttagcatattgatttctcaccaaaatcgtaagaacctcatttgacgtttcactggatagattat

SEQ ID NO: 10176 - DNA, 765 bp, Bacillus anthracis
gtgagtatagttaataagaaaatcatcttttttggagactttggtattgatgatgctgtggcgttaatttatgcaaataaaacatgtaaattagatattttaggtattgttgctgaatatgggaatgtatcgcgagaaatcgtaacagaaaatgtgtattttttagaaagatactatgctacagaagtaaaaatcattgagggtgcagcaagaccgatgacagctgaagaacctttattctttcctgaaattcatggggagcatggtttagggccaattattccgcctgatctgaggatttgtaaacgggaaaatttttgtgaattaattaaattaattgaaccttgtccagaagatattattatcgtagcaacaggacgattaacaacattggcaacgttatttttattatatccaaatgtcatggataaagtatgttcgtattatattatgggcggtgcttttttatttcctggtaatgttactcctgtatcagaagcgaatttttatggagatccaatcgccgcaaatattgtaatgaagtacgcaaagaatgcgcatatttatccattaaatgtaacgcaagaagccctaattactcctgaaatggtggatattattaataaagaaggaacagggcaggcgaaacttataaaaccaatgattgatttttattatgagaacttttataaaaaagaatacccctgggtattgctggaaggtcccgattccatgatttacttcccgtttattttcgtttataaa

SEQ ID NO: 10177 - DNA, 1868 bp, Bacillus anthracis
atgttgaaaaaacgacaagatttacgtaatatagcaattattgcccacgttgaccatggtaaaacaacacttgttgaccagttattacgtcaagcggggactttccgtgcgaacgaacacgttgaagaacgcgcaatggattcaaatgatctagaaagagaacgcggtattacaattttagcgaaaaatactgcgattcactatgaagataaaagaattaacattttagatacaccaggtcacgctgacttcggtggagaagtagaacgtattatgaaaatggttgatggtgtattacttgttgttgatgcatatgaaggttgtatgccacaaacacgatttgttttaaagaaagctcttgagcaaaacttaactccaatcgtagttgtaaataaaattgaccgtgacttcgctcgtcctgatgaagtagttgatgaagtaatcgacttattcatcgaacttggtgcaaacgaagatcaattagagttcccagttgtatttgcatcagcaatgaacggaacagcaagcttagattcaaacccagcaaatcaagaagagaatatgaaatcattatttgatacaattattgaacatattcctgcaccaattgataacagcgaagagccacttcaattccaagtagcacttcttgattacaacgactatgttggacgtatcggggttggacgcgtatttcggcggtacaatgaaggtggaacaaacaagtgcttttattgaagtagacggaagtgtaaaacatttccgcgtaaacgaactatttgggtatatggggattaaaacgtcaagaaattgaagaagcaaaagctggagacttagtagctgtttctggtatggaagacattaacgtaggtgaaacagtatgtccagttgaacatcaagatgcgttaccattattacgtattgatgagccaacactacaaatgacattccttgtaaataacagcccatttgcaggtcgtgaaggtaaatacattacatctcgtaaaattgaagagcgtcttcgttcacaattagaaacagatgtaagtttacgcgtagataatacagaatctcctgatgcgtggatcgtatctggacgtggggaactacatttatctatcttaatcgaaaacatgcgtcgtgaaggttatgaactacaagtatctaaaccagaagtaatcattaaagaagttgatggcgtaagatgtgagcctgtagagcgtgtgcaaattgatgtacctgaagaatacactggttctattatggaatctatgggtgcacgtaaaggtgaaatgttagatatggtgaataacggaaacggtcaagttcgccttactttcatggttccagcacgtggtttaattggttacacaacagaattcttaacattaactcgtggttacggtattttaaaccatacattcgattgctaccaaccagtacacgctggacaagttggtggacgtcgtcaaggtgtttctagtttcacttgaaacaggaaaagcatcacaatacggtattatgcaagttgaaagaccgtggtggtatctttcgctgaaccacgtacagaagtatatggctggtatgattggtgggagaacacactcgtgagaatgacttaacagttaacgttgtgaaaatgaaacaacaaactaacattcgttctgcgacaaaagatcaacttttcaccaatgaaaaaaccacgcttaatgactttagaagagtcattagagtacttaaacgatgacgagttctgtgaagtaactccagaatcaattcgtttacgtaaaaagattcttgataagagcgaacgtgaaagagctgctaagaaaaagaaatctgtagaagcgtaaaaaatagaacagcta

SEQ ID NO: 10178 - DNA, 1236 bp, Bacillus anthracis
atggaagaagcaccattttatcgtgacacttgggtgggaagtggatttagatgccatttataaacacgctacacatattaaagaatttatccccgagtgatggaaaaaatttttgcccctgttttaagggaaatgtctatggggccccaattatgtaccggtggctaaaatagcattagaagcggggccgacaaaggtaacaagtgcgttccttataagaaactttaatgcttcgaagagctggtattactgcgccaattttggtgttaggtccttctcctcctcgtgatataaatgtagttgcggaaaaatgatgtagcattaactgtttttcaaaaggaatgggtagatgaagcaatcaaactttgggatggttcgtctacgatgaaataccatattaatttcgatagtggtatggggagaattggaatacgtgaacgtaaagaattaaaaggatttttaaaaagcttagaagtcgcaccattcttacagtttggagggagtttattcgccttttggcaacagcagatgaagtggagacttcttactttgataagcaatataaccacattttttggagcaagtaaattgggtggaaagaattccgagttggatccctaagtttggtcctaccactctataaaggctgcaacccctacctttttcaaagggattacatttaaatggcagtacaaaattgggcattgccaatgtataggggttatctccatactgtagaaatacgccctttttttaccgtttaaattagaaccagcgctatcattgcatacgaaagttgctcctatttaaacagggtgattaaagggatgggaattagttataacgtcacttatccgaacgaaaactgaagaatggattgcgaccgttgcaattggttatgcagatgggctgggcttagaagattacaaggatttgagaggtacttgtaaaatgggtaaaaggggtacccgattgtaggggcgagtaaacgatgggatcaaatccatgattcacccttcttggtgaagtgctgtcttggtacgaaaagttacactcattggaaaggcaagggaaaggaatattttatcccttacagagggttgcgggaaaattcggggactatttattattgaaattattacgacgatcagttttcgtgtgccgagaatatttatacggaatggaaaagttgtggaagtaattaattatttgaacgatatatagaaggtagtatga

SEQ ID NO: 10179 - DNA, 330 bp, Bacillus anthracis
atgctcgaaaaaacaacgagaatgaactatttatttgatttttatcaatcgttgttaacgcaaaaacaaagaagttatatgtcgctttattatctagatgatttatctcttggtgaaattgcggaagaatttgatgtaagtcgccaagccgtgtatgataacattaaacggactgaagcgatgcttgaagaatatgaagaaaaattagtattacttcaaaagtttcaagagcgacagcgacttgttgcaaagctaaaacagctaatcagcgaagaagagcatgtgaatgaagaaatgaaacaagttgttgaagctatcgaaaaattagat

SEQ ID NO: 10180 - DNA, 748 bp, Bacillus anthracis
gttgctagtacggaactaggattacttgaaatggtgaaaagtggtacaacatcattctctgatatgtttaatccaattggagtagatcaagatgcaattatggaaacggtatcaaggagcgggatgcgagctgctgtttcaagaactttatttagctttggaacgcaagaggatgaaaagaaagcaattgaagaagctgagaaatatgtgaagcgttactataacgaaagtggtatgttaactacgatggttgcaccgcatagtccatatacatgcagtacagaactgttagaagagtgtgcacgtattgcagtagaaaatcaaacgatggttcatattcacctttcggaaacagagcgtgaagtacgtgatattgaagcacagtacggaaaacgtccagtagaatatgtagcaagctgcggattgtttaaacgtccaacagttattgcacacggtgtagtattaaatgacaatgagcgtgcatttttagcagaacatgacgttcgagtagctcataatccgaatagtaatttaaaactaggttctggtatagcgaacgtaaaagcgatgctagaagcgggaatgaaagtaggaattgcaacagatagtgtggcatctaacaacaatttagatatgtttgaagaaatgcgtatcgcaacattattacaaaaaggtattcatcaagatgcaacagcgttaccggttgaaacagctcttacacttgcaactaaaggagcggctgaagtaa

SEQ ID NO: 10181 - DNA, 1152 bp, Bacillus anthracis
caaagggggctttataacgtaattgatccgcttgaaagttcaaatggaccgatcattacaattggcggaaaagaatatattaacttatcttcaaacaactatcttggattagcaacagatagccgtttgcaagaagcagcaattggtgcaattcataagtacggcgttggagcaggagcggttcgtacaattaacggtactttagatttgcatattaaattagaagaaacaattgcaaagtttaaacatacagaagcagcgattgcttatcaatcaggatttaattgtaatatggcagcgatttcagccgttatggataaaaatgatgcgattctttcagacgagttaaaccatgcttctattattgatggtagtcgtctatcaaaagcaaaaattattgtttataaacattctgatatggaagatttacgccaaaaagcaatcgcggcgaaagaatcaggtctttacaataaattaatggtaattacagacggtgtcttttccaatggatggagatgttgcaaaactaccagaaaattgttgagattgcggaagaattagatttaatgacatacgtagacgatgcacacggttcaggtgtacttggaaaaggtgcaggaacggtaaagcacttcggtctgtctggtaaagttgatttccaaattcgctcactttataagtaaagcccaattggggtagataggtggatatgtagcagggaaacaaaacttaattgactggttaaaagttcgttcacgtccattcttattctctacagcagtaacgccagctgatgcagcggcttgcatgagatcaattgaaatcttaatggaaagcacagagttgcacgatcgtttatgggaaaatggtcgctatttaaaacaagggttaaaagaacttggctttaacatcggagaaagtgaaacgccaattacaccttgtattattggtgacgaagtattaacacaagaatttagtaaacgtctaaatgaagaaggcgtatatgcaaaatctatcgtgtccccaactgtagctaaaggacccggacgcgttcgtaatatgccaccagcagctcatacgaaagaaatgttagatgaagcaattcgtaagtatgaaaaagtagggaaagaaatgggcatcatttaagtaacg

SEQ ID NO: 10182 - DNA, 971 bp, Bacillus anthracis
atgttcaaaattggataccgtacagtaaaaacagcaatagggacaggcgcagccgtttttattgcccagttattagggttagaattttatagttcagcgggtattttagttatattatgtgtacaaaatacgaaacgtaaatcacttcaagtatcattacatcgttttttagcttgtgtattatcaatggtgttcgcgttttgtatttttgaaacaattggatatacaccactagcaattagcgtactattacttacatttattccgactgcagttatgctcaaaattcaagaaggtattgtcacgagttcagttattgtgatgcacctatattcattgaaacaaattacatggcttattgttgggaatgaaattgctatatttacgatagggattagcgtggctctattagtaaatatgtatatgccaagtagtgaaaataagctaaaagagtatcaagagaaaatagaaaataattttaaaacgattttgtttgaaatggttgtgtatttacgaaaccgagaaagtagttggagcggggcagaacttattgaaactgaacagatgctaaatgaggctagagatttatcatttaagaaacttgagaatgcatttatgcgagaagatgactattactatcgctatttcaatatgcgcatgcaacaattcgaaattttagagcgaatgattccgttagcagcttctttatcgtggacatatgaacaagctgatatgattgcggatgtggttgaaaacatttggaaatgctattacgccctcagagtaccggagttatttctttaagacagcttcaagaaatgagagaattatttagagatatgccattgccggctacacgtgaagaatttgaaatacgtgcgaaacttgttcaacttgtgtatgaaatggagcaatatttactcattaaaagtcgttttaagggaaaggataatataaaagaacttatatag

SEQ ID NO: 10183 - DNA, 903 bp, Bacillus anthracis
gtgaaaatcgcaatttctggtggtaccggctttatcggcacatacctttctactttttttattcaaaaaggatatacggtttacattctcacaagaaaaaaaactactgaaacttctcaccctaaccttcagtatgtgcaatggacaccagatttacaaaccttccctctctcttctattgatgtagttattaatctagctggagagtctattaatagtagatggacaaagaaacaaaagaaaatcattttaaacagtagaattcaaacaacaaaaggactcattaaacaattgcaggcactccctgcaaaaccacatacatttattaacgcgagtgcaattggatactatggaacgtctgaaaccgagtcttttacagaacagcatgtgactcccggaaatgactttttagcaaatacagtatattcatgggaacaagaagcatctaaagcacgctctctcggaatacgaacaatctatgcacgattcggagtcatattaggtccagacggaggagcccttcccaaaatgctacttccctatcaattctatatcggaggtacagttggatctggaaagcaatggttatcatggattcatatagacgatgtcgcttccatgattgatttcatcatacacaaaaaagaaattgatggcccgctcaacattacagctccagagcctataagaatgaagggatttggagaaaccattgcaactataatgaaaaaacctcattggttacctgtcccttcatttatgcttcatgctttattaggtgagatgagcatacttgtactagaaggacaacatgtattacctagtaaagcaattgagcatgggtatcaatacacatttccaacaatagaccatgcattacaaaatatactttcgcatacaatg

SEQ ID NO: 10184 - DNA, 1182 bp, Bacillus anthracis
atgaacaaaaaatcaattcgtgacgtagatttaaaaggtaagcgtgtattttgtcgcgttgacttcaacgtacctatgaaagaaggcaaaattacagatgaaactcgtatccgtgcagctcttcctacaattcaatatttagtagagcaaggtgcgaaggttattttagcaagccacttaggccgtccaaaaggtcaagcagtagaagaattacgtcttactccagtagcagcacgtttaggcgagcttcttggtaaagatgttaaaaaagcagacgaagcattcggaccagttgcacaagaaatggttgcagcaatgaacgaaggcgacgtattagttcttgaaaacgtacgtttctatgcgggcgaagaaaagaacgatgcagaacttgcgaaagaatttgcagctcttgctgacatcttcgtaaacgatgcattcggtgcagctcaccgtgctcatgcttctacagcaggaatcgcagactacctaccagcagtatctggtctattaatggaaaaagagttagaagtattaggtaaagcactttctaacccagaacgtccattcacagctatcatcggtggtgcgaaagtaaaagataaaatcggtttaattcgtcatctattagacaaagtagataacttaatcatcggtggcggacttgcttacacattcgttaaagctttaggtcatgaaattggtctatctctatgtgaagacgacaagattgaactagctaaagaatttatgcaacttgcaaaagaaaaaggcgtaaacttctacatgccagttgatgttgtaatcactgaggaattctctgaaactgcaacaactaaaatcgttggtatcgactctatcccttctaactgggaaggcgtggacatcggtcctaaaacacgtgaaatttatgcagatgtaattaaaaactctaagcttgttgtatggaatggaccaatgggtgtattcgaaatgactccattcgcagaaggtacaaaagcagtaggacaagcattagcagatgcagaaggtacatactctgttatcggcggtggtgactctgcagcagctgttgaaaaattcggtatggctgataaaatgagccacatttctactggcggcggtgcgtcattagaattcatggaaggtaaagagcttccaggtgtagtttgtcttaacgacaaa

SEQ ID NO: 10185 - DNA, 596 bp, Bacillus anthracis
atgaaagcagtagtagttaataaaaatagtaaagccaatattgaggttgttgaaaaggaattacgtccgctacactcaggtgaagcactagtagatgtagagtattgtggggtttgtcatactgatttacacgttgcaaatcatgattttggaaacacagatggccgtattcttggtcatgagggtgtaggtattgtgacgaaaatcgctgatgatgttacttcactaaaggtaggtgatcgtgtaagtattgcatggatgttccaatcttgtggacgttgtgaatattgcgtgactggtagagaaacattttgccgtgaagttaagaatgctggttattcagtagatggtggtatggctgaacaatgtattgttacagctgattatgcagtgaaagtaccagaaggattaaatcctgctcaagcatcatcgatcacatgtggcgggcgttactacatattaagctataaaagtatctgatattaaacctgggtcaccgatcgtaatctatggttgtggtgggataagtaacttatctatcccatatgctaaaaattatttggtgcaaagtaattgccctaaatattatgacgata

SEQ ID NO: 10186 - DNA, 835 bp, Bacillus anthracis
atgacattacaagaacagattatgaaaggcttttcgggttcaccctgaaatgattccgaaacgcagaaatccgtaaacgtggttgattttcttaaaagattatgtaaaaaaaacaggtgggaaagggattggtacttggaattagtggcgggcaaagactctacattagctggacgtttagctcagcttgcagtggaggaaatttcgtaatgaaggtggtaacgcaacgtttatcgccgtgcgccttccttattaaggtcaaaaagacgaaggtgatgcgcaattagcattccatttattcaaagctgatcattctgttgcatttgatatcgcttcaactgtgaatgctttctcaaatcaatacgaaaacttattagatgaatcgttaacagatttcaataaaggtaacgtgaaagcacgtatccgcatggttacacaatatgcaatcggtggacaaaaagggctccttgttatcggaacagatcacgctgcagaagctgtaacaggattctttacaaaattcggagatggtggtgcagacctattaccattaacgggattaacgaaacgccaaggacgcgctctattacaagaattaggtgcggacgagcgactttacttaaaaatgccaacagctgatttattagatgaaaaaccaggtcaagctgatgaaacagagttaggtattacgtatgatcaacttgatgactatttagaagggaaaacagttccagctgacgttgcagaaaagattgaaaaacgttacacagtgagtgagcataaaagacaagtaccagcatcaatgtttgatgattggtggaaataaataaaacat

SEQ ID NO: 10187 - DNA, 1544 bp, Bacillus anthracis
atgaagttattagaacaaattgaaaagtgggctattgaaacgcctgatcaaactgcttttgtttggcgagatgcgaaaattacgtacaaacaattaaaggaagattctgatgcgttagcacattggatttcttctgagtatccagatgatcgttcaccaattatggtgtatggccatatgcaacctgaaatgattattaactttttaggatgtgtaaaagctggacatgcttatattcctgtagatttatctatcccagctgatcgtgtacaacgtatcgctgaaaattctggtgcgaaattacttttatcagcagcagtacttgtaggtgtttcagcaggttcgcatggtaagggaaggccatctaaaaagatattttcttacttcataaggggaacactccaaatccctgacatgcgggtaaagggtgatgagaacttctacattatttacacatcaggaagcacaggtaatccgaaaaggggtcagaatactttatactgcccttgtaagctttacacaatgggctgtagaagacttcaacttacaaacaggggcagtattcttaaaccaagcacctttctcattcgatttatctgtcatggatatttacccatcattagtaacaggtggtacactttgggcaatcgataaagatatgattgcacgtccaaaagacttgtttgcttctttagagcaatcggatatacaagtatggacttcaacaccatctttcgcagagatgtgtttaatggaagcatctttctctgagagtatgctaccaaacatgaaaacattcttattctgcggtgaagtattaccaaatgaagtagctagaaaattaattgagcgtttcccgaaagcaacaattatgaatacgtatggtccaacagaagctactgtcgctgtaacaggtattcacgttacagaagaagtgcttgatcaatacaaatcacttccagttggctactgtaaatcagattgtcgccttcttattatgaaagaagatggcacgattgcacctgatgggtgaaaaaaggtgaaaattgtaaattgtcggttcccaagggtaagcggttggattatttaggaagcccctgaaattaccagaaaaagccattttcttatgattggcgggggagcgcgcttataaaaacaggcgatgctggctatgtgaaaagtgtcttctattctataaaggtcgtcttgattcccaatttaagctgcatggtatccgaatgaatttagaagaaattgagcatcatcttcgtgcgtgttcttacgtagaaggagcagttatcgttccaattaaaaaaggtgagaaatacgattatttattagcgggttgtttttcccgggagacccattcatttgaaaaaagaatttcaaattaccatctgcattcaaaacaggacctcaatgggcggttcgcaaactacatgtttccaggtaaattcatgtatcattcttctattccaatgacaccaaatggaaaggtagatcgcaaaaaattattgagtgaggttacagcatgtccgcatatg

SEQ ID NO: 10188 - DNA, 1454 bp, Bacillus anthracis
atgaattgttatgtatcatttccaatgataatttcgttatcgtggtatttttaaatgggtgtatatgctcaaagacgtgtacaagcaaccgcacctaataaatttttacaagaatattttttaggtgggcgtgagcttggtggtttattattagcgatgacaatgattgctacatacggtagtgctagtagctttattggtggtcctggtattgcttacaatatggggcttggatgggtattgttgtctgcgattcaagttgtaacaggatatatcgttttaacggttatcggtaaaaagtttgcaattatcgctaggaagatggaagctattactcttattgattatttaaagggaagatacaataataaagcagttgttatactttctgcggtatgtattattatctttttattttcagcaacagtagctcagtgggtcggcggtggtcgattaattgagtcactaacgggtctctcttatacaacagcattatttttatttactttttctgtacttgtgtacgtattaattggtggatttcgtgcagttgctttatcagatacgttattaggtatcattatgttagttggaacgacaatcattttaattgctactgtcattgccggtggtggaattgaaaagattatgcaggaacttgttcaaaatcattcggaaatttattccccccatttggagcggatggtagtttacccaaatcataggtgacatcattttgggattttattgggaatgggcgttgtcggtttaccgcaaattagtgtgcgcgccatgtcttataaaaattcaaaagcgatgcatcaagcgttaataattgggacgattgttgtcggtacaattatgattggtatgcatttaacgggtgtatttgcacgaatcctacttcccgggaatagcggtaccagacaaagtaatcccgttacttcgcaatggaagggttacctccttggttagctggagttttcttagctgccaccgatggcggcaattatgtctacagtaaactcgctattattacttggtaagtcatcaatcattaaagatatatacgtaaattacataaataaagatgcggcagacagtacgattagaaaaggaagtttatggattactgctatcgtaggattgctcgtttatgcagcagcaatttaaaccaccagattttttaatatggttaaattatttttctttcggtggattagaagcagcattcatttggccgattgtattagggttatattggaggaaaggaaatgcaacaggagcgccttgcctccattttagttggagtaagctcatatatgtgcattcatcttttctatccaaatccgttcggtatacatacagttgtcttcccgatttgttttgcgtttatcgcttatatcttaggaagcatggttgctgtgaagaaaaacagtataggttagatgaaa

SEQ ID NO: 10189 - DNA, 618 bp, Bacillus anthracis
atgcaagaaagaaactgggaagaagctgctaaaaatttcacagaagcaatttgagaaaatccgaaagatgcgcttggatatattaattttgcaaacttattagatgtattaggtgacagtgagaaaagcaattttattttataaacgtgcattagaagtagatgataaatctgcggctgcctatttatggatagggaaacgtatattacggtcaagagcaatttgcagaggcgaaagctgtatttgaacaagcgatgcaagctggattacaatcagctgatgtaacatttatgttaggtattacgcatgtgcaacttggaaatgatcgtcttgcactgccgtttttacaaagagcacgtgatatacgatgatattgatgtagaagctgtgttccagtgcggactttgttttgcacgattagaacatattcaagaggcgaaaccttattttgaaaaaggttattagaaaatgggatgaaagagcatgcggaatgcgtattataatttagggtgttgcgtacgtggttgaagaaaataaacgagaaggcctcttgctttatttaagaaagcaactgaaattcagccagatcacttttttagctggtaatggtgttcgttt

SEQ ID NO: 10190 - DNA, 1006 bp, Bacillus anthracis
gtggaaagaagtttatctatggagttagtacgtgtaaccagaggctgcagctttatcatcagcgcgttggatgggacgcgggaaaaaggatgaggcagacggtgcagcaacatcagctatgcgtgatgtatttgatacaattcggatgaaaggtacagttgtaatgggtgaaggtgaaatggatgaagcaccaaatgttatatatcggagaaaaattgggtccggaatatggtcccgcggtaagccgttgccattgatcctttagaagggacaaacattgtagcagctggtggatggaatgctcttgctgttattgcaattgccagatcccgggtaatttttttcaagttccctgccaagttccagggataaaattcgcggtttgcccaaaaaaccggttggggccgttcgatattgatgcgcctattatcgataacttacgtgcagttgcgaaagcgaaaaacccaaggatattgaagatgttgtagcgacagttttaaaccgttccacgtcatcaagcgattattgaagaaattcgtacagctggtgctcgtattaaattgattaatgatggagacgtagcaggtgcaattaatactgcatttgatcgtacaggtgtagatattttattcggatctggtggtgcgcctgagggtgtattagcagcagttgcattaaaatggttaggtggcgaaattcacggaaggctattaccacaaaaacgagcctgaattggcgcgttgcaaaaagatgggcatagaagacatcaaccgcatgccttcgcatggaggacttagtaaaaggtgacgatgcaatctttgcagcaacaggtgtaacagacggagaactattacgcggcgttcaatttaaaggtagcgtaggaacaacacaatctcttgttatgcgtgcaaaatcaggcacagtacgcttcgtagacggacgtcatagcttaaataaaaaaccgaacttggttattaaataaaaagcgggggggggcttcctcaga

SEQ ID NO: 10191 - DNA, 1329 bp, Bacillus anthracis
atgtctattcaaatcccacgcggaacgcaagatattcttccaggcactgttgagttatggcagtatatcgaagggccaagccacgcgaaaatttgccgtcgttacaattaataaagaaattcggtacaccgattctttgaaacacactgagttatttttacgtggtgttggtgatacgacagatttcgtgcaaaaaagaaatgtactcattccaagatcgtggagagcgtagtttaacattacgtccagaaggcactgcacttgttgtacgttcttacgttgaaaccaaaatgttcggtgacgcaccacaacccagcgaaaattatattatatcggtcaaatgttccgttagaaaaacgcccacaggcaggtcgctatcgtcaattcgtacaattcgggaattgaagcaatcggtagtaacgatccctgcatttgatgccgaagtaattgcacctgctggaaagttttaccgcgggcatgggcttaaaaaatattaaagttgtattaaacagcttaggtgatgcggcgagccgtcaagcgcaccggtgatgcgttaattgcacacttggagccccggatcgggggaattctggtcctgaagggcaatctccggttagaaaagaaaccccttcccaatttttaattgtaaaaaaggaccgtaaccatgaattaatgggaacagcaccatctattacagaatacttaaacgaagattcagcagtatactacgacaaagttcaagaactattaacgatgatggatgttccatttgaaaaagatccgaacttagtacgtggtttaggacttactacccagccccctgtttttgggaatttatgggtaaaccaaggaggtttttcggtgcgatccactacattaaggcggtggtggccggttataacggaccttgtacaagaaaatcgggtggcccagaaaatgccaggtattcggttttgcgatgaaaattgaaccgtttaattatggcgcctaaaagctgaaaacaccgcaattaccaattggacctaagattccattgttaccttgtaaccccttggtgaaaaagcgaaagaccatgctgcaaaagttgcgtttgatcttcgtaaagctggattagcagttgaaaaaagattatttagatcgcaaaatgaaagcacaatttaaatcagcagatcgtctaaaagcgaaattcgtagctgtactaggggaagatgagttagataaaggcatcattaacttaaaagatatgggcacagggcgaacaagaagaaggagctttagatgtggttgcttcctacgtagcagagaaattaatataggggggaccttaca

SEQ ID NO: 10192 - DNA, 669 bp, Bacillus anthracis
atgacttcattattaaaattagacaaagtaagtaaagtgtacggagaagggaatacggaagtaacagcccttcatccgatatcgcttgatgtaaaagctggagaatttatcggaatcgtcggtccttctggatcagggaaaagtacgttattatcaatcgcgggtgcattactatcaccatcaaaaggggatatatacattcgtgagcaaaatattacgaagttatcagaaaaggaaatgacagacattcgtttgaaaaaaatcggcttcattttccagtttgcaaaccttgttccatatttaaatgtaaaagagcaattactgtacattgcaaagctgaaaaaagaaaacaaacaagaatcagaaaagcgtgcggatcatttattagcggcatttggattaggagaaagaaaaaatcattatccaaatcaactgtctggcggggaaaagcaaagggtagcaatcgctcgtgcgttcatgaacaacccagatttaatattagcagatgaaccaacggcaagcttagactcaaaacgcgcacgtgaagtcgtagaaatgatgaaacgcgaagtgaaagaaagcaaaaaagcagctattatgattacacatgatgaaagaatgcttgatgtatgtgatcgtatattgacgcttcgagatggacagttaata

SEQ ID NO: 10193 - DNA, 671 bp, Bacillus anthracis
gatacatattataataatgcaataggaaaaacgggtttagaattaaagaaggaacttcataatattattgatgatcatacaaagttatcatacagtgcggtttgggaagcactaagagatactgatgaagatccaaataataaaaacaatgtgatactcttatatactgggcgttcgcaaggaaattctacgaattggtccaggagtcgataattggacccgagagcatgtttgcgcaaaatcacacggtgattttgaaacgactgcagggacctggaacagttttgcatcatttaagagcgacgaatgtatctgtaaatagttcacgtgaaaatctggattttgataatggtggcgggaatcattcagaagcgccagaatgtaaatatgatagtgactcttgggaacctcgtgatagtgtaaaaggagatatcgctagaatgctattttacatggcagttcgttacgagggagacaacggtgaaatagacttagaactatatgagaggggtgaataacaataaagaccccatacatgggcaaactatccgtttttactaaaatggaatgaaacagacccgggtcgatgaattagaaaagaaagcgtaaatgaagtgacttttttacgaaatatcaagcataatcgcgaatccttttcattgaatcaatcc

SEQ ID NO: 10194 - DNA, 549 bp, Bacillus anthracis; identical to SEQ ID NO: 9145

SEQ ID NO: 10195 - DNA, 1248 bp, Bacillus anthracis
gtgaatgaagttaatcaggaaatatataagcctgtaaagacaaacaggttatggatgattcttgtattagggacacttacggcaattgggccgttatctattgatatgtatttgccttcgttaccgaagttaacggatgacttgcaaacgggtgcatctctagcacagcttacattaacagcttgtttgcttgggctttcagtaggacaattatttgttggctcaattagtgatatttacggaagacgcaaacctcttattattgctcttattatttatgttgcttcttctttactttgtgctgttgcaccatctatttggactttagtgttattacgcttcctacaaggagcttcaggatcagccggaattgttatatcacgtgcaatggtacgtgacatgtattcaggttctgaaatgacgaaattcttctcactgcttatgttagtaaacggagcagcacctattttggcaccgattatagggggacaattattacagttcacaacgtggcgcggtgtctttatcgttctcggagcaataagtgtatttatgttaatatcagctactttcgtattacgtgaaacattacctcctgaagaaagagaaacaggcggtttgtcagggacgttagcgacgtatggaaaattgttaaaggatcgtttgtttatgggatatgcattgtcacaaggattagtaacggcggcaatgtttgcatacatttcgggctcaccatttgtgttgcagaacatatacggagcatcaccacagcaatttagtttattctttgcaatcaacggtatcggtattattattgcgagtcaggttacgggtcgtttagcagggaaagtgaatgagaagacattatttgtctctggtatcgttattgcagctgttggtggtttatctttactactaacaatcttattaggaatagggttaattggtgttttatgttcattattccttgttgtatcaagtgttggggttgtctcaacaactgggttctcattagcgatgagaaatcaaaaacaagctgcaggaacagcatcagctttattaggcttattacagttcatttcaggagcgcttgttgcaccgctagtaggtattggtggaagcaacaccgcattaccgatgggtattgtaatagccctttgtgaaattggtgcggtactatgctatttatttatggccagaagaagtgaaaagcagtttgaactgcaagcaagacaaaatttagaggtt

SEQ ID NO: 10196 - DNA, 816 bp, Bacillus anthracis
atgacattacaagaacagattatgaaagcattacacgttcaacctgtaattgatccgaaagcagaaatccgtaaacgtgttgatttcttaaaagattatgtaaaaaaaacaggtgcgaaaggatttgtacttggaattagtggcgggcaagactctacattagctggacgtttagctcagcttgcagtggaggaaattcgtaatgaaggtggtaacgcaacgtttatcgccgtgcgccttccttataaagtgcaaaaagacgaagatgatgcgcaattagcattacaatttattcaagctgatcaatctgttgcatttgatatcgcttcaactgttgatgctttctcaaatcaatacgaaaacttattagatgaatcgttaacagatttcaataaaggtaacgtgaaagcacgtatccgcatggttacacaatatgcaatcggtggacaaaaagggctccttgttatcggaacagatcacgctgcagaagctgtaacaggattctttacaaaattcggagatggtggtgcagacctattaccattaacgggattaacgaaacgccaaggacgcgctctattacaagaattaggtgcggacgagcgactttacttaaaaatgccaacagctgatttattagatgaaaaaccaggtcaagctgatgaaacagagttaggtattacgtatgatcaacttgatgactatttagaagggaaaacagttccagctgacgttgcagaaaagattgaaaaacgttacacagtgagtgagcataaaagacaagtaccagcatcaatgtttgatgattggtggaaa

SEQ ID NO: 10197 - DNA, 1117 bp, Bacillus anthracis
gaaacacgcgttgtcatcgggatgtccggtggcgtcgattcatctgtagcggctcttttattaaaagagcaaggttatgatgtaatcggaatttttatgaaaaactgggatgatacagatgagaatggtgtttcgcacagccccagaagtttccaatgatgttaatgaagtgtggacccaaaattggtattccgtattatgcagtaaactttgaaaaacaatactgggataaagtatttacgtacttcttagatgagtaccgagttgttcgtccacaaacccccagatgtaatgtgtaacaaagaaattaaatttaaagcatttttagagcatgcaattgcacttggtgctgattatgtagcgacaggtcattatgcacgcgttgcttatatggacggcgaatataaaatgcttcgcggcgttgacgacaataaagaccaaacgtatttcttaaatcaattaagtcaagagcaattatcaaaaacaatgttcccgctgggtgaactgaagaaaccacaaattcgtgaaatggcgaaagaagctggtttagcgacagcggcgaagaaagatagtactggtatttgcttcattggtgagcgtaactttccagatttcttaagtaactatttaccagtacaaccaggtgtgatgcaaacattatctggcgaagtgaaagggaagcatgacggtttaatgtactatacaattggacaacgtcatggtcttggtattggcggtaacggtgatccgtggtttgctgttgggaaaaacttgaaagaaaacattttatatgttgatcaaggattccataacgaacttctatatggcgacgaagttattgctaccaatgttggctgggtaagctatgaaacggaaagaaaaagaattttagtgcgcagccgaaatttccggtatcgtcaaaaaagacaataaaagtacgggtccaaaatcgtggaggaaaaaacaggtccgaatcttttgggaagagacaatttctgggattttcccccggacaaagcagtttgttttctatgatggagatgaatgcttatgcggcgcctacattgatgaagtgtaccgtaccggtaagaaattggtattggttaggataaaacga

SEQ ID NO: 10198 - DNA, 705 bp, Bacillus anthracis
atgatgggaaagaaaattttagtagttgatgatgaaaagccgattgcagatattttgaagttcaacctagaaaaagaaggttttgaaattgtaatggcacacgatggtgatgaagcgattgaaaaagcgactgaagaacagccagatatggttttattagatattatgctaccaggtaaggatggcttagaggtttgccgtgaaatacgtaaaagctcagaaatgccgattattatgcttacagcgaaggactctgaaatcgataaagtattaggtttggagcttggggcagatgattatgtaacgaagccatttagtacgagggaattacttgctcgcgtgaaggcgaatttacgtcgccatcagcaaggtggtgctgcagaaaaagaagaaaatacggaaatggttattgggccaattgttatcaatcccaatgcgtatagtgtaacgaaacgtgaggaaaatattgagcttacacaccgtgaatttgagctgctgcattatttagcaaaacatttaggacaagttatgacacgcgaacatttattgcaaacagtttggggttatgactactttggagatgtacgtacagtggatgtaacagtacgtcgtctacgtgaaaaaattgaagataatccaagtcatcctacattaattgtcactagacgtggagtagggtattacttgcgtgacccagagcaggaa

SEQ ID NO: 10199 - DNA, 834 bp, Bacillus anthracis
atgagtaagatgaaatggtttatttctttactgctttcacttgggctacttgccggatgtgaagaggcagctgtaaagcttgagaagaaagtagaaccgaagcaagaagaagtagcaaaacaagaagagaaaaaagatgaagcgaaaccggaagaaaaaccggaggaaaaacaagctgaacaagagcaaaataagcaagacgaacagaaagagaaacaagaacaaaaagtagaagagaagccgaaagaagaaaagccgcaggcacagctagaagtaaagaaagaagagaaacagcaggaacaaccgaaagaacaaccagctgtaaataagcaaccagaacaacaaaaagcacaagaagaaaaacaacagcaaccgaaagcacaagaagtaaaagaagaagcgaaggttgtgaatcagccgaaagaaacaccgaagcaggagcaaaagaaaaaaccagaagagaacaatagtgtaccaactccaccaacaccggtaccagatccagtaccgccagtgccagatccagtaataccaaaaccaaaacaagttacgatctcagtaaaaggtaatgaaggatatttattaggagcaaaaaaggttgatgtacaagaaggcgatactgtttataaagtattgcagcgtacaggattagatgttgatgcgatgggctctaaagacggtatttatgtaaaagggattaatgatttatatgaaaaagatattaccgctactagtggatggaaatatcgtgtgaacggtgcgtttccaaaccatagtgcaggtgtagttacagtaaaaccaggcgatacaatcgagtgggtgtttgtattaaaa

SEQ ID NO: 10200 - DNA, 768 bp, Bacillus anthracis
atggaaattttacatgcaaaaagtattagtaaagtatataaagggaaagtgccttataaagcattagtagatattgatttatcaattcaagaaggtgaatttgtagggattatggggccatctggtagtgggaaaacaacgttattaaatatggtatctacaattgattctccatcatcgggagaaattttaattaatggcacaaatcctttccaattatcatcagaagatttagcgttattccgtaggaaacaattaggttttgtttttcaatcatttaatcttcttagcacacttactgtaaaagaaaacatcgtattaccgatgactttagatggtgtttctgtgcaagagatgaacaaacgagtggragcaattgcagagaagttaaacattacagatatattgagtaaaagaacgtttgaaatatcaggggggcaagctcaaagaacagcaatcgctcgtgcaatcgttcataaaccgcaattattacttgctgacgaaccaacagggaatttagactctaaatcttcaaatgatgtaatggagatgcttgatactcttaataaagaagaaaaagctacgatgatgttagttacacatgatccgtatgctgcgagtttttgcagtagagtagtatttattaaagatggtcaactatataacgaaatttattgtggtgaaagcagacaagccttttatcaaaagattatggatgttctttctttgttaggagggaaaaggcatgacttttcgtcagttcgcatt

SEQ ID NO: 10201 - DNA, 1515 bp, Bacillus anthracis
atgattacattaacaggacatacattgacaattgaagaaatgaagaggttgttacttgaaggggaaggtgtaaccgcttgtccaactagtatgcaaaaggtggcggagtgccgcgaagtagttgagaaaattgtagagaacggaaaagtcgtttacggtattacaactggatttggaaagttcagtgacgtgctaattcaaaaagatgatgtaaaggcacttcagcacaatttaattcagtcacatgcatgtgggataggcgatccatttcctgaagaagtatcacgcggtatgttaattttacgagcgaacacgatgcttaaaggagtatctggtgttagaccgctcgttgtaaatatgcttcttgagtttgtaaatcgtaaaattcacccagttgttccgcaacaaggttcacttggtgcgagtggtgatttagcgcctttatctcatcttgcgctcatattattaggcgaaggtgaagtgttctataaagggaaacgtgttcatgcgatggttgctcttacagaagaaggtcttgagccaattgaacttgaagcaaaagaaggtctggcgttaattaatggtacgcaggcgatgacagcgcaaggagttctttcttatatagaagcagaagcaacggcttatcaagctgaattaattgcatctatgacaattgaagggttacaaggcattattgatgcatttgatgaaaatgttcataaagcacgtggttataaagagcaagtggaagtagcgagcagaattcgtgacatccttcatgatagtaaattaacaacaaaacaaggagaactgcgtgtacaggatgcgtattcacttcgctgtattccgcaagtacacggtgcttcttggcaagttttaaattatgtaaaagaaaaattagaaattgaaatgaatgccgcgacagataatccacttatttttgatggcggggaaaaggtaatttcaggtggtaatttccacggtcaaccgattgcatttgcgatggacttcttaaaagtagggatggcagaacttgcaaatatttcagagcgtcgtattgagcgtttagtaaatccgcagttaaatgatttaccaccatttttaagtccagaaccaggacttcagtctggtgcaatgattatgcaatatgctgcagcgtcactagtttctgaaaataaaacgttagcgcatccggcgagtgttgattcaatcccgtcatcagctaaccaagaagatcacgtaagtatgggaacaattgcttcacgccatgcacatcaaattattcaaaatgtaagacgcgttctttcaattgagatgatttgtgcgatgcaagcagcagaatatcgcggaattgaaaacatgagtacagtgacgaaaagcttctaccatcaaggtcgtcagcaagtaccttctattacaaatgatcgtatattctcaacagatattgaaaatattacgcattggttaaaaacgaattattcgataaaagaaagattagatgtaaacgcagcatta

SEQ ID NO: 10202 - DNA, 543 bp, Bacillus anthracis
atgatgaagattttaaaaagagcagctcttcctcttttgctcctttttgtttttttatttgaaaatatgtttgctactattgttccaacagcagttttttggaaagacagtatagcagcacctcatttctttatcattgtgttatgttttgttactgtgtactatagtccggtccaagggatttattacggactattatttggtttcttatttgataccgtatacacagaacttgtcggtatatatattttcgcatatccgattgtagcttatttagtatatagtgtgatgaagatattacaattgaatttatttattgttgtctctatcgtactagctagcattgcagcactagagtattatgtgtatggatttttaactttgttaggacgtactcatatgtcggcgtatgtctttttcacagatcgtctcctttctactttattgctaaatgcaattttcttattcatagtttgtttcccactgagacgatatttagtgcgtctttcaaaagcgatggaagaaaaagaaaaaaggattttc

SEQ ID NO: 10203 - DNA, 885 bp, Bacillus anthracis
aatatttttcgtaataagcgtacatacgttgcccattttttaagtagtacattttctattatggttttctttacatatgctcttttattatttcatcctgatttacaaggtgaattgaaatcaacaagtgcaacaatgagtgcatatggtacgatgggatttacaatttcgcaaggtttgatttttgtattttcatttttctttattctatattcagttagttcatttttaaaaactcgtaagaaagaatttggcatattaatgatgcaaggtatgtcaatgagacagtttaagaaattattattaattgaaaatatgttgattggacttggttcaatttgtatagggattttcattggactcatattttctaaactagtcttattgataagcgcaagtgtattaatgattaataatagtttgcctttttatacaccagtgaaggctgtattattaacagtaatcacttttcttttcttatttttcattgtttcactatttacatttaaaatggtaaaaataacggaacttgtggaacttattcgagcagaggaaaaaccaaaacctgaaccgaaatcttcaattttattatcattgctttctttaattagtataggatatggatatttctcagtatttcgctttatttcaagttccagttttactacgctcggaatgggtgtcctactagtaattataggaacgtactttttatatacacagtgtagcgtttatatattacatcttgctaaaaggagagaatatttctttttaaaaagaacaaatatattaacgttttctgaattaatttaccgtatgaaagataatgcaacgatgttttttattgtatctattatttcagcagttgcatttacagctattggt

SEQ ID NO: 10204 - DNA, 2934 bp, Bacillus anthracis
atggcagaacagacagtccgtgtaaccgtagatggtaaagagttttcagcatcaggtgaaaagacgatactacaattatttaacgagagtaatttggaacatcctcaaatttgtcatgtaccagaagtagatccaattcaaacttgtgatacgtgtattgtagaagtagatgggaagttaatgcgtgcttgttcaacgcaaatagagaatggtatgcatattgaaagacagtcacagcgtgcaaaagaggcgcagactgaggcgatggatcgaatattagaaaaccacttattgtattgtactgtatgtgataacaataatggtaattgtaaggtccataatacagtgcatatgatggggattgaagaacagaaatatccgtatgagccgaaggtaagtgcttgtgaagtggatatgtcacatccgttttatcgatatgatccaaatcaatgtattgcttgtggacagtgtgtagaagtatgtcaaaacctacaggttaatgaaacgatatcgatagactggagcttagatcgtccgcgtgttatatgggatcatggtgtaagcataaatgactcatcttgtgtgagttgtgggcagtgtgtaacagtatgtccatgtaatgcattgatggaaaaatcaatgttaggtgaagctggattcatgacaggattaaaaccagatgtgttagatccgatgattgattttgtaaaggatgtagagcctggatatagtagcattttagcagtttcagaagtagaggctgcgatgcgtaagacgaaagttaataaaacaaaaacagtttgtacattttgtggtgtcggttgttcattcgaagtatggacgaaagatcgccatatactaaaagtgcaacctgtttcagatgcaccggttaatggtatttcgacatgtgtaaaaggtaaatttggatgggactttgtaaacagtgaagatcgcattacgaagccattaattcgccaaggagatatgtttgttgaagcttcatgggaagaagcactagaagttgtggcttctaacatgcagcatattaaatcagcatatggcagcgatgcatttgggttcatttcttcttcgaaagtaacgaatgaagaaaattaccttatgcaaaaactagctcgtcaaatatatggaacaaataatgtagataactgctcgcgttattgccaatctccagcaacagatggtctatttaaaactgtcggtatgggcggcgatgctggaacagtgaaagatatagctgaagcaggtcttgtcattatcgttggtgcgaatccaacagaaggacatcctgtacttgcgacacgtgtaaaacgtgctcataaattacacgagcaaaaactgattgtagcagaccttcgtaaacatgaaatggcagagcgtgcggatttatttattcacccgcgccaaggtacggattacgtatggcttgctgggattacgaaatatattattgatcaagattggcatgataaaaagttcatagctgaaaacgtaaagaattttgatgaatatagcaaaatggtagaaaaatatacgctggactatacagagaaaattacagggatttcgaaagaaaatctgaaagaaatggctcgtatggtatatgaagcagacggtacttgtgtactttggggaatgggcgtaacgcaaaatacaggaggaagtacaacgtccgctgcaatttcaaatttactgcttgttacgggtaactatcgtcgtcctggtgcaggtgcatatccattaagaggacataataacgtacaaggtgcttgtgatatggcaacattaccaaactggcttcctggttatcaagcagtatcagatgatacgcttcgtgctaagtttgaaaaagcatatggtactactattccgaaagcaccaggattaaataatattgcaatgttacttgcggcagaagaaggaaaactacgtggtatgtatgtcatgggtgaagaaatggctttagtcgattcaaatgcgaaccatgtacaacatattttagcgaatttagatttcctcgttgttcaagatatgttcttatcaaaaacagctcgttttgctgatgttattttaccagcagcaccaagcttagaaaaagaaggaacatttacgaatacagaacgccgtattcaaagattatatgaagtgttgaaaccgcttggtgattccaagccagactggtggattttacaaaaagttgctcgtgcactgggcggggattggaattacgaaagtccaagtgaaattatggacgaaatcgcatcacttgcaccgctatattctcaagcaacgtatgaccgcctagaaggttggaatagtttatgttggggtagtcatgatggtagcgatacacctctattatatgtagatggatttaacttcccagataagctcgctcgtttatcattagatgaatggataccgccagttgtagcgccagatgagtatgatctacttttaaataatggacgcatgctagaacatttccatgaagggaatatgacgaataagtcggctggtattttatctaaagtatctgaagtattcgttgagatttcacctgaactcgctatagaacgcaatgtgaaagatggtggtcttgtggaattagcatcaccatttggaaaaattaaagtacaagcacttattactgatcgtgtaacggggaaagagctatatttaccaatgcatgcaacgataaatgaagaagcgattaatattttaactgggacggcaacagacctttatacgtgtacaccggcttataaacaaacgatggtaaaaatgcgtgtattacgtgaaaaaggaaatcgtccgttaccaccttcaaacccgcgagataaaaatcgtaatccgcaaaatggtgttgaaatcgagcaaaagtggcaaagaaaacaatacgtatcacttgtggac

SEQ ID NO: 10205 - DNA, 1690 bp, Bacillus anthracis
atgaataagacatggtggaaagaagcggttgcttatcaaatttatccacgtagctttatggattcaaatggtgatggtattggagatttacaaggtattattgcgaaactggattatttaaaagatttaggaatagatgtaatttggatttgtccaatgtataagtcaccttaatgaggaatattgttatggacactagtgattatcaagattatattggatgagtttgggacgatggaagactttgatgctttactagatgaagttcataaacgtgatatgaagcttattattgatttagttattaatcatacaagtgatgaacatccatggtttattgagtctcgttcatctaaagacaatccgaagcgtgattggtatatttggcatgatggtaaagatggtgcagaaccaaacaactggggaaagtatttttaaatggttcggcatgggagtatgatgaagtaacaggacaatattatttacacttattctcgcgtaaacaaccagatttaaactgggagaataaagaagttcgagaagtgctatacgatacagttaacttggtggttgataaaggaattgatgttttccgagtagatgcaatcagccatattaaaaaagaagatggcttataagatatgccaaatccaaaacgactaaaagtatgttccatcttttgataaacatatgaatgtggatggtatttcccccttttttttgggagaattaaaaggaaaataccttttttaaagttcggttattatgactttgggtgaagcaaatggcgttaaaattaaaaatgctgaccttttgggtgggaaaagagcaaggtaagttcaatatggtattccaattcgaacatttaagtttatgggatgcagaaaagaagaaaattcttgatgttgtagggctgaaaaaggtattaacgaaatggcaaaaagggttagaaaataaaggatggaatgctttatatattgagaatcacgataagccgcgtatcgtttcaacttggggagatgataaacaatattggcgtgaaagtgcgacagctttaggagcaatgtatttctttatgcacggtacaccgtttatttatcaaggacaagaaattgggatgacaaatgttcaattcccaaacattgaagattacgatgatgtagcaattaaaaatttatatcgcgagaaaattgcagagggcgtatcccatcaagatatgatggaaattatatgggcttcttgccgcgataattcacgtacgcctatgcattgggacgatgagataaatgctggtttcacaacaggtacgccttggtttggtatgaatcaaaactacaaagaaatcaatgttgcaaagcaaaagaatgaagagaactctattttcaatttctataagaaaatgattgccctgaaaaaagagcatgatgtactgaattatggtacgtacgatttacttttagaagatgacccgcaaatttatgcatatactcgtacactaaacgatgaaaaaatagtcgtaattagtaatatctcaaaagaggaagctgtgtataatgaggatttatttgcactagaacgcaaacgtttgcttttaaataactatgaagttgcggaacatgaacaattaactacaatcacgttaaagccttatgaaacaagggtttatcgcatttcataataaaaaaaataa

SEQ ID NO: 10206 - DNA, 4056 bp, Bacillus anthracis
gtgaacaaaagagaggattttcaaattttgctccagcaattggcaaaataccagacgaccttataaatcaatatttacaaggccggtggtattgaaagactcgctatcgataaaagcgataaaagttggcattttaatttacaagtgcccacgtattttgcctacagaattatatggatttgctagaaaacaagctttaagcatcattttctcctattgaaggaacaccttttgcttaaaaaccgaagaaaaaacaatttacttaaaaaaaaatgaaggcggtttgggccacttggtccggaacaaattactttttcccctaggttggctattttaaaaaaacagcttttcgccgggggatgggaggggaattactttttaatgtggaaaatggacgtgaaatttccggttttaagaaaaaacgtgtccaaaccccgagggggatcaatacccaggctttcggattcccgcgttttcagttagacacacatatacagcaaaatacagaagaaatgcaaaagtttcgtgagcaaacgcaacaagaagaccgcgagcgtgttatacaagctatggaagaaatggcaaaagaagcaagctgaagaaagcagcgttgtgcatgaaggaccgattacacttgggtatcttattaagccggatgaagagattacaccgatgcgagaaaatccagatgaggaaagaaagaaaaacggttcaaggatatgtccttcatgtgggaaacaaaagaacttcgtagggggacgtacggtaattaactttataaaaaaacgggataatacagaaatcaattaaggatcaaaatgttcctcaccgggaaaaaggaaaaaaatccaaaggctacaaatccctaaaaaaagaatgttggtgaaagctcgtggttctgtccaaaaatgatacatttgttcgagatttagtaatgattgcaaatgatattaatgaaataacaggcccgtctcgtaaagataaagcaccagaaggtgaaaaaagagtagagcttcatcttcatactccaatgagtcaaatggatgctgttactccagtttctaagcttgttgctcaagctggtaaatggggacatgaggctattgcggttacagaccatgctgtggctcagtcgttcccggaagcatattctgcggggaaaaaggctggagttaaagttatatatggtgtggaagcaaacttagtgaatgacggagtaccaattgcttataatgaagaacatcgtttactggctgatgaaacatatgttgtttttctaatcagagacgacaggtttatcagctgtgacccatacagttattgagttagcttgctgtacaagtaaaaggtggcgaaattattgaccgctttgaatctttttgcaattccccctacaccatttttggcaaccattccttgggtaaccgggttttacagatgattatgttaccggcccccccagaagtagatgaaggtgttaaaaaagtttgagaaatggatgggtgaccatccacttgtggttcatacggcaagtttagataggggctttattaatgtaggattcaaaaaagctggtttagaaaaaacggaaaaatccggtaatagatacgttagagcttgcaagattcttattcccagaaaatgaaaatcatcgctttaaatacgttatgtaaaaaggatggacattggattaactcagcatcaccgtggcgatttatgatacagaaggcacgggatacttactagtgaaaatgttaaaagatgtaattgaaaaaggtttttgaatatcacgatccattaaacgatagtatgggacaaggggatgcatataagcgcgggcgtccaagtcatatgacattacttgctacatcggatgttggattgaaaaatttatataaactttgtttcatattctcatctaaattacttttaccgtgtaccgcgagtaccaagatcactattaaaaaaatatcgtgaaggtattttagtaggaacggcttgtgataaaggtgaagtgtttgaggcaatgatgcaaaaagctcctgaagaggtagaagaaattgcgcagttctacgattacattgaagtaatgccaccagaagtgttacgtcatttagtagagcgtgaacttgttcgggatgagggacaattaaaaacaattatttcaaacttagtaaaactaggtgagacgttagataaaccagttgtcgctaccggaaaacgggcatttcttagatcccagaagatgcaatgattcgcaaaatttttagttagttcgcagggcgggagccaatcccgttaaaccggcattcattaccacctgtacatttccgtacaaccgatgaaatgttagagtgttttctcattcttaggtgaagatgtagcgaaagaaattgtcgtaacgaatacacaaaagattgcgaacattaattggcgatgttcatccagtaaaagatgatctatacacaccgaaaattgaaggtgcagatgatgaaacgcgtgatatgagttataaaatggcgcgtagcatttatggtgaagagttacctgaaattgtagaagcgcgtttagaaaaagaattaaaaagtatcatcgggcatggattcgccgtaatttatttaatttcacataagcttgtgaaaaaatcgttagtagacggatatctagtaggttcgcgtggatcggtaggttcatcattcgttgcaacgatgatggaaattacagaagtaaacccattaccaccacactatgtatgtccgaagtgtaagcaatcagaattctttaatgatggttctgtagggtctggttttgacttaccgggataagaaatgtccaacttgtaatattccatatgtaaaagatggacatgacattccgttcgaaacgttccttgggtttaaaggagataagggtacccgatatcgatttgaatttctcccggggaataccaaccacgtgcccataactatacgaaagtactattcggtgaagattatgtatatcgtgcaggaacgattggtacagttgcggaaaaaactgcttatggatatgtaaagggttatgcaaatgatcataacttaacgattcgaaatgcagaaattgaccgcttagtagcaggatgtaccggtgtaaaacgtacaacaggacagcatccagggtggtattatcgttgtgccagattatatggacatttttgatttctcaccaatacagtatccagcagattcaataggtgctgagtggagaacgacacactttgacttccactctattcatgataatttattgaaagcttgatatactaggacacgatgatccgacagttattcgtatgttacaagatttaagtggtattgatccaaaaacaattccaacggatgatccagaagtaatgaaaattttctcagggccagaatcgttaggcgtaacggaagaacaaattaactgtaaaacaggtacacttggtataccagagtttggtacgaaattcgtaagacagatgttagaagagacgaaaccgacgacattctcagagttagtccaaatttctggattatcacatggtacggacgtatggcttggtaatgcaaacgagttaatttataacggtacatgtacgctgagtgaagttatcggttgtcgtgatgacatcatggtatatttaatctatcaaggtttagacccatcattagccttcaaaatcatggagtcagtacgtaaaggtaaaggtgtaccagaagaatgggaagaggacatgaaaagtaataatgtaccaggttgggtatattgattcatgtaagaagataaagtacatgtcccgaaaagcccatgcggctgcttacgtacttatggccgtgcgtatcgcatacttaaaagtgcatttcgcgctttatttctatgcggcatactttacgtttcgtgcagatgactttgacgtagagaaagatggcaaaaggttcagcatctatacgtgcaagaaatggatgaaaattgcgcaaaaaagggtttagatgcagcaccgaaaagagaaagagtttattgacggggtactagaaa

SEQ ID NO: 10207 - DNA, 693 bp, Bacillus anthracis
ttgagaattgctgtaattggagcaatggaagaagaagtacgtattttacgtgacaaattagaacaagcagaaacagaaacggttgcgggttgtgaatttacgaaagggcaattagcaggacatgaagtaatcttgttaaagtctggtattggtaaagtaaatgcagcgatgtcaacgacaattttattagaaagatataagcctgaaaaagtaatcaatactggttcagctggtggattccatcattctctaaatgttggagatgtcgttatttcaacagaagttcgtcaccatgacgtagatgtaacagcatttaactatgaatatggtcaagtaccaggaatgccgcctggattcaaggctgatgaagcattagttgcattagctgagaaatgtatgcaggcagaagaaaatattcaagttgtaaaaggtatgattgcaacaggtgattcatttatgagtgatccgaatcgcgttgcagccattcgtgataaattcgaaaatctttatgcagtagaaatggaagcagcagctgttgcacaagtatgccaccaatatgaagttccgtttgttatcattcgcgcactttctgatattgctggtaaagaatcaaatgtttcatttgatcaatttttagatcaagcagctcttcattctacaaactttattgtaaaagtattagaagagttaaag

SEQ ID NO: 10208 - DNA, 660 bp, Bacillus anthracis
atgaacttaattttaatggggctttctggtgctggtaaaggtacacaagccgaacagattgttgccaagtataacatccctcacatctcaacaggagatatgttccgtgcagctatgaaggctgaaactgaaatgggtttacaagcaaaatctttttattgataagggtgcacttgttcagaaatgaagttacaatcggaattgttcgtgaacgtttaagccaagaagactgtgtaagaggcttcttattagatggtttcccacgaactgttgcacaagcatcagctcttgaagagattatgaaagatcttggcaaaaaaatcgactatgttttaaacattaatgtggattcagggttgttattaaaacgccttacaggccgtcgcatttgtaaagagtgcggtgcgacttaccacttagaattcaatgcgccagcaaaagtctgacggggcggataaaatgtgggggagaatttatatcacggcttggatggccattgagggaaccgttggcaaatcggcttagatgtaaattattaagcaaccttacccttttgcttgatttttacgaggagcttggttacttacaaagcattattggtgagcaagatatcaataaagtatttgctgatatcgatgttctcatcggaggcttagcgta

SEQ ID NO: 10209 - DNA, 927 bp, Bacillus anthracis
atgagcgtattagttaataaagatacaaaagttattgttcaaggtattacaggttctcaaggattattccacacaaaacaaatgattgaatacggtacgaaaattgtcggtggtgtaacgccaggtaaaggtggcactgacattgaaggtgtaccagtatttgatactgtagaagatgcagtgaaagcaacaggcgcaaacgcttcagttgtatacgtttcaccccgcttttgcggctgatgcaattatggaagcagttgatgcagaaattgatttagtagtatgtattaccgaaggaattcctgtattagatatgggtaacgctaagagatatatgggctgtaaacatacacgtttacttggaccaaactgcccacgtgttattacgcctgatgaatgtaaaatcggtattatgccaggatacattcataaaaaaagtcatgtaggtatcgtatctcgctctggtacattaacgtatgaggctgtacatcagttaacacaagaaaggtatggggccatctactgctgtaggtatcggcgggagacccagttaaccgttacgaattttattgatgccttaaaagcctttattgaagatgaaaaaacccctgctggaaatatagattggggaaaaccgggggacaacgggaaaaaaaagccacttaaaggggtgaaaacttattttaaaaacacctgttgtaggcttcattggtggccaaacagcgccctgctggcaaacgtatgggccatgctggtgcaatcatttctggcggtaaaggaactgctgcagaaaagattaaaacgatggaagcttgtggtattaaagtagcggaaactccagcagttatgggagaaacgctaatctctgtcttaaaagaaaaaggtctatttgagacttgtaaaaactactaatctgttgaaagacac

SEQ ID NO: 10210 - DNA, 441 bp, Bacillus anthracis
atgaaagtagtaatagcatctgatcacggcggtatgaatatccgtaaagaacttgtaagtttattagaagagttaaatattgaatatattgatttaggttgtgaatgtgaagctggttctgttgattaccctgattttgcgtttccagcagcggaaatggtagcaaatggcgaagtagaccgtggtattttagtttgtgggacaggcatcggtatgtcaattgctgcaaacaaagtaaatggtattcgttgtgcgttagttcatgatactttcagtgcgagagcaacaagagagcataatgatacaaacatgttagcaatgggcgagcgtgtaattggtgctggtctagcacgtgacatcgcaaaaatttggttaacaactgaatttgaaggtggccgtcacgaaaaccgcgtaggaaaaattaaaacatacgaagcaaag

SEQ ID NO: 10211 - DNA, 769 bp, Bacillus anthracis
ataggtgtgctagattcgggagttgggggattaacagttgcgagcgaaattataagacaattgcctaaagagagcattgtttatattggtgaaaaggagcgttgtccgtatgggcccaagaagtgtagaagaaggacaatctttcctatttgaaatgggtgagtttctcaaacagtttccgttaaagggtctaattgtaacatgtaatactgctgcagctgctacattggctgcgttgcaagaagcactttctattccgggtattggcgttatacatctcgggagcaagaacggctattaaagtgaccaagacaagggaaatccgagtaattggaactgtaaggacgatacagtccaatatgtaccaaaaagcactgcgtgagcttggtacatatttgaaaatgcgtagtcctgcgtgcccgacatttaacttcatctgtaaaaatcgattagaagatatcgcatatgtccaccccacaagtgaaacaagctttactttcccttaaccaaggaaaaaatagatacgcttattccttgggcggacacattatcccccttttagagtcctatattaaaaaggaactaggagaggatgtaacgattattagttctgcagaagaaacagcgatagagttaagcacaattttacagcacaaaggaattctggctgacaatctgaatccgaagcatcgattttttacaaccaggctctgtttcttcatttgaacatatcgctgagcgttggctagggtatcaaatttctgtagat

SEQ ID NO: 10212 - DNA, 1455 bp, Bacillus anthracis
atggaaaagcaagtgagagtgcgctatgcgccaagtccaacaggacacttacatatcggaaatgcgcgtacggcattatttaattatttatttgctcgtcatcaagatggtaagtttattattcgtattgaagatactgatgtaaaacgtaatgttgctggtggagaagaaagccaattaaaatacttgaaatggctcggtatggactgggatgaaggtgttgatgttggtggtgaatttggaccatatcgtcaaacagagcgtttagatatttataaaaagttatatgaagatttattagagcgtggtttagcttacaaatgttatatgacagaagaagagctagaggcagaacgcgaagggcaaattgctcgtggtgaaacacctcgttacgcaggcaaccaccgtgatttaactgaagcgcaagtgaaagaatttgaagctgagggacgtattccaagtattcgtttccgcgtaccagctgaccgtgattacacatttaaagatattgtaaaagatgaagttgcattccattcaaatgatttcggtgattttgttatcgtgaaaaaagatgggattccaacttataactttgcagtagcagtagatgatcacttaatggaaattacacacgtacttcgtggtgatgaccatatttcaaacacaccaaaacaaatgatgatttatgaagctttcggttgggatattccgcaattcggtcatatgactttaattgtaaatgaaagccgtaaaaaattaagtaagcgtgatgaatctattattcaatttattgagcaatataaagagcttggatatcttccagaagcaatctttaactttattgcactactaggttggtcgccagtaggagaagaagaaatcttctctcaagaagagtttatcaaaatgtttgatgcagctcgtttatcaaaatcacctgcattatttgattctcaaaaactaaaatggatgaacaaccaatatatgaaaaagcaagatttagatacggtggtagaattaagcttaccgcatttagtgaaggctggacgtataggtgaaactttaagtgaacaagaacaagcttggattcgtgatgtaattgcgttatatcatgaacaaatgagctttggagctgaaattgtagagctttctgaaatgttcttcaaagatcacgttgattatgaagaagaaggacaagaagtattaaaaggtgaacaagtaccagaagtacttcgtgcatttgctggtcaagtagaagcactagaagctatggaaccggcagcaattaaggcggctattaaagcggttcaaaaggaaacaggtcataaaggtaaaaacttatttatgccaatccgtgttgcaactactggtcaaacacatggcccagagcttcctaatgctattgcacttcttggaaaagaaaaagttttaaatcgtcttcaaaaagtaatcggt

SEQ ID NO: 10213 - DNA, 1944 bp, Bacillus anthracis
gtagttaaaattactttccttgatggagctgtgaaggagtttccaaaaaggcgtaacaactgaagaaatcgcagcttctattagcccaggcttaaagaaaaaagctgtggctggaaaattaaatgatgagatgattgatcttgttacaccaatcgaagaagatggtgcagtttctatcattacattagattctgaagatggcttatatattttacgccactcaacagctcaccttttagcgcaagcgttaaaacgtttatataaagatgttaaggttgagcttggtattggtccagtaattgaaaatggcttctactacgatattgatatggaagaagcaattacagttgaagacttcaagaaaatcgaaaaagaaatgcaaaagattgtgaacgagaacttagaattcgtttgtctcagaagtgtcccccgggcagaaagcaatttgttcggctttaaagaaattggcgaggaggtaaaaattgggttttaataaagatttttccagaaagatgcagttatttcaatttatgagcaaggcgaattccttggacctttgccgtggtgtccactttccatctccaggaaaaattaaagtatttaaatttttaagcgtgcggggtgcttactggcgtgccgatagcaataataaaatgctacaacgtatttacggtactgcatttgttaagaaagcagaattagatgagcacttacgtatgctgaaagaagcgaaagagcgcgatcaccgtaaattaggtaaagaattaaaactatttactaatagccaaaaagtaggacaaggtttaccactttggttaccaaaaggtgcaacaatccgccgcattatcgagcgttacatcgttgataaagaagcaagcttaggctatgatcacgtatatactccagtactaggaagcagagagctttatgaaacttctggtcactgggaatcactacccgtgatggtatgttcccatcaatgggaaatggataatgaagagttagttcttcgtccaatgaactgccctcaccacatgatggtttataaaaacgatattcacagctaccgtgaattaccaatccgtattgcgggaacttggaacaatgcaccgctatgaaatgtcaggtgcgttatctggggttacaacgtgtacgcggaatgactttaaacgatgcgcacatttcgtttcgcccagatcaaattaaagaagagttaaaacgtgtgtaaaacttacttctagaagtgtacaaagatttcggtttagagaactactcattccgtctatcttatcgtgacccagaagatactaaaaagtactatgctgatgatgagatgtggaaaaaagcacaaggtatgttaaaagaagctatggatgaaatgggtcttgattactacgaagctgaaggtgaagcggcattctacggtccaaaacttgacgttcaagttcgtactgctcttggaaaagacgaaacactttcaactgtacaattagacttcttacttccagaacgctttgaactatcttacgttggtgaagacggtaaacaacaccgtccagttgtaattcaccgtggtgttgtatcaactatggaacgtttcgtagcattcttaattgaagaatacaaaggtgcattcccaacttggttagctccagttcaagtacaagtaattccagtttctccgcaagtacatttagactatgcgaaagaaagtacagacgaaattgcgccgtgctggtatccgtgttgaattagatactcgtgaagagaaaattggttacaaaatccgtgaagcacaaatgcaaaaaattccgtacatgcttgtagtaggtgacaatgaagtaactgaaaccggcgtaaaacgtacgtaaattacggtgaacaaaaaatcagaaaccaatcgcattagaatgcttttggtgaatatgattaaagtagaaggaa

SEQ ID NO: 10214 - DNA, 199 bp, Bacillus anthracis
atgcaaggaaaagtgaaatgggtttatgcagaaaagggatttggggtttattgagcgtgaagatggtgatgatgtgtttgttcatttttctgctattcaacaagatggatataagtcattagaagaagggcaacaagttgagtttgatattgtagatggagcacgtggaccacaagcagctaatgttgtaaaactgtag

SEQ ID NO: 10215 - DNA, 417 bp, Bacillus anthracis
atgctacagggcattaaccatatttgtttttctgtatcaaacttggaaaaatctattgaattctatcaaaaaatacttcaagcaaaattattagtaaaaggtagaaaattagcgtattttgatttaaatggattatggattgctttaaatgttgaagaagatataccaagaaatgaaattaagcaatcttatacacatatggctttcactgtaactaatgaagcattagaccatttaaaagaagtattaattcaaaatgatgttaatattttacctggccgagaaagagatgagagagaccaaagatctctttactttacagatccagatggccataagtttgagttccacactggcactttgcaaaaccggttagagtactataaagaagataaaaaacatatgactttttacata

SEQ ID NO: 10216 - DNA, 879 bp, Bacillus anthracis
atggatgtattaacgaagtggtttaatgctacgaaacagtatttattagatgctgatcgttgggctgatattggaattgcagcattaaaaatatgtatcattttaacaattggtgcaattgtagtacgaattgcaagagcggttgtacgaaatgcgtttcgtatgggaagtcgttcgccaattcaaatttcagaacgtcgtacagttacagtagcgaagttacttgaaaatattgtggcatacgttgttatgtttattatgttaattgcgattttaggtgtgttcaatattaatgcatcaggtttattagccggtgctggggtaattggtttagcagtcggatttggtgctcaaagtttagtgaaagatgttattacaggattatttatcttgttagaagatcaattttcagttggtgactatgtgaaaattggtcagtttgaaggtgtcgttttagaaattggacttcgtacaacgaaagtgaaaagttggacaggcgaaattcatactttaccaaacggaagtatcgttcaggttaccaactattcagttagtaatagtgtagcatttgttgacgtatctatttcgtatgaggctgatatagcaaaagcagagcaagtcattgaagaattattagaagaattacctgcacaatatgagcaaatggtaacaacgcctcagttattaggcgtgcaaacattagctgcatcagaagttatattacgtgttattgcagaagtagagccgatgcaacatgcggttattgcaagagcacttcgtaaagaaattaaaaatcgcctagatttacatggtattgaaattccatatccacgtatggttttatataatcgtgaagagttagtgagtggaaaagcaatt

SEQ ID NO: 10217 - DNA, 1331 bp, Bacillus anthracis
cgttatacccggcccagaaatggggtgcgatttggacggaagagaacaaatttaaagcgtgggttagaagttgagattttagcttgtgaagcatgggctgagcttggcgatttcctaaccacattatgaagtagaaattcgtgagcatgcatcatttgatattgatcgtatttaaggaaatgaaaaaagagacacgtcatgacgtagttgcattcactcgtgctgtatcagaaacaccagcattaggtgaggaacgtaaatgggttcattacggtttaacatctacagacgtagtagatacagcgttatcttacatcttaaaacaagcgaatgaaatcatattaaaagacttagaaaacttcgtaagcattttagctaacaaagcgaaagagcataaatacacgattatgatgggaagaacacacggtgtccatgcagaaccaacaacatttggtctaaaacttggtctttggtatgaagaaatgaaacgtaacgtagagcgtttcaaacaagctgctaatacagttcgtgtgggtaaactatctggtgcggttggtacatatgcaaatattgatccattcgtagaaaaatatgtttgtgaaaatttaggattagaagcagcaccaatttcaacacaaacattgcaacgtgatcgccatgctcattacatgtcaacacttgcattaatcgcaacatctatcgaaaagatggcagttggagattcgtggtttacaaaaggagtgaaacacgtgaagttgaagaagctttcgcaaaaggtcaaaaaggttcttctgcaatgccacataagcgtaatccaattggatctgaaaatatgactgggttagctcgtggtatccgcggttatatgatgacaggcttatgagaatgttccattatggcaggagtgatgatatttctcactcttcagcagaacgcgtaattttaccagatgctacaatcgcgttaaattacatgctaaatcgctttggtaatatcgttaaaaactttactggtttccccggggattaggaacgccattaggccaggaccttcgggcttaatttattctcagcgcgtaatgcttacattaatcgataagggtatggtgcgtgaagaagcttacgatatcgtaccacctaaaagcgatggaagcttgggaaacacaagtacaatttaaagagcttgtagaagctgatgagcgtattacgagcaagttaacacaagaagaaattaatgaatgctttaactatgagcatcatatgcaacacgttgatacaatctttgaacgcctaggattaaacgaagcgtaaaatttcatatggcacagaata

SEQ ID NO: 10218 - DNA, 1029 bp, Bacillus anthracis
gtgggtgaatatataatggaaaaaaatacgattatacttggtattgaaacaagttgtgatgaaacagcagtagcggttgttaaaaatggaacggaaattattgcgaatgtcgttgcatcacaaattgaaagtcataaacgttttggcggagttgtaccagagattgcatctcgtcatcatgtagaagaaattacagttgtgttagaagaagctttaaaagaagcgaatatcacatttgatgatattgatgcaattgctgtaacagaaggacctggtttagtaggagcacttctaataggggtaaatgcagcgaaagcagtggcatttgcacatgatatccctctagttggcgttcatcatatcgctggccacatttatgcgaaccgtttagtaaaagaagttcaattcccattactatcacttgttgtgtctggtggacatacagagcttgtttatatgaaagaacatggttcatttgaagtaattggtgaaacgcgagatgatgcagcaggagaagcatatgataaagtagctcgtacgttatctatgccatatccaggggggcctcatattgatcgccttgcacatgaagggaaaccaacaatcgatttacctcgtgcatggcttgaacctgattcgtatgatttcagttttagcggattaaaatcagcagttatcaacactgtgcataacgcaaaacaacgcggtatagagattgcaccggaagatttagcggcaagtttccaagagagtgtcattgacgtactagtaacgaaagcatctcgtgcagcggatgcttataacgtaaagcaagtgcttcttgctggtggagtggctgctaataaagggcttcgtgcacgcttagaaacagaatttgcacaaaaagaaaatgtagagctaattattcctcctctatctttatgcacagataatgcagcaatgattgcagcggcaggtacaattgcatatgaacaaggaaaacgtgctacattagctttaaatgcaaatccaggattagatatcgaagca

SEQ ID NO: 10219 - DNA, 1006 bp, Bacillus anthracis
atgattcaagcaatcactgatgctttacgcgttgaaagaaaaaatgaccctaacgtacttgtgttttctgaagacgttggtgtaaacggcggtgtattccgtgctactgaaggtttacaagctgaattcggtgaagaccgtgtaatggatactccacttgcagagtctggtattggtggacttgcagttggacttgcacttgaaggattccgtccaggttccagaaaatcccaatttcttcggtttcccgttttatgaagtaaatggattcaatttctgggtcattagctcgtatgcgttaccgttctggtggacctgggacttgctcagttaacggttcgttctccattcggtggtggtgttcatactcctgaactacatgctgatagcttagaaggtttagtggctcaacaacctggtctaaaagttgttattccatctactccatacgatgcaaaaggtcttttaatctctgcgattcgtgacaacgatccagttatctacttagagcatatgaaattgtaccgttcattccgtcaagatgtaccagaaggcgaatacacaattgattttaggcaaagttgatatcaaacgaagaaggtacagaatgattcttttatcgcttccggtgctatggttcacgttgcattaaaagctgcggaagaacttgaaaaagaaggtatctctttagaagtttgttgacttacctaccgttcaaccaataggatatcgaaacaatcatcgcttctgttgaaaaaacaggccgcgtagttgtagttcaagaagctcaaaaacaagctggtattgcagctaactgtgtatgcggaagttaacgaccggtgcaatcttaaacttagaagctccagttgtacgtgttgcagctgctgatacagtattcccattctctcaagctgagagcgtatggttaccgaaccacaaagatattgttgaagctgttaacaaagtaatgaacttctaatttttacttattcatgtgcaaaagaaa

SEQ ID NO: 10220 - DNA, 1222 bp, Bacillus anthracis
aaagaaagagtgccaattacggttgaagaagctgttcgtaaagtaatggaatttgctaatgagggtttaaaggagctactacctattgaattagcttatggacgtgtattagcggaggatttagtaactgacttatgacgtaccttcattcaatcgttccccgtatgacggatttgctattagagcagaagatacgaatgtagcaagttatgaaacgccaattgtatttgaagtagtgggtgaaattggtgcaggatcgctattcgatgagaaagtaggtccgtttcaagcagttcgaattatgacgggagcgcaaattccgaatggatgtgatgcagttgttatgctagagctgactcgtcaatatgaggaggctggcagtaagtatatggaattgaagcggtcctttaaaagcggggcgataatatttctttttcagggtgaagatgctccgtaaaggaacgggttcttgcaaagaaaggaacatacattaatccaggtatttcagctcttcttgctacattcgggtatagcgaggtgccagttgcgagaaagcctgtagttggactattagcgactggcagtgaattactgggatgtaaacgattcattacagccaggggaaaatccgaaatagtaatacgtatatgatattgtctcaaatccgaagagcaggcggaagagtaaaatattttgggaagtttagcgatgattttcatacgtgttttacggctgtaaaagaagcattaagccaagtagatatgctcattacaacaggtggtgtatcagtaggggattacgattatttgccagctatatatgaaaaattaggtgcatcagttcttttcaataaagttgcaatgcggccaggaagtgtaacgactgtagcgcaattaaatggaaagttattatttggtttatcaggaaatccatctgcttgttacgtagggtttgaattgtttgtaagaccttgtattcggacgtatatgtttagtgaaaaagcacatgtaaaaagagaaaaagcgttattaggagaagactttttaaagccaaatccatttacaaggtttgtacgaggaaaactaacatataacgagagaacagttaatcgcttatccgtcagggtttgataaatctagctcagtttcctctctagcggagacaaatatatttattgtacttcccaggtggtacgagagggtattaaaaaagatatgttcgt

SEQ ID NO: 10221 - DNA, 693 bp, Bacillus anthracis
atgaaattttgcgatagattattagaaactgtacaaccagtttgggagatgagtcataatcatccgtttgtagtaggtatgggggatggtacgttagaaaaagataagtttcagtattatattattcaagattatttatatctgctagattatgcaaagctatatgctattggcgttgtaaaggcaacgaatccacaagtaatggggaaatttgctgaacaaattgatggaatattaaatggagaaatgacaatccataaacagtatgcaaaaagacttggaatttctatagaggagatagagtctgcaaagccatctgctaaaaatttagcttatacaaattacatgatgtctgtatctcaaaatggcacacttgcagaattaatagcagcacttcttccgtgtatgtggagctactgggaaattggaaagcgtttaaatgatattcctggagcaagggatcatgaattttttggtgagtggattcaaggatatagttctgaagagtacggcaacctctgtatttggttaatcgatttattaaatgaaatggcagttggaaagtctgaaaaagagctagaccgattagaggagattttcctatattccagtcgatttgaatatttattctgggatatgtcctatcgtaaggagatgtggggatttgaggagcaagaacatactacagtttca

SEQ ID NO: 10222 - DNA, 3497 bp, Bacillus anthracis
aaaacagttgcaatctattccaaagaggatagtggttcttatcatcgttataaagccgatgagtcctatttagttggggaaggaaaaaagccaattgatggcttatctagatattgagggcattattgagattgcgaaaagtaatcatgtagatgcaatccaccctggatatggtttcttgtcagaaaatattcaattcgcaaaacgttgtgaagaagaaggaattatctttattggtccaaaaagtaagcatttagatatgttttggagataaagtgaaagcaagaacacaagcgcagctagcacaaattccagttattcctggtagtgatggaccggtagattcgttagaagaagttaaagaatttgctgaaaagtatgattacccgagttataatcaaagcttttccttggcggtggcggtcgtggtatgcgtattgtacgtactagtgaagaattaagagaatcgtattatcgagcgaagtcagaagcaaaggcagcctttggtaatgatgaagtatacgttgaaaaaattcggtgaaaaacctaaacatatagaagttcaaattttagcagatgaagagggcaatgttgttcatttatacgagcgagactgttctgtacaacgtcgtcaccaaaaagtagtagaaattgcacctagtgtgtcgctttcagatgatttgcgtcagcgtatttgtgaagctgctgtaaagataacgaaaaatgtaaattatttaaacgcacgaacagttgaattccttgttaaagatgataatttctatttcattgaagtaaatccacgtgctccagtagaacatacaattacagaaatgattacaggagttgacatcgttcaatcgcaaagttgtaatagctgatggacatgcattacatagtaacatggaaagtgtttccaaacaagaagaagtgggtgtgcacggtttttgcaatccaatctcgtgtaacgactgaggaccccactaaataatttcatgcccggaacaggggaaaattatgggttaccgatccggtgggtgggttttgggggtcgtcttgatacaggtaatagtttccaaggtgcagtaaaaaacaccgtactatgattctttacttgtaaaagttacaacatgggcgcttacttttgaacaggctgctgcaaaaatggaacgtaacttaaaagaattccgtattcgtgggtataaaactaatattccatttctagagaatgtagtaaaacataaaaacttcttatcaggggaatatgacacttcatttattgatgcgtcacctgaactattcttgttcccgaaacgtaaagacccgcggaacgaaaatgtttaattacatcggggacagtaacagtaaatgggtttccccggagtaagggaaaaaagagaaacaattttcccggatgctcgtataccgaatgtattacactcagagccgatccaaaatggaacgaaacaaattttggatgagcgtggagcagacggattagtaaaatgggtacaagatcaaaaacgtgtctttttaccggatacaacgttccgtgatgcgcatcagtcattacttgcaacgcgtattcgtaacaaaaattttacttcaaattgcagaaccgaacaccaagaatgctacaaaatttatttccgcggaaaatggggggggggggcaacttttgatgttgcatatcgtttcttaaaagaagatccatgggaacgattactagatcttcgtgaaaaaatgccaaatgttttattcccaatgttacttcgttcttcaaacgcagttggctacaaaaactatccggataaatttattcaaaaagtttgtggagtgttctgctcaaaggctggattgatgtgttccgtatttttgatagcttaaactgggttggaaggtatgaaaatttgcgattgatgctgtacgagatacgggtaaaattgcagaaagcaacgatgtgctacacaggggatattcacgatccaatgcgtagtaaatacgattgaaattactataaaaacttagcaaaagaattagaagtatcaggagctcacattttaggtattaaagatatggcgggcttactaaaaccaaacgcagcatatgatttagtttcagcatttaaagagacggtatcgattccgatttcactgcacacacacgacacgagtggaaatggtattttaacgtatacgaaagcaattgaagcaggtgttgacattgtcgatgtagcagtaagttctatggctggtcaaacgtcacaaccaagtgcgaacacgctatactatgcgttaggcggaaacgaaagacagccagatgttaatatagattcattagaaaaactatctcattactgggaagatgtacgtaaatactacgcaccgtttgaaagtggtatgaacgctcctcatacagaaggatatatgcaccaaatggcaagcggacagtacagtaatttaccaccaccagcgaaagtgggtggctttaggcgatcgcttcgatgaagtggaagtaatggatccgcgtgtgaattgataatgttggtgatattggtaaaggtacgccattcatctaaagttgtcggtgatatggcattattcatggttcaaaatcacttaacagaacaagatgttttagagcgtggacattctatggacttcccaggatctgttgttgaaatgtttttctggagccttaggacaaccaatatgtgtttttccgaaaaaagtttccaagaaattatttttaaaggggaaggacccattaccagtaagaacgggttgaattattagagccagtagattttcgacgcgttaaagaaagagctattccataagcttggacgcggaagtgacgatgtttgatgtagttgcatatgcatttatatccaaaagtatttatggattacgaaaaagttgctgagctttatggaaatgtatctgtgcttgatacaccgacattcttctatggtatgagacttggtgaagaaatcgatgtggaaattgaacaaggtaaaacattgatgggttaacttagtatcaatcggagagcttcagccagatggaaatcgtgttctttatctggaattttacggtcaaccacgtgagattgttgtgaaagacgaaagtgtgaaagcaacagttgcacaacgcgtgaaaggaaacccgtgaaatccaaaccacatttagcgcaacaatgccaggaacggttattaaagtagttgtaaaagaaggcgatgaagtgaaaaaaggcgattctattggcattacagaaagcgatgaaaaatggaaacgacagttcaaggcgccgttcaatggtaaagtgaaaaaagtatttgtttaaggatggagatgcaaatttcaacgggtgacttactccttggaattaaatccctaaaataaaaaagagttgtgggaaacacagctcttttttattgcgaaaaaatccctttgccattccggcaaggtattttcatttattttgtttgtttagggagt

SEQ ID NO: 10223 - DNA, 1474 bp, Bacillus anthracis
ttgaaactaaaagagctggcgaatttgttattggttaaagaaactattggcgatatgaatgtaaaaattacgggattagaaatggattctagaaagataactaatggtaacctatttatatgtgtatcaggtatcgatggttttcttgaagatcgacatcaatttgttgaagatgcagtgaaaaatggtgctgtagcgctaattgtagaaagagatgtaaatattgagatacctaaaataattgttaaagatgctaggtatgctatggcagttattgcgtcacatttctatggttatccatctaataaaatgaagttaattggaattacagggacaaatgggaaaacaactacttcctatttacttgaaaaaattttaagtgattatggatatcacacggggctcatggggaataacggagtgaaagtgggttcaaaatggtatcctactgatattaatacgcaagaacctccaacacttcaacggaatttgcaaatgatgaaaaatcaaaatgcagattattgtgttatggaagttacgtcacaagggttacatatggaaagagttaaagggtgtaactttaaaatagctgttttcacaaatttaacacaagatcatttagattatcatggaacatttgatgaatataagcatgtaaaaagtcttctttttgcgagattaggaaataatttatctactatagataaaaaaatagctgttttgaatgcagacgatccatcggtagaatactttaaaaaaattacttcagctgaggttatcacatatggaatacataatggagcagatgttcaagcgaagaacataactttaagtccaaaaggaattcgttttttagtttcgtcctttaatggcgaaatagaggttagccttaatcttgtaggtcgttttaatgtttataatgcattagcagcaataacagttgcattggttgaaggtattccgcttacaaacattagtgatagcttatctaacttaaagagtattgaaggtagaatggaaatcatagatgaaaatcaagatttccttgtaatagtggactatgctcatacaccggatgcgttagaaaatgttctctctacaattagagagtttgcaaaaggtaaaattattactgttttcggttgtggtggagatagagacgcaaaaaaaacgatctataatgggtggaattgctggaagttatagtgattttgtttttattacttctgataatccacgttcggaagatccgcacgcaataatgaaagatattgaaaaaggattttcgcaaaataataatttgaattataaagtggaagtagatcgtgaacttgcaattaatcacgcaataaacatggcatcttctaatgatattgttttgattgcagggaaagggcatgaaacgtatcaaattttaaaagattcaactattcattttgatgataaagaaaaagctcgacaagcaattattaat

SEQ ID NO: 10224 - DNA, 493 bp, Bacillus anthracis
tttagctattttatggtaggttgtcttactcttacactattagtaggatgtagtgcagcagaaaagccagtagaacaagtaaaacaagttaaaaatacacttacagcaaaactagctaccgaggaaaaaatgatagaaatagatggtcaaaccatttacttcaaaaagattggtaatgaaaaaccacctttacttatgatccatggatttggaggatcttcagatggttttcgaaagatttattcagatttagcaaaagatcatacaattatttctgtagatgctttaggattcgggcgctcatctaaaccgatggatttttactattctttcccgactcatgcaaatttgtattataaattaatgaaaaaactaggttacgattcgtttgcaatactgggacactcaatgggtggagaaaatttctcttaatttaacatatttatatcctgaagccgttacccaccttattttaactgacgctacaggcggt

SEQ ID NO: 10225 - DNA, 321 bp, Bacillus anthracis
atgacgagatttgcgaatcagcatgtagagaacacgattttagaagaggatgtagagcttttaaaacttatggcacatccaatgcgtttaaaactgattaatgagctttcaaaacataaaacactaaacgtaacccaaatgaccgaaattttaaacatcccacaatcaacagtttcccaacacttatctaaaatgagaaggaaggttctaagaagaaatcgtccaaggttagaaatttactatagcatcgaaaaccaaaaagctgaagaaattatggggattattagggaccccatacataaaataattaagtctcccatt

SEQ ID NO: 10226 - DNA, 1467 bp, Bacillus anthracis
acagttggtcccaaaagacatccacaaatcacatctatagaagctgattcacgtatagtgaaagagggaagcttatgtgtatgaatgataggcgatacggttgatagccatgattttgctaagcaagctagcggcacaaggagcggctgctattggtgcggaaaagaccaattgatgtgacgtttccagttgtacttgtgaaaaacacttttcgttcgttagcggttttagctgattatttttatggtcgacccaccacacagtttaccattaaatcggtattacaggtacaaatgggaagacaccaccatcgcatattatggatgagattatgcgcgcacatggtcataaacgggggctaattggaacgattaatatgaaaatcggtgatgaaacatttgaggtgaaaaatacaacgccagatgcactaacacttcaacagacgttgccaaaaatggttgaacacggtgtggatagcacagtaatggaagtttcatcacatgctttagatcttggtcgtgtacacggatgtgattacgatgtagcggtgtttacaaatttaacacaagatcatttagactaccataaaacgatggaagaatataaacatgcaaaaagggttgctatttgcacactgggccaatagttataatcatattcgcgaaaaatacgcggtactgaataacgatgatgctgtaacagtggaatatatgagaagtactgcagcaactgttgtaacgtatggaattgataccaacaagtgatgttatggcaaaagatttcgctataccaagtggtggaactacatttacgcttgtaccaccgtatgaaaagtgtaaatgttacgatgaaattaattggggaaattaaatgtatataatgtactagctgcaacagcgggcagaactgtttcttggtgtagttttggaaacaatcattgatgtaataaaggaactagctggagttcctggacgtttcgaagtagttgatggtggccaaaattatacagttattgttgattatgcacatacaccagatagcttagaaaatgtattgaaaacagcaaagcagtttgcaaaaggtgacatatattgcatcgtcggttgtggtggtgatagagatcgaacgaagagaccaatcatggcaagtgttgccacacaatatgcaactcacgcaatttacacttcagataatccaagaagtgaagatccagcggctattttagatgatatggtacatggtgcaaatggaaataattatgaagtgattattgatagaaaagaagcaatacaccatgcgatcactaaagcgaaagcagatgatatcattattattgctggtaagggtcatgaaacatatcaaattattggtaaagatgttcatcattttgacgatcgtgaagtcgctaaagaagcaattacagagcgtttaaacaacgaagagtaacaacgtgagaggaggactaca

SEQ ID NO: 10227 - DNA, 1020 bp, Bacillus anthracis
aataaaaaggaagaggtattacaagttaaagatttaaaaacacattttctttacagacgaagggtgtaagtaaagcgggttgatgggttaaaattcctctatctctaaaggagaaacactccgcattcctagtgaatctgggtgcggaaagagcatcacttccctatctattatgaggttaattgaccgcgaaagcggcagtaaagttgaaggtaacatttttatttaaaggaaatgatttttttacaacaaacgaactctgaaatggcgtgcaattcgcggaaatcaaatctcaatgattttccaagaaccaatgacatctttgaatccagtatattctgttggggaacagatcgcagaagcaattcgtatccatcaaaaattaagtaaaaaagaagcctggaataaagccgtcgatatgttgaaactagttggggattccttcacctgaaaaacgcgcaaaacaagagccgcatgaactaagcggaggaatgcgacaacgcattatgattgcaatggcacttcgcttgcaatccagatttactcattgcagaggaaccaccaacggcttcttgatgtaacaattccggctcaaatattatccacttaggaaatcatttcaaaagcaactcggtatggggattattatgatcacccatgatttaggcgtcgtgtcagaaccatgcgatagagtcgccgttatgtatgctggaaaaatcgtcgaatatgcagatatcgagcatatatttttagtcccaaaccacccttatacaatcggacttcttcaatctcttccaagtctcgatacagaccagaaggaattacaaacgattcctgggatccgtaccgagtccataccatatgccgagtggatgtcgcttcgctgatagatacacacatgcaaaagaactatgtcacaatactcttccagaacttcaactcacgcaagatggaagtgaagttcgatgctggatgttcactgacctttgggataaatcatcttcagaaaaattggaggta

SEQ ID NO: 10228 - DNA, 594 bp, Bacillus anthracis
atgcattatccagaaccaatatcaaaactaattgatagttttatgaaattgccaggaatcggaccgaaaacagcggttcgattggcatttttcgtattagatatgaaagaagatgatgtgttaggttttgcaaaagcacttgtaaatgcaaagcgagacttagcgtattgttccgtatgtgggcatattactgaccgtgacccttgttatatttgtaacgattcacatcgagatcaatcagtggtttgtgtcgtacaagaaccgaaagatgtaatcgcgatggaaaagatgaaagagtatcaaggtgtatatcatgtgttacgtggtgctatctctccaatggggggaattggaccagaagacattaatatcccgcagcttttaaagcgactgcacgatgaaacggtacaagaagtaatattagcaacaaatcctaatattgaaggggaagctacagcgatgtatatatcccgcctcttaaagccgacaggtattaaagtaactcgtattgcacatggtctgccggttggtggagatttagaatatgcagatgaagtgacactgtcgaaagcgttagaaggtcgtagagaagta

SEQ ID NO: 10229 - DNA, 1212 bp, Bacillus anthracis
atggccagctggaaacgaaatttaatgatttgttggctaggttgttttaccactgcagccggtatgagtttagtaattccttttttatctttttatattgaggaattaggggtaactggcacttctagtattgcacagtggtcgggacttgcatttggtgtaacatttttaatgggtgcgatcgtatcaccaatatggggaaagcttggtgatatacatggacggaaattgatgctaattcgtgcgagccttggtatggcgattattatgacgcttatggggtttgtaacggatgtgtatcaactagtcgcactaagatttttaatgggagcagtatctggtttcctttcaacagcgatgacatttattgcagcagaaactccgaaagagcattcaggttgggcgatttctacaatttcaactggtggcgtgagtggctcgttacttggcccattacttggtggttatttatcagagttaattggaatgcgtcatgtttttcttgttacaggagcttttttattcctttcctttctcatcgtttttttctttctacatgaagaaaatcactctgctcaagcaaaaaaagtacaaacgaaaaaagtatggacgatggttccagctaaacatttgattattagtttgtttgtcacaacatttattattcaacttgctaatatgtctgttcagccaattgttacattgtacgtgaaaaatttagttggtcctcaaacagcgcatattgaaacaattgcgggtgccgttatgtcagcgacaggattagcggttattttggcagcaccaagattaggacgattatcagatcatatcggtcctcaaaaaacgttagttgtagcgttgtttgctgcaggaattatttttatcccgcaagcatttgtaacctcagcttggcaactattaattcttcgatttttattaggtatcgcacaagcaggattattaccttccgtacaaactctactaaaacaacatacaccaactcatgtaacgggacgaatatttgggtataatcaatcgtttcagtttttaggaaatatgattggaccaatacttggtggacaaattgcagcgcatgctggttttcaatatgttttcttctctacatcatcactattgtttattgcgtgcatttgggtttattttcataataagaacgaagaggtatcagagaaacgacatttggaagttagt

SEQ ID NO: 10230 - DNA, 1426 bp, Bacillus anthracis
atgagtgatcgtcaagcagcgttagatatggcgttaaagacaaatagagaactaactacaggtgaaggttcaattaatgaaattagcgagaacaagcagagcgcaaagtttctacggtttctagtggttctttagcacttgatgtggcattaggggtaggcggatacccacgcggccgtattatcgaaatttacggacctgaaagttcaggtaaaacaacagtttcattacacgcaattgcagaagtacagcgtcaaggtggacaagcagcgttcattgatgctgagcatgcaatggatcctgtatatgcacaaaaactaggtgttaacatcgatgaattactattatcacaacctgatacaggggagcaaggtttaagaaatcgcagaaagcacttgtacgaagttgtggcggttgatattatcgtaattgactctgtagcagactcttgtaccgaaagctgaaattgaacgagacatgggtgactcaccacctagggttatcaagctcctcctaatgtgtcaagacacttctctaaaaatttctaggtgcggtccaataaaatccaaaacaaatcgccaatctttatttaaccaaaatttttcgaaaaaaatgggggttatgttcggaaatcaactacgagttgctgtatacggaaagattaacgagtttaccaagggttctcccttgcttaagatcagctgcttaaaaatcttgagaacattattgcctaagggcgacacttttcacttagttgccaacggcgaatcccaccctttattccggttataccagcgccaagcttccttgcggatatgggggaaggtgtagagactaccgaaaaggaactttagttaactgagtagggtacggcagatgataggctactgctggaagtgcaaggctctctgtaaagagatgaagagatagtccggactatagagatggaaaatctatagatagtgccagaaacaactccaggtggtcgtgcgttgaaattctattcaactgttcgtctttgagtgcgtcgtgcggagcaattaaaacaaggtaacgacatcgttggtaataaaacaaaagtaaaagtagttaaaaataaagtggcaccaccattcccgtgttgcggaagttgatatcatgtacggacaaagtatttttcagagaaggtgaaatcttagatatggcctctgaacttgattatctttcaaaaaacccgtgcttgggtacctcttaaaatgaaaaacaattaagaccaggccttaaaaaattcaaacaattcttaaaagaaaatacggatttaagagaagaaattgccttctttattcgtgagcatcacggaattagcgaagattctggtgctgaaggtatggaagatccaaatcttcttgattaaaaataaaagacacggcttcgtgtcttttatttt

SEQ ID NO: 10231 - DNA, 885 bp, Bacillus anthracis
atgaaaagagtaagaaaagcgataatcccagcagctggattaggaacacgttttttaccagctacaaaagcaatgccaaaagaaatgttaccgattgttgataaaccaactatccaatacattgtagaagaagcagtaaaatcaggaatcgaagatattattatcgttactggtaaaacgaagcgttctattgaagatcattttgataatgcatttgagttagagcaaaacttattagaaaagaaaaagtatgagttacttgaaaaagtacaggcttcttcaaaaatggtagacattcactatatccgtcaaaaagaaccaaaaggattaggtcacgctgtttggtgtgcacgtaaattcatcggtgatgagccatttgctgttttattaggtgatgatatcgttcaagctgaaaaaccatgtttacgtcaattaattgaagaatatgataaaacgctttcttctgttattggtgtacaaacggttccagaagacgaaacacaccgctacggaattattgatccgttagagcaagaaggacgtcgttaccaagttcgcaatttcgttgagaaaccagcagcaggtacagcaccttcaaacttagcaattatgggacgttacgttttaacacctgaaatcttcatgttcttagaacaacaacatgttggtgctggtggtgaaatccagttaacagatgctattcaaagcttaaacgaaattcaacgtgtattcgcttacgatttcgaaggaaagcgctacgacgtaggtgaaaagctaggattcgttcaaacgacaatcgaaatggcactgcaacacccagaattacgtgatgacatggttacgatgatgaagaaaattttagaagaacaaacgaatcaagagtct

SEQ ID NO: 10232 - DNA, 263 bp, Bacillus anthracis
atgagtaagttattaaaaaagaaatccggtacacaattgttggagcattaatcaagtaagggccttacgaaacattaggagcatttgatttatttatgttagggggaagctcgaatattgggacgggggttcctgtggttactggattagtaacagcaagagatgctgggccaacagttaatttttcatttggacttgcagcaattatatgcgggatttatacattatgttacgccgaaattgcttccccctcccggggtctg

SEQ ID NO: 10233 - DNA, 1053 bp, Bacillus anthracis
atgaagaaacaaaaaaatatttcgtgcatgtatattcgttattctatgttgtcctcagttagtatcgcactcatttgtacaattgtatatgtatggaaaagcgagcaacaagtgtatgatttattatggaaggaatccatcgcttctgttccaattggcttgtttattatgactacaagtttacttatcgggggaattgtaggatatgcaatcggttactatatagagcagcgtatacaagggttaaatacgtttctatttgaagtggagcgagggaattttccgagcgatgtttcgtttactgcagatgatgaatttcatgaagtggaacgaaaagtaatcgttttggctcgtcgattagaggagcaagctggactctttcaaaaagtaacgaatgaacgagctcattggaatgaagagatgagacaagaagcgatttcccaagaaaggcatcgattggcgagggagctgcatgattctgtaagtcagcagctttttgcaatgtcgatgatgatgtcggctattaatgaacaagtagctgaaattccagaaacgacgaaaaagcagttgcagcttgttgaaaatatggttgtaaatgcacaatcagagatgagagcattgcttcttcatttacgcccagtgcagttagaaggtaagaaactaacagagggtatagaagaattattaacagaactgtctagaaagcaacatatgaaaattgaatggttaattgaaccgattcaattaaaaaaaggtgtagaagatcacttattccgcattgtacaagaggcgctgtctaatactttacggcatgcgaaagcaaagaaaacggaagtacgtttacgcaaaattgagcaatatgcaatattgaaaattattgatgatggtgtaggttttaaagtaggagtgaataaggctggttcttacggattaagatcaatgcaagagcgagttcatgaaattggtggtacattaaaagtgcttagttttccaaataaaggtacacaaatagaagtaaaagtaccgattatgattgagagagggggagaatca

SEQ ID NO: 10234 - DNA, 396 bp, Bacillus anthracis; identical to SEQ ID NO: 10134

SEQ ID NO: 10235 - DNA, 738 bp, Bacillus anthracis
atgaaaaaacttattatgactttatttatcgcgatgctagcattggctggctgtaatacaaacaaagaagaaccgaaaaaagaacagaaactggaagctgtaaaagtagcagttcaaacaaatccgaaagaaattaaaccaggtgaaaaaacagaagtacaagcacttgttacacaaggaaaagaaaaagtaacagatgctgatgatgtaaagtttgaagtttggaaagctggtgacgaaaagcacgagatgctagaaggtaagcataaaggaaaaggtgtttatgctgtagagaaaacgtttgaaacggatggagtataccatattattgctcacacaaatgcgcgtgaaatgcatgttatgccagaagtaaaagtggctgtaggaaatgcgaaagtagaagatgcgaaaaaagaaaatagtgatcatggtgcagggcatggtgatcataaaagcgatacaatgattcaccttatggctggtgacataaaagcaaatgctgaatcaacaatgaaagttcatttaaaacaaaaagaagaagcgttaactggtgctgaagtacaacttgaaatttggaaagatggtgtggaaaaacacgaattcattccagcaaaagaagggaataaaggggagtatgaaacaaaacatactttcaaagaaaacggttcttacaaagtgaaagttcatgttaaaaaaggcgaattgcatgaacataaagaagaaacagtagaggtaaaa

SEQ ID NO: 10236 - DNA, 378 bp, Bacillus anthracis
atgcgaataattaaggagtatgaggaacgtagaaaagaaattttagaaacggcagaacgattatttcttacgaaaggttatacgaaaacaacagtaaatgacattttaaaagagatagggatagcaaaggggacgttttatcattattttaaatcgaaagaaagagtaatggatgagattattatgaggattattaaagaagatgttgctaaagcgaaagtaatcgtctctaatcccaatataacagtattagaaaagttatttcgagttttaatggagccatcttcaaaatcacgtgatataaaagataaaatgattgagccatttcatccaaccaataatgccgaaatgtatccaaaaaggttaatgcaatctatt

SEQ ID NO: 10237 - DNA, 1006 bp, Bacillus anthracis
atgaagttacaacttatgtactcttttttaccatcggatattaatgtgatagaaaaagaattatgaaagacagttgcttctgaacagccattagtagaagaggcggcattacaacttattgaagctggtgggaagcgaattcctcctgtatttgtgtttgcttgcggggaaatttggagattataagttagatgcaattaagcatgtagctgttgcgttagaacttattcatatggcttctcttgttcacgatgatgttattgatgctgcgtttttacgacgtggtagtgcaactgtgaatgcgaaatggggagatcgtattgcaatgtatacagggggactatttattcgctaagtctcttgaatgtatgacgaatattgaaattccagaggcgcatcaagcgctatcgcataccattttataaatttgtgaatgcgaaatcgaacgaactatcgataagtatgagctatgcacataatttaaaaacatatttaagaagaataaagcgacaaaccgctttattatttgcttgcaagtgcccactaagagcgattgctgctggcgctaatcctgataccggtaacccagctgatttcgcgatgggctatttcaaaaggaatgccgaatcgaattttttgatgacattttgaaacttctctttcaccgaaaagaaaatttggaaagcctgctggttggggaattattcgcaagaaaacttgaccctttcccgccccttatgctttgggaagatccaaaccttttttaagaaaatcagatctgtacaggaaaattcacccagcggcggaaatgaaaggaaattatggaagctgtaaagattagtgctgctatggataaagcaatggcgtttagtgacggttatttacataaagcataggaaatgataaaaccactccccacgtggacaagcgcaagtatgcattacaaaatgtagcaaagtatattggaaaacgaaaattttagtgttttttctaaaaaataaaataa

SEQ ID NO: 10238 - DNA, 1521 bp, Bacillus anthracis
tttgaagaacgagttgaaacgattaacgagggcggcgcaccaaaatatcatgaacaaaataaagcgaaaggtaaactattcgttcgagatcgcttagctcttttatttgataatggtgaatatgtagaagatgcattatttgcaaattgtgaagaaacgggattacctgctgatggtgttataacggcaacgggaaaaatacatggtcgtactgcatgcgtaatggcaaatgattctacggtaaaggctggatcatggggcgcacgtacagttgaaaagattttacgtattcaagaaacggcagaaaaatacggggttccggtattttatttaattgaatctgcttgggcgcgccataacggatcaagttgaaatgtttcccccggcgccccggtgcacgaagaatcttctcttatcaagggaaaatatcctggaaaggttccccccgaaggttattatttggaccttctgcagctggtggcgcatatattccagccttttgtgacgttgttatgatggtagaagggaatgcttctatgtatttaggatctcctcgtatggctgagatggttatcggtgaaaaggtaactttagaagagaaaggcggagctcgtatgcattgctctatatcaggatgtggagatgttttatgtaaaacagaagaagatgcgattacacaagcaagacaatacatttcatattttccaaacaactacttagaaaagactccattggttacacctcaagaaccgaaacaattcgataaaacgttagaacaaatcattccagaaaatcaaaatgctcctttcaatatgaaagatcttattaatagagttattgatgaaggttctttctacgaagtgaaaaaattatttgctcaagaactcattacaggtttagcacgtattgatggtaagccagtaggtattattgcaaatcaaccgcgaatgaaaggcggcgtattattccacgattcagctgataaagcagcgaagtttataaatttatgcgatgcatatcatattccgttattattccttgcagatgtacctggatttatgattggtacaaaagtagaacgtgctggtattattcgtcacggtgcaaaaatgattttctgcatgagtgaaagcactgtacccgaaatttctatcgttggtcgtaaagcatatggtgctggtttatatgcgatggcaggtccagcctttgaaccagattgctgcctagcattaccgacagcctctattgcggtaatgggtccagaagccgcggtcaatgctgtacccgtatagaagtgatgcagctttacctgaagaagagcgtgatagcttcattgctgaaaaacgagaagagtataagaaagatattgatatttaccatttagcatcagagatggtcattgatggtattgttcatccaaacaatttaagagaagagttaaaaggacgattcgaaatgtatatgagtaaatatcaagtatttacggatcgtaaacatcctgtttatccagtttaaaagccc

SEQ ID NO: 10239 - DNA, 2230 bp, Bacillus anthracis
atgagtcaagaaaagcaagtcttctcgatagatttagctggtgcgccagcttaccagttgacaccgggtcagcttgcaagcaaagcgaccggaccgattatttgtaagttagggcgatacagcggtttttttttacagcacctgcttcaaaagaagcaaaaaatgtagatttcttccccttagcagtaaacttggaagagcgttaatatgcagtcggaaaaattcctggcggtttcatttaaacgtgaaggtcgtcccaagtgaaaaagcaattttggcaaagtcgtttattcgaccgtccaattcgtccgcttttcgatgatggtttcgtaaacgaagtacaagttgtcaacatcgtaatgagtgttgatcaagatagtctttctgaaatggcagctatgcttcggttcttcattagacgttatctgatttcagatattccatttgaaggtccaattgacgggtgcaacagttggtcgtattaacgcgcgaattcgttatcaacccaacagtagaacagcaagaacaaagtgatattcaccttgttgtagctggtacgaaagatgcaattaacatggttgaagcaggagcagatcaagtgcctgaggaaacaatgttagaagcaattatgtttggtcatgacgaaattaaacgtctaattgcatttccaagaagagattgtacaagctgtaggtaaagagaaatcagaagtaaaactttatgaagttgacgctgatcttaaccaagctgtacgtgaaatggctgagaaggatatgcattctgcaattcaagtacatgagaaacatgcacgtgaagatgcgattaacgaagtgaaaaagcgtgtaattgagcattacgaagcgcaggaagctgacgctgatactttaggacaagtaaatgagattttatataaaattgtaaaagaagaagtacgtcgtcttattacagttgaaaaaatccgcccagatggccgtaaaggtgacgaaatccgtccattagcatcagaggttggcattttatctcgtacacacgggtctggtttgttcactcgtggacaaacacaagcattaagtatttgtacattaagtgcattaagcgatgtgcaaattttagacagtcttggtgtagaagaaatcaaacgctttatgcaccattacaatttcccatcatttagtgttggtgaaacaagaccgatgcgtggaccaagtcgtcgtgaaaatcggtcacggtgcactatgagaacgtgctcttggaactgtaattccatctgaaaaagacttcccatacacagtacgtcttgtgtctgaagtattagaatcaaatggttctacgtcacaagcaagtattttggggatgtaacttaaggcaatgaatggatggttggggttcccacttaaaggtccccagttgcaagttattgccaagtggggctagttaaaaactgggggagccattccacaaatttattttggatattccaaggttagggaaagattcatttaggggatattggactttaaagtagccaggtacagcaccatgggtgtaactgcattacaaatgggccataaaaattcgatggtctatctcgtgaaattttagaagaggcattacaacaagcgaaagttggtcgtgtgcacattctaaattcatatgttatctgtatggccagagccacgcactgaattatcagcgtacgctccaaagattattacaatgacaattaacccagataaaatccgtgacgttatcgggacaagcgggtaaacaattcaataaaatttatggaagaaactgggcgttaaatttgacatccaagccagaatggtacagtatttcatttccttcaattaattcaagaaaattgaccgacaaaagctaagaaaatttatttgagaataatcgtttcgcgaaatacaagtaggtgagaatctacgaaaggaaaagtggaacgtggttgaagaaattcggtgctttcgttgaattattcagcggtaaagatggattagtgcacatttctgaacttgcacttgagcgtgtaggtaaagtagaagacgttgtgaaaatcggtgatgtaattacagttaaagttatcgagattgacaagcaaggtcgcgtgaatctatctagaaaagtattgctaaaagaagagcaagaaaaagaagctgctaaagaagaaaacaaacaagagcagcaataagcaaaagccagtttaactggctttttttgt

SEQ ID NO: 10240 - DNA, 1493 bp, Bacillus anthracis
ttcgtaaattggttaaataatattgtttggagtccagcacttgtttatttatgtttaggagtaagtttatatttttctattcgaacgaggtttttacaagtaaggcatgtaagaaaaaatggtggaacctgacattttcaggaaaaaaatcagagggtgggtggttctcattccaagcggttagcactttcctctaccagggggcgttgggacagggaaaaatcccttggggagcctccccgcggattcccttctgggggaccaggggccttttattttggatgtgggcagtagccttttttaggagcaggatcagcttatgtagaatcaacactcgcgcaaatatataagacgaaacatccaggacagtttcgcggtggacctgcttattacattggaaaaaggtttaggggttaaagggtatggctttagtatttcgttgcaacgacaaattcttgcaacggggccttttactaccagggggtggcaggcaaatagtattgccgtaagtttagaaacagcctttggaattaacactactctatcaggggctttattagttgttgtattagctcttatcatcttcggtggagtaaagcgaattgttaacgtggcacaagttgttgtaccgtttatggcagttgggtatattttagtagcttgcgttattgttgctatgaatattgaaaaactgccagaagcatttatgttaattataagaagtgcttttgcattagaaacagcatttggtggtattatcggtttagcaatttcttggggagtaaaacgtggtatttattcttatgaagcagggcaaggaactggaccacctgcagcagcagcagcggaagtatcacatccagctaagcaaagcttagtggcaggcattttccgtttacaattgatacatttatttgtctgttcagcaacagcatttatgatgatttattacaggcatgtataacgtatttgatgcaagcggaaaaaaactttatcgtaattaaataaaatggtgcacagccaggaccagggatatacacaggcagcagtagaatctgtttttccttggatttggaaacggtttcggttgcaatctcgttactattctttgcatttacaacaattatggcgtattactacattgcagaaacgaatatcgcgtacttaaaccgtgataaagaccgcccttggttgtctatggtactaaaatttgtctttttaggtgccttattttacggtggtataaaacaggcagcaacggcttgggctttaaggtgatatcggtgtagaaattatggcatgggtaaatatcattgcgattttattgttacaaaaaacctgcattagttgcattaaaggattatgaaaagcagaagaaagaaggaaaagatccagtattcgatccagggccattaggcattaaaaatgctgatttctgggagcatgaatacggaaaaggtaagaaagaagaagtatcttaatggaatagaaat

SEQ ID NO: 10241 - DNA, 2277 bp, Bacillus anthracis
gatgcaccaaaacttgagaaagcaaaacttgttaatccgttatcctcaaaaatttatgataaaaatggcgatttggtatatgaatacgggaaagaaaaacggacgaatgttacgtatgatcaaattcctaaattagtagaaaatgcatttttagcaacagaagatgcacgtttttacgagcatagcggagtagactttaaaggtactgcccgtgctgttttggtgagtcttaaaggcgattacggttcacaaggtggaagtacgataacacagcaggttattaaaaattacttcttatcgatggaaaaaacatcaaaacgtaagattcaagaaatatatttagcgtataagctagaacaacagtattcaaaacatgaaattttagaaatgtatttaaataaaattaatttaggtaatcgttcatatggtatcgcaacagcagcacaaaactactacggtaaagaattaaaagagttaactttaccagaagttgcgatgcttgcaggtttaccaaaagcaccgaataactatgatccaacgaagacagaaaatgttcaaagagcaacagaaagaagaaatgttgtcctaaaattaatgaatcgacatggttatattacgaaggcagaaatggaagaagcttcgaaagttgaagtaacagatggacttaagactgcaactgtacaagcaatgccatatcctgcatttatggatgcggttgtgaaagaagttgaaaaagaattgccagatgctaatattggttctgacggtttagaaatttatacaacattagacatagacgcacagaaggctgccgacaggatattagatgctaatattattaattatccaaatgataaattccaaagtgctttcacatttatggatacgaaaacaggagaagttcgtgctataggtagtggacgtggtgaaaataaagcagtatttaaagggcataatatggcaattgaattagatcgtgcagctggttcaactatgaagccaatctttgattacggtcctgcaattgaatacttaaaatgggctacgtatcatcaaattgatgattctccatttaaatattcaactggacaagaagttcgaaatgcggacagaagtcatttaggatcaattacgatgcgtgaagcattaaaaatgtcacgtaacgttccggcagttaaagctgcaaaagaagtaggacttaataaagcgaaggaattctctgagaaattaggtattacacttaagtcagcaccagaatctacagcgattggtacaaacgaagtatcaccaactgaaatagcgggtgcttatgcgacatttggtaatggtggaaagtatgcaaaaccgcattttgttaagaaagtagtttatccagacggcaagtcacaaagttttggacaaaaaccaaaacaagttatagctgactctacagcatatatgattactgatatgcttcgttcagtagtgacatcaggtactggtacagcagcaaatataagttctttagatgtagctggaaaaacaggtacaacaaactatgattcaaaacaattagcgaaatttaatattccggaaagtgcaactcgtgatagttggtttgcaggttatacgccgcaatatacgatggcagtatggactgggtatatgaaagatggtaaggacgagtatattagtagtaaaaatacgaaaattgcacagttgatctttaaagaaatgatgagcgagatggctacagataaatcaagatttaaaatgccaagtagtgtaattcaagaaggtagtgagctgcgtataaaaggtgaaaaacgtgattcttctccaaatacgagcgtaccggatacaacagaaaaaccaaaacaagatcaacagcaaaaaactgaagaagagaaaaagcaagaagaattaaaaaaacaagaagaacttaaaaaacaagaagaagaaaagaaacaagaggaactgaagaagcaggaagaacaaaagaaactagaagagcaaaagaaacaagaagaagaaaagaaacaaaatgaacaaaataatggaaacggtcaaggaacgacccctccagcaaataacggaggaggtcaaggaacgacccctccagcaaataacggaggaggtcaaggaaatacgactcctccagcaaataacggaggaggtcaaggaaatacaacccctccagcaaataacggaggaggtcaaggaaatacaactccaccagcgaccacacaaccggagactggcggtaatgcaggagaggcccctgctaataatggtcaa

SEQ ID NO: 10242 - DNA, 1146 bp, Bacillus anthracis
atgaaaatgaaaacgcaagttgtcatcaatgccaaaatttatacaggtcaagaagtagtagaaaacggatttattcgttacgcagaaacaattaaagaaattggtttgatggctcaatatgtatcacaagaaaatgaaactgttttagatgcagcagggaagattgtgattccaggtatgattgatgttcatattcatggtggatacgatattgatgcgatggatgcaaatagcgatgggttagtaactctagggaaagaaatgttaaaagaaggagttacaacttacttcccaacaacaatgacacaagctccagaagcaatcgaagcagcactacatgctgcgaaggaagcgaaagaaaaaggagcacatttcgaatatattcacttagaaggaccgtatgtttcaaaaaaacgtgcaggtgcacaaccacttgaacatattgttcctgctaatattgaacaatttaaacaatggcaggaagcaagcggaaatctaattaaattagtaacatacgcacctgaagaagaaggagcattagagtttgagcagtatcttgctgaaactggtgttgtcggcacaatggggcatacagatgcaattgatgcgcaattaaaaaacagaaacattacacatgcaacgcatttatacaatcaaatgcgtggattacatcaccgtgaaccaggagttgttggtcatgtgttattaaatccagatgtaatggttgaagtaattacagatggtattcacattcaccctgatatggtgaaattagcatataaattaaaaggaccgaaaaaagtaagtgttattactgacgcaatgcgtgcaaaaggtcttgaagatggattatatgagcttggcggacagccagtacatgtaaaagatggtagtgctcgattagaagatggaacgctagctggtagtattctaaaaatggatcaagctttccgaaatgtaattgaatttacaggttgttcaatcgaagatgcagtactgatgacatcagttaaccaagcagaagagtttggattaaataataaaggtgcattagcggtaggaaaagatgcagactttgttgtgatgaatgaagatttacatgtatatgatacggttcgtttaggaattcatatgaaggaagggaag

SEQ ID NO: 10243 - DNA, 271 bp, Bacillus anthracis
gggtctttccgtcctgtcgcgggtaacctgcatcttcacaggtactataatttcaccgagtctctggttgagacagtgcccaaatcgttacacctttcgtgcgggtcggaacttacccgacaaggaatttcgctaccttaggaccgttatagttacggccgccgtttactggggcttcagttcagagcttcgcttacgctaacccctctccttaaccttccagcaccgggcaggtgtcaccccctatacttcgccttacggcttcgcagag

SEQ ID NO: 10244 - DNA, 297 bp, Bacillus anthracis
atgacgagatttgcgaatcagcatgtagagaacacgattttagaagaggatgtagagcttttaaaacttatggcacatccaatgcgtttaaaactgattaatgagctttcaaaacataaaacactaaacgtaacccaaatgaccgaaattttaaacatcccacaatcaacagtttcccaacacttatctaaaatgagagggaaggttctaagaggaaatcgtcaagggttagaaatttactatagcatcgaaaaccaaaaagctgaagaaattatgggattattaggaccaatacaa

SEQ ID NO: 10245 - DNA, 841 bp, Bacillus anthracis
cataattataaaaaaataagcgtcattgtaccgaactataattacgaaaaatacttatccgaacgagttaaatcaatattaaatcaaacctatcccctttacgaactaattttcctagacgatgcctccactgacaatagcgtatctatatttgaaaagctgctctcaaacgaaaataaacatcacctgaaaattcagcagattattaatgataaaaactctggttctgtatttaaacaatagataaaaggtgtctctgcagcaaccggtgattatatttggattgctgaggccgatgacttatgcgatcagacatttttagaagaagtaatacaaggttttcatatagatagtgatgttgccttaagttaccacacaatcaaaacaattagatgaccaaggaaatatattggctaaatcattattagatttacacaaatgatattgataaagaaaaatggcagagttcttatgtgcgaaaaggggatagatgaaatacaagatgggttacttatcaaaaacaccatacctaatgtctcaagtgtagtttttaaaaacatagatataaaaacaacagcaaaacaattgcgaaaagtttaaaatagccagtgattggtttttctatgtttctatccttaaagaggggaacatttatttcaatccaaaacctctaaactatcatagacgacataaaaatagtgtaacgagagcagaagattcatattcccattacagtgaagttgtacaaatgcagaattttattaaagaaacctttactatcgacgacatttcaaaaaagaaaatgtacgcatatagaaagtatcttaaagcatatttgaag

SEQ ID NO: 10246 - DNA, 1138 bp, Bacillus anthracis
gatattttaaaattactgatggtagccatccttattggattaacagcattttttgtagctgttgagtttgcaattattaaggtgcgtagcagtcgtattgatcaactcgttagtgaaaaacgacgaggagcattggcagcgaaaaaagtaacttcgaacttagatgagtatttatcagcatgtcagttaggtattacaattaccgctttagggcttgggtggttaggtgagccgactataaaacatttacttgagccgttgtttttaaaactaaactttatctcctgcaattgtctgctaccgtttcatttattattgcttttggcagttattacgtttttacatgtttgttattggtgaacttgctcccaaaacgttcgccatacaaagagcagagcaagttagcttattattatcgaagccacttattggctttaaccgaataatgtatccgtttattagggctttaaatggttcgaccccggcttgtagagaagattatttggtttacatccagcttctgaacatgaagtagctcattcagaagaagaattacgattgatcttatctgagagttatgagagccgagagattaatccaaagggaatttaaaatatgtatttacacatttttgaatttgataatagagtagccaagggaaattatgggtgcctcgtacggaaagttataggtttatattgaggacgaaccattttgaaacacatattaaaataatcgcacaagaaaaatatacgaggtatcctgtatttggtgaaagataagatgaaactcattgggatggttaatgtaaaggatttatttattcgttatatggatggtaatcgggacgaggaatgctccattacgccatatacaagaccagttattgaagtgttagaaaatattcctatacatgatttactattacaaatgcaaagaaaacatattccattagcttgctctgtatgatgaataacggaggtacagcaggaattgttacattagaagatattttagaagaaattggttggagaaatcccgaggtgaattcgaggaaggggaccccccgcttttagagcatataagtgaaagtggacactgaaaaattcttctacatgatactcgtggtttttagagg

SEQ ID NO: 10247 - DNA, 1858 bp, Bacillus anthracis
gtggctgaaagaacacatgcatgtgggaaaagtacggtagaagcagttggacaaacaggtccattaaaaagggtgggaaccaaaacagccgggatttaaggggggattaatcttttatcgaattacggggatcgtaacgggattcggacaagttgtatttaacccataaacattcaaaagaaccgctagaggtagcagaaaccattcgtaagcgaataccgtataacaccgtaaaaggaacaatttgttgaaactgggtgaaagcgcatttatgacatatggcaacaggtcgtattgaagtacaagcaacgaaagtaagcgtattaaatgcagcgaaaacaacgccaaatcattattgctgatgatacagatgcatcagaaagatgtacgtttgaaatatcgtttatttagacttacgtcgtcctgtaaatgtttaaacacatttcaaaaatgcgtcacgacgtaacgaaaacaaattcgtacttttttagatacagaaagagttctagaaagtgggaacaccaattttacgaaagagcacaccagaaggcgctcgtgactatttagtaccaagtcgtgtacatgacggtgaattctatgcattaccacagtctccacagctatttaaacagcttcttatggtcggtggatttgaagcgttactttcaagtagcacgtgttttccgtgacgaagatttacgtgcggatcgtcaaccagaatccacgcaaatcgatatcgaggccttcattcttaacacaagatgaaattttagatatgatggagcgcatgatgaacgaaatgttatgaagggatgcaaaaagggtgtagaagtttagcgccaccattccccttggtatgaaaatatgctgatgccaaatggctccgctacggcttttgataaggcaagataccacgcttttgaaatggaacctaaccagacttattctgagtttgcagccagggttgtgtctttaaaagtatttacaaagtgctgtagaaagcgggcggaccaagtaaaagcaaatttatgcaaaaaggtgctgcgagcaaatactctcgcaaagatatcgatgcataaactgaattcgtaaagttatacggtgcaaaaggtttaagttgggtttaaagggaagaaggccggttaaaaaggaacaatcgcgaaattttttcggtgaagaagatgcgagcgtgttaatgaatacattagaagctactgctggtgacttattactattcgtagcagataagaagagcgttgttgcagatagcttaggcgcacttcgtttgcgtctaggtaaagagcttgagttaattgacgaaagtaaatttaacttcctatgggtaacggattggccacttcttgagtacgacgtagatgcagatcgttacttcgcagctcaccacccattcacaatgccattccgtgaagatgttgagctattagaaacagcaccagaaaaagcacgtgcacaagcatatgaccttgtattaaacggttatgagcttggcggtggatcacttcgtatttacgagcgtgacgtacaagaaaaaatgttcaaagcacttggattctcacaagaagaagcacaagagcaattcggattcttattagaagcattcgaatacggtacgccaccacacggtggtatcgcattaggtttagaccgtcttgttatgttacttgcaggccgtacgaaccttcgtgattcaattgcattcccgaaaacagcaagcgcaagctgcttattaacagaagctccaagcccagttgcagaagcacagcttgaagagctgaacttgaagttgaacgtgaaagaagagaagtaagaaaaaagtctagatggttatactatagcc

SEQ ID NO: 10248 - DNA, 680 bp, Bacillus anthracis
tatcactgcaaccttcgcggtgacgtcgttacgataacgaatcaggataaagaagttgtagcaacgtatgaatatgatgcatggggtaatgtagtaaagagtgatacgaaaggtatcgcagtagataatccatttggatatgcgggatacatgtatgataaagagattggtatgtattatttgattgcccgttactataatccagaacatggtgtgttcttatcagtggatcctgatccgggtgatgaagatgatccggttacaatgaatgggtatacgtatggtgataataatccagtgatgatgattaatccagatggtcatttagcgtgggtttattccagtccctggacccgaaggcgaaaattccttgctccccatgtaggctccttttgttggacaacaattggctaaacgtgctataacgcaaccattaaagtacaagaatacgaaagcagtaaccgggtaaaattattggatataccaaaccatgggggttcacccagccgattagtccgaaataaggcattagggggtgtcacccaaaggccttcttacatacaggttaagtcaggtaagatggttatacaaaaagatcggtggaactatttaatttacttattaacaaactgtgggtggttttaattaaaagggggaaaatctttacgcccttttgctag

SEQ ID NO: 10249 - DNA, 1758 bp, Bacillus anthracis
atgcttaaagaagccatttatcataggccaaaagataattacgcatacgcttacgatgaaaaaacgattcacatccgaatacgtacgaaaagagacgatgttcaaagcaccactcttatttatggtgatccttatgaatggaaagacgggaagtggatttcttcaagtacaccgatgaaaaaaactggttctactgcattgtttgattattggttcatttccatcgagccgaaatttaagcgcttacgttatggatttgaattaaaaaacgatacagacactcttatttatgcagagcgaggatttttttctaccactccaaatgatgacgttggtaactttttctgttttccatttattcatgcaaatgatgtattcaaagcaccttcttggattaaagatactgtttggtatcaaattttcccagaacggttcgctaatggagatcatacgctgaatccagaaaacacccttccttggggcagcgctgagccaactccaactaattttttcggtggagattttgctggtattattcaaaaccttgattaccttgttaagcttggaatttcaggaatatatttcacacctattttcaaagcacattcaaaccataaatatgacacaattgactacatggaaatcgatccacaatttggtacaaaagaaacattcaaagaactcgttcaggcatgtcatacacacggtataaaagtaatgctcgatgctgtattcaatcacagtggatactttttcgataaatttcaagacgtactacaaaatggtgagcagtcagcatataaagaatggttccatattcatgagttcccaattagaactgagccactcccgaattatgatactttcgcgtttacaccgtatatgccgaaattaaacacagcgcacccggatgtaaaagaatacttacttgaagtagggcgttattgggtgagagaattcaatatagacggttggcgccttgatgtagcaaatgaagtcgaccataacttttggagagaatttcgaagtgagataaaagcattaaattctgaagtatatattttaggagaaatttggcacgatgcacttccatggctacaaggagatcaattcgatgctgtcatgagctatcctgttacaaacgccctactgtcttactttgctaacgattccattaaggcaaatgaatttatgaaacaaattacagaatctctacattcctactctatgaatgtaaatgaagcagcatttcatttattagatagccatgatacaccaagaattttgacaacatgtaacggagataaaaataagttaaaattactttatgtattccatctttctttcatcggctctccttgtatttattatggagacgaaattggtatggacggcggtatggacccagattgtcgcaaatgtatggtttgggatacggaagaacaagatcatacattatttacacatgtacaaacattaatttcattacgaaagcaatataaagcatttggaggacatggtactttccaattcattgaagcaaatgatgaatataattatatttcttatacgaaaacatatgaagatgaaacgatctttttcgttttaaatccgactaatagtgatattacagcttcactccctctccatgttactggaaagaaaatcattaatatttatacaaacgaagaattttcagcggaagcaagtgtattacaagttacacttcctccatatggattctccatattaaaatgg

SEQ ID NO: 10250 - DNA, 183 bp, Bacillus anthracis
atgttaagagcacgccatctcccgtttgagattactccaaaacgagcagaggcttggctatcatgcatggagcaagcaatggatgacacaggagtgcacggtcatataagagagttcgtttttgaacgtttagcattaactgctcagcatatggttaatactccaaatgaaacaggtgaaata

SEQ ID NO: 10251 - DNA, 853 bp, Bacillus anthracis
aacttacaaagtaaagcagtattaaataacggtgtagaaatgccttggttcggtttaggtgtatttaaagtagaagaaggaccagaacttgtagaagctgtaaaatcagcaattaaagcaggataccgcagcatcgatacagctgcaatttacggaaatgaaaaagctgtaggtgaaggaatccgtgcaggtatcgaagcaactggtatttcaagagaagatttattcatcacttcaagaagtatggaacgcagatcaaggatatgaagaaacaattgctgcatatgaagagagcttaaaaaaattagaactagattatttagatctgtatcttgttcactggcctgtagaaggaaaatataaagatacatggagagcgttagaaacactttataaagaaaagcgcgtacgtgcaattggagtaagtaacttccaaagtacatcacttacaagatgtaatggaaagatgcccaaaatataacccctggtttaccccgtggaatactcaccccccttttacaccaaaaagaaaaacaaactttcttgttaagaccaagtgttttccaaggggaagcatggtcaccattaatgcaaggtcaattattagataacgaaacattacaagagattgctgagaaacacggtaaaacaacagcgcaagttattttacgttgggatcttcaaaatggagtaattacaattccaaaatcaacgaaagaacaccgcattattgcaaacgctgatgtatttaactttgaattaacgaaagaagatatgggaaaaaatcgatgcgttaaaccaaaatcaccgcgtgggtccagatcctgataacttcgatttctaagattaaggg

SEQ ID NO: 10252 - DNA, 390 bp, Bacillus anthracis
ttggcacaggttcaatactatggcactggacgtcgtaagagttcagtagcgcgcgtacgcctagtttcaggcgaaggacgcgttatcattaacggtcgtgattttgaaaactatatcccatttgctgcattacgtgaagtagtgaaacaacctctagttgcaacagaaactttaggtaactacgatgtacttgtaaacgtaaatggtggtggatacactggtcaagctggtgctattcgtcacggtatttctcgcgctttattaaaagctgatccagaataccgtctaacactaaaacgtgcaggtctattaactcgtgacgcacgtatgaaagagcgtaaaaaatacggtcttaaaggcgcacgtcgtgcacctcagttctcaaaacgt

SEQ ID NO: 10253 - DNA, 1257 bp, Bacillus anthracis
atgaagaaagcattatcattattaactgtttcagcattatcaattggtatgttatctgcatgcggaccgaaagattcagggaaaaaagaagaaagtaaagcaaagaaagattacgatctactcgtttgggaagatgataaaaaaggtgttggtctagaaccagcagtgaaaagctttgaggaaaaatataaagtaaaagtaaaagttgttgaaatgcaaatgacagatcaagtgaagaagttacgtcttgatggaccagcggggacgggaccagatgttgtaacattaccacatgatcaaatcggaaacgcagtaacagaaggtttactttctgaagtgaaagctgatgatgctgtaaagagtaaatttactgattcatcaatagaagcacaaacgtataacggaaaattatatggtttaccaaaagcaattgagacaccagtctttatttacaataaaaagctaatgccaaaagcgccagaaacgatggacgagctgtttaacttctcaaaagaatttacgaaagatggcaagtacggatttttagcattaggagataacttctactttgctaatgcatttatggcaggtatgggtggctatgtgtttggtgaaaaagatggaaaaccaaatgcaagtgatgttggattaaataatagcggagcagtacaaggtgctgagtatcttcaaaaatggtacaaagaaaaattattcccgaaaggtattatcggtgaatctggtggacctgctgctgatggactatttaacgaaggaaaagcagcatctatcatgaacggcccttgggcgttccaagccatggaaaagaacggaattgattatggcgttgctccaatgccgaaattaccaaatggtcaaccattgaaaacgtttgtcggggttaaaggatggcatgtaacaagcttctctaaacaaaatgatttagctactaagttcactgaatgggtaacgaacgaagaaaacgcaaaaattcgatttgagaaaacaaaagaaatccctccagtaaaagcagtaatggaagatccaattattaaagataatgaagctgcaaaagcagttgcaacacaatctgaaaatggaattccaatgccaaatattccagaaatgcaagaagtttggaaaccagctggagatgcgcttcaattagttgttacagataaagaggcaccaaaggcggcgcttgatagtgcagtgaaacaaattaaaggtaatattgaggcaaatcatagcaagcaaaaa

SEQ ID NO: 10254 - DNA, 873 bp, Bacillus anthracis
atgtggcaacaaaaaagctttcaacaaaatgaaaagggagttttatatttagtaccaactcctattggaaatttagaagatatgacatttcgtgcaatccgaattttaaaagaagctgatttaattgctgctgaagatacgagacaaacgaaaaaactttgtaattattttgaaattgaaacgcctgttatgagttaccacgagcataataaagaagtaagtggaaagaaaatattagagaagttagatgaaggaaagactgtggcacttgttagtgacgctggtatgccgtgtatttccgatccaggctatgatattgttgtcgaggcagtagctgagcaatatcatgtaatcccgcttcctggggcaaatgcagcacttacagcattaattgcatcaggccttcaaacaaaacagttttatttctatgggtttttacaaagaaataaaaaggaaagaaaaatggagttagagaagcttcgttacgtacaaactacaatgatgttttatgaagcacctcatcgcctggatgatactttaatctcgatgcaagaagtattaggaaatagagaaattgtattatgtcgagagttaacgaaaaaattcgaggaatttattcgaggaacagttgaagaagcaattgagtggacgaaacaaaatgaagttcgtggtgagttttgtattttagtagctggttcaacggaagagcctgctccagaagaacaatggtgggaatctatttcagtatataatcatattgaacattatataaatgaaaaaggtatgaattcaaaagaggcaataaaaacagtcgctaaagatcgagatttgtcgaaacgcgatgtatatcaaatctatcatgtcgataaaaaa

SEQ ID NO: 10255 - DNA, 2655 bp, Bacillus anthracis
ttgaacaggtatacaaaaatcattgttgctatgtttttaatgatatttacattcgtatcaacattacaaccacttgcagttcaagcagctaccaagttggctgacggtgaatattcaattgggttcaaagttttaaaagatacatcagatgaagaatcgatgatgaatcaatattcagtaagccccgggactttaaaagtgaaggatgggaaaaagaaagtatcctttacattaacgaatagttcatggattacgaagtttgaaacagaaaaagcaggtaagctagttgcgacaaatgtaattagtgaagataaagaaaaagatacaagagtagtagaatttgatgtagaagatgtagagaaggtattaaatgcaaaagtaaaagtagatattgattttttaaattatcatcatgagtacgacgttcgtattgcatttgatcaaaatagtattacaccgattcatgtggaacaaccaaatgaaaaagaggacccagctaataagccagatccaaatgaaaaaccggatccaagtcagaagcccgaccaaaagcctgacccagatcaacaaccaaattctaacacaattaaagatggagagtacagcattccatttaaagtgttaaaaaatcaaacagatgaagaatctaagatgaatacttacatggtaaatccaggagtattaaaaatagaaaacggtaagaaaaaagcaattgtaacattaaaaagtagctcattaattaaaaatttccaaacggaaaaagatggtgcatttgttgacgcaaaagtagtgagtgaaaataaagaaaaagatacaagagtagtagagttcgaagtagctgatctatcaaaaaaactaaatacaaaagtatttattgagatggcatcaagaaattataaacaaacgcatgatgtacaacttttatttgaacaagataaacttgaacaaattaaaaatgaagagaaacaaccagaggtagaaaaaccggaagtagaaaaaccagaagtagaaaaaccagaagtagaaaaaccagatgaaaataaaaaaacagatgctgaaacaattaaagatggtgaatacagcatcaattttaaagcgttaaaagatcaaacagacgaaatttcaatgatgaacacatatacaaaaagtccaggtttgctaaaagtaaaagatggtaagaagtatgtatcatttacgttaacgaacagttcttggattacaaaatttgaatttgagaaaaatggttcgtttgttgatgcaaatgtaataagtgaagataaaaaagctgatacacgtgtagtggaagtagcagtagacgatttatcgaaaaagttaaatgcaaaagtaaaagtagatatcgattcaatgaattatcaccatttctatgacattcaatttgcatttgataaaggtagcattaaaccgttagacaaccaaggcggaaacgacaaccaaggcggaaacaataaccaaggtggaaacaacaaccatgacgataacaaaacaattgatcccaatgctcttaaagacggtgaatacagtatcggttttaaagtgttaaaggataagactgaagaaatttcaatgatgaacacatatacaaaaaatccaggtgtgttaaaagtgaaagatggtaagaagtatgtatcctttacattaacaaatagctcatggattacgaagtttgagtttgagaagaatggtgcgttcgtcgatgcgaaagtattaggtacaaataaagagcaagatacaagagtagtagaagtggaagtagctgatttatcgaaaaagttaaatgcaaaagtgaaagtggatattgattcaatgaattatcaccatttctatgatattcaatttgcatttgataaaggaagtattaaatctttaggtaaccaaggtggagatactaaccaagatggtaatggtaatcaaggcggaaacgacaaccaaggtggaagtaacaaccaagatgataacaataaccaagatggaacgaataatctaaatgaaaatccaacagttgatccgaaaaatttaaaggatggtcagtacgatattgcttttaaagtgttaaaagataagactgaagaaatttcaatgatgaatcaatatgttgtaagtccagcaaggttaacggtgaaagatggtaagaagtatattgcaatgacactaaaaaatagtgaatggattacaaaattccaaacggaaaagaatggtggatttgcagatgcaaaagtagtaagtgaagataaggccgcaaatacaagagtcgtagaatttgaagctaatgatttatttgcaaaattaaatgcaaaggtaaaagtagatatcgattcaatgaactaccatcatttctacgacgtacaaattcaatttgatccgacgaagattggtgctgtaggaacggtaaaagaagagccgaagaatgaaccgaaaaatccggtaattacgccgaaagtagataatgtaaaaacaattgctacgcctgattttaaccgaaatgcagatggtaagaagaaaaatgaagctacaaataatgatgcgaaaaaagaaaaaaactcaaaaacagcagatacagcacaacttggtttatacatggtgttactgctaggttcacttgctttactagttcgtaaatatagagcaggtagattg

SEQ ID NO: 10256 - DNA, 3114 bp, Bacillus anthracis
atgaacaaaattattaatttttcgttaaaaaataagttcgcggtttggctactaaccattatcgttaccattgcagggatttattctgggctaaatatgaagctggaaacaattcctgatattacaacacctgttgtaacagtaaccacggtttatcctggtgctacaccagaagaagtagctgataaagtttcaaaaccgatggaagagcaactgcaaaatttaagtggtgtaaatgttgttagttcatcatcttttcaaaatgcatcttctattcaggtagaatatgattttgataaaaatatggaaaaggctgaaacggaaataaaagacgctcttgcaaatgtaaaactgccagaaggcgtaaaggatccgaaagtttcacgtgtaaacttcaatgcctttcctgttatttcattaagtgtagcaagtaaaaatgaatctttagctaccttaactgaaaatgtagaaaaaaatgttgttccaggattaaaaggacttgatggggtcgcatctgttcaaatttcaggtcaacaagtagatgaagtacaacttgtctttaaaaaagataagatgaaagaattaggtttaagtgaagatactgtaaaaaatgtaattaaaggatcggacgtatctttaccacttggcctatatacatttaaagacacagaaaaatcagttgttgtagatggaaatattacaacaatgaaagcattaaaagaactaaaaatccctgctgttccttcatcagcaagcagtcaaggaagtcaaactgctggagctggtgcacaaatgccgcaaatgaatccagccgctatgaacgggattccgacagttacattaagcgaaattgctgacattaaggaagtcggaaaagcagaatctatttctcgaacaaatggaaaagaagcaattggaattcaaattgtcaaagctgctgacgccaacacagttgatgttgtaaatgcagtgaaagataaagtaaaagaacttgagaaaaaatataaagacttagagattatttcaacattcgaccaaggtgcacctattgagaaatcagtagaaacaatgctgagcaaagccatttttggtgctatttttgcgattgttattattatgctgttcctacgaaatatccgaacaacattaatctctgtcgtttccataccactttctttattaattgctgtattagtcataaagcaaatggatattacacttaacattatgacgctcggagcaatgacagtcgctatcgggcgggttgtggatgactctattgttgttattgaaaatatttaccgacgtatgtcattgtcagaagagaaattacgcggaaaagatttaattcgtgaagctacgaaagaaatgtttatcccgattatgtcttctaccattgtaacaattgctgtattcttaccacttggactagtaaaaggcatgattggcgagatgttcttaccattcgccttaactatcgtcttcgctttattagcatcattactagtggcagttacaattgtgccaatgctagctcattctttatttaaaaaagagagcatgagagaaaaagaagtacatcatgaagaaaaaccaagtaaattagcaaatatttataaacgcatacttgcatgggctttaaatcacaaaattattacatcaagtattgctgtccttctattagttggtagtcttgcacttgtgccaattatcggtgtaagtttcttaccatctgaagaagaaaaaatgatcattgcaacgtacaaccctgaaccaggtcaaacgttagaagacgttgaaaaaattgcaacgaaagctgagaagcacttccaagataataaagacgtcaaaacaattcaattctcattaggtggcgaaaacccaatgagtcctggtcaatcaaaccaagcaatgttcttcgtacaatatgataacgacacaaaaaactttgaaaaagagaaagaacaagtcgttaaagatttacagaagatgtctggaaaaggcgaatggaaaaaccaagacttcggagcaagtggcggtagtaacgaaatcaaactatacgtttacggagatagctcggaagacattaagcctgtcgtaaaagatattcaaaatatcatgaagaaaaataaagacttaaaggatatagactctagtattgcaaaaacatatgcagaatacactttagtcgctgatcaggaaaaactaagtaaaatgggtctaacagctgcacaaatcggaatgggactttctaatcaacatgatcgccctgttctgacaacaattaaaaaagacggtaaagatgtcaatgtatatgtagaagctgaaaaacaaacttatgaaacaatcgatgacttaacaaatcgtaaaattacaacgccacttggtaatgaagtggctgtgaaagatgtcatgactgtaaaagaaggagaaacttcaaatacagtgaaacaccgcgatggccgtgtttatgcggaagtaagtgcaaaactaacatctgatgatgtttcaaaagcatccgccgcggttcaaaaagaagtagataaaatggatcttccttctggcgtagatgtttctatgggcggcgttacaaaagatattgaagaatcattcaaacaacttggcttagcgatgttagctgcgattgccattgtatacttcgttcttgtcgttacatttggcggtgctcttgcaccattcgcaattttattctcgctaccatttacaatcatcggagctcttgttgccttactaatctctggtgaaacgttaagtgtctctgcaatgatcggtgcgcttatgttaatcggtatcgttgtaacaaacgcaatcgtgcttatcgaccgcgttattcataaagaaaatgaaggtctatcaacacgtgaagctttattagaagctggtgcaacacgccttcgcccgattttaatgactgcaattgcaacaatcggtgcccttatcccgcttgcattaggatttgaaggtagcggcttaatttctaaaggacttggtgtaacagtaattggtggattaacaagttcaacattattaacacttcttattgttccaatcgtttatgaagtattaagcaagttcaaaaagaaaaaagcaaaa

SEQ ID NO: 10257 - DNA, 1028 bp, Bacillus anthracis
agggcaaaacgtaaattagatcatattgaatacgctctttctactggtcagtctcgtacgcatggctttcatgatattgaatttgtgcatcaaagcttgccaaattcaagttatgaaacaataacatgtgaaacaaaaatcggcgaactttcactaagttcgccgatttttatcaatgcgatgactggtggtggaggagagaaaacgttacatattaatgagcaattagcatatgtagcgaaacatcataaccttgctatggctgtaggttcgcaaatggcggcgttaaaagatgaaagtgaagctgcttcttataagattattagaaaggtaaatccaaatggtattttctttgctaatttaggtagtgaggcaactgttgaacaggcaaagcgtgctgttggatatggttggagcgtatgcattgcaaattcatttaaatgtcatacaggagttaacgatgccagaaggagaccgtgactttactggtgtacttcagcgtattgaggaaattgttttaaatagtaaagttcctgtcattgtaaaagaagttggatttgggatgagtaaggaaacaatgcaacagttagcgagcgtaggtgtaacggcaattgatattggcggacaaggtggtacgaattttgctgctgttgaaaatgaaagaagacagcgaatgctttcttattttaataactggggcatacaaacagctacctcgattattgaagcaacctctacaaataataacctctcttttattgcatctgggggtatacaaacagcgcttttacttacagagagcaatcgcattaggggcgaatacaactgcgtttgctggatactttttacgcattttaatggaagatggtatcgagaagttggtggacgaaattgaccttttacatacagatttgaaatttattatgacagctctcggtgcaaagacgatagaagagttacagtccgtacctcttgttataaagggtgaaacgtatcattggttaacgcagcgtggcattgatacgacg

SEQ ID NO: 10258 - DNA, 1473 bp, Bacillus anthracis
atgaagttgcatacacttgtatcatgtttgcatgattttccagttgttccaaaagaaaatccagaaatcacatctatagaagctgattcacgtaaagtgaaagagggaagcttatttgtatgtatgaaagggtatacggttgatagccatgattttgctaagcaagcagcggcacaaggagcggctgctattgttgcggaaagaccaattgatgttgacgttccagttgtacttgtgaaaaacacttttcgttcgttagcggttttagctgattatttttatggtcaaccaacacacaagttacatttaatcggtattacaggtacaaatggaaagacaacaacatcgcatattatggatgagattatgcgcgcacatggtcataaaacggggctaattggaacgattaatatgaaaatcggtgatgaaacatttgaggtgaaaaatacaacgccagatgcactaacacttcaacagacgtttgcaaaaatggttgaacacggtgtggatagcacagtaatggaagtttcatcacatgctttagatcttggtcgtgtacacggatgtgattacgatgtagcggtgtttacaaatttaacacaagatcatttagactaccataaaacgatggaagaatataaacatgcaaaagggttgctatttgcacaacttggcaatagttataatcataatcgcgaaaaatacgcggtactgaataacgatgatgctgtaacagtggaatatatgagaagtactgcagcaactgttgtaacgtatggaattgatacaacaagtgatgttatggccaaagatatcgctatgacaagtggtggaactacatttacgcttgtaacaccgtatgaaagtgtaaatgttacgatgaaattaattgggaaatttaatgtatataatgtactagctgcaacagcggcaggacttgtttctggtgtaagtttggaaacaatcattgatgtaataaaggaactagctggagttcctggacgtttcgaagtagttgatggtggccaaaattatacagttattgttgattatgcacatacaccagatagcttagaaaatgtattgaaaacagcaaagcagtttgcaaaaggtgacgtatattgcatcgtcggttgtggtggtgatagagatcgaacgaagagaccaatcatggcaagtgttgccacacaatatgcaactcacgcaatttacacttcagataatccaagaagtgaagatccagcggctattttagatgatatggtacatggtgcaaatggaaataattatgaagtgattattgatagaaaagaagcaatacaccatgcgatcactaaagcgaaagcagatgatatcattattattgctggtaagggtcatgaaacatatcaaattattggtaaagatgttcatcattttgacgatcgtgaagtcgctaaagaagcaattacagagcgtttaaacaacgaagag

SEQ ID NO: 10259 - DNA, 273 bp, Bacillus anthracis
atgaaagaacaaaaagaaatgtttgaagaaatctctgaagtactaaaggtattggcgcatcctgtccgtttatcattagtaaaaataatgcttgcaaaaggtcctactaatgtaacaacaatgtatggggatttggaaatgcctcaaagtacaattagtcaacatttatctaaactaaaagctgctaaaatggttacaggtactcgaaaaggattagaaatttattatgaagtaactgacaatcgcacaaaatcaatattagcatgtttagtt

SEQ ID NO: 10260 - DNA, 645 bp, Bacillus anthracis
ttgaagtttaataaggacgtaaaagaaaaacttttatttcatgttacaataaacgtaattgttattagaaatatgatagaaaggttgaaagtaggtgacatcatgggaaaaatcattgctattgccaatcaaaaaggtggcgttgggaaaacaacaacatctgttaatttaggggctggattggcacaagtaggtaaaaaggtccttcttgtagatattgacgctcaaggaaatgcaacgactggtgtgggaattgaaaaatccgaattagatcaatgtatttacaatgttcttgtggaagatgcagatgttcaaggggttatacagaaaaccgcaactgaaaacttagatgttctacccgctacaattcaattagcaggtgctgaaattgaattggtaccgactatttcccgggaagtacgtttgcaaagggcattacagccagttcgtgatgaatatgattatattattatcgactgtcccccgtccttagggttattaacgattaatgcattaactgcagcggattctgttattattcctgttcaatgcgaatattacgcactagaagggttaagtcagctattaaatacagttcgacttgtgcaaaagcacctttccagcacactggcaagctggagtgtc

SEQ ID NO: 10261 - DNA, 2241 bp, Bacillus anthracis
atgatttggaattggctacgtaagaaaaaaaaattaaatacaacagagaaaaacgaaacagataattcggagcaaaaacctaacaatcaagaggatgacaacaaagaacagactagaagtacgaaacataataaaagtaacaatagcgagcaaaaaaaagaggaacacaaggaatcttctcaagataagcagcaaaatcaatcgaatcaaaatcagcaacaaagtgctaaacaagatgaatcttctcaggggcaacagaatcattctaagcaagacgactccgatcaggggcaacagcaacactctaagcaaggcaactccgatcaggggcaacagcaacactctaagcaaggcgactcgaatcaagggcaacagaatcattctaagcagaacgactccgatcaggggcaacagcaacactctaaacaagatgaatcttctcaagagcaacagaatcattctaagcaagacgactccgatcaggggcaacagcaacactctaaacaagatgaatcttctcaagagcaacagaatcattctaagcaagacgactccgatcaggggcaacagcaacactctaaacaagatgaatcttctcaagagcaacagaatcattctaagcaagacgactccgatcaggatgattcattccaggatacgcagcaaagctccaagcaagatgatttagcacaagataaacagcaacactctaaacaagacaactcagatcaggataagcaacaaaattctaaaggtaatagtatttatgatttttcgaaaccagaaaaagatcgtattcattctttacaagatttaatagagaaactgaaaaagtctagtgattttgtgaattatcatacatctgacgatgaaacgatgccttattggatttcttactatcgtccttcacttgatggtgagaaattgcaaaagtatttaatgcctactcttttagaacgacctaacgcatcactagaagagctgaaggaacatattccaatgagcggcattacaattacaaacgatttacaaaaaattgaggacatggttttaaagggacatgcgattgttcaagtaaatcaacaagatcaaaaatgtatgctcgcaaatattgcaattgataattatcgtgcaccaactccacctttaaacgaatcgactgttattggtccgcaagaaggttttgtagaggacattgacacaaatattaatttagttcgaaaacgtcttcctgttttagatttacaaacaaaagaaatgattgtcggtgagttttccaaaacaaaagttgtcatgatgtatttagacaatctcgctgaaaaagataatgtagattttctcgaggaatcattacgtgctcttgaatatgatcaaattaatgatagtgcttatatacaagaattgatgggagaaaagtcgatttttcctctttatatcaatacagaacgcactgatagagttacaaaagcattaatcgatggaaaaatcgctatttttgtggacggttctccaagtgttttattaacacctgtatcctatttcgattttttcatttcaccagaagactacaacgtctcttggctatacgctacattttcaaggattttacgccttatcgccgttctattctcgatatgcgctacaccgttatacgttgcagttttaaattatcattatgaactcattccaagtgatttacttgaaactttaattttatcaagggcacaagtaccattcccacctttaattgaagctctctttttagaactcgcaatcgacttattgagagaagctggggcgaggttaccgatgaaagttggtcaaacgctcggtattgtaggcggtatcgtaatcggacaagcatctgtacaagctggtttaacgagtaatattttattaattatcgtcgccttatcagcactcgcttcctttattacacctatttataaaatggggaatgcggttcgattactacgcttcccgtttctcatatttgcagaaataggaggacttttcgggatttctcttgggtttatctttttatttactcatctatttagacttacttccttacgtaaaccatacgctttgttttatccaacaagacaacaatctgttaaagattcttggattcgttttcctttaacaatgattgatacaagagatgtacaagcaaggccacagcatgtaaaaaaatcagcaaaaggaatttcaacaaaacatagatcggactttgatgat

SEQ ID NO: 10262 - DNA, 1239 bp, Bacillus anthracis
gtggatcatttaaaacgtcaagatgaaaaggtatttgctgcaattgaggcagaactaggaagacagcgttcgaagattgagttaattgcttcggaaaacttcgtaagtgaagcggtaatggaggcgcaaggttctgttttaacgaataagtatgctgaaggatatcctgggaaacgttactatggtggttgtgaacacgtagacgtagtagaagatatcgcacgtgatcgcgtaaaagaaattttcggcgcagagcacgtaaatgttcaaccgcattctggtgcacaagcgaacatggcagtatacttcacgattttagagcaaggcgatacagtacttggtatgaatttatctcatggtggtcacttaacacacggaagccctgttaacttcagtggagtacaatataatttcgtagaatatggcgtggatgctgaatctcactgtattaattacgatgatgtattagcaaaagcgaaagaacataaaccaaaattaatcgttgcaggtgcaagtgcataccctcgtgttatcgatttcaaacgattccgtgagattgcagatgaagtgggcgcatacttaatggttgatatggcacatatcgctggtttagtagctgctggtttacatccaaacccagtaccacatgcacatttcgttacaacgacaacacataaaacgttacgtggcccacgtggtggtatgattttatgtgaagaacaatttgcaaaacaaattgataaatcaatcttccctggtattcaaggtggtccacttatgcacgtaatcgctgcaaaagctgttgcgtttggtgaggcacttcaagatgatttcaaaacatatgcacaaaatatcattaacaatgcgaaccgcttagctgaaggtcttcaaaaagaaggacttacacttgtttctggtggaacagacaatcacttaatcttaattgatgttcgtaacttagaaatcacaggtaaagtagcagagcacgtattagacgaagttggtattactgtgaacaaaaatacaattccatttgaaacagcaagcccatttgtaacaagtggtgtacgtatcggtacagcagctgtaacatctcgcggtttcggtttagaagacatggatgaaattgcttcacttattgcttacacattaaaaaatcatgaaaatgaagctgcattagaagaagcacgtaagcgtgtagaagcgttaacgagcaaattcccaatgtacacagatcta

SEQ ID NO: 10263 - DNA, 633 bp, Bacillus anthracis
atgcgaataattaaggagtatgaggaacgtagaaaagaaattttagaaacggcagaacgattatttcttacgaaaggttatacgaaaacaacagtaaatgacattttaaaagagatagggatagcaaaggggacgttttatcattattttaaatcgaaagaagaagtaatggatgagattattatgaggattattaaagaagatgttgctaaagcgaaagtaatcgtctctaatccaaatataccagtattagaaaagttatttcgagttttaatggagcaatctccaaaatcaggtgatataaaagataaaatgattgagcaatttcatcaaccaaataatgcagaaatgtatcaaaaaagtttagtgcaatctattattcatttatctcctgtattaacagaaattttagaacaaggaattgaagaagggatattttcgacttcatatccacaagaaacgattgaactattactatcttcagcgcaagtcatatttgatgaggggttattccaatggaagccggaagaaatgatgaggagagtgaaagcttatattaaaatgatggaagtatctgttggagcgaaagaaggatcttttaattatatgctggaggttttaatgaaacagagg

SEQ ID NO: 10264 - DNA, 2467 bp, Bacillus anthracis
tttggaagatttacagaaagagcacagaaagtattagctttatctcaagaggaagcaattcgtattgggcataacaatattggaacagaacatattttacttgggcttgtacgcgaaggtgaaggaattgcagcaaaagcgttgattgctcttggattaagtccagagaaggttcaaaaagaagtagaagcgttaatcggacgtggaacgagaagcttctcaaactgtacattatacaccgcgtgctaaaaaggttattgagctgtctatggatgaagctcgtaaattaggtcattcttacgttggaacagaacatattttacttggtttaatccgcgaaggtgaaggggtagcggcacgcgttttaaataacttaggtgttagcctaaataaggcaagacaacaagtattgcaacttcttggaagtaatgaagcaagttcaggtcaccaaggtgtgttcttcaacaaatgcaaatacaccaacacttgatagcttagcgcgtgatttaacagttgttgcacgtgaaaatcgtttagaccctggtattggacgtggtaaagaaattcaacgtgtaattgaagttttaagccgtagaacaaaaaacaatcctgtattaatcggggagcctggtggagggaaaacggcaaatgcgcgaaagattagcacaacaaatcgtaaataatgaagttcctgaaactttacgagataagcgtgttatgacactagatatgggtacagtggtagctggaacgaaataccgtggtgaatttgaagaccgtttgaaagaaagtaatggatgaaattcgccaagcgggaaatatcattctatttattgatgaacttcatacattaatcggtgcaggtggagcagaaggtgctattgacgcatcgaatattttaaaaccatctttagctcgtggggaattacaatgtatcggggcgacaacgttagatgaatatcgcaaatatattgaaaaagacgcagctttagagagacgttttcaaccaattcacgttgatgagccaagtttagatgaaatcactcaaattttgaaaggtttacgcgatcgttatgaggcacatcaccgcgtatctattacagatgatgcaattgatgcagctgtaaagctttcagatccgtatattacagatcgtttcctaccagataaagcaaattgatttaattgatgaagctgcttcaaaaggtcgcttacgctcttataccacaccaccaaatctaaaagagcttgaagtgaagcttgaggaaattagaaaagaaaaagatgcagctgtacaaagtcaagagtttgaaaaagctgcttccttacgtgatatgggaacacgttttacgcgagaagttagaagatacgaagcgtcaatggaaagaacaacaaggaaaagaaaactcagaagtgacagtagaagatatttgcaatgttgtttctacatggactcgtatcccggtttctaaacttgcacaaccagagactggataattatttaactttagaatccatccctttcacgatcgtggtattgggtcagaatgagcggtagtagctgtaacgaaagctggttcgccgtgctaaagcaggatatgaaagatcccaaacgtcccattgggtccatttatttttcttagggccaacaggtgtaggtaaaacggagctagcaagagcgttagcagaatctatgttcggtgatgaagatgcaatgattttcctcgatatgtcgtgagtacatgggagaagcattctacttctcgtttagttgggtctcctccaggggtatgttggatatgaagaaggtggccatttaccagaaaaggtttcgccgtaagccatattcagttgtcctattagacgaagtagagaaagctcatcctgatgtgttttacattttactacaagtattagaagatggtcggcttaacagattcgaaagggcgtacggttgatttccgcaatacaattgttattatgacatctaacgttggtgcagaggcgttaaaacgtaataagcatcttggatttaacgtacaagatgagagccgcgattattcggatatgaaaggtaaagtaatggatgagctgaaaaaagccttccgtccagaattcttaaaccgtattgatgaaattatcgtgttccatatgcttgagaaaaaacatattcaagagattgtaacacttatggtaaatcagttagtaaatcgcttaaaagcagcaagaaattgaattgcatttaacagaaggagcaatttcggctattgctgataaagggtttgaccgagagtacggtgctcgcccgccttcgtagagcgattcagaaacatgtagaagatagactatcccgaagaactgttaaaaggtgctattgaagaaagggcagaaagttatctttgatgttgaaggagaatcatttgtcattcatagggcgcgaaaggttaaaataagtttaggcaaattt

SEQ ID NO: 10265 - DNA, 684 bp, Bacillus anthracis
agaacgaaggaagttgagataattggtgaggctgattgtgtagaggacgcattagaagagttaatgaaaaacaaaccagatattgttttcctagatattcaattatcggatgataacggattcgaaatcgcgaatatattaaagaagatgaaaaatccacctgcaattgtatttgcgactgcctatgatcaatacgcgttgcaagcatttgaagtagatgcgttagactatattttaaagccatttgatgaagaacgtattgtacaaacattaaagaaatataaaaaacaaaaacaatcgcaaatagaaatgaagcaagaaataaaaggggcagatgtaacggcagagatgcataaattagcattaccaattgaggaatcgattgttcttgtaaatattgaagatattgtatatgtagggcttgtggacggaaaagtgacagtaaaaacagtgagggaaacatatgtaacacacgatacgcttgtaatttttggaaaagaagttgcccacaagcaagtttcatgcgtgtccatcgtagctttattgcaaatattaatcatattactgaaatttcagccatggttcaactctacttataatttaattatgaaagaaggatcaaaagtacctgttagtcgtacatatgcaaaagaactcaagaagctgcttcgtatttaagaagca

SEQ ID NO: 10266 - DNA, 1008 bp, Bacillus anthracis
atggcaaaagtttattatgaaaaagatgtaacggtaaatgtattaaaggaaaagaaagtagcaatcattggatatggctcgcaaggtcatgcacatgcgcaaaatttacgtgataacggatttgatgtagtagtaggtttaagaaaagggaagtcttgggataaagcgaaagaagatggattttctgtatatacagtagcggaagcagcaaaacaggctgatgtagtaatgattttgctaccggatgaactgcaaccagaagtatatgaagaggaaattgcgccaaatttacaggcaggaaattctctcgtttttgcacacggatttaatgttcactttgatcaagtgaaaccaccagtgaatgtagatgtatttctagtagcaccaaaaggtccaggacatcttgtgcgtcgtacgtttagtgagggcggagctgttcctgcattatttgcagtatatcaagatgcaacaggagttgcgactgaaaaggcactttcttatgctgatggaattggagcgacgagagctggtgtattagaaacgacatttaaagaagaaacggaaacagatttatttggagagcaagcagtactttgcggcggagtaactgcgctagtcaaagctggatttgaaacgttagttgatgccggatatcagccggaacttgcatattttgaatgtttacatgaactgaaacttattgttgaccttatgtatgaaggtggacttgaaaatatgagatattcagtttcagatacagcgcagtggggcgacttcgtatcaggaccacgtgttgtaacagaagatacgaagaaagcgatgggtacagtgctagcagaaattcaagatggtacatttgcaagaggttggattgcagagcataaagcaggaaaaccaaatttttatgcgacaaatgaaaaagagaatgaacatgaaatcgaagtagttggacgtaaattacgtggaatgatgcctttcgtacagccgcgagtaaaggcaggggtcaaa

SEQ ID NO: 10267 - DNA, 804 bp, Bacillus anthracis
atgaaaaagattctattgtcagttgttacagcgctgtctgtatttacattagctgcttgcgggggaaaagaggagaataagcttgtcgttggagcttctaacgtaccgcacgctgttattttagaaaaggcacagccgatattagagaaaaagggaattaaattagaaattaaaaaattccaagattatgtgttgccaaataaggcgttagcggataaggaaattgatgcaaactacttccagcacattccgtatttagataaagaaatccaagaaaaaggatataaaattgtaaacgcaggaaaaatccatttagagccaatgggtatttattctaaaagatataaaagcttaaaagacttaccagatggcgggacagtaattatgagtaataacgtagcggagcgtggccgtatgctagcattgttacaaaaaggcggcgttattaaactaaaagacggtgtagatgttgtgaaagcaacagtaaaagatgttgtagaaaatccaaaaaacttaaagtttaaaacagatgtagagcctgggctttcaccaaaattatatgaaaataatgaaggagatgctttatttattaattcaaactatgcaattgatgcaaaactaaatccaacaaaggatgcaattgcgattgaaggatcagactctccatacgcaaatattattgcagttcgtaaaggtgacgagaagaaaaaagaaattaaagagctagtagaagtactacattcaaaagaaattcaagattttattaataaagaatataagggtgctgtactaccagtaagtgaa

SEQ ID NO: 10268 - DNA, 1999 bp, Bacillus anthracis
tttttgggaaaaaaatacaaagttgtcgcgtctatgggacacgttcgcgatttacctaaaagccaaatggggatagaagtaaagaacaacttcaccccgaagtatattaccattcgtggtagaggtccccgtctaaaaagactaaaaatcagcggcaaaaaaagcaaagaaaagtctatctcgcggccgatccagaccgcgaaggagaagctatgctgggccatttagcccaatacgttaaatgtggacgtgaaatcagattgccgagttgtgtttaatgagattacaaaagatgcaataaaagaatcattcaaacatcctcgtgcgattaacatggatttagtagatgcacaacaagcaagacgtatactagatcgtcttgttggttacaatattagtcctttattatggaagaaagtaaaaaaaggattaagtgcagggcgcgtacaatcggtagcagttcgtttaattatcgaacgtgaaagagaaattcaaagtttcgagcctgaagaattctggacaattaaaacagaatttgtgaaagggaaagacacatttgaagcaagtttttacggtgtagatggtgaaaaagttcaattaacgaatgaaacacaaagtgaatgaaataattgaccagctgaaagataatgcgttctcagttgaaaatgtaacgcgaaaagagcgaaaacgtaatcctgcattaccatttacaacatcttccttgcaacaagaggcagcgcgtaagttaaacatgcgagcaaagaaaacgatgatgcttgcgcagcaattgtatgaagggatcgatcttggaaaacaaggaactgtaggtcttattacgtatatgagaactgattcaacacgtatctcagaaacagctcaaacagaggcacgtacttatatttactgaggcggatggtacgggatacttaggagccgaaaagaagaaagaaaacgagaagtcgaacgcacaagatgcgcatgaggcaattcgtcctacttcggtaatgagaaagccagaggaattaaagagtttcttaagtcgtgatcaacttcgattgtataaattgatttgggagcgatttgttgcaagtcaaatggcgtctgctataatggatactgtgacagcgagactcattaataacaatgttcagttccgtgcaagtggatcggttgtaaagttcccagggattaatgaaagtgtatgtagagtcgaaagatgacggggctgaagaaaaggataagatggttgccacctttagatcccggggaaaccgtattttcgaaggatttagaaccgaagcagcactttacacaacctccgccgcgctatactgaggctcgtctagtaagaacgcttgaagagcttggaattggaagaccgtcgacttacgtaccgacacttgaaacgattcaaaaacgtggatatgtcggtttggataataaacgcttcgttccaactgaacttggtgaaatagtaattgaacttattttagagtttttcccagaaattattaacattgaatttactgctaacatggagcaaagcctcgatgaagtagaagaaggaaatgcaaattgggtaaaaattgttgatgatttctacgtagggtttgaaccgcgtttagaaaaagcggaaaaagaaatgcgtgaagtagaaattaaagatgaaccagctggggaagactgtgaattatgtaatcacccaatggtctttaaaatgggtaaatacgggaaatttatggcttgctcgaatttcccagattgtcgtaatacaaaaccgattgtgaaagaaatcggtgttacttgtccgaaatgcgataaaggtcaaattattgaacgtcgtagtaataaaaagaaacgccttttctatggatgcggtacgtatccagagtgtgactttgtatcttgggataagccgattggccgtaaatgtccgaagtgtgaaggtatgctagtagaggaaagaatttgaaaaagcggccgaccagaacaaatgtat

SEQ ID NO: 10269 - DNA, 1216 bp, Bacillus anthracis
atggccagctggaaacgaaatttaatgatttgttggctaggttgttttaccactgcagccggtatgagttaggtaaatcccttttttatctttttatattggggaattatggggtaactggcacttctagtattgcacagtggtcgggacttgcatttggtgtaacatttttaatggggtgcgatcgtatcaccaatatggggaaagcttggtgatatacatgcacggaaattgatgcctaattcgtgcgagccttggtatggcgattattatgacgcttatggggtttgtaaacggatgtgtatccactacgcccccctaagatttttaatgggagcagtatctggtttcctttcaacagcgatgacctttttttgcagcagaaacttcccaaagagcattcagggtggggcgatttctaacattttcaattgggggggtggagtggcctcgctaatttggcccattacttggtggttatttatcagagttaattggaatgcgtcatgtttttcttgttacaggagcttttttattcctttcttttctcattctttttttctttttccagaaagaaaatccactttgttcaagcaaaaaaaagtccaacgaaaaaaagtatggacgatggttccagctaaacatttgattattagtttgtttgtcacaacatttattattcaacttgctaatatgtctgttcagccaattgttacattgtacgtgaaaaatttagttggtcctcaaacagcgcatattgaaacaattgcgggtgccgttatgtcagcgacaggattagcggttattttggcagcaccaagattaggacgattatcagatcatatcggtcctcaaaaaacgttagttgtagcgttgtttgctgcaggaattatttttatcccgcaagcatttgtaacctcagcttggcaactattaattcttcgatttttattaggtatcgcacaagcaggattattacccttccgtacaaactctactaaaacaacatacaccaactcatgtaacgggacgaatatttgggtataatcaatcgtttcagtttttaggaaatatgattggaccaatacttggtggacaaattgcagcgcatgctggttttcaatatgttttcttctctacatcatcactattgtttaaattgcggtgcatttgggtttattttcataataagaacgaagaggtatcagagaaacga

SEQ ID NO: 10270 - DNA, 4661 bp, Bacillus anthracis
attagctgcctactatgtatcggataaaaggtgtcttttggtgaaatcagaaaatatttaagtgataaactacctgagtttatgattcctgaaaaaatgattcaggtagaagagattccattgaatccaaatggaaaagtggatagaaaaaggttattggatataacacaaacggattatgtatcaattccatacgttgccccgcgcaatgaaattgaacaaaaattagtgtgtgcgtgggaaaaagttatggagattgagggaatcggtattcatgataatttttttgcattaaaaggagaatccattaaagcacttcaggtaattaatttattaagaaaagactgcttaaaaataagtacaacagatttttttaagcaccctacaatcgctcaactgagttcttgtgtaaagttagagcataaagaggaaaactttgaaagtagaccaactcatgttaaagatttgtctaatccattttccttaacagaagttcagatagcgtatatgttaggaaggaattcacagtttgaattaagtggtatttcacctcaaacatattttgaatatgaaacagcattggatatcaattgtctttcaaaaagttttcaaaaggtaatccatcgtcatccaatgttgcgagctgtaattttaccagagggaaaacaacaaatattacaaagcgttcctgattacgagattgaaatagtgagtctcatagatttagatgataggaatcaaaatgctcgctttacagaagagcggtctcgaatgactaaccatgtattccctttggggcaatggcctttgtttgaattgaaagcttttcttttaaaagaagacaagtatttattatgttttcgatacgatgctttattaatggacggagcaagcatgaacattgttggacaggatttgttgcattattattataaaccaaatcaaaaattagaatctttatcttttgattttcaagaatatatgtttatctatgatgaaatggaacaaagcgaagaatataaaacagcaaaagattattggaccagtaagcttcccctgactttcgtttgcaccttctttgctgttaaaaaagggtccagcagagattgctactcctaaatcccaatcacttacaaaaatcctggacaatgaaaaatggacaaagctacgaaagttagcacaagaagaaagaggtaacgccttccgctctactttgtacaatatatggtgatgtgttggcatattggagtaatcaacgtcgattagcaattaatttgactgtatttaaccgttatcctgttcatgatgaagtagaaaagattgttggagatttcacatcgcttattttgctggatgttgatgtaaaaccagggcaaaatttctttactagagtaaaagaaacgcaatctactttattagatggccttgaacatcgtcattacgatggagttaactttattcgagatttcactcgatatcatcaaatgacgccaaaagcagttatgccaatcgttttcacctcgatgttagcaggtgcaggtgctttctcttgggaacaacttggttctcttcgctatattcatgctcggactccacaagtatattttggataatgtattaattgaaaaaaatggagagttattaattagctggaactatgttgaagagctgtttgatgttgatgtaatagaagcaatgttttcccaatttgttgacttattggaacaattggtgaaacaaagcgatataacatctttgcagatgaaagaatcggatcaaactttaattaagcaatacaatgaaacaacagaaaaaataccttcaactactctgtatcaattatttacagaccaagtaaaacgtacaccggatgaagtagcagtggtatttgaacaagaatggttaacatactcggaacttcataaaacgctccaatcaattgcccccttccttaaaaaaacaagggcttgggtcttaggggaaaaagggggggcttttttaccaaaaaggcgaaggttgacacaattgttaatatgttaggtattttaaaagcaggtgccgcttatgttccgattgattccgatcatcctttagatcgccaaacatatattttaaaaaatagctcatgcaaacttttattagaacctagcctttatgaagaaaatgatttgtcattttatacaacagaagatatgcctgctattgctggtccagaagatattgcctatattatatacacttcaggaagtacaggaaaaccaaaaggagtaattattactcaccaagcggttacaaatactattcaagacataaatcaaaaatatgaggtaaatgaagatgatcgtattattggtatctcttccatgtgttttgacctatctgtatacgatattttcggagctttaagcacaggtgcaatggtgggtgatgatttcgtgatcccagagacatgtcagaattaatccgcactgttcgacgtagaggggattaccatttggaaatacagtgccctgcaatcatggatttagcattggatcaagtaaggtctcattttgaacattcttctttacgttttagtttaccatagtggaagatggaattccgctttctttaccagaaaaaaataaaacgacattttccgattgcagaagtagtttcactaggaggggcaacagaagcatcgatttggtcaatttattatccggtcaaacaagtgaaatcacattggaatagtattccatacgggatgcccttggcaaaccaaacgtattatgtgttgaactatgaaaagaaaatgtgccctgttggtgtaattggagatttatatatcgggggagtgggccttgctaaaggatatttaaatgctgaaaagaaaacaaatgaagcgtttgtgtcacatcctgattttggtcttatatacaaaaccggagattgtggaaaaatgcattctgagggatatattgaatttttaggccgccaagattaccaagtgaaaattcaaggatatcgagtagagttagaagaaatctctcattgtcttctaacttataaacaagtcgaacacgctgtcgtaattgatcaaacagatgagaacggaataaaatttttagttgcatatgtggtaactgagcaaaatattagtacaacagaactacgaaagcatttgcgagatcacttgccagattacatgattccttcttattttgtttatttggaccaattacccttgactccaaacggtaaattagatagaacatatttacccgttagcacctttccaagaagttatttatgaacatgctacgaatgaacctgatacaaatgcatattttgaacaaaccaatttgggctattgagggggagctggatattaaactctttattcagtgtttccaacaattggttaatcgttatgattctttaagaacaataattgtgcaagatgaacaagcaaaaccttggcaagctgttctatatgatgttcaaataaattcagaaataaaaaacttgattgagatgacgaaacaagaacagcaagaattcctaaaacagtggatgaatgaaaatttaagtcgaggatttaaaaatgatgaacttatgacacgtctctgtatattccaactaggtaataacgagcataaggtaatttggagttcccatcatctgttatgtgatggttggagcgtcagcattttgatagacgaattattccagctctacgaaactacaaatgctgggaactatgtgtggagttacctatggtaaaaccttttgaaacattcatagactggactttggcacaagatcatgagaaagcacgtcatttttggcgagattatttatcaggatacaatcagaaaattagtattcctaaaaagaaagtcccatctaaaagtgaagggttaaacttcatttttatggatttaacattagacaaggatttgactaatcagttacagacatttgtaactaaaaacaatataactatgaatacagcactactagctgtatggggaatattacttggcaaattcaacggaacgagagaagtcgtattgcctaatctagtatcagtcagacctcccgaagtagaaggaattgaaaatatgttcggtctgttcacaaatgttttgcctatccgattagcatggacagaaacgcaatcttttgtggacttcctacaaaaggtacaactagagacattgaaatgtaatgagtatgcatactattcatttgttgatatacaaaagcaaagtgaattaaaaactgagttgactgaccatctttgggtttttgaaaactatccaactaatccagcaatcttttcttcaaatgaaaacagacattttgctatcacggattacgaagttgttgaagttgacaccatgtaaagtatggaattatgtgcttcccctgaagaaaaacttacaataaagtttggatttgatcaaaccgtatatgaagcagagaaaatacagggaatattaaatcacatccatggattaatcaacatgattcttcaaaatccaatacaagcaattggtgattacaaattataaaaaatgaaaaggcgagcaagaactcgcctttttaaatagaataggagtaaaccaaatgacaaaaaacttgcagttatcagccgaagagatgcgtcagttagg

SEQ ID NO: 10271 - DNA, 1214 bp, Bacillus anthracis
caatcggcaggagaaaatgtatggattgctaacgctggatttttagtaacaggtgttggattaccattactaggtgtactagcatttggtttttcgggtaaagatgatttacagtcattagcaagtcgtgctcacccagtgttcgggattgtgtttacaacagttttatacttggcgattggcccgttatttgcaataccaagaacaggaaatgtttcttatgaaattggtcttaaaccgtttatgccagagggattaggttctacacctttaattcttttcacaattgtattctttagcatcacttgtttttttcgctaaatcccgcgaaaattgtcgatattgttggaaaaatcttaacgccaattaagttaactttcatcggtattttagtaatcgttgcttttattcatccgattggagaaatgcaagcaccagttgaagcttatacatcacatgcattctttaaagggttccaagaaggatacttaacgatggacacgcttgcatcattcgtattcggaatcatcatcattaatgcaattaaagaaaaaggtgcaaaaacgaaaacacaaattatggtcgtttgtgcaaaagcaacaatcattgcagcatctattttagcaattatctatacagcactttcttatatgggtgcttcaagtgttgcaaagcttggacatttagagaacggcggagaagtattagcgaaagtttctaactactattttggatcatatggcggagtattattagggttaatgattacagtagcttgtttaacaactagtgtgggacttgtatcagtatgttcttcattcttccataagttattcccaaatgttccttacaaagcaattgcaatcacgctatgtatatttagtgcaattgttgcaaatgtaggattaacacaattaattgcagtttctgttccagtattaacagcaatttatccactagcaatcgtattgattttcttaacattcttccattcattattcaaaggaagagctgaagtttatcaagtgagcttaactgtaacatttattatcagcttattcgatggattaagtgcagctggagttaacgttgaagtagtaagccaagtgttcactaaattccttccgatgcaggaagtaggattaggctggatcttcccagcgattatcggtggatttatcggatatggcattagcgttttaaaattaaaaaat

SEQ ID NO: 10272 - DNA, 489 bp, Bacillus anthracis
atggataatttctttggatttcgcatcgtagaaaatttgcaaaaaatggacaaggatattcaacgtaaacagctcaaatatcataataaaagagtaatggtcagcaaggaatttacatttgatgcagcgcaccatttacactgttatgaagggaaatgtaaaaacttacatggtcacacatataaagtagtatttggaattagtggatatgtaaatgaaataggtcttgcaattgactttggagatataaaagaaatttggaagaatgagatagaaatttatttagatcatcgttatttaaacgaaacgttaccagcgatgaatacaacagctgaaaatatggtcgtttggatttatgaaaagatggcagaagcgttaacaaaagataatcgtgcgaacgaatataaaggagctcgtgttgagtttgttcgtctgtttgagactccaactagttatgcggaagtaagacgggagtggatgctcgatgag

SEQ ID NO: 10273 - DNA, 1033 bp, Bacillus anthracis
aaaacagaaaaggccaccccgcagaagcgtaagaaatcgcgtgaagaagggaatattgcccggagtaaagatttaaataatttattttctattcttgtattagcagttgtcgtttacttttttggagattggctaggatttgagattgccaattctgtatcggtgctgtttgatcaaattgggaaaaaatacagattcaaccgagtatttttatatgatggggattttactactaaaagtatcagctccgatattaatactcgtatacgcttttcatttattcaattatatgattcaagttggtttcttattttcttctaaagttattaagccgaaagcatcacgtattaacccaaaaaactattttacgagactgtttagtcgtaaaagtttagtagatattttgaaatcactgttttatatgggattaatcggttacgttgcttacgtgctatttaaaaagaatttagagaaaatcgtgagtatgattggatttaactggactgcgtcacttactgaaattattaggcaaattaaatttatcttcttagctattttaattatattaattgttctttctattattgatttcatttatcaaaagtgggagtacgaacaagatattaagatgaaaaaagaagaagtaaaacaagagcataaagaatatgaaggggacccgcaagtaaaggggaaacgaaaaaactttatgcacgccatattggcaggaaacattgcgaagaagatggatgggtgcaacgtttatttgtaaacaacccaactaatatttcggtcgtacttcggtacaataaacacgttgatgcagcaccaattgtcgttgcaaaaggggaagatgaactcgcattatatatacgaacgcttggcccgtgaacaagaaataccaatggtggaaaaccgtccgcttgctcgttctttatattatcaagtcgaggaagatgagacgattccagaagatttatacgtagctgtaattgaagttatgcgctatttaattcaaacgaacgaacttgaagta

SEQ ID NO: 10274 - DNA, 147 bp, Bacillus anthracis
atgtcaaataaagttcctacttcttttatcattattataggattgatgctgtttgcattgttttttggagcaggaaatttaatttttccacatatgcttggtcaaatggctggaaatagaaatgaagccaatgcagcttcttccaca

SEQ ID NO: 10275 - DNA, 921 bp, Bacillus anthracis
atgaaaatttttgatgctcattgtgatgtgcttcttcagttatggagtgcacaagggaaaaaggattttaaacatgatccgcaattacatattacatttgaacagttaaagagaagaaaagaaagtatacaatgttttgctatatatgtgccagaaacagtggcatatgaaaaccgatttgaagtatcattgcaaatggtagatattttttataatgaaattttatccctcccgggtgtgaagtttattcagacaaaagatgatattaacatgttaaaacaggacgagattggggcgatattgacactagaaggatgcgaagcaattggaaaagatgcaatgaaattacggttgttgtatcgtctaggagtacgttcttttggactaacatggaattatgctaatctattagctgatggtgcgttagagacacgtggggcgggtttaacgacttctggtaaacatgttgtacaagaactgaatgcgttacatgtatggactgatgtgtctcatctgaatgaaagaagtttttgggatgtgatagaaattgcaaaaaatccgattgcttcccactcaaattgtatgaaactttgccagcacccacgtaatttaaacgatgaacaacttaaagctcttataaagcgaaatggcatgatcggtgtcacttttgtaccacagtttctaacaaatgaaaaacaagcgaatgtagcagatataataagacatatcgaatatatttgttcattaggtggagagaataatatagggtttggttcagattttgatgggatattagaaacagttgtaaatgtatcagcgtatcgagattatgaaaatgtagtgaatgagctttgtaaacactatgctgcatctactgtagagcgatttttatatgataattttgttgaacatataagcttt

SEQ ID NO: 10276 - DNA, 1698 bp, Bacillus anthracis
atgtcttcaaaaacggaagagaaactggcaaccggtgcacagctattgttagaagcgctagaaaaggaaggagtagaagtgatttttggttatcctggtggtgcagttttacctctttatgatgcgctctatgactgtgaaattccgcatattttaacaaggcatgaacaaggagctattcacgccgcggaagggtatgccagaattactggcaatccaggggttgtcattgcaacgagtggaccaggtgctacgaatgtaattactggtctagcagatgcgatgattgattcattgccacttgttgtatttacagggcaagtagcaacaacgttaattggaagcgatgctttccaagaagcggatattatggggcttacgatgccagtgacaaaacataactatcaagtgcgaaaggcttcagatttacctcgaattattaaagaagcatttcatattgctagaacaggaagaccaggcccagtcgtcattgaccttccgaaagatatggtagtagagcaaggcgaacgatgtagtgatgtgcaaatggatttaccaggatacaaccctaattatgaaccgaatctactgcaaataaacaaattattacaagcaattcaggttgcaaacaagccattaattttagctggagcaggtgtattgcatgcgaaagcttcaaaagaattaacaagttttgctcgtaaatatgaaattcctgttgtgcatacattacttggtcttggtgggtttccaccagatgatgaactatttctagggatgggaggaatgcatggttcttacacagctaatatggcgttatatgaatgcaacttactcattaatataggcgctagattcgatgatcgtcttactggaaatttagcttattttgcgaaagaggcgactgtcgcgcatatcgatattgatccagcagaaatcggaaaaaatgtaccgactgaaattcctattgttgcaagtgctaagcaagcgctccaagtattgcttcaaccagaaggaaggaaagaaaatcatcatgagtggatctctttattaaagaatagaaaagaaaagtatccattctcttataaacgaaattctgaaagtattaagcctcaatatgcaattgatatgttatatgaaattacgaagggagaagcgattgtaacaacagatgtggggcaacatcaaatgtgggcagcccaatattatccgctcaaaactccagataaatgggtaacttcaggaggactaggaacgatgggatttggatttccggcagcaattggtgcacaaattgcaaagcctgatgaactagttattgcaattgtcggtgatgctggatttcaaatgactctgcaagaattaagtgtgttaaaagaacactctttacctgttaaagtatttattttaaataatgaagctttaggaatggtaagacaatggcaagatgaattttataaccaaagatattcgcactctttactatcgtgtcaaccagatttcgttgctcttgcgaatgcgtatggcataaaaggggttcgcatagatgatccacttcttgcgaagaaacaattgcagcatgcaattgaattacaagaaccagtcgtaattgattgccgtgtacttcaatcagaaaaggtaatgccgatggttgcgccagggaaaggtgttcaccaaatggagggagtggaaaaaagg

SEQ ID NO: 10277 - DNA, 609 bp, Bacillus anthracis
aagctttcttacgtttatattgatacaggcgcaatgtttcgtacgattcattagccagcctttgagcaaaaagtggatattggaaatgaggagccagctaatggagttgtaaagaatgtgaaaatcgagttttcagcaaggagaaaatacacactttgtatttttaaatggacaagatcctttctgaagtaattcgtacacctgaggtaacgaatcgagtatctattgtggcgaaacatcgccttgttcgtgaagagatggtacgccgtcaacaagagttagcggaaaaaggcggcgttgtaatggatggtcgtgatattggtacacatgtgttaccagatgctgaagtgaagatctttatgcttgcttctgttgaagaaagagcagaaagaagacatttagaaaatatgaataaaggtttcgattctaatttagagcagttaaaagaagaaattgctcagcgtgataaattagattcagaacgcgaagtttctcctctaaaaaaagctgatgatgcattggaattagatacaactttctttatcaattgaagaagttgtccaaaaaattatgggtattgttttgggagtgtttgcgaaaataaagaaa

SEQ ID NO: 10278 - DNA, 201 bp, Bacillus anthracis
atgcaagatttacatgaaaatcataatgtaagtattttgatggtgacacatgatgcatttagtgcgagttactgtgagcgaatattatttatccaagacggtcttttatataaagaattaaagcgtcaaggaaagcgagaaaatttctatcaagacattttaggtgtgctcgctcatatgggctcagctgctgagtctaag

SEQ ID NO: 10279 - DNA, 1092 bp, Bacillus anthracis
atgattacagtaagtaacgttagtttgcgtttcgcggatcgcaaattgtttgaaggtgttaacataaaattcacgccaggtaactgctacggtttaatcggagcaaacggtgctggtaaatcaacatttctaaagattttatctggagaaatcgaaccatcaacaggtgacatacatattacgccaggtgagcgtctagcagtattaaaacagaaccacttcgaatacgaagagttcccagtattagaaacagtaattatgggtcacacgcaactttataaagtaatgcaagagaaaaatgccatttacatgaaagaagacttcagtgatgaagatggtatgcgtgctgctgaacttgaaggtgagttcgctgagctgaacggttgggaagctgagtcagaagctgcaatcttactaaaaggacttggtattggtgaagatcttcatgataagaaattgtcagaattaactggggcagagaaagtaaaagtattacttgctcaagcattattcggtaaacctgatattctattactagatgagcctaccaaccacttggacttaaaagcgatccaatggttagaaaacttcttaatgaactttgaaaatacagttatcgttgtatcccatgaccgtcacttcttaaataaagtatgtacgcacatggctgatcttgatttcggtaaaattcaactttatgttggtaactatgacttctggcatgagtcaagccaattagctttaaaattaacgcaagatgctaataagaaaaaagaagagaaagtaaaagagttacaaaacttcattgcgcgctttagctcaaacgcatctaaagcgaaacaagcaacttctcgtaaaaaattattagataaaattactttagatgatattagaccatcatctcgtcgttacccattcgttggcttcacacctgagcgtgaagtaggaaatgacttattaactgttgaaggtctttctaaaacaattgatggggaaaaagtgttagataatgtgtacttcactttaaataaaggtgataaagttgcatttatcggtcgtaagcatccaaccgctcatgtcagaagcaccggc

SEQ ID NO: 10280 - DNA, 831 bp, Bacillus anthracis
atgaatacgaaagaaattagcaaagtagtggatttggtgagagaatctaatccgctcgttcataatattacaaatgttgttgtaacaaattttacagctaacggtttattagcattaggggcatcgccctgtaatggcgtatgcaaagaagaaagtagcagaaatggctagcattgctggagcgttagtattaaatatggggacacttcgtcctgacgaggtagaagcgatgttacttgctggtaagtcggctaataggaatgatgtaccggtactgtttgatcccggttggccgcaggggcatctcgtttggaacaagaagttgcgagacatattccggctgaaatcgaattagcatttatttcgcgaaaatgcagctgaaatagcgataaatattaatgaaaaatgggaaattaaagggggtagacgctggtgctgaaaatggtaatgtcgtaagtatcgcaaagcagggcagcagatgaactaaatacagtttgcggtgattactggaaaagaagatgttgttacagatggagagcgaactattgttattcgaaatggtcactctattttaacgaaaattacggggaactggttgtttaactacttctgtaataagagcatttgtagcggtagaaaaaggatatgtaaaggctgcagtaacggcattaccgttttatgctgtagccgcggaactagcagctgctaagacagtagaaaaaggacctggtagtttccaaattgaatttttaaatcagttagccaatacgacttcgggtgatatagaaaagtatgggaagattgaggttatatagtaaggagggaaaataa

SEQ ID NO: 10281 - DNA, 198 bp, Bacillus anthracis
atgcctaaacaaaaaactcatcgcggcgctgcaaagcgtttcaaaaagactggatcaggtaaactgaaacgttctcacgcttacacaagccatttattcgctaacaaatctacaaaagctaaacgtaaactacgtaaagctggtgtagtaagcgctggtgacttcaaacgcattcgtcaaatgcttgacaacttaaaa

SEQ ID NO: 10282 - DNA, 393 bp, Bacillus anthracis
gtgaaaaagcacggcgtattaaacagtgagattgcagcagtgcttgcttcacttgggcatacggatacgattgtaatcgctgattgcggtttaccaattcctgacggagtaaagagaattgatctagctgttgaaataggaaaacctagctttttagatgtattgcaagtggtagcggatgatatggcaattgaaaaagtgacgttagcagaagaagtcattaacaacaatgcggaagtaaataaagaaatcgagctaaaattaatagaaccagcgtttgaatatgtatgtcatgaacaatttaaagagcatacaaagaaagcgaaagctattattcgtacaggtgaggctacgccttatgccaatgtaattttacatgcaggcgtgattttt

SEQ ID NO: 10283 - DNA, 1668 bp, Bacillus anthracis
atgaagagaaaagagaatgagtctgttaaagtatttgctcttggtggagtaggtgaaatcgggaaaaacatgtactgtgttgaaattgattctgaaatctttattgtagatgcagggttaatgttcccgggagatgaaatgtttggaattgatatcgttattcctgatattacatatttagtggaaaaccaagagcgagtaaaaggtttatttattactcacggtcatgaagatcatattggtggtattgtttacgtacttcgtaaattatctattccagtgtatgcaacgaaattaacagtaggacttatacaagaaaaacttggcgaagcaggtatgttaggccgtgtagacttaaaaacaatcgattcaaattcaacagtagagtttaatactacaacggtgtcattctttggaacgacacatagtattccagattctgttggtgtttgtttccatacatcaaaaggtgcgatcgtatatacgggagactttaaattcgatcaaactccaattggaaatagtggagcagatcttgggaaaatggctcaaatcggaaatgaaggtgtactatgcctattatctgatagtacaaatgctgagcgtccaggctatacaggttctgaaaaagaagttggtgtagaaatttctaaagtattctacggcgcagaaggacgtattatcgttgcttcatttgcatcgaatgtacatcgtattcaacaagtatttgatgcagctgctgaaacaggacgaaaagtcgcggttgtaggacgtagtatggtgaaagtagtagatatcgcaagacgccttggttatttagatgttccagaaggtatggttatttcactacaagaagtagacaatttcccagagaaaaaggtagctattttaacgacaggtagccaaggcgaaccgatggcagccctttctagaatggcgaagcaagctcataaacaaatttcaattcgtaaaggtgatacggttattattgcggcttctccaattccgggtaatgaaatatctgtatcgaaaattattgatttgttatttagagctggagctgaagttgtttattatggtgaaagaaaagttcacgtttcaggtcatggtagccaagaagaattaaaactaatgttaaacttaatgaaaccgaaatattttgtacccgtacatggtgagtttcgtatgcaaaaagcacatgcatacttagctgaagatgtaggtattgcaagagaaaatatctttatcgtagaaaaaggcgatgtaattggttttggtgacgatgaagcaaatttagttggtaaagtgcaagcgggcaatgtattaattgatggattaggtgtaggtgacgttggtaatatcgttcttcgagatagaaaaatgttatctcaagatgggatattagtagttgttgtaacacttggtaaagatgaaaagaaaattatctctggtccagaaatcatttcgcgtggatttgtatatgttcgtgaatcagaagcgttaattgaccgttctacagagattgtacgtatgattgttgagcaatcaattaaagaatattcaattgaatggtctatgttaaaacaaaatattcgtgaattattaggacagttcttgtacgaagagacaaagagaaaacctatgattttaccgattattatggaagta

SEQ ID NO: 10284 - DNA, 709 bp, Bacillus anthracis
tttcttttaataattaaggaaggggaattcgtcgggattatgggtccttctgggtctggaaaaactactttacttaatgtgattagtatctctggatcaagcgacaggtggtagtgtgacaatagctggtacaaatattacttctatgaagggcaatgcgttatctgattttcgtgtctcaaaaattaggtttcatttttcaagattttaacttacttgaaaacttatcaattttatgaaaatatcgctttaacacttttctttgcaagcggaaccttcaagtgagattactggaaaaggggatgaaggtgccaaaaaattacgggattacttgaaattttaacgaaatatccaactgctgtttctggtggacaaaagcaaagaacagcggcagcacgagctttagtacataatccagcaatcgtattagctgatgaaccgacaggagcgcttgatagtaaaaatgcataaagcttattagaagcgatgcaagatttacatgaaaatcataatgtaagtattttgatggtgacacatgatgcatttagtgcgagttactgtgagcgaatattatttatccaaagacggtcttttatataaagaattaaagcgtcaaggaaagcgagaaaatttctatcaagacattttaggtgtgctcgctcatatgggctcagctgctgagtctaagtagggggcgagattatgttat

SEQ ID NO: 10285 - DNA, 2169 bp, Bacillus anthracis
aagaagcagaaacaacaaaagaaaaagactcacgttccttttcggttaaacgtgctgtttttctgcgtgtttttaatgttctccgcggttattgtaaggcttggatatgtacaaattgttcgcggtgaaggatataaaaatgaaagtggagaagaaagagaactccacgattagtaattcctgttacacgtgggaaaatatttgaccgttatgggcgacctgtagtagataatgcagctgtacgtacgattacatttacaaaaatgaaaggatcaactgcagaggctcgcttagaaacagcgaaaaagctagccgattttgatttgagtaccgacaaataaattaacagatcgcgataagaaagattattggcttgctattcataaagaggaagctaaagaaaaaattacgaataaagatcgtcaagagtttaaagataaaaaaattgacgataaagaattagatgagcgtcaacgaaatcgcgtgacagaagaagaagtgaatcaattatccgcaaaagatttagaagtactagcgattaaaagcaaaatggacggcggatatgcgatgacgcccacaagtccataaaaagggatgctacagaccaagaatatgcgattattagtgaaaatctagcaaccattaccggggtgtagatacgaatgttgattgggatcgaaagtatatttatgacgattttattccgaaagtgtacttgggcggggtttcaacgtctgatgaaggcttacctagagaaagattagattactatcttgttcgtgattataatcgaaaatgaccgcgtaggggaaaagttatcttgagcagcaatatgaagatagtttgcacggtaataaagcggaagtgagaaatgttacagataaaaacggtaatattttagaaacgattaacgtatcaaaagggcaaagtggtaataatctaaatttaacaattgatatggaattacaaaagcgtgtagaagaaattatcacgaaaaatttattgagatataaaggtgggcaaccctatttagatcgtgcattcgttgtaatgatgaatccaaaaaatggtgaagttttatctatggcagggaaacagttagtggaagaaaatggcgaaacgaaaagtccaagttttccctttggaacggatgccaagttttttccgaagggaatcaactgtaaaaggtgcgacagtacttacaggatatcaaacaggtgcaattcaaccaggttcagttcaacttgatgacccaatcagattaaggggaacgccaccaaaattcttcgtggaagacgatgggatatattaaatgatttaacagcattaaaaatgtcttctaacgtatatatgtttaaaacagcagaatgaatatcgcaggcgttcaatatgtaagaggtggtacgttagatataccacaaaaagcatttgatacgatgcgttattatttcggaccagtttggacttggcgtaaaaacaggtattgatttaccaaatgaatctgcgggccaaacaggtagaggaaatcagccaggtttcctactagatttatcaattggacagtatgatacgtatacgccacttcaattagcacaatatgtttcaacaattgcaaatggtggatatcgtatgcagccgcaagttgtaaaggaaattcgtcaaccgtcagcgaaacaagacgaagttggaaaagttgttcattcaatggagccgaaagtactaaatcgtattgatatgcctgaatcacaaattaaacgtgttcaggaaggatttagacaagtatttaacgattctggtggtacagctgcgaaatattttacaggtgcaccatataaagctgctggtaaaacaggtacagctcaaactgtgtatggcggagataaagagattggtaaaaaggcaaacggtgagcgtaaagaaccatatattttaccattagtaggttatgcgccactgaaagaccctgaagtagcattttctgttgttgtaccttgggtagatgataaatcaggtattaacggatatattagccgtgacattatggacgcgtactttgatttgaaaaaagtagaaaatggcgaagctactaaagatgaaatagataagaaaaataaagaacaagatgatgaataaaaagttgtaaaaaaagcacactatctgaaaagatag

SEQ ID NO: 10286 - DNA, 1476 bp, Bacillus anthracis
atgtttcaaaaaatagcaaaggaatgtttagctggttttactgttgcaattgttgcgttgccacttgccattgcatttggtattgctgcaacaggaacatctgagggagcactagtcggattgtatggtgcaatttttgcaggtttatttgcggcgttatttggtggtacacctgggcaggttacagggccaacggggccaattacggttatcgcaacaggggttattgcgacgcacggattagaggcgagttttatagcatttatgatggcgggactgttccaaattttattcggtgtatgtaagcttggctcgtacgttcgttacattccgtatcctgtcgtttcaggatttatgaacggtattgcattaatcattattttaggtgaaatgaagcatgtgcaaaatagttttctactcgtcgtattaacgattattgtcatgattgtttctggaaaatggattaaagcaattccatctagtttagttgcattagtcggtgtgactgctttgcttcctttattttcttctgcgttagaagggcttacagtgaagttaccggttatcggaaatctgacattaaataaagtaattgaaaagattgggacgattccagaagcgatgccgacgcttcatattccatctttaggtggaacaggtatagcagaacttgttttaccagcgcttagtattgctttattaggatcgattgactcgttgttaacatcggtcgtaatggataatgtgacgggtacgcgtcataaaagtaataaagaactggttggacaaggtatcggtaatatggtgagcggattgtttggcggattagcaggggcaggtgcgactgtacggtctatcgttaatataagaagtggcggtaaaacggcgctttcagcatgtatgcatagtgttatattatttattttcattatgggacttggatcagtcgtgcaatacattccgcttgctgtattatcaggtattttaattttaactggtattggcatgtttgattgggaaagcatgaagaaaatgcatgtagcgccaaaaggtgatgtcattgttatgctcgtcacgatgattgtcacagtgaagtttgatttaatgatcgctgttgcgttcggaattcttctttcgttccttatatacatggtgaaatgtaaagaacgtaaagtttctattgtaaaagaaaaagaagcgacatataaaattaaaggcccactttcgtttttaacagtggatcgtgttttttatgctttacaagacgtaaaatctccggttgttttgcgcatgaaagatgcacgctatatggatgtatcaggagctatggcgttattgaatttcattgagcagtcggataaatcaggattgagtgtgacgctagagcaagtgcctgttcatattaaaaagacgttagtaacgatggcgagtaatgaacagaaagataaattactatttgcagaagttgatgttatg

SEQ ID NO: 10287 - DNA, 1561 bp, Bacillus anthracis
ggggaaagctcaattccgcaacaacttgcgaaaaatgtatttctgacacaaggccgcacatactcttgaaaaataatggaatattttttaacaaaaaaaatagagcgtacgtattcgaaaggatgaattcattgaaaatgtatatggaaccaaatttatttttgtggaaggtgcttggggtaataaaaagggcagctaaatcttattttgataaagatgtaaaagatttaacaatttcagaagctgcaacgattgcaggcttgattaaagcaccatctggcgaattccccctattaaaactttaacaaggccacttgaagaacggaattgccgtatttaagtttaatgaaagagactacgtatatgtgcggacgaacagtataataaagaaaaagagagcgggcttgtgttaaaacgtggcgttgatgataaatacaagggaaaatactctcaatatgtagactatattgttagagaagcgatggacaagtacgaattaccacaaaatgaaattttagcaggtggttatcgtatttatacagagcttgatccgaaaaaacaacaggctgtatacgacgttgtgaataatgatagttatttcaaagatagtggctcagaccaacttatgcaaacgggtgtagttcttatgaatccaacaacaggtggtgtaccagctctagtaggaggcagagggccttatcagtttttacagtttaaccatgcaacacaattaaaaagacaacctggttcaacgctaaagcctttggctgtatatgtaccagcgttagaacaaggatatgaagtatacgatatattaaaagatgaaccatttaacctttaagaatataaaccaccaaatagcgatcctactttttcccgggaagggaacatggatgaagctgtggccaaatcctattattgtttcgctgggtgggctattaaaccaattggaatagaataaaggattgaattctttaaagcaattgggtatcccttagtaaccaaaagatcgtacgtatccgatggcttaaggcggaatgcatgttgggaacatctccatttgtaatggcttcagcatacagtacattttgcaaatgacggtgtcccaatggaaagctcatgcattaaaagagaatacaaatgctgaaaggtgaaacgattggaaaagtggtataagaaagaaaacccaatgaccagcgaaaaaatttctctcaaaatgacttatttatttaaagggtgtttgtcgaaaagggaacaggcgaaaagggcaaaggtacctaatgttgttccccccaggtaaaacaggaactactcaaattgtaaatggcccgagcaccggtgcaaaggattcatggctttgttaggatacacaccagattttgttaggtgccgattttggttaggtatttgattaaaccgtattcccgatcttaggttcccaggtggtagtcaaatttccgccggccaggtccccgggtatattaggaaaaaagcgaccgcaaatccagctccaaaaaagcattccagttatcactcatatctgaggctgattataaaaaac

SEQ ID NO: 10288 - DNA, 825 bp, Bacillus anthracis
atgaagtttcgaaatacaaagcttgctatggttacactatcttcattttttattttaggttctgcatctctatcattcacaaatatcatacaaggtgaagtagcttctgcatcaccacaagagattactgtaaaaagctatgatgatacatattataataatgcaataggaaaaacgggtttagaattaaagaaggaacttcataatattattgatgatcatacaaagttatcatacagtgcggtttgggaagcactaagagatactgatgaagatccaaataataaaaacaatgtgatactcttatatactgggcgttcgcaaggaaaacttacgaatggttcaggagttgataattggaaccgagagcatgtttgggcaaaatcacacggtgattttggaacgactgcaggacctggaacagatttgcatcatttaagagcgacggatgtatctgtaaatagttcacgtggaaatctggattttgataatggtggcgtgaatcattcagaagcgacagaatgtaaatatgatagtgactcttgggaacctcgtgatagtgtaaaaggagatatcgctagaatgctattttacatggcagttcgttacgagggagacaacggtgaaatagacttagaactaaatgaaaaggtgaataacaataaagacccatacatgggcaaactatccgttttactaaaatggaatgaacaagacccggtcgatgatttagagagaaagcgtaatgaagtgatttttacgaaatatcaacataatcgtaatcctttcattgatcatccggaatgggtaaataaaatttggaac

SEQ ID NO: 10289 - DNA, 354 bp, Bacillus anthracis
atattaaatatttttctcatctttgttcttatccttatttccggctttttcgttgcatcagaattcgctgttgtaaaagtacgaaaaagtcgaattgaccagcttgcaaacgaaggcaataaacaagctttagctgcaagaagtgtcatttctaatttagatgtttatttatcagcttgtcagctcgggattacaattacttctttagggcttggttggcttggtgaaccgactgtggaacatttactacgaccgctctttgaaaagattaatattactggaacaatggcaaatactttatcctttattattgcttttagtgtgattacatttttccatgttgtattaggtgaa

SEQ ID NO: 10290 - DNA, 1364 bp, Bacillus anthracis
ttaaaagcgcttagtactgattcaccacggcaactacaaagaacattaaccgcacttgatttaacgtttttaggaattggcgccgtaattgggacagggatatttgtattaacaggtgaaagttgcagcgaaacattctggtcctggtattatgctatcatttcttattgctgcatttacttgtgcttgtgtagccttttgttatgccgaatttgcttcttctattcctgtctcaggcagtgtgtatacttacgcatacatgacagtcggagaagtcgtcgccttcatcgttggatggtgtttaatgctcgaatatttacttgcagtcgcagcagtagctgtcggttggtctggttatttacaatctttactacaaggatttaacatccatctgcccgccataatcgcctcggcccctggcgtaggaaaaggtggtctcattgatttacccagctgttgtatttttactcatcataccgtttcttttaagttttggtatacgtgaaagcgcacgcattaataatattatggttcttattaaattggccgttattatcgcctttatcgtagcaggcgcaaaatatgtaaaacctgaaaattggacaccgttcattccattcggatacgacggtattattactggagctgccactgtattcttcgccttcttaggctttgatgcaatcgcaactgctgcggaagaaacgaaaaaaccacagcgcgatttaccaatcggcattatcgggttccccttcttatttgaacggttttataaatgatcgaatccttccgtttaacaggtatggttccttatacacaattagatgtttctgatccagttgcgtttgccttacatttcgttggtgaagatacaattgcaggactactcgctgttggagcgatgactggaatgacaaccgttctcttagtcgttatgtatggacaagttcgcgtttcatatgcgatgagccgcgacggtttacttccaaaagcgttagcacgtgtaaataaaagagtgaaaatccctttattaaatacgtggattactggtgttgttgccgctttattagcacgacttttagacctgcacgtattagcgaatttagtaaacatcggtacattaacagcctttacattcgtttgctgcgcaggacttattttacgaaaaacacaccctgacttaaaacgcggattccgcacacctttcgtacctgtactaccagttgtcgcgattctttgctgcttatatttaatgatcaatttgtctaaaacaacatggattagctttgcccctttggcttatagtcggattatgcttctatttcttctattctagaaagcatagccatttagctaccgaaaaa

SEQ ID NO: 10291 - DNA, 865 bp, Bacillus anthracis
ttgaaaacaaaaacagattttttgaaaaatgaaagagcaaggtgagccgattacaatgctaacggcgtatgattatccttctgctaaattagcagaagaagctgaagttgatatgattctagttggagaatcctctcgggatggttgtgctcggctacgaattcacagtaccagtaacagtagaggatatgattcatcatacaaaagctgtacgccgcggtttccaaagagacgtttattgtaactgatatgccatttatgtcgtatcatgtgtcactgcaagatacgatggtgaatgcacgccgccatcgttcaagagaagtggtgcccatgcactgaaggtagaaggtgcggggagagtgatatcgactattcactatttgacgaatgcgggaaatttctgtcgtggcgcacttaggggttaactcctcaatctgtaggagtgctaggtggatataaagtacaaggaaaagacgctgaaagtgcaaaaaaattaatagaagatgcgaagaaatgtgaggaagctggtgcaattgcactcgtgttagagtgtgtgccaatgcagttagcagacttattttcagaggcaataaccaatttccaacaatccgggattggcgcaggacaaaaagtagatgggcaagtgctttgttatcatgatcttatctcatatggggtaaatcgtgttcccgaatttgtgaaagcaatatacgtccgttcaagaaagaatttgtacgcgggatttcttcaatatgttgctgaagtaaagacaaggcaatttcctgaagaaaaacattcgttcacaatgaaagaggaagaatgcttagcgttatacggagggaaacaatcatgaaaatcgtaacga

SEQ ID NO: 10292 - DNA, 633 bp, Bacillus anthracis
atgggagcgacaggagtagcgtcacaaagaaaaacaattgaagagagtatcgaaagaaataaggaaaagtacatagaaacaagtcatgatattcatgcgaatccggagattggtaatcaagaattttacgcatctagaacgttaagtttattactaggtagtgcaggatttcagttgcagcacaatatagctggacacgaaacaggatttatcgcgcgaaaaagttcaggaaaacaaggaccagcaatcgcatttttagctgagtatgacgctttaccaggactcggtcatgcgtgtggtcacaatttaatcggcacaattagcgttgcagcagcgattgcattatcagaaacactcgaagaaattggtggagaagttgtcgtattcggaacaccagcagaagaaggcgggccaaatggtagcgcaaaatcgagttatgtaaaagcagggttatttaaaaatattgatgcggcgcttatgattcatccgagcggaaaaacagcgacaacgagcccttcactagcagtcgatccacttgattttcattttttacgaaaaacaactcacgcggcagcgtcacctgaagaagggatttatgcattagatgcggggaatccgcctggacaacagcat

SEQ ID NO: 10293 - DNA, 849 bp, Bacillus anthracis
atgctagaacaaggattggattatgttgtcaaactggctaaaagcaaaaaacaaatactagatgcaaacccgatgcaatatttcattcgtgcagcacttgcgggtatttatatcggttttattattgttctatgctttaaattaggtaacttttttcacattgcagattcaccagcaacttatttagctgcttctatgtttttcggaattgctctcgtacttattatatatggtggtgctgaattgtttactggaaacacaatgtacttcactgtagcaacattaagaaaagaaacaacaatatctgatacacttcgtaactgggttgcttgttatgcaggtaacttagcgggtgctttattctttgccttactattttacgcaactggcattttcgaagcaatcgatcacggtcatttaatgaataaagtcgttgagggaaaaatgaatacacctacaatgcaattattctttaaagcaattttatgtaactggcttgtatgtcttgcctgcttcttaccttcccaagttaaaggggatacagcaaaaataatgatcatgatgctactcgttttcacatttttcttatctggttacgagcatagcatcgcaaacttatcactgtttgctctatctttagtttcaccgcatcctgagacaatttcttttgcaggtgctattcataacttaattccagttacaatcggtaacattattggtgggtcagtatttgtcggtatggtataccactacttaacaaagaaagtacctgacgtgaaacaagaagacactgaattagtagcagctcaacaagaagaaattattcctctgcaagcgcatatgaaacat

SEQ ID NO: 10294 - DNA, 1544 bp, Bacillus anthracis
ttttaccaaacgtttcaagaacgaaaaatagaattactaactgcattaagtgagcatttacaaatatcgcttatttcattattttttgcagtaattattgcggtaccgctgggcattttattaacgagaaaagaaagaatggctgagttgattataggaacttctggcagttatgcagaccgtcccatcacttgcattactcggactattaattccgttggtaggaatcggaaaaatcccggccgttattgcattagttgtatatgcactattacctattttacgcaatacatatacaggaatacgggagttagatgaatcctttattcgagcaccgaaggctatggggatgaataattcggaaaaacactgtgaaagtaaaagctccctctgcccttacaattattatggccggtattcgtacggcaatggtattaattgttggaacagctacatgggcaactcctttaaggggctgggggactccgggaaactcatattacttggtatgatcgggaatgatcatgcacttaatattttagggggccgtacccagccgcgttactcgctttattctttgatgtagtacttcgagtgcttgagagcccaaaacgctcgtctaagcgtgttatattgacgatatgtatcgttggtataatggttgcttctccatttctttggaatacagaaaaagaaagatattgttattgcgggcaaacttggatcagagcttgaaattttaattcaaatgtataagcagcttattgaacaagatatccgatgtacacgtacaattaaaaccaggtcttggaaaaacagcatttgtatttgaagcgttgaaatcaggagaagtagatatatatcctgagttttcgggaacagctttatctactttcgtgaaagaagagccaaaaagtacaaatcgggatgaagtatatgagcaggctcgcgttggaatggaaaagaaatataatatggttatgttgaagccgatggagtataacaatacatatgcactggctatgccgaaaaaaatagcagatcaaaataatataaatacaatctctgatttaggaaatattgcacaggatacgaaagtaggattcacattagaatttgctgatcgtgaagacggttataaaggaatgcaaaagtttatatatctataagttttcaaatgtgaaaacgatggaaccgaaattacgttacagtgcaattcaatcaggggatgttaacgtaatcgatgcatattcaacagatagtgaattggagcaatacggacttaaagcgctaaaagatgataaaggggttatccccaccatacccaaggtgcaccattattaagaaaagagacattacaaaaatatcctgaacttgaaaaagtattaaataaattatctggaaagattacagatgaagaaatgcgaaaaatgaattatgaagtaatgtggaatgtaaaaaatagtgaagaagtagcgaacaaatttttacaaaaagagaattactttcgttaaattacaaggaaatatacaaatttatatgta

SEQ ID NO: 10295 - DNA, 1305 bp, Bacillus anthracis
gatgaaaaggggcaattaaaatgttctttctgtggtaaaacacaaacacaaagtccgaaagttagttgcaagttcagggtgtttccatttgggacgaggggtatcgaactttgtaccgaaaattgtccaggaggagcttgcgaaagacgaagaagtagaattcaaagatgttccggaaaccgggaggaaatttcggaaatttttagatgatgtatgtcatcggacaagataacgcgaaaaaagcactagcggtagcgggtatatacccattacaaacgcattaatttttaaccagccaaaatttgatgactgtaggaattaggggaaggagtaatatgcgcatttgttgggggccagcgggtagtggtaatatcttttctgccacaaaacgttaggcgcgttttttaaatgttccatttgcaatcgcggacgcaacatctttaaatgaagctggataggttggggaagatgtaaaaaacattttccttaaattaatccaagcagcggattatgatgtagaaaaagcggaaaaaggaatcatttatatggatgagatggataaagtggcacgtaagtccgaaaatccatcaattccacgtgatgtatctggtgaaggtgtgcagcaggccctctctgaaaattttagaaggtactgtagcaaggcgttccacctcaaaggtggtcgtaagcattcgcacccaagagtttattcaaattgatacaacgaatatcttattcttctgggggtggagccgttggatggcatcaagcccattatttaacccccgccctgggtgaaaaaggaattgggatttggttccctgaaaaaaaaaaatgtctgatgtaaattgaaaaccatgttttatctcacgtattaccagaagaccttttaagatttggtttaattcccagagtttatcggtcgtcttccagttattgcgaacctagagccacttgatgaagatgctcttgttgatattttaacgaaaccgaaaaatgcacttgttaagcaattccaaaaactattggagcttgacgatgttgagttagaagtttgaagaaagtgcactaattgaaattgcgaaaaaagcaattgaacgtaaaacaagtgctcgtggacttcgttctattatttgaaggctaatgctttgagtaatgttcgagctaccatctcgcaaagatatcgagaagtgtattcttacaaaagaaacagtagctgataatgcagcaccaaaattggtgttacaagacggtactgtacttgatacaaaaacatctgcataatgcgaaggagaaacagcaatt

SEQ ID NO: 10296 - DNA, 2643 bp, Bacillus anthracis
atgtcaaacacggaaaagaatttaccaactaaatatgatcatatgtccgttgaagaaggcctttatcagtggtggctagaaggcaaatattttgaagcaacaggagacgagaagaaacaaccgtatacaattgtaatcccacctccgaacgtaactggtaagttacacttaggtcatgcttgggatacaactcttcaagatattttaactcgtacgaagcgtatgcaaggttacgatgtattatggcttccaggaatggaccatgcgggtatcgcaacacaagcgaaagtagaagggaaacttcgtgaagaaggtatttcacgttacgatcttggccgtgagaaattccttgaaaaggcttgggaatggaaagaagaatacgcttctcatattcgtcaacaatgggggaaagttggtttaggactagactattctcgcgaacgcttcacattagacaaaggtttatctgatgcggttaataaagtattcgttcaattatacgaaaaaggcttaatttaccgcggtgaatatattatcaactgggatccagcaacacgcacagctctttctgatatcgaagtaattcataaagaagttcaaggtgcattctaccatatgaactatccgttaacagatggttctggacacattcgtcttgcaacaactcgtccagaaacgatgcttggtgatacagcagtagcggttcatccagaagacgatcgttacaaacatttaattggaaaaacagttacacttccaatcgtaggtcgtgagattccgattattgctgatgagtacgtagaaaaagactttggaacaggtgttgtaaaaattacaccagcacatgacccgaatgactttgaagtaggtaaccgtcacgacttaccacgcatcttagtaatgaacgaagatggatcgatgaacgaaaaagctggtaagtataacggcatggatcgtttcgaatgccgtaaagcgttagtaaaagacttacaagaagcgggcgtattagtagaaatcgagcctcatatgcattcagtaggtcatagtgagcgtagtggtgcagttgtggaaccttacttgtcaacacaatggttcgtaaaaatggctccacttgcagaaaaagcaattgagcttcaacaaaaagaagaagagaaagtaacgttcgtaccagatcgttttgaaaacacatacttacgctggatggaaaatatccacgactggtgtatttctcgtcaattatggtggggacaccgcattccagcttggtatcataaagaaactggtgaagtatacgtaggtacagaagcaccagcagatattgaaaactggaatcaagataacgacgtacttgatacatggttcagttcagcgttatggccattctcaacacttggttggccaaatgaagatgcagcagactttaaacgttactattcaacagatgcgttagtaactggttatgacattatcttcttctgggtatctcgtatgattttccaaggtttagagtttacaggcgagcgtccatttaaagatgtattaattcacggtttagttcgtgatgagcaaggacgtaagatgagtaaatctcttggtaacggtattgatccaatggacgttatcgagaagtacggtgcagatgcaatgcgtttcttcttatcaacaggaagtgcaccaggtcaagatttacgtttcagcatggagaaagtagaatctacttggaacttcattaataaaatttggaatgcatcacgtttcgtattaatgaatatggatgacatgaagtatgaagaaatcgatttaactggtgaaaaatcagttgcggataagtggattttaactcgtttaaatgaaacaatcgaaagcgtaacacgtaacatggataaatatgagttcggtgaagctggtcgttcattatacaacttcatttgggacgatttctgtgactggtacattgaaatggcgaaacttcctctatacggtgaagacgaagcagctaagaaaacaactcgttctattttagcttacgtattagaccaaacaatgcgtctattacacccattcatgccattcgtaacagagaaaatttggcaacatttaccgcacgaaggcgaatctattacagtagcagcgtggccaacagttcgcgaagatttacaagatacagaagctgcggcagaaatgcaccttctagttgatatcattcgctctgttcgtaacatccgtgcagaagttaatacgccaatgagcaaaaaagttcaaatgcaaattaaagcaaaagatgaggctgtacttgctcaacttacgaaaaacagttcttacattgagcgtttctgtaacccaagtgaattaacaattcaaacggatttacaagcgccagaaaaagcgatgactgcaatcgtaacaggtgcagagttattcttaccgttagctgatcttatcaatcttgatgaagagagagcgcgtcttgagaaagagcttgagaagttcgataaagaagtagaacgtgtacagaagaaactttcaaaccaaggtttcgtagcgaaagctcctgcagcagttattgaaggagagcgtgcgaaagagcaagattacctagaaaaacgcgaagcagttcgccaacgtctagcggatcttgagaaa

SEQ ID NO: 10297 - DNA, 384 bp, Bacillus anthracis
atgtcacgtatttcaaaggcagaaatgtctaagttattatcagtatattttattatgggaagtaacaattgtacgaaggatccactgcaagtattgagagaggcacttgaaggttttataacaatttttcaatttcgtgaaaagggagaaggtgctttaacgggagaagagcgtatttgtttcgcaaaagaattacaagcaatttgtaaggaatacggtgtaccattcatcgtaaatgatgatgtggaactagccctcgagttagatgcagatggcgtgcatgttggacaagatgatgaaggaattacttctgttcgtgaaaaaatgggtgataaaattgttggtgtatctacccatacaattgaagaagcacgctgggtaaat

SEQ ID NO: 10298 - DNA, 1621 bp, Bacillus anthracis
aatgttcaagatatgatcttccagttcattggtggattagggattttcttattcgggattaaatacatgggcgatggactgcaacaagcagctggagatcgtcttcgcgatattctagatcgttttacaacaaacccactgatgggtgtactagcaggtatgttagttaccgtattaatccaatcaagttcaggaacaaccgctttaacagtcggacttgtaagtgctgggtttatgacattaagacaagcaatcggtgttattatgggtgcgaacatcggtacgactgttactgcatttattatcggaattaaaaatcggagaatatgctcttccaattatggcagttggagctatcttactattcttctttaaaaataaaaaagtacattctttaggtcaagttatattcggttttggtatgttattcttcggtttagaattaatgagcacaggtatgaagcctcttcgctctttagaatcattccaagaattaacggttagcatgagtgataatccaattctaggtattgttgttggtacagtcttcactttaattgtacaaagctcaagtgcaacaatcggtattttacaagaactattcggtcaaggtgcaatcgatttacaagctgcccttcctgtattatttggtgataacatcggtacaacaattacagctgtattagcagcaatcggtacttcaattgctgcaagacgcgcagcattagttcacgttatctttaatattgtcggtacaatcatctttacaattttattaataccttttacaaatttaattcaatacttccaaacgtcattaaacttaaatccagaaatgacaattgcatttgcacacggaacatttaacgtaacgaatacaattattcagttcccattcatcgctgtattagcatggattgtaacgaaaattattcgcggggaagatgctgctattgatttcaaaccgcaacatttaaatccaatctttattgaacaatctccagctatcgctttaactgaagcacaaaaagagattattcgtatggctgagttttcattacatggattaaaagaagcaaaccaatttttaaacacacaagataaaaaacacgttgacatggctactcaattagaaggagctattaacaatttagataaaaaaattaccgagtatttagttttactatcagaaaagccactttcaccaacagactctgagaagcattcagttctagcaggtgttgttggcgatattgaacgtgtcggtgatcatgtagaaaaccttgtagaacttgttgatttccaaatttcaaaccgtgtttccctatcaaacgaagcactagctgaattaaatgaaatgctcgagttaacaatctcaacattacaagatgcaattaatgctttaacaaacttcgacactgaactagctcaaacggttattgcaaaagaacgtaaaattgaccaaatggaacgtgttcttcgtaaacgtcacgtattacgtctaaacgaacgtagctgttcaggtgatgcaagtatcatctacgttgatatggtaagcaacttagagcgtattggtgatcacgctgtaaatattgctgatggtgttttaggtgaacaaggt

SEQ ID NO: 10299 - DNA, 561 bp, Bacillus anthracis
atgttattaatcggcacagaagtaaaaccgtttaaagctaatgcttaccataatggagaatttatccaagttactgacgaaagtttaaaaggaaaatggagtgtagtttgtttctacccagctgacttcacattcgtttgcccaactgaacttgaagacttacaaaaccaatatgcaactcttaaagagttaggcgttgaagtatactctgtatctacagacactcacttcactcacaaagcatggcatgatagctcagaaactatcggtaaaatcgagtacatcatgattggtgacccaactcgcacaatcactacaaacttcaacgttttaatggaagaagaaggtcttgctgctcgtggtacattcatcatcgatccagacggtgttatccaatctatggaaatcaatgctgacggtatcggccgtgacgcaagcattcttgttaacaaaattaaagcagctcaatacgtacgtaacaacccaggtgaagtttgcccagctaaatggcaagagggttctgctacacttaaaccaagccttgaccttgtaggcaaaatc

SEQ ID NO: 10300 - DNA, 1313 bp, Bacillus anthracis
ttgtttctcatctttgttcttatccttatttccggctttttcgttgccatcagaattcgctgtgtaaaaagtacgaaaaagtcgaattgaccagcttgcaaacgaaggccaataaacaagtctttagtctgcaagtaagtgtcatattctaatttagacgtttatttatcagcttgtcagctcgggattacaattacttctttagggcttggttggcttggtgaaccgactgtggaacatttactacgaccgctctttgaaaagattaatattactggaacaatggcaaatactttatcctttattattgcttttagtgtgattacatttttccatgattgtattaggtgaattagttccaaagtcattcgcaattcaaaaagcagaagcgattacacttaagtttgcacgaccaccattttgaattgatacaatgatgtccccatgaatatggttcctaaataaaaactgcaatctttcccccaaatctactctgattaaaaaccttctaaacaaaatgatcttggtcatatttgaaaaggacctacgacttgatacaggtgaaaagtctcaaagccgcggatttatttaaaaccaaattgaatttgtaaatactatttttgaattcgacgaccgagttgcgaaagaaattatggtccctcgtacagaaatgatttgcttatctactgaaaatacgttagaagaaaatatggatatcgtcgcaactgaaaagtatacacgctatccctatcatcgaaaaagataaagatgatattatcggtatgatcaatacgaaagaagtatttcacgatcaaacgaaaggcattcataagccacttgaatcttacatacattccgggcctaactgtattttgaaactgtttccaattgtaaaacactggtacatctacataaagaatcgcgttcagatgggaatcgttatggatgaatatggtggtactgcctggacttttaactagtaaaagatattcttgaagaatatcattggagaaattcaagatgagtttgatgcagatgaatcacctatgattgaaaaacgtacgcctaaacttactgtcctagatggaaaagtacttatttctgaagtaaatgatatgtttggcttacatattgatgagagcgacttagatacaattggaggctggctattatcgcaagcagttgacgtaaatattgaagctggctactccatcgaatatgccggttttcaatttaaggcattagaacttgatggacatcaagtgaaaaaaattgctgtacataaattagatatacaaacgccgctataaagt

SEQ ID NO: 10301 - DNA, 1389 bp, Bacillus anthracis
atggaaaacacattagtaaaaagtctgtatagagatacagataaatacgcaggtcaaacagtacaagtatcagggtggattcgtaacttacgtgattcaaaagcatttggtttcatcgaattaaacgacggtagcttcttcaaaagcgttcaaatcgttttcgatacagaattagataacttcaaagaaattgcaaaacttccacttagctcttcagttaaagtagaaggtaaagtaattgcaacgcctggagcgaagcaaccatttgaaattaaagcagaaaaaattgatatcgagggcttatcagattctgattacccacttcaaaagaaacgtcatacgtttgaatacttacgtacaatcgctcacttacgtccaagaacaaatgcattctctgcaacgttccgcgtacgttctatcgcagcatttgcgattcaccaattcttccaagagcgtggattcgtacatgttcacacaccaatcatcactggtagtgatacagaaggtgcgggcgaaatgttccgcgtaacaacgcaagatttaaacaacgtaccaaaaggcgaagacggacaagttgatgaatcaaaagacttcttcggcaaagaaacaaacttaacagtaagtggacagctgaacgctgaagcttatgcattagcattccgtgatgtatacacattcggacctacattccgtgcagaaaactcaaacacaactcgccacgcagctgagttctggatggttgagcctgagattgcatttgctgaactaggtgacgtaatgaaccttacagaagatatgctgaaatatgcaatgaaatacgtattagagcatgcaccagaagaaatggaattcttcaacagcttcgttgataaaacagttctagagcgcatgaacaacgtaatcaactctgacttcggtcgcatcacttatacagaagcaattaaagtacttcaagagtcaggtgctgacttcaaatacccagtagaatggggtattgacttacaaacagagcacgaaagatacttatcagaagaaatcttcaaacgccctgtattcgtaactgactatccgaaagacattaaagcattctacatgcgcttaaatgacgacggtaaaacagtagctgctactgaccttctagttcctggcatcggcgaattaatcggcggaagccaacgtgaagaaagaatggacgttttagtagacagaattaaagaactaggcatgaacgaagaggactactggtggtacttagaacttagaaaatacggcggtacaaaacacgctggattcggtctaggtttcgagcgcttcctaatgtatatcactggcatggctaacatccgtgacgtaattccattcccaagaactccaggttcttctgaattc

SEQ ID NO: 10302 - DNA, 1014 bp, Bacillus anthracis
gtgtcaaaaaatatgatttctagggttgagaatatttctcaaccccagttttataatcacaataaaatatggacaaaaccttttataatagcgattatagttgttataattttagggattatatcactgtttactggagtttatgatatacgtggacaagaggatggaatggagatgtttttcataactcgtgttccgagaacagtggcattaatgctgactggagctgcaatggcgatggcagggctcgtcatgcaactcattacacaaaatcgttttgtcgaacctactacaacgggaactattgaatggtcaagcttaggcctgctttttgtgtatttactatttcctgccccgactttagttcaaagaatgactggtgcaatcattttttcttttataggaactatgattttctttctatttttaagaagagttaagcttcgttcgtctttaattgtcccgattattggattgatgcttggagcagttatttctgcagtatctacttttttgggactcctttttcaaatgacgcaaagtattgaaacttggtttgtaggttcatttgctaacattcaggtaggaagatacgaatatttatggctgatcgttatcgttactttacttatttttatgtatgcgaatagattgactttagctggactaggagaagatgtcgcaacaagtcttggagttaattacaatcgaattgttctttttgggactgctcttatctctgttgcagttggaattgttgcagctgttattggaaacttacctttcttagggttaattgttccaaatattgtttccatgtttagaggtgatgatcttagaagtaatttaccttgggtgtgtgtcatcggaatggggacaataactgcctgtgacatcatttctcgaacaattataaagccttttgaattacctgtttctttaatacttgcatcagtgggagcagttgtgtttattactattttattgagaaaaagaaaaccaaggaggctacga

SEQ ID NO: 10303 - DNA, 546 bp, Bacillus anthracis
atggattcaatgacatttcttttatttggagcgacaggggatttagcgaaacgcaaaatttaccctgctttatacaaattatttagtaatgggaatataccgcaatctatttcgattatcggtattggtagaagggtaatgtcagatgtggaatttcaaacaaaggtagaacaatcccttgctacattttctagaagatctactgatgacgaatcaggagtagaagaatttcttagcacatttcgttattgtcaattaaatacagcgaatatagaggactatcaagatttgttgagtcttgtaaagagacgtgaaacagaattaaacattcctgaaaaccgtatgttttacctatctgttataccaaaagtatttgatgtcattgctttaaatattaaggaaagtggattgtgggctacaaaaggattgaaccgtcttattatagagaagccttttggtcatcatgtaacgtctgctcacgagtttaacgaaaaattaattgaagattttgatgaaactgatattttttatatcgatcattatctt

SEQ ID NO: 10304 - DNA, 1914 bp, Bacillus anthracis
atacaaaaaataagtaagtctcaagatttattattatttagttggtttcaagccgcttaaggggtttgtttggcacattatacagatcaagaaagagttactattagtattcctataattgaaaagaatcttgaacaaagtgagaatcttaataagttgattcctttaggaagtgaaattcatccgcatcacacctttaaacaattagtaaatgagattgaacaaacgactttattcgggtatgaaaatcaggagtatccgctctctgaattattagttaaacacaatttaaccccttttcaaattgtaatcgggatggaaggattacataatgaaaattcgctagaagaatacgcagagaataatttagtcctatggatacgaagaaaatggaatgaaatacataatgaatttgaatttcaaatttcttgcaagtcccgttcattctcttctttgcaacaatttgccaattcgtattgttatgttttaaagcaagtttcacaaaacccgaatttggcattgaaagatatttgtattattgcagaagaagaaaaagagttgctagaaggattgaatacttttcaaacgggcatagacttgtttcaatcatttcaagatttgtttgaagcgcaagtattaaaaactccagatcaaattgctgttgtttgtaatgatcaatctttgacatatagagaattgaataagaaagcgaatcaaatggctttctattctcaaaagtaaaggtgttccaaaaagaaagtattattggcgttatggtagatcggtcattagaaatgattattggtatgatggggattttaaaagcagggagcagcctatttaccaatcgaccctaactacccaactgaacgaattgaatatatgttacaagatagtcaagcaaaatatttacttagtaagcgaacagaagaagtattgccacaatttgcgggtgaagtactgtatcttgataaagaatatctttttcaaggtgaagaaagtaatttagtacgagaacataatcctaatgatttggcttatgttatttacacatcaggatcgacaggaaatccaaaaggggtaatgatagaacaaaaatcgctagttcattttttaaatgtaatgagagaaaaagtaaaggctaatcaatcattcttgtttcttgctagtgtatcttttgatatttccttgttagaaatatgtcttcctttaacgcaaggttcaaaagtagtaattgctacggaggaccagtttgcaacaaaagaattggctcatttagtcaaaaaacataaggtggatttatgggaaatcacgccatcgcgaatggaagtgattttgagtgatccagaaggggcaaaattttctaaaagatttaaaatctattttattagcaggagaagcattttccattgatttggttgaaaaaattcgttgtatcagtgaagcaacaatttcaaatatttatggtcccacagaaacaaccatttgcgcaacagtaaaagacttgagcacttccaaagaagttacgattggcaaacctaacccgaattatcattcctatatattgaataagtatggccaattaaaaccatttggaattcctggtgaactctgcattgctgggcgtagcggtagcacgagggtatcttggtaaaagtaaactgacagatgaaaagtttgtaccgagtccttttgcggcaggggaaatgatgtatcatacaggtgatctcgttcgttggttgcctaatggagaacttgaatatttaggtcgaatggatcatcaagtgaaaattcgggggtatcggatttgattaagagaaatcgaaactcaattaagggaaaatatcagaataaaccaggttatcgttgttgatcagtgtatggaaataggaaattattagctgctactatgtg

SEQ ID NO: 10305 - DNA, 1887 bp, Bacillus anthracis
atgggatacaatgccggttcatacgatgtcatagtaatcggtgcaggtcatgcaggatgtgaagctggtcttgcggcagcacgaatgggctccaaaacattaatgttaacaattaacttagatatggtagcgtttatgccatgtaacccttctgttggtggaccagcaaaagggattgttgttcgtgaaattgatgcattaggcggagaaatggggcgcaacattgataaaacgcatattcaaatgcgtatgttaaatacaggtaaagggccagctgtacgtgcacttcgagcacaagcagataagttctcttaccagcatgaattaaagaaaacaattgaagaaacaccaaacttaacgttgttccaaggaatggtagagcgtttaattgttgaagatggcgaatgtaaaggtgtaattacgcaagctggtgctgaatatacagcaaaaacagtcgtaattacaactggaacgtttttacgtggtgagattattatgggagatttgaaatattcgagtggtccaaataatcaacaaccatctattactttatcagaacatttagaggagcttggattcgatcttgttagatttaaaacaggtacacctccgcgtgtaaatagtaatacgattgattacagtaaaacagaaattcagccaggtgacgataaaccacgagctttctcttttgaaacaacaaaatttattatggatcaaattccatgttggttaacgtatacaagtacggaaacacatcgtttaatagatgaaaatctacatcgctcagctatgtattctggtatgattaagggaacagggcctagatattgtccttcaattgaagacaaggtagtaaggtttaatgataaaccacgtcatcaaattttcttagagccagaaggacgtaatacacaagaagtgtacgtacaaggtttatctacaagcttaccagaagacgtacagcgtgatatgcttagaacaatccctggtttagaaaatgttgaaatgatgcgtacaggttatgcaattgaatatgatgcaattgtgccaacgcaactatggccaacacttgaaacgaaaaaaattaaaaatttatatacagcaggacaaattaacggaacttctggttacgaagaggcagcaggacaagggcttatggccggaattaatgcagcatgtcgttctttaggtaaaaaagaagttattttaggtcgtgaagatgcttatattggtgtcttaattgatgaccttgtaacgaaaggaacgaatgaaccatatcgtttattaacgtctcgtgcagagtatcgtctattattacgccatgataatgcggatcttcgtttaactgaagttggtcatgaaattggattaattacagaggagcgctatgaacgatttacaaataaaaaattacaaattgaacaagaaaaggaacgtttaagcagcattattattaaaccacgtcctgaagttcaagaattaattcgcaatattggcggaagtgaattgaaagatgggatacgtgcaagtgacttattacgtcgtccagagatgacatatgagcatattcatcttttagtaccaagtgaagtagaattaagtgatgaagttaaagaacaagttgaaattcagattaagtacgaaggatatatcgaaaaatctttacaacaagtagagcgtatgaagaaaatggaaaataaaaaaatccctgtagatattgattatgatgcgatttctagccttgcatcagaagctagacagaaattgaaagatgttcgtccgctttcaatggggcaagcttcacgtatatctggcgtaaatccagcggacatttccattttacttgtgtatattgaacaaggaaaaattgcgcgagtatcgaaccaa

SEQ ID NO: 10306 - DNA, 108 bp, Bacillus anthracis
ttggttttcttaatcgctgttatcggaactcgcagcttagctcttcgcccaacaggaatgcaaaacttcatggaatgggtgtttgacttccgtgaaagggattatcaa

SEQ ID NO: 10307 - DNA, 528 bp, Bacillus anthracis
atgagcattgtcaatacgatatcattatgggtaatcccttgtgtcattggttttatccttttatatggaacgataaagaaagttccgacgtatgaatcgttcgttgaaggaggaaaagaagggattcaaattgcaatttccattttaccgtttatggttggaatgctcgtatctatttctatatttcgagcttcaggtgcattagatgcaatgatatcagtgatgaagccgatgttagatttaattcatgtcccagcagaaattgttccactagcacttatacgtcctatttcgggctctgctggtttaagtattacgaccgatttaattgcgacgtatggaccagactcgttcattgggcgattggcttctacgatgcaagggagtacagatacgactttttatattttaacagtatacttcggagctgttggaattagaaaaatgggagatgcattaaaagtaggactttttgccgatttaatcggaattatttgttcgattgtgtttgtttctttaatgtttaag

SEQ ID NO: 10308 - DNA, 927 bp, Bacillus anthracis
atgccgaaagtaaggacaaaagatttgattgaacaatttcaattggagttaataagtggtgaagaaggaattcatcgtccgattgatacaagtgatttatcacgacctggaattgaaatggcaggattttttacatattatccagctgatcgcgtgcagcttcttggaaagacggagcttacattctttgacacgttaacgtcagatcaaaaacaagagagaatgaaagcgctttgtactgaggagacgccatgtattattgtaactcgtaatcaagatgtaccagatgagttactgcaagcatcacgtgaatcaggcatgcctttattacgttcttctcaaacgacaacaagactatcaagtcgtttaacaaattatttagaaggtaagttagcgccaacaactgccgttcatggtgtgttagtagatatttacggcgttggtgttttaattacaggacaaagtggtgtcggtaaaagtgagacagctcttgagcttgtaaaacgtggtcatcgccttgttgcggatgatagtgtagaaattcgccaagaagatgaagacatgttagtcggaagctcaccagatttaattgagcatttattagaaattcgtggtctaggcattattaacgttatgacgttattcggtgcaggagcagtgcgaaattataagcgtattacacttgttattaatcttgaaatttgggatcaaaagaaaaattatgatcgcttaggtcttgatgaagagaagatgaagattattgatacagaacttacgaagattacacttccagttcgtcctggtcgaaacttagctgttattattgaagtggcagcgatgaacttccgtttaaaacgtatgggagtcaatgcagcacagcagttctcagaacgattaatgagtgcgattgagttaggaaatcaggag

SEQ ID NO: 10309 - DNA, 1302 bp, Bacillus anthracis
atgtttcgtacgatttcaaatttcatgagagtagctgagataagaaggaaaatcctttttacattagcgatgttaatcgtttttcgaattggcacgtttattccagttcctcatactaacgcagaggtattaaaaatacaagatcaagctaacgttttaggtatgctaaacgtatttggcggaggagcattgcaacacttctcaatctttgctgtaggtattacaccatatattacagcttccatcatagtacaattactacaaatggacgttataccaaaattttcggaatgggcaaagcaaggagaaatgggtcgtaagaaatcagctcaatttactcgatactttacaatcattctcgcattcatacaagccattgggatgtcttatggctttaataatatagcaggtggacaattaataacagatcaaagctggactacatacttatttattgcaacagttttaactgcaggtactgcatttttactttggttaggtgaacaaattaccgctaatggagtaggtaatggtatttcgatgcttatcttcgcaggacttgtagcagcgattccaaatgttgcgaatcaaatttatttacaacaatttcaaaatgcaggcgatcaattattcatgcacatcataaaaatgctcttaattggtctcgtaattttagcgatcgttgttggggttatttacattcaacaagctgtgcgtaaaataccgattcaatatgcaaaagctgtttcaggaaacaatcaatatcaaggagcaaaaaacactcatttacctctaaaagtaaatagtgctggtgtaattccagtcatctttgcttccgcatttttaatgacgccgcgtacaattgcgcagctcttccctgattcaagcgtatcaaaatggttagttgcaaaccttgatttcgcacatccaattggaatgacactatatgtaggtcttatcgttgcttttacatacttctatgcatttattcaagtgaatcctgaacaaatggcagagaatttgaaaaagcaaaatggttatgtaccttgtattcgtcctggtaaatcaacagaacaatatgtaacgaaaattttataccgtttaacatttatcggtgcaattttcttaggtgcaatttcaattttaccgcttgtattcacaaagattgctacattaccaccttctgcacaaattggtggtacaagcttactgatcattgtcggtgtggcacttgaaacaatgaaaacgttagaaagtcagcttgtaaaacgtcattataaagggtttataaaaaaagcgaat

SEQ ID NO: 10310 - DNA, 210 bp, Bacillus anthracis
atgactaaacatgatcatggtttaaaagaaaaagtagaaggtgcaattgataaagtaaaaggtgaagtaaaagaagttgtcgggaaagtaactgacaataaaaaattacaagctgaaggaaaatgggataaagtaaaaggcactgctaaagatactgtcggtaatgtaaaagaaaaagttcatgaatataaagaacataaagagaataaa

SEQ ID NO: 10311 - DNA, 630 bp, Bacillus anthracis
atggcagaccattatttttctaacgacccttctagtaaaagtgatcgtaagcgatgggaatttacgcttcgtggatctcgatttactttcttatctgaaccgtggggtgttctcgaaaaacgaagtggactttgggtctcgtcttttaattgaaagcgtttcaagtgccagaatattaaaggtgatatattagacgtaggttgtggatatggaccgattggtttatcgttggcgaaagagtttcaagaccgtaaagttcacatggtgggatgtgaatgaaaagggcgcttgagcttgcgaaagaaaaatgccgctaacaatagaaattggaaatgggcacattttttcaaagtagcgtctacgaaaacgtagaagggatgaatgctggctattctatctaaatcttccatttcgtgcagggtaaagatatcgtggcttggaatttttaaaaaaagctgtaaaacattttaatttccaggggggaaagattggggaattgttattcaaaagaaacaaggtgcaccatctgcactgaagaaactagaagaagtgttttctgaagtcgaagttgtagaaaagaaaaaaggatattatatcataaaatcaaaaaaacgttgacggttatttttg

SEQ ID NO: 10312 - DNA, 369 bp, Bacillus anthracis
atgatacaaacgaaagataaaataaaagttatgcgtgcagaagatcttcctattcaaatcggtaaagaggtccaaatgaaaggtatgtctatcgccctattccgcctttcaaatggtgatattcgagctgtagaaaatcgttgtcctcataaaaacggaccattagccgaaggaattgtatctggtgaattcgtcttttgtccgctacatgattggaagatttcattacttacaggtgaagttcaaaaacctgatgacggttgtattcaaacgtacgaagtagaagtcattaatggtgacatttatatatatatatgtaatttacaaaaggaagcctcccccctggctttccttttaaataaaactaga

SEQ ID NO: 10313 - DNA, 924 bp, Bacillus anthracis
atgaacaacagtagacgaattggactcattatgattattacaggagctaccttatggggattatctggccctatgattcagtggctatttcaacatactaacgtatcatcagttgattttttaacaattcgcttgttgcttgcaggaatatttattttatctttcttactgataaagaaacaaaacatatttcaaatttggaaacaccctagatattctatacaacttattattttctctattctcggcatgctcggtgcgcaatatgcctttatcgaaacagttcatattagtaatgcggtcacagcgacactatttcaatttctaggtcctgttcttattaccatgtatgtcgcatttgaacaacgaaaatcccctgctcccatacaactactcgcaattataactgcactaacgggtacgtactttattattacgaacggttccattgaaaatattgttttatcgaaagaagcgattatttttggcctattaacagcaattggatttgcattttatacccttcatccagcttctcttattaaagaatgtggaacaattgtagtaattggatgggggatgttaatcggaggcattgccctgcttatttgtaatcgctcgtttgaatggactcagctttcgcaaacttttacactaaaaactttttcaatgcttattctaatcatcataagtggcactctttctttccttctttatatcggtagtttgaaatatttagccgcaactgaaacaagcattttatctagcattgaaccacttgtagcagctatcgtttcaatcgcttggctgaatgaatcctttggagcctatcaattactaggcggcctatgtatcgttctttctgttattttcttaacgatgccgcaaaaagaaaatgaagctaccttttcaactgaacaaata

SEQ ID NO: 10314 - DNA, 2559 bp, Bacillus anthracis
atatcattggagatatcgtccctgcctatacacccttaatttcttaaaagacaactatacattcgttgatccgtccgactttttttatttactttttttaataagctttgcattcgccttttctatatgaaatcatttatacccgagatttattagaaaagcttttttatgatatgtgatattgccattatggttacagcacaatccactttaagttactatttacttatgaacgaacccattcacgtttttacaacatcctatatcgacatattgtttcaacttacctatccaatggcagacttactcttccttctcataggaatcaatcttttattcagaccattatccttattaccgaaaaaagttggagccgcttctcggcagtgctttacttttatatgcgactacagatgcaatttatgcttttatcaaatactttacaccagagtattctatgtttacagttactcctctttatcaagtaactttagtactagtagcaatcgcctgtattatccatacaaaaagcccctgaaaaccaaggaccaattcttttaaccccctaaacttggtgagtcaatcggattgtcattccctaattatttttgtcgaaagggaggattgtttttaatattagtggaaatacgtttttcgcactttatgttattattcgggtttatcaaacctttctctgtgttcttaatacgccataggtttagttcgtaaacaaaataaatttattattactagccccaatggcaattcaactcagacttgaaaaaccaaattgacctgcgtacagaagatttagtagaacaaaaaaatgagctctatcatacccaaacaaatgtttaagtctttatacgaggcatcatccagatccaatcttcacattagatttgtatggtaattttctcaaaagtgaataatgccggtacggactttactcggctatcaaaccaacgatttatttaatccaccctttctactcactcatatgcgaggaggatttagagaaatttattaccacctttcatcgcgtaaaaaaagggcattctatttctttagaaatacgggcttatcataaaaatagagatatttactacttgcatgttacggctggtcctatctttttaaaagatcatatttcgggagtttatttaatgattaaagatattacggaaagcaagcaacaacaagagcaaattaattttctagcatatcgtgataccttaacagagcttgcaaaccgacgtgcatttcaccaatatgtagaacaagcaattgctcgatccaaaatatcaaaaagaccttttgctgttatgtttctagatttagaccgttttaaaattattaatgataccctcggtcatagggtagggagacctcctattattcgcagtagcgaaaagactggaaagaatggccacaccaaatatgaagctcgcccgtctagctggggatgagttcacaatccttattgagaactataataaaagaccagatgtaaaaagaatggctgatacgattgtagaagctatgaatgaaccattggaaattgaaaatcaacatttacaaatctcaccgagcatcgggattgccatatatcctgaagcagggtgaagccccattgtcgattctacaacatgctgatatggccatgtatgaagcaaaaaataggggcaaaaacggtagctctctatacacgaaagaactgtacaaaaaaatggaacgaaaagcttgaattgaaaaagatttgccacttgctttagagaacactattagttggtgacgtatatcaaccacaaattgatattacaacgcaaaaagatcattggttgctgaaagcattactacgctgggaagcatccactatttaggcgatattcaccccggggagtttatttccaattggagaaggaaactccacaggtcattccacttggacattgggtattacaggaatcttgtcggcagttaacaattgggcattcccttcggttacaaagatttaaacataagtgttaacttatcagcaaaagaattccagcaagatcatttaatcgagaacatttcacaaatactaacagatgttaaagtcgatccaaagtagtgacccctggaattaccaggacggattggcgatgttcgatgaaaaagcacctctttccagggctaaaccatttaaaggaatttggtattcaaacgttcccatggatgacttccgcaccgggttattcttctctcggcttattaatctattttccttatcgatacattaaaagtccgagagaaatttacacatctagctgatcatcgaccagaagagagagccatcgtttccactatcctttcccttgcaaatactttaaacctttctgtcgttgctgaaggaattgaaacagaaaaaccattttaagtttctacaaaggaaccaactgtaaatatatgcaaggttattatttcagtaacccacttactagccagcaatttataaaatttctacaaaaaacacccagtatgaaccaatagctcatactgggtatttttatcata

SEQ ID NO: 10315 - DNA, 174 bp, Bacillus anthracis
atgtcttgtggacattgtgtaaatgctatcgaaagcagtgtgaaagagctaaacggtgttgaacaagtgaaagttcaattagcagaaggaactgttgaaagtactattgactcgtcagttgtaacattaaaagatatcgttgctgtaatcgaagatcaaggatacgatgttcaa

SEQ ID NO: 10316 - DNA, 1579 bp, Bacillus anthracis
gttgccgttttaagtaccattattttttcaagcgtatttgccgctcccccatctcagactccagctgaacaaaaccgctacatagacgtacaaatacttggtattaatgatttccatggacaactagatactgttaaaaaaattaataacaaagaagctggtggcgttgattacttagctacttatttaaaagaacgtaaaaaacaaaaccctaatacacttcttgtacatgctggtgatattgtaggtgctagtccaccagtttcagcattattacaagatgagcctacaattgaattcttaaatgatttaaaatttgatgttggtacaatcggaaaccacgaatttgatgaaggtattgaggaaatgcgccgcctcatttatggcggttaccatgagaaaactggcaattttaaaggcgcagacttcccttatgtcgctgcaaacttctataataaatccactggccgcttatttttaccgccatttactatcaaaatggtaaaaggtgtgcctgtaggattcattggcgttgttacaactgatacaccaaatgtcgtgatgcctactatgcttaaaaatgtagaaatcactgacgaagtagaagctatcaataaatcagcacacacaattaaaacgtcttggcgttaaatccatggtcgtccttgctcatgttggcggaacaacagatgaatctggtgtgacaaatggagaccttacttgaattgcaaatgaaacagatccggaagttgatgttattcttggtgggcatagtcatacgtatgtaaatggtactgtaaataataaactaatcgtccaagcgaactcttacggaacagctttctcagacgtagatgtaacaattgatcgtaaaacaaaagatattgtaaagaaaaaagctgaagttgttacaacataccatgaaggtgtagaacctgataaacaagtaaagaaaaaattagatcagtataaagaaaaaatcgcaccacttgtaaatgaagttgtcggaaaatctacagcgcttattggccgttaaacaaaatgatgctggggagtccacttcttggaattttagtggcggatgccccagcccccaagcgatgcaaactcaaatcgcacttatgattccaggtgccattcgtaatgacttagatgctggtgatattacatgggggcgaattatacggcattcagcctttggaaaccaattaattaaagtagattttacagggccagataattcctgacattttaaatcaacaatggcaaaaaggagcggcgagaatgcttcaaatttcaggtattcactatacgtgggatgcaaataaaccaaacggtggaaaaagttacaaatatacgtttaacaagcggagaagaattatctccatctaaaacgtatagcgtagttgcgaatgctttcttagcttctggcggtgatggatttgtatcatttaaaaatggtaaaaatacagaaactggtccaaacgactttgaagcgctagtcgattacgtaaaacaattaaaagaacctattcagccaatcatcgatggtagaattcaaaaaataaattaagtacac

SEQ ID NO: 10317 - DNA, 1249 bp, Bacillus anthracis
atgaataagtttgtcacgtttcttgataaaaacttatctggaccgatggcaagactttctgaacagagacatttacaagcaatccgtgatggagttatttcagcattaccatttatcatcgtaggaagtttctttttaatcgtagcatttccaccattaccgaaagatagtttcatatccgtttgggcattaaagaatcaaacaagtatattaataccatatcgcctaacgatgtttattatgtctttatatatagcatttggaataggatataatttagcgaagagttataagttagatgctttatcgggagctcagcttgcagtatgttcactgctattaacattaactcctgaattaattgataaaaaaggatttatgcttccgatgacaaatctcggagggcatggattattcgtgactatgattgtttctattttatcagttgagattttaagatttggtaagaagaacaacgtaacgatcaaaatgccagaacaagtccccctttcagtttggcgttggtttgaagcatttatacctgctgcattcgttattattattattatgagcgttattccagttgtttttaaagttgatgtacattacgtagtggataaattagcccgcaccgttagtcaaagctggagatagttactttggcgtcataatacctgtatttttaattacatttttctggtccttcggaatacatggtgtatcggttgtaggtactgtagcaagaccgctttgggatgtatatttagggaaaaatggtgaagctgtagcaagtggtgcgagtcaatttccattcattgcaccagaaccgttttatcaatggtttatttggattggtggttcgggtgcaacgttagggcttgtgttagcaatgatcgtatttggtcgatcaaaatattcgaaggcattatcgagaacttgtattgtgcctgggatttttaatattaatgaaccagttatattcggcttgccgattgtattgaatccaattttaattattcctttcgtcattacgccgctagtaacagcgactatcgcttatgctgcaactgcaatgggatttgtaacgccaactcatattatgccgccatggacattaccagccccaattggtgcatatttagctacaggacgagaatggcgtgcaaatgtattagtcttaataaatatagcaatatcattccttaattatttaccaatctttaaaatgtacgacaaaaatatggcttga

SEQ ID NO: 10318 - DNA, 2468 bp, Bacillus anthracis
atgttcgtatcatatcgttggttacaagagtatgtagatattaaagatgtaacagcacaagaactagcagacaaaatcacgaagagtggtattgaagtagaaggtgttgaagtattaaataaaggtgtaaaagggtgttgtagttggtcacgtattagaaatgtgaaaaacacccagaagctgataaattaagcaaatgcttaatcgatatcgggtgagaaagagccagttcagaataattgtgggtgctgctaacattgcaaaaaggtttaaaaagtaccagttgcaaaagagtggtgctgtactttcctggcaacttcaaaattaaaaaagcaaaactacgtggtgaagcttctcacggtatggtttgtgctcttcaagagcttggtattgatggaaagttagtttcaaaagaatacgcagatggtatcttcatcttcccaagtgacgctgaagttggtgcggatgcacttgaaattttaaactttacatgatgaagtacttgagcttggttttaacacccaaccgtgccagattgcttaaatatggttaggtgttgcatatgaagtagctgctatttacggccgcgaagtaaaacttccagctatcgacttacaagaaacagcagaaaaaacttctgattacatttctgtaagtgtagaagcgaaagagaaaaccccattatacattgcaaaaatgggtgaagaacgtaaaaattggtccatcaccaatgtggatgcaaactcgcctaatggcagctggcattcgtccgattagcaacgtagttgatattacaaactacattttaatggaatacggtcaaccgttacatgcatttgattacgataaattaggttcaaaagaaatcgttgttcgtcttgcaaaagaaggcgaaaaaattgaaacgttagatgatcaagaacgtacgttacaaagcccaccaccttgttattacaaacggcagcaagaagcgttacctgttgctggtgtaatgggcggagcggattcagaagttacaaatgagacagtaaacgttctaattgagtctgcatactttgcacgtccaactgtgcgccgtacatcaaaagacttaggtcttcccagtgaatcaagtgcaccttttcgaaaaaggaatcgaccccacgcgtactttcgaaagcatttcacattgcagctgcgttaagggcaaaatacgctggccggggaagcacttgaaggtgtcgtagaagctgacaacttacaagtacaagagcggtccggtttcgggttctggtgggaaagttacccgggttttaggtacaaatatttctgcaagtgaaaagggtacaatgttccacaaacttaaagttccccatttccagaagttgaaggaacattccacgtgaatgtaccagcacgccgtcctgacattacaatttcagaagacttagtagaagaagtgggccgtctatacggttatgaccacattccagttacattaccttctggaacgatgactcgtggtaaattaacagcagcacaaacgaaacgtcgtaaagtacgtcgcttcttagaaggtgctggcttatatgaagcgatcacatattcattaacaagcgctgataaagcgaaacaatatatggttgagccaaatgaaaaagcgcctgtaaaccttgcacttccaatgagtgaagaacgtagccaacttcgtttaaagcttagtaccgcaactactagaagcagtttcatacaatgtcgctcgtaaaaacgacagcgttgctttatacgaagtaggttctatcttcataccgacagaagcaggagaacttccgaggtgaagaacaacatcttgcaggtgttatgacaggtcttgctcttcaccatgcatggcaaggtgagaaaaaagtagtagactttctcgttgtgaaaagggtactacaaggactatttgacctgcattggtgtttcaaaccaaatcacatttggcaccagcaaaacgtgaaaggatgcacccagggtcgtacaactggaatccgtattaaatggcgaagtaattggtttcatcggtcaattgcaccccagaagcagaaaaacaatttagatgggaaaaatccattggtattcgaactatctcttgtaaaagtattcggtaccagacgccagaaggaaaccttacttactcaggccatttccccgttttcccattttatgacacggtgatatggctgttgttcgtaacgaaagaaaacaaaacctggcgaaatgaagcaaggtattgctgtacctggtgggagaactgctgaaagacgtaacccttgtttgctttatagggaaggggaaaaaaagggaggaagggcaaaaaatcccctggcatttttatggaatttcttcaatcaaagaggttcgttaccaggcgaaggaagttaccgaaggcccctaccgggttattacaagcggtaaaagaagaattttggggggaggtacggtag

SEQ ID NO: 10319 - DNA, 741 bp, Bacillus anthracis
atggagaaggtaaaagcaatactatttgataaagatgggacattaatggattttcattcaatttggataaaagtagctgaagaacttgtggcggaatgtatcaatttatatgaactgccaaagtcaatgcagcctactttattaaaagagatcggcgtggagggggtgtttgtgaaccctcgtagcgcaatagcggcaggaacaagccttgatgtggcaaaggggctttgtaagtatattacgtcatctaaggaagaggagatgcatgagtgggtaagtgaaaagttattttcccttatgtatgagcaccgttcctatatgaaaatgacggcagatttaccgagaattttacaaagtttaaaggatagaggatttattttaggtgttgtgacagctgatgatttcgcaccgacagaattatttttaaaacagtatcaattagagtctttttttgattatgttgtagcttcagatacatttccggcacaaaaaccagataaaagaattgtagaatccttctgtgataagtttcatttagatgcatgtgaagtagcggtcgtcggagatacgccaactgatttacatttagctaaaaatggtgattgctatgcaattggggtgctatctggtacaggagatcgtcaaacgttagaaccacttgcggatttagtagtacaatctgttgaggattttatttctcattcaggtgagtttatttgggaacgaggaaagtctaatgtg

SEQ ID NO: 10320 - DNA, 1374 bp, Bacillus anthracis
atgtattcaatggaacaagtagtaaacttagcgaaacatcgcggttttgttttccctggttctgaaatttacggtggtcttgcaaacacttgggattacggtccacttggaatcgaattaaaaaataacgttaaaaaagcttggtggaaaaaattcattcaagaatctccatacaacgttggtttagacgcagctattttaatgaacccaaaaacttggatcgcttctggtcacgttggtaacttcaacgatccaatgatcgactgtaaaaaatgtaaagcgcgtcaccgtgctgacaaattaattgaagatgcattagatgcaaaaggcatcgaaatggttgttgatggtcttactttcgaccaaatggctgacttaatgaaagaacatgaagtaaaatgtcctgattgcggtagtgaagaattcactgaaatccgtcagttcaacttaatgttcaaaacattccaaggtgttacagagtctagcacaaacgaaatcttccttcgtccagaaacagcacaaggtattttcgtaaacttcaaaaacgtacaacgctctatgcgtaaaaaacttccatttggtattggccaaatcggtaagagcttccgtaacgaaatcacgcctggtaacttcacattccgtacacgtgaattcgaacaaatggaacttgaattcttctgtaagcctggtgaagatttagagtggttcgcattctggcgtgaaacttgtaagaactggttactttcacttggtatgacggaagaaagcatgcgtcttcgtgaccacggtgaagaggagttatctcactacagtaacgcaacaactgatattgaattcaaattcccattcggttggggcgaactatggggcgttgcatctcgtacagacttcgatttaaaacgtcacatggaacactctaacgaagactttaactatatcgatccacaaacgaatgagcgttacgtaccgtactgcatcgagccatctttaggtgctgaccgcgtaacattagcattcttatgtgatgcatatgaagaagagcaattagaaaacgattctcgtacagttcttcgtttccaccctgctttagcaccatacaaagcagctatcttaccattatctaaaaagctatctgaaggtgctactgaagtattcgcagaattagcgaaagacttcatggtagactttgacgaaactggttctatcggtaaacgttaccgtcgtcaagacgaaatcggtacaccattctgtatcacttacgacttcgactcagttgaagacaaagctgttacagtacgtgaccgtgacacaatggaacaagttcgtatgccaattagcgaactaaaaggtttcttagagaagaaaatccagttc

SEQ ID NO: 10321 - DNA, 1112 bp, Bacillus anthracis
gtcataattattggtggcggcattgctggtctatgtgcagcaatttccttacaaaaataggattagatgtaaaagtatatgacaaaaatactgaacctactgttgctggtgcgggtattatcattgccccaaacgcaatgcaagcacttgaactatacggcatttctaagaaaatcaaaaaattcggcaacgaaagtgacggttttaaccttgtatccgaaaaaggtactactttcaataagttaattattccaacttgctatccaaaaatgtactccattcatagaaaagatttacaccaattactactttctgaactaaaagaagatactgtcaagtggggaaaagaatgcgtaaaaatagaacagaatgaagcaaacgccttaaaaatagtatttcaagatggtagtgaagcactcggtaatatactcattgcggctgatggtattcattctgtcattcgaaaataagtaacacaaggcgataattatcgttatgcaggatatacgtgttggcgcggcgtaactcctgctaataatctttctttaacaaatgattttattgaaacttggggaacaaacggtagatttggtatcgtccctcttcctaacaacgaagtatactggtatgcgctcataaatgctaaagctagagatccaaaatacaaagcttacacaacagcagatttatataatcatttcaaaacttaccataatccaatcccatctattttacaaaacgcatcggatgttgatatgattcatcgtgatattatagacattacgccaatgaaacagttttttgacaaacgcatcgtatttattggggatgctgcccatgcacttactccaaatttaggtcaaggtgcttgtcaagcaattgaagatgcgattattctggctgaatgtatcaaaaataatgcttattatcgtcaagcatttacagaatttgaacaaaaacgacgagatagaattgaaaaaatctcaaacactgcatggaaagttggaaaaatagcgcaaatagaaagtaaacctttaactctagtaagaaacgaagtaatgaaacgtatgccaaaatgggtttctgaaaagcgaacacatgaactatatagt

SEQ ID NO: 10322 - DNA, 346 bp, Bacillus anthracis
atgcaagctaaagcagtagcgagaacagttcgtattgctcctcgtaaagttcgtttagttgtagacttaatccgaggtaagcaagtgggtggaggggtttccttatctttgccaacacaccaaagaactgctccttcagttgtagaaaaaggtttaaaatctgcagtcccaaatgcagagcacaattatgaaatggacatcaccagcctagttgtagagaaagttttcgttgacgaaggtccaacgtttaaaacgtttccgtccacgtgcaatgggtcgtgcaagccaaattaacaaacgcacaagccacatcacagttgtggtatcagaaaagaaggagggataa

SEQ ID NO: 10323 - DNA, 898 bp, Bacillus anthracis
acagggacagaacgtgtaaaacgtggaatggcagaaatgcaaaaaggcggcgttattatggacgtaattaacgctgcaacaagcaaaaattgcagaagaggcaggcgcagttgccattatggcattagagcgcgtaccagcagatattcgtgcagcaggtggcgtttctcgtatggcagatccaacaatcgttgaagaagttatgggtgctgtgtcaattccggttatggcaaaatgccgtatcggtcaccttgtagaagcacgtgtattagaatcattaggggtagactatatcgatgagagtgaagtattaactcctgccgatgaagtataccatttaaataaacgtgattacactgttccatttgtatgtggttgccgtgatatcggagaagctgcacgtcgtattgcagaaggtgcatctatgcttcgtacaaaaggtgaaccaggaacagggaacattgtagaggcagttcgtcatatgcgtcaagtcaatgcagaaatccgtcaagttgcaagtctacgtgaagatgagttaatgacatatgcaaaaaatactggtgctccttatgaagtactacttgaaattaaacgtcttggtcgtttgccgggtgtaaactttgcagcaagtggtgtagcaacaccagcagatgcagcgttaatgatgcaattaggggccgatgggtgaatttgttggatctgggatcctttaaatcagagaacccagcgaaattttgcacgtgcaatcgttgtagcaacaactccttattgaggattacgaacctaattgccaagccttttctaaaggaataagggaattgcgatgtaaagggatcgcaaaattttcacgttattaccagaacaacgcatgcaagagcgtggatggtaattgaaggag

SEQ ID NO: 10324 - DNA, 264 bp, Bacillus anthracis
atggacggttttgataaaacaatgaagtttagcattcaagatgaaaaacagagtgtccatgtaaatgatgtacttttaactgtgtatgatgcacttcaagaaaaaggctataatccgattaaccaaatcgtcggttatttattaagtggagacccagcatacatacctcgccataaagatgcacgaagcatcattcgcaagcttgaacgtgatgaattaattgaagagcttgtgaagtcttacttgaaacatcatcgtgaggag

SEQ ID NO: 10325 - DNA, 1732 bp, Bacillus anthracis
ttgggacaaaatcagttcagatggagtaacgagcaattacgagaacatgttgaaataatagacggtacaagaagtcctcataaattattaaagaacgcaacatacttaaattcctatatacgtgaatggatgcaagcaaatatttggatctatgatgacagaattatatatgtaggagaaaaactaccagagcaattacatgaatgtgaagtcattgattgtgatggaaagtatgtagttcctagttacatagagccacatgcacatccgtatcaattatataatccagagacattagcgaatcatgcgatgcaatttgggacaacaacttttattaatgataatttaactttatttttcaccattaaagcgtggaagaatcatttcatttattagatgaatttacaaagattccagctagtatgtattggtggtgtcgttttgatggacaaactgaattgcaaaacggggaatctttatttaatagtgaagaaataataaagtggctacagcatgaagcagttctgcaaggcggcgagttaacagcatggccaaaattattacatggcgatgatgaaatgttaacttgggtgcaggaaacaaagcgattacagaaaaaagtggaaggacatttcccaggagcatctgaagcaacgttagcgaaattaaaactgttaggtacggattgcgatcatgaagcgatgacagggcaagaagcgttagctcgtcttatgcaaggttacaccgtttctcttaggaattcttccatacgcccagatttagaagttttattgaaggaattgttggaattaggtgttaagcagtttgatagattcatttttacaacagacggttcacatccgtccttttatgaaaatggaatgacgaatatcatgattgctaccgctataaagaaaggtattccagtaattgatgcgtatcaaatggcaagtaataatattgctcgttattataatatggagataatatacatggtgcgattgcgacaggtagaattgctaatatcaatattttagaaagtaagagaaacccagtgccaacgagcgtaattgcaaagggacaatgggtaaagcgcgacggtgtaaatacacacgaagcattacatatagactggagtaaatgtaaagtaactccattatcattagagtggtcgatagaaaaagaggatatgcttttttctaataaaacgggtatccacttattaaataacgttataacaaaaccatatactagtgaaattaacatagactgtgatgaattgtccatagattatgatgaatgtttccttatgatgattgctcgtgatggtacttggcgagtgaatacagttgtaaaaggttttgcgaaagaaataggaggccttgctagctcttattctggtacgggtgatatcattcttgtcgggaagagaaaagaagatatgcttacagcttttcacaggataaaagaacttggcgggggaatggttatagctgaaaagaatgaagtattacacgaaatagcattaccattgcttgggattatgtctgaattaaaaatgagcgagttaatacagaaagagaaaaagatggtgaatttactgcaagagcgaggttacgtatataacgatccagcatttacgattttattcttttctgcgacgcacttgccgtttatacgggtaacgtttatagggctatatgacgtaaaaagtggaaaggtagttgcttcg

SEQ ID NO: 10326 - DNA, 1652 bp, Bacillus anthracis
actaagtatatttttgtaaccaggcggtgtagtatcgtctttaggaaaaggtattacagcagcatctcttggaagacttttaaaaaatcgtggtttaaacgtaacgattcaaaagtttgatccatacattaacgtagacccaggggactatgagcccataccaacacggtgaggtgttcgtaacagatgaagggcgccaaaactgacttagaaccttgggccatatggacggtttcatccacatttaactttaacaaaatacggcacgcgaaccccggggaaaatattacccttccggtcttcaaaaaaaagcgtcgcggggggattcctcaggaggagacagttcaagttattcctcacattactaacgaaattaaagagcgcgtataccgttctggtcgcgaaacaaacgcggatgttgttattacagaaattggtggaactgttggtgacatcgagtctctaccattcttagaagcaatccgtcaaattaagagcgacatcggtcgtgacaatgtaatgtacattcactgtacgttaatcccgtacttaaaagcagcgggtgaaatgaaaacaaaaccaacgcaacatagcgttaaagagcttcgcagcttaggtattcaaccaaatatttatcgtgaaacgtacagaaatgcctgtttctcaagatatgaaagaccaagcttgcattattctgtgacatcgatacaaggcacgtgttattgaagcccgcgatgcagatactttatatgcggttccattatctcttcaagagcaaaatattggacaaaatcgtttgcgatcacttaaaattagacaatccagctgcagatatgacagaaagtggactggcttttgtgtgaaaaagtgcgtaacctattctaagaaaacaaaaatcgctcttgttggtaaatacgtagagcttcaagatgcatacatttctgttgtagaagcacttcgtcatgcaggttactctttcgacacagatgtagaagtgaaatgggtaaacgctgagcacgtaacagcagagaacgtacaagaattagttggtgacacagacggtatccttgtaccaggtggcttcggcgatcgtggtgtagaaggtaaaatcgttgcaattcaatatggctcgtgaaaacaaagttccatttttaggaatttgcttagggtaggcaacttgcatcaatggatttcgcacgtaacgttataggatttgaagggagctatcttttttgaaatttactcctgacacaccttatgcaatcattgacttattaccagaacaaaaagatgtagaagacttaggtggtacacttcgtcttggtttatacccatgtaagctttctgaagaaacaaatgcttacaatgcttacaatgagccggttgtatatgagcgtcatcgtcatcgttatgagttcaacaatcaattccgtccggatatggaaaaagcaggatttgtattctctggtacaagcccagacggccgtctagttgaaatcattgaattaaaagatcacccttggttcgtggcagcacagttcccaccagaactagtttctcgtccaaaccgtccacaaccattggtccatgactttgtaaaagcttctcttacgaaataagagagccagtaataaaaaaagcgcctgaaatag

SEQ ID NO: 10327 - DNA, 591 bp, Bacillus anthracis
atggatacgaatattacttggcatacagcttctgtttcaaaagatgagagaagagtgaagaatgggcatcatagttttgtaatttggtttactggtttatcagcttcgggtaaatctacagtagcgaacgcggttgctcgtaaactatttgaaaagaatattggaaactatgtacttgatggagataatatacgccacggtttaaataaagacttagggttctctgaaagtgatcgtatggaaaatataagacggattggcgaggtggcgaagctatttgtagatcaaggagccgttgttcttacagcgtttatttcaccgtttcgagtcgaccgaaaacaagttagggatctattagctgtagatgaatttatagaagtgtttgtaaaatgtccaattgaagagtgtgagaaacgtgatccgaaagggctttataaaaaagcaagaaaaggtgatattaaagagtttacaggtatcgattcaccgtatgaggaaccagagaaagcggaattaattgtagaaacgcataagtattctattgaagaatgtgcagaacaaatcgtgaagtacttacaagagcgtagtttgata

SEQ ID NO: 10328 - DNA, 708 bp, Bacillus anthracis
atgaaaggaattgtatatgttggacacggtagtcgcttgcaagaaagtaacgaacaattcattcactttattcaatctgttatgaaagaacgtaacgaaagaattcaaaaaatagcttttctagaactaacgacacctaccatttcggatgcagttacagaaacgatactagagggagcaactgaaataatgattgtacctgttttattatttgcagcagctcactataaacgtgatattccttttgagatagaaaaaatgcaaaagcaatatccacatataacattttcagttgtaccaccttttagtacgcatccgcatatggttgaacttgtagtgaaaagaatacgtgaagctatgccaatgcaaaatagtagtattttactcgtaggaagaggtagtagtgacccccagccgatacatgagttacagcaaattggagtagctgtcgaacaaaaactcggtatgcgtgtatgttgttcctttttaacgaaaggaacgccctcttttactgctgagctcaagactataacatcgactgcatctcatgtatatgtcatgccgtaccttctctttactggattattgcttcaaaaaattaagttgcatacaaaaaaatacgatcacgttacaacttgtaactgtcttcagtttgatacatatatgaaattaacattactagaacgaatggaggaatatgtgtatgta

SEQ ID NO: 10329 - DNA, 1284 bp, Bacillus anthracis
atgaattatttgtttaaaaatggtcgttatatgaatgaagaaggaaaaatcgtagcaacggatcttctagtacaagacggtaaaatcgctaaagtagcagaaaatattacggcagataatgctgaagtgatcgatgtgaacggaaagttaatcgcacctggattagtagatgtacacgtacaccttcgtgaaccaggtggtgaacataaagaaacaattgaaacaggtacattagcagcggcaaaaggtggattcactacaatttgcgcaatgccaaatacacgcccagtaccagattgcagagaacatatggaagacttgcaaaatcgtattaaagaaaaagcacatgttaacgtactaccatatggagcaattacagtacgtcaagccggttctgaaatgacagatttcgaaacattaaaagagcttggagcatttgctttcactgatgacggtgtaggcgtacaagatgctagcatgatgttagctgctatgaagcgtgcagcgaaattaaatatggcagtagttgcgcactgtgaagagaatactcttattaataaaggttgtgtacatgaagggaagttttctgagaaacacggattaaacggtatcccatcagtatgtgaatctgtacatattgcaagggatatactgcttgctgaagcagcagattgtcactatcacgtatgtcacgtaagtacgaaaggctctgtacgcgtaattcgtgatgcaaagcgcgctggaattaaagtaacagcagaggtaacgcctcatcacttagtgttatgtgaagatgatatcccatcagctgatcctaattttaaaatgaacccaccgcttcgtggaaaagaagaccacgaagcattaattgaaggtttattagatggaacaatcgatatgatcgcaactgaccatgcaccgcatacagcagaagagaaagcgcaaggaattgaaagagcaccattcgggattactggttttgaaactgcattcccacttctatacacaaaccttgtgaaaaaaggaattattacactagagcagttaattcaattcttaacagaaaagccagctgatacattcggcttagaagcaggtcgcctgaaagaaggtagaacagctgatattacaatcattgatttagaacaagaagaagagattgacccaacaacattcttatcaaaaggaaaaaatacaccattcgcaggttggaaatgccaaggatggccggtaatgacaatcgttggtggtaagatcgcatggcaaaaggagagtgcattagta

SEQ ID NO: 10330 - DNA, 462 bp, Bacillus anthracis
gtgaatcgtattcgcatgatttgtgaattatttgctcagcataatatgtatgtacttttagaaacacacccaaatacgttaacggatacgttgccttctactttggaattattaggcgaagtagatcatccgaatttgaaaataaatcttgattttcttcatatatgggagtctggtgcagatccagttgacagcttccagcaactaagaccgtggatacaacattaccattttaagaatatatcttcagcagattatttacatgtgttcgaaccgaataatgtatatgcagcagcgggaaatcgtactggtatggttccattatttgaaggcattgtaaattatgatgagattattcaggaagtgagagatactgatcatttcgcttcactcgaatggtttggacataatgcgaaagatatattaaaagcagaaaggagaatactaacaaatagaaccttt

SEQ ID NO: 10331 - DNA, 921 bp, Bacillus anthracis
atggaaggtgtagtattattacataagccaaaaggcatgacatcacatgattgtgtatttaaattaagaaagatattgcgtgaaaaacgaattggtcatacaggaacattagatccagatgtaacaggagtattgccgatttgtgttgggcgagcaacaaagattgcgcaatttttaacgagtgagacgaaaacatatgaaggtgaagtgacattagggttttcaacaacaactgaagatgcttctggtgaagttgtggaaacgaaatatgtagatcgtgttattactcgtaaagaagtggaagaggctcttgcgacattaacaggtacgattgagcaaatgcctccgatgttttcggctgtaaaagttaacggaaaaaaattatatgaatatgcaagagcaggacaagaggttgaacgtccagttcgtacaattacaattcatgaatttgtattactagatgaccgtgaagtgtttgaaggagaaaatatttcattccgtttccgtgtaacgtgtagtaaaggaacatatgtaagaacattagcggtaatgattggtgaaaaacttggttttccatcacatatgtctcaccttgtaagaacggcttctggtgaatttttattagaggattgcatatcatttgaagaaattgaggaaaacgtgcaaaatggaacagtagagtctatcttcatttcaattgatgaagcattaagtaaattcccaaaaatggttgtagatgaaaagcaagcagaaaaaataaagaatggtatgttcttaaaaaatgaattgcaaataacggcgccatttataacagtgtttgataaaaacgatcgttgccttgcaatttatgagcaccatccaaagcaccctggtatgctaaagccgatgaaagtacttgtgaataatcaagaactaaagcta

SEQ ID NO: 10332 - DNA, 1092 bp, Bacillus anthracis
atgtttacaagtcgagtcatagatacattacaaattaagtatcccattattcaagcaggtatggcgggtgcgattacgacgccaaaacttgttgcagctgtaagtaatagcggaggattaggtactcttggagcaggctatatgagcccagaacaaattcgtgaagcaatttatacaataagggagctaacagataagcccttcggtgttaatttacttttaacgaaagaggtacagatagaagaagagaagataaacttgggaaagggattacttagcggagtgaatagagaattcggtatagaggaagaagagcagttaaagcttccaaaaagttataaagaacaattccaagtgttattagaagaaaaagtaccagtcgttagctttgcgtttcaaacgttagaaaaagaagagataaatgatttgaaaagaagtggaataaaagtcatcggcacagctactcatgtggcagaggcgaaagtgcttgctgaattaggagtagacattattgtcggtcaaggtagcgaggcaggagggcatagaggaacgtttatcgggaaagaacaggacgctatgattggtacgtttgcattaattccgcagctagtagcagcagttccgcatatcccgattgttgcagtaggtggtgtaatgaacggacaagggcttgttgctgcatttacactgggggcagaagctgttcaaatgggatcagcctttttaacgagtgaagaaagtattacgcatgatgtgtataaagaagcagttttacatagtacagatacgagcacaactgtaactcgggcgttttccgggaaatatgcacgcggtattcgtaatgaatttatagagaagcatgaagggaaagaagaagggcttccgatgtatccggtgcaaaatgtattaacttctaaaatacgccaagaagcagcaaaacaaaataatggagaatatatgtcactttgggcgggacaagcgtcgtcattagcacgaatagaatcagctcagcatgtagtggagcgagttatggaagaagcaaataacgtaatcgaacaattacagaatgtatatagaaaaagaccacttgaa

SEQ ID NO: 10333 - DNA, 767 bp, Bacillus anthracis
gcacttatcctttcttttcttcttatatttagtgttgcatgtacaagcggagataagaaagagaaatcaactgctacagaaggaaaaacagttgaacttactatatcagcagctgcaagcttacaagatgcgctaaaagaaattgaaacaaaatataaagaaaaagaacctaatattaaactttcttttaacttcggcgcttctggtgcacttcaacaacaaatcgaacaaggtgcacctgctgatttattcttctcagcagccgaagataaattccaaactcttgttaaaaaaggattcattaatgaaaaggaagggaaaaatcttcttggaaatgagctcgttctagtcgtcccaaaagatagttctcttacaaaaattcaagatttaaaagatgaaaaaataaaaaaatcgcacttggcacacctgaatctgtacctgcgggaaaatacgcaaaagcttctctcacacatgaaaatctttggaatgacgttcaaaataaagtcatatttacaaaagatgtgcgccaagtgttaacatatgtagaaacaggtaatgttgatgctggtattgtatacaaaacagatgctcttatttcagacaaagtaaaaatcggcgagacagcagcaactacttctcatgagccaatccactatcctttaggcgttataaaagaatcgaagcataagaaagaggcgacttcattttatgagtatttgcagtcaaaagatgcacaatctatctttaagaaatatggatttacagtc

SEQ ID NO: 10334 - DNA, 1065 bp, Bacillus anthracis
atgtttacaagtcgagtcatagatacattacaaattaagtatcccattattcaagcaggtatggcgggtgcgattacgacgccaaaacttgttgcagctgtaagtaatagcggaggattaggtactcttggagcaggctatatgagcccagaacaaattcgtgaagcaatttatacaataagggagctaacagataagcccttcggtgttaatttacttttaacgaaagaggtacagatagaagaagagaagataaacttgggaaagggattacttagcggagtgaatagagaattcggtatagaggaagaagagcagttaaagcttccataaaagttataaagaacaattccaagtgttattagaagaaataagtacccagtcgttagctttgcgtttcaaacgttagaaaaagaagagataaatgatttgaaaagaagtggaataaaagtcatcggcacagctactcatgtggcagaggcgaaagtgcttgctgaattaggagtagacattattgtcggtcaaggtagcgaggcaggagggcatagaggaacgtttatcgggaaagaacaggacgctatgattggtacgtttgcattaattccgcagctagtagcagcagttccgcatatcccgattgttgcagtaggtggggtgtatgacggacaaggggctggtgctgcatttacactgggggcagaagctgttcaaatgggatcagccctttttaacgagtggagaaagtattacgcatgatgtggtataagaagcagttttccatagttcagatccgagcacaacttgtaactcgggcgttttcccggaaatatgcacgccgtattcgtaatgaatttatagagaagcatgaaggaaaagaagaagggcttcccgatgtatccggtgcaaaatgtattaacttctaaaatacgccaagaagcagcaaaacaaaataatggagaatatatgtcactttgggcgggacaagcgtcgtcattagcacgaatagaatcagctcagcatgtagtggagcgagttatggaagaagcaaataacgtaatcgaacaa

SEQ ID NO: 10335 - DNA, 630 bp, Bacillus anthracis
atgaatcctaatccaaatgttaaataccctattgaaggaaatcaaaacgtccattttataaaaaatacaataacaaaagctaatatactcgttggagactattcatattatgatgcgaaagatggagaaacatttgaagatcgagtattacatcattatgaatttcttggagatcgccttattattggaaagttttgttgtattgcaagtggagttacctttattatgaacggagcgaatcatcggatggatgggttttcggcatatccatttaatatatttggaaatgggtgggagaagtatacacctaatttgtctgatttaccttacaaaggcgatacagttataggaaatgacgtttggatcggtatggatgcaaccattatgcctggaataaaaataggggatggtgcaataatagcagctaaatctgttgtgacgagagacgtcgcaccatatacaattgttggcggaaaccctgcaaataaaataagggagagattttcaaatgcaataatagaagaattattacaaattcaatggtggcattttgatattgaaaaaataactgaaaatataggtgctattgtacaaggaaatatagagccattaagaaagctaaaaagggaa

SEQ ID NO: 10336 - DNA, 540 bp, Bacillus anthracis
gaattcgctagtgattttgaagtagatgaagtaattgacatgaaaggaaagtgggttttaccagggcttgtaaatacacatacacacgttgtaatgagtctcttaagaggtattggtgatgatatgttattacaaccatggcttgagacgagaatttggccacttgaaagtcaatttacgccagaacttgcggttgctagtacggaactaggattacttgaaatggtgaaaagtggtacaacatcattctctgatatgtttaatccaattggagtagatcaagatgcaattatggaaacggtatcaaggagcgggatgcgagctgctgtttcaagaactttatttagctttggaacgcaagaggatgaaaagaaagcaattgaagaagctgagaaatatgtgaagcgttactataacgaaagtggtatgttaactacgatggttgcaccgcatagtccatatacatgcagtacagaactgttagaagagtgtgcacgtattgcagtagaaaaatcaaacgatggttcatattcacctttc

SEQ ID NO: 10337 - DNA, 620 bp, Bacillus anthracis
atgaacattgcaaagttaattgaccatacaattttaaaagctaatactactaaagaagatgttatgaaagtaatcgaagaagcaaaggaatataaattcgcttctgtttgtattaatcctacatgggtaaagctagctgctgaggagtaagctggacatgatgtagatgtttgtactgtaatcggtttcccattaggagcaagcacgactgaaacaaaagcatttgaaacaaaagatgcgattgcaaaaggtgcaactgaagttgatatggtaatcaacgtaggcgctttaaaagatggcgataacgaacttgttgaaaaagacatttatgaagtagtacaagcagcaaaaggaaaagctcttgtaaaagtaatcattgaaacttgcctattaacagatgaaggagaaagtttccgcgcttgggaattattcagtaaaaagcgggtgccgatttcgtaaaactttcaactggattctcaacaggcggagcaactgctgaagatatcgcattaatgcgtaaaacagttggaccaaacgttggtgtaaaagcatctggtggtgttcgtacacgtgaagatgcagaaaaaatggtagctgctggagcttctcgcgttggagca

SEQ ID NO: 10338 - DNA, 837 bp, Bacillus anthracis
atgaaaaacttacaaagtacaacaaaattgcataacggtgtagaaatgccttggttcggtttaggcgtatttaaagtagaagaaggaccagaacttgtagaagcaattaaatcagcaattaagacaggataccgtagcatcgatactgctgcgatttatggaaatgaagcagctgtagttgaaggaattcgcgctggtattgaagcgactggaatttcaagagaagaattatttatcacttcaaaagtatggaacgcagatcaaggatacaaagaaacaattgctgcatatgaagagagtttaaaaaaattacaactagattatttagatttatatcttgttcactggcctgtagaagggaaatataaagatacgtggagagcgttagaaacgctttataaagaaaagcgtgtacgtgcaattggcgtaagtaacttccaaattcatcacctgcaagatgtaatacaagatgcagaaattaagccaatgatcaatcaagtagaataccatcctcgtttaacgcaaaaagagttacaagctttctgtaaagaacaaggtattcaaatggaagcatggtcaccacttatgcaaggtcaattattagataatgaaacattacaagcaattgctgagaaacacggtaaaacaacagcgcaagttattttacgttgggatcttcaaaatggagtaattacaattccgaaatcaacgaaagaacaccgcattattgcaaatgctgatgtatttaactttgaattaacgaaagaagatatggagaaaatcgatgcgttaaatgaaaatcaccgcgttggtccagatcctgataactttgatttc

SEQ ID NO: 10339 - DNA, 432 bp, Bacillus anthracis
ttgattaattttaacttttttatgaatgatgttgtccgccaagcgcgtgaagagattgtttctgctggatatacagaattaacgacgccagaagcagtagacgaagcgtttaaaagaaatggaacaacacttgtaatggtaaactctgtatgtggttgtgcaggtggtattgctcgtcctgctgctgcacattctgtacattatgataaacgtcctaaccatcttgtaacggtgtttgcaggtcaagataaagaagcaacagcaagagctcgtgaatatttcgaagggtacccaccttcttctccatcatttgctttattaaaagatggaaaaattgtaacgatggtagaacgtcatgaaattgaaggtcatgaaccgatgcaagttattgcaaaactacaatcgtatttcgaagagaattgcgaagaacta

SEQ ID NO: 10340 - DNA, 2118 bp, Bacillus anthracis
atgagcaagaagcagaaacaacaaaagaaaaagactcacgttccttttcggttaaacgtgctgtttttctgcgtgtttttaatgttctccgcggttattgtaaggcttggatatgtacaaattgttcgcggtgaggaatataaaaatgaagtggagaggaaagagaactcgacgattagtaatcctgtaccacgtgggaaaatatttgaccgttatgggcgacctgtagtagataatgcagctgtacgtacgattacatttacaaaaatgaaaggatcaactgcagaggctcgcttagaaacagcgaaaaagctagcagatttgattgaagtaccgacaaataaattaacagatcgcgataagaaagattattggcttgctattcataaagaggaagctaaagaaaaaattacgaataaagatcgtcaagagtttaaagataaaaaaattgacgataaagaattagatgagcgtcaacgaaatcgcgtgacagaagaagaagtgaatcaattatccgcaaaagatttagaagtactagcgattaaaagcaaaatggacggcggatatgcgatgacgccacaagtcattaaaaaggatgctacagaacaagaatatgcgattattagtgaaaatctagcaacattaccgggtgtagatacgaatgttgattgggatcgaaagtatatttatgacgatttattccgaagtgtacttggcggggtttcaacgtctgatgaaggcttacctagagaaagattagattactatcttgttcgtgattataatcgaaatgaccgcgtagggaaaagttatcttgagcagcaatatgaagatagtttgcacggtaataaagcggaagtgagaaatgttacagataaaaacggtaatattttagaaacgattaacgtatcaaaagggcaaagtggtaataatctaaatttaacaattgatatggaattacaaaagcgtgtagaagaaattatcacgaaaaatttattgagatataaaggtgggcaaccctatttagatcgtgcattcgttgtaatgatgaatccaaaaaatggtgaagttttatctatggcagggaaacagttagtggaagaaaatggcgaaacgaaagtacaagatttcgcattaggaacgatgacaagctcttatccgatgggatcaactgtaaaaggtgcgacagtacttacaggatatcaaacaggtgcaattcaaccaggttcagttcaacttgatgaaccaatcagattaaagggaacgccaccaaaatcttcgtggaagacgatgggatatattaatgatttaacagcattaaaaatgtcttctaacgtatatatgtttaaaacagcgatgaatatcgcaggcgttcaatatgtaagaggtggtacgttagatataccacaaaaagcatttgatacgatgcgttattatttcggacagtttggacttggcgtaaaaacaggtattgatttaccaaatgaatctgcgggccaaacaggtagaggaaatcagccaggtttcctactagatttatcaattggacagtatgatacgtatacgccacttcaattagcacaatatgtttcaacaattgcaaatggtggatatcgtatgcagccgcaagttgtaaaggaaattcgtcaaccgtcagcgaaacaagacgaagttggaaaagttgttcattcaatggagccgaaagtactaaatcgtattgatatgcctgaatcacaaattaaacgtgttcaggaaggatttagacaagtatttaacgattctggtggtacagctgcgaaatattttacaggtgcaccatataaagctgctggtaaaacaggtacagctcaaactgtgtatggcggagataaagagattggtaaaaaggcaaacggtgagcgtaaagaaacatataatttaacattagtaggttatgcgccacttgaagaccctgaagtagcattttctgttgttgtaccttgggtagatgataaatcaggtattaacggatatattagccgtgacattatggacgcgtactttgatttgaaaaaagtagaaaatggcgaagctactaaagatgaaatagataagaaaaataaagaacaagatgatgaa

SEQ ID NO: 10341 - DNA, 777 bp, Bacillus anthracis
atgcagaaaataattggccttgccattattggattttccgctcaattaatggatggagcacttggaatggcgtacggggtaacatctacctcacttttactaatgtttggtatcgcaccggctgtaaccttccgccttctgttcatttaactgaaagtgttacaaacgccgctttctggtgcatctcacctcaaatttggaaacgttgataaatataccgttttcagggcttacattaccaaggagcaatttgttggcatttgtgtggggcatgtttttttaagtaatttacctgggcgatggcatttaaaccgcaaattttccttatttttatttactttaggagtttatattttattacgatttattattcaaaaacaaattgttacttcaaataaacgtatgtcagctaaacaacttgtgccgcttggcttattcgctggattcgttgattcaactggtggcggtggttggggaccgattacgacacctgttcttctagcaagaggaaatgaagcgagaaaagttattggatctgtagatacgagtgaatttcctgttgcattagctgcaacaattggcttcttcatctcgcttggctgggaacaagtaagctggttttgggaatttgcgctaatgcgttgggggatatgtcgcagctccaattggctgctgggtaaaacccatcggaccatcccatttacttgggcgaattaattggggggcttattattcttttacaatatacgtacactacttactacttttaaagtagat

SEQ ID NO: 10342 - DNA, 459 bp, Bacillus anthracis
gtattcgaaggtcatttagttggtacaggattaaaagttggggttgttgttggacgttttaatgaatttattacaagtaagttactaggcggagctttagatgggttaaagcgtcacggtgtagaagaaaacgatattgatgttgcttgggttcctggcgcattccaaattcctttaatcgctaaaaagatggcaaatagcgggaagtatgatgctgttattacggtacgtacagcaattcgaggtgctacaacacattacgattatgtttgtaatgaagtagcaaaaggtgttgcatctttatcacttcaaacagacatcccagttattttcgcgcgtataaacgacagaaacgatttgagccaccgattggacgcgcgggcaccaaagcttgtaaaaaaagctatgaatctgcagctgctggcaattgaaatgggctccttatcaaaacactgggca

SEQ ID NO: 10343 - DNA, 312 bp, Bacillus anthracis
atggaaattttacatgcaaaaagtattagtaaagtatataaagggaaagtgccttataaagcattagtagatattgatttatcaattcaagaaggtgaatttgtagggattatggggccatctggtagtgggaaaacaacgttattaaatatggtatctacaattgattctccatcatcgggagaaattttaattaatggcacaaatcctttccaattatcatcagaagatttagcgttattccgtaggaaacaattaggttttgtttttcaatcatttaagtatattagcacacttcatgaacaagaatat

SEQ ID NO: 10344 - DNA, 2058 bp, Bacillus anthracis
atgagtaaaattcgagtgcatgaatatgcgaaaaaacataatatctcaagtaaagatcttatgacaaaactaaaagaaatgaatatcgaggtttcgaatcatatgacaatgttagacgatgaagtagtaaacaaattagataatgagtatcaagctgaaaaaccttctgttgcagatgagtttgaagtagaagaaaaagttgttcgtagtaaaaagaacagcaataagaaaaagaaaaaaggcaaaggaaacgaagacaagcgtcaagagaactttgctggaagacaacaaacacaaactgtagaaacaccagataaaattactttctctggaagccttacagtaggtgaccttgctaagaaattaagcaaagagccatctgaaattattaaaaagctcttcatgcttggaattatggcaacaattaaccaagacttagataaagatacaattgagttaattgctaacgactacggtattgaagtagaagaagaagtaattgttagcgagactgagtttgaaacattcatcgatgagcaagatgatgaagagaacttaaaagagcgtccagctgtagttacaatcatgggacacgttgaccatggtaaaacaacattacttgactctatccgtaactctaaagtaactgctggcgaagcaggtggaattactcagcatatcggtgcataccaagttgaattaaatgacaagaagattacattcttagacacacctggtcacgcggcgtttacaactatgcgtgctcgtggtgcacaagtaacggatattacaatcattgttgttgcagctgatgacggcgtaatgccacaaacagttgaagcgattaaccatgcgaaagcagcaggagtaccaattattgttgctgtgaataaaatggataaaccagcagcaaatcctgatcgcgtaatgcaagaattaacagaatatgaattagttccagaagcatggggcggagacacaattttcgtaccaatttctgcaattcaaggcgaaggaattgacaacttactagaaatgattcttcttataagtgaagtagaagaatataaagcaaatccaaaccgctatgcaactggtactgtaattgaagcacagcttgataaaggtaaaggaactatcgcgacattacttgttcaaaacggtacgcttcgagttggagacccaatcgttgttggtacttcattcggacgtgttcgtgcaatggtaagtgatattggtcgccgtgtaaaagttgctggtccatcaactcctgttgaaattacaggtttaaacgaagtaccacaagcgggagatcgtttcatggcattcgctgatgagaagaaagctcgtcaaatcggtgaatcacgtgcgcaagaagcgttacttgctcaacgtggtgaaaaatctaaattaagccttgaagatttattccaacaaatccaagagggcgatgtaaaagaaattaacttaattgtgaaagcagacgtacaaggttctgtagaagcaatggcagcatcacttcgtaaaattgatgttgaaggtgttaaagttaaaattatccatacaggcgtaggtgcgattacagaatctgatatcattttagcttctgcatctaatgcaattgtaattggatttaacgtacgcccagatgtgaatgcgaagcgtacagctgaattagagaacgttgatattcgtttacaccgtattatttataaagtaatcgaagagatcgaagcagcgatgcaaggtatgttagatccagaattcgaagaaaaagtaatcggtcaagcagaagtacgtcaaacgtttaaagtaacaaaagttggaacaatcgcaggttgttacgtaacagacggtaaaattacacgtgatagtggcgtgcgtattatccgtgatggcgtagtaattttcgaaggacaacttgatacgttaaaacgtttcaaagacgacgtaaaagaagttgcacaaaactatgagtgtggtattacaattgagagatataatgatcttaaagaaggggacattattgaagcatacattatggaagaagtgaagcga

SEQ ID NO: 10345 - DNA, 2148 bp, Bacillus anthracis
atgaagagaaatatgactaaatttcataccaataagggagcagggtattttatgattttattcctcctgctctttttgctgttattagcccgatttttttacatacaagcaacaggatcagttcataatcaagatttgaatgaacttgctaagcaaaaacatagtaaaacaggagttctagaagcaaatcgcgggacgatctatgatcaaaatggtcatgtattagcgcaagatgcaaactcttataaacttgtagcggaattaaaaggtgcgaagccggttgaggataaggaggataccgccaagaaaattgcgggcgtactcggaaaagatgaagagaagattttagctacgttaaataaagaagatagaagtcaagtggaatttgggaaattaggtaagggcttgacgaaagaacaaaaggaacaaattgaagcattaaaattgccaggtatatcttttattactgaaaatgcaagagtatatccgaacggtgatttcgcatcttatgtcgtaggtcatgcgagacctgatgataaggggattgctatagggcaatttggtttagaaaagagtttggataagtatttaggagcttctcatggggaagtagcttatacaggcgatcgtagaggcgtatctcttgacggtggaaaagtaaacgtaaaagcacctaaaaatggagataatgtatatttaacgcttgaccaacgtattcaaagttatttagaagatgcaatgaaagaagcgagtaaacattatgaaccagaaagcttaataggaattgttgcggatccaaaaacagggaaaatattaggaatgtctagtaagcctagttatgatccgaaccaggaaaataatcagtatttttataatgatgcaatcgcaaatgcatttgaacctggatcaacaatgaaaattttcacactagcagcagctattaatgaaggtgtgtataagggacaagattattatcagtctggtacatatccagttgggaaccgcaaaataaaagatcataatggcggcgctggatggggatctatcacatttgatgaaggagtagagcgctcttcaaacgtagcatttgcaattttaggggatcaaaaacttggtccagaacgttttcgaaaatatattcatagctttggattagatgaaaaaacaaagattgatttacctggtgaaggttcaaataccattgtattcgatcagcaaatacagcaagtaacaacagcttttggacaaggttctactgtaacaccaattcagcttgtccaagctgcaactgctattgcgaacgatgggaaaatgatgaaaccttatacaattgataaaattgtagatccgataacagaggaagtaaaattagaacataaaccagaagaagtgggaaaacctgttacaaaagagacagcagcgcaagtaagacagttattagagcgtgttgttacatcaccgaaaggaacaggaactgcttataaagtcgatggatattcagttggtggtaaaacaggaacagcacaaattccggatggaaaaggtggctatatgacgggaagagagaattatatattctcgttcttaggtatggcacctatggacgatccgcaacttgttgtgtatgtagctgttaaaaagccgaaattgaaagatgatgagagcggtgcacaacctttagctgatatttttaaatatgtaacgaagaatagtttagagtatttaaagattaagcctaatgaagtgaaagatccgaagaaatatgtgaaagagcaacaaaccgctgttccagatgtaaccgaaaaaacgatggaagaagcgaaaaaagccattgataaagcaaaactacgtccaatcgtattaggtgaagggaaagtacagcaacaagtgccgaaagcaactgaacaaacattgaagggtgaccgagtcttcttagtgggagataaacctacaatgccgaatatacaaggctgggcactgcgtgatgttatgaatttagcaaaaacattaaagcttaacctaaaacctactggtaccggatacgttactgaacaaagtgtgccagaaggaacattgttgcaacctggtacagagttaggtgtaacacttgtaccgccacttgaaccacaacaagaagcagaaaaaccg

SEQ ID NO: 10346 - DNA, 639 bp, Bacillus anthracis
gtgtgctggaagataagattaggatttgtctctcccaatcaatttattccgctagcagaaagaacaggatttattattaagcttgatgaatgggtaataaatgaagtgtgtcggcaaatacgtgaatggttaaataaaggatatgaagttgtcccgattgcagttaatatttcagccaggcattttcgctctattacattaatagagatgattacacgagctttacataagtataatgtatcagctcatttattagcaatagaggttacagaaggagcacttatacataaagatatatcgaaaagagtattgctacaattaaaagaacaaaatttaaagattcatttagatgattttgggacagggtattcatctttaagttatttaaaaacgtatccaattgatactttgaagattgatcgttcttttatggaaggtatacatgtagatgaacgagatacgaatattacggctgcaattattcatttagctcatacgttagaattagatgtaattgcagaaggggtagaaaaggcggaacaaatacaatttttgaaggaaaagaatgtgaagtttgtacaaggttattattatagccgccctttatcaaaatatgatgtggaaaatgtgtattataaa

SEQ ID NO: 10347 - DNA, 707 bp, Bacillus anthracis
attaaaaaatttggaaagggctggtattttgtatctttaacaggtatttttggctataatgtttttttcctttatgggacttaactatacttctactctgaatggctcgcttattattgctacaatgcccgtttttgtaacattgggagcaatattattttttaaagagtcttggagtacaaaagtcggaatgagtttatttttgtcccttatcggtgtaatagttgtgattacgagtggttcaatggatacacttatgtctttgtcatttaataaagggaagttctttttattaataaccggcttaaattggggggggtgttatatagtttaccagggcaaaaatgtttatgagggtggtctccccctttgttaactacaaggagtatgcccggtattggggtcctgtttttttagcagcctttttttttatatgaagatggatggggaaaggttggggcgtttttctctacaggatggatagaaatgttgtatatggtcatatgcgggacgttaattggatatatcgtgtttaataaaggagtagaagagctaggtgcaagcaaagcgagtatgtatttaaatctaacgcctattgtagctacttgcatatcagttgtctttatatggagctgcaatctacgaaggaaacaatagctggaatgttttccgtgttaatcggtgtttatatagcaacggtacaatcc

SEQ ID NO: 10348 - DNA, 750 bp, Bacillus anthracis
atgatggaagctacctataaaacgaaagatgtcacgaataaaacaggcatcccaaaacatatagttcgcaaatatagtcaactgttagaggaacatggttatatgatttccaaaacagctgatgcccgtatttataaacttgatgatttaaaactattgaaatctatacatgaaagagctgctacattacaagaagatatttcagaaacgataccaattattttaaaagaaaaagaagctcctcctgtaccagttatacaagataagcaagagatacaaccgaaagaaaaagaagatgggcgtaactttgaggagtttatgttaaaacttgaaatgctcgctcagttaaatgaagcaattattcatcaaaactctaccctaattacccaaaatcgtttaaaagatgaaaagctagatgaattgatgcaacaagtttatgtaaaagaaggctctcaagaaaagatgctacaggagttagtagatcatgccgctcaaacagatgccttgcaaaaagaaaagatggacttattaatgaatcatatgtataaacgagaatctaagcaagaagaaaaaatgaataaactcgtaaatcaaatttataataaagacagcaatcgtgatgcacaacttatgcaagtcattcgtgaaattcaagaaacaaaaagattagttgctgcttcaaaagaacaaagctttttccaatcatttagaagtttatttagccgaacaaaacaagaaaaaacaactgaa

SEQ ID NO: 10349 - DNA, 1170 bp, Bacillus anthracis
atgcgatatattacagctggtgaatctcatggtccacaacttacaacgattatagaaggtgttccagccggactaccattagtggcggatgatataaatgaagagttagctagaaggcaaaagggatatgggcgtggtagacgcatgcaaattgaaacagatcaagtacaaattgtgagtggtgttagacatggagaaacattaggttctccaattgcacttgttgttgaaaaccgtgattttgcacattggacaaaaattatgggtgcggagccgttaacggaacaagaagaaaaagaaatgaaaaggaaagtaacaaaaccaagacctggacatgctgatttaaatggtgcgattaaatatggtcatagagatatgagaaatgtactggaacgttcttcagctcgcgaaacgacagtgcgtgttgctgctggtgcggttgctaaaaaagtgttagcggaacttggtattacagtagcgggccatgtaattgaaattggtggtgttgaggctaaagagactacgtatcgttcaattgaagaattaaaaagtattacagaagcatcacctgtacgctgtttagatgaagaggctggtaatcaaatgataaaagcaattgatgatgcgaaatcaaatggtgattcaatcggtggcatcgtggaagtaattgtggaaggaatgccaattggagtaggcagctatgtgcattatgatcgaaaactagatgcaaaattagcagccgcaataatgagcattaatgcctttaaaggggtcgagattggaattggttttgaagcagcgcatagaccaggaagtgaagttcatgatgaaattctttggaacgaagagcatggatatacaagaagaacaaataacgcgggtggtttagaaggcggtatgacgactggaatgccaattgttgtgcgcggagtgatgaaaccgatacctacactatataaacctcttcaaagtgtcgatattgatacgaaagagccttttacagcaagtattgagcgttcagatagttgtgctgttccagcagctagtgtcgttgcggaagcggttgtagcttgggaattagcgacagctttaatagaacaattcggattagatcgtatggaccttattcgtgaaaatattgagaaacataatgaatatgcgaggggattt

SEQ ID NO: 10350 - DNA, 1993 bp, Bacillus anthracis
aataaaaaggaagaggtattacaagttaaagatttaaaaacacatttctttacagacgaaggtgtaagtaaagcggttgatggtttaaatttctctatctctaaaggagaaacactcggcatcgtaggtgaatctgggtgcggaaagagcatcacttccctatctattatgaggttaattgaccgcgaaagcggcagtaaagttgaaggtaacattttatttaaaggaaaagatttattacaacaaaacgaatctgaaatgcgtgcaattcgcggaaatcaaatctcaatgattttccaagaaccaatgacatctttgaatccagtatattctgttggggaacagatcgcagaagcaattcgtatccatcaaaaattaagtaaaaaagaagcctggaataaagccgtcgatatgttgaaactagttgggattccttcacctgaaaaacgcgcaaaacaagagccgcatgaactaagcggaggaatgcgacaacgcattatgattgcaatggcacttgcttgcaatccagatttactcattgcagacgaaccaacaactgctcttgatgtaacaattcaagctcaaatattatcacttatgaaatcacttcaaaagcaactcggtatggggattattatgatcacccatgatttaggcgtcgtgtcagaaacatgcgatagagtcgccgttatgtatgctggaaaaatcgtcgaatatgcagatatcgagcatatatttactagtccaaaacacccttatacaatcggacttcttcaatctcttccaagtctcgatacagaccaagaagaattacaaacgattcctggatccgtaccgagtccataccatatgccgagtggatgtcgcttcgctgatagatacacacatgcaaaagaactatgtcacaatactcttccagaacttcaactcacgcaagatggaagtgaagttcgatgctggatgttcactgacctttgggataaatcatcttcagaaaaattggaggtattataaaatgtctactactacgcaaataaataaacgagatttattacaagtgcaaaatttaaaacaatacttccctataaaaaaaggaattctaggacgctctattagctatattaaagcggttgacgatattagttttacagtttatgaaaaggagactgttagtattgttggtgaatctgggtgcggaaagtccaccactgggcgtgcaatattgcgccttgatgaagcgacaagtggaaaaattatatttcaagataaagatttactagcattaaataactcagcaatgcgaaaggttcgaaaagatttacaagttatttttcaagatcccttcgcttctttaaaccctcggcaaactgtaggaagcattttagaagaagctatgtccattcaaaacgtatgtccaaaaggggaaagaaaagcaaaagtaattgagttactcgggaaagttggtcttccacctgatgcagtgaagcgctatccacatgaatttagtggtggtcaacggcaaagaattggaatcgcgcgcgctttagctgtgaatccaaaactcatcatttgtgacgaagccgtctccgccttagatgtttcagtgcaagcacaagttttaaatttattaaagcagttgcaacaacaatatggtttaacgtacttattcatctctcatgacttagctgtcgttcgtcacatatcagatcgcatcattgtaatgtaccttggtaccatcgtggagattgccgataaacattctctttttaacaatccgcaacacccttacacaaaagcgcttctctcagcaattcctaccattagtgcaggaacgaaaaaagagcgtattgaacttaaaggagacctcccctctcctttaaatccgccaacaggctgtcgctttcatactcgttgtccgtatgctattgaaaaatgcgctacgcaacaaccaagttttcaatctataagtaaagatcataaagtagcctgtcat

SEQ ID NO: 10351 - DNA, 1250 bp, Bacillus anthracis
atgggatattacgacggaccaaatttaaatgaagagcatagtgaaacgagagaagtgagaaaatcgggcagtaaaaaaggctattttttcacaggtttagtcggagctgtagttggggctgtttcaattagttttgcggcaccatatatgccatgggctcaaaataatggagcgactgtatcatcttttagttcagattcaaaagttgaaggtactgtagttcctgttgtcaataaagcaaaaaaatgaaacggatttacctggtatgattgaaggcgcgaaagatgttgttgtaggtgttattaacatgcaacaaaagcatgatcccatttgcaatgcaacgacagggtcaagagcaacaagctggttcaggatcaggtgttatttataaaaaggcaggaaataaagcatatattgtaacgaacaatcatgtagtagatggtgcaaataaacttgctgtaaaactgagtgatggcaagaaggtagatgcaaagcttgtagggaaagacccttggttagatttagctgttgttgaaattgatggtgctaatgttaataaagttgccactttaggtgattctagtaaaatccgtggcgggtgaaaaagcaattgcaatcggtaacccattaggatttgacggaagtgtaacggaaggtattattagtagtaaagaacgtgaaattccagtagatatcgatggcgataagcgtgcagattggaatgctcaagttattcaaacagatgcagcaattaaccctgggaacagtggtggtgcgttatttaaccaaaacggagaaataattgggattaattcaagtaaaattgcacaacaagaagttgaaggaattggatttgctattccaattaatatcgcaaaaccagttattgaatcacttgaaaaagacggagtagtgaaacgtccagctcttggagtaggtgtcgtttcattagaagatgtgcaagcttatgcagtaaatcaattgaaagtgccaaaagaagtaacaaacggtgttgtattaggtaaaatttacccaatgaaaccctgcagaaaaagctggtttagagcaatatgaatattgtagtagcattagataatcaaaaagtagaaaactcacttcaattccgtaaatatttatatgagaagaaaaaagtaggcgagaaagtggaagttacattctaccgtaacggtcaaaaaatgacgaaaacagctactttagcagataactcagctacaaagaatcaataatcg

SEQ ID NO: 10352 - DNA, 441 bp, Bacillus anthracis
atgatgccgacattgcaagatggcaatatgctcgttgtaaataaggtgagttatcatgtgggggacttgaatagatttgacgttgttgtgtttcatgcgaacaaaaaagaggattacgtaaaacgaattatcggtttacctggggatcatattgaatataagcatgataagctatatgtaaatggacaattcgtagatgaaccttatttagagacgtataagaaagagatagatggacgacaactaacaggtgattttaaactagaagagttaacgaaggaaaaatcggtgccacctggatatatttttgtagtgggtgataaccgtctcggaagctgggatagtagacactttgggtttgtaaaagctgatacagttgtcggtaaagttgatttacgatattggccaattcaagatgtgcaaacgaatttttcaaaaggt

SEQ ID NO: 10353 - DNA, 1326 bp, Bacillus anthracis
ttggaaatatttaatttagtcatggttgcgattttaatcgcatttactggatttttcgtagcagctgagtttgcgattgtaaaagtacgttcaagtcgtattgatcagcttgttgcagaaggaaaacgcggtgctttagcagcgaaaaaggtaacaacaaatttagatgaatatttatctgcttgtcaattaggtattacagttacagctatgggattaggttggttaggtgaaccgacaattgaaaagttattacacccgttatttgagaaatggaacttaaacccttctatttcatcagtattaacatttggtcttgcttttatgttaatgacgtatttacacgttgtagtaggggaattagctcctaaaacgatggcaattcaaaaggctgaaaaagtaacattattatttgcagctccactaatgatgttctataaagtgatgtatccatttatttgggtattaaatggttcagctcgtgtgataactggtttattcggtttaaaaccggcttctgaacatgaagtagctcatacagaggaagaattacgccttattctttcagatagctatgaaagtggcgaaattaatcaagctgaatacaagtatgtaaataacatttttgaatttgataatcgtattgcaaaagagattatggtaccgcgaacagaaatcgttggtttctacctggaagattcagtagaagaacacatgaaagtaatccaaaatgagcgatacacacgttatccgatttttggagaagataaagatgatattatcggtatggtcaacgtaaaagatttctttattcgatatatgaccgaggatcaaaaagatttatcatccattcgctcgtatatgcgtccgattattgaagtgatggaaacaactccaattcacgatttattacttcaaatgcagaagaagcgaattccgatggctgttttatatgatgagtacggaggaacagctggaattgtaacgtttgaggacatcttggaggaaatcgtcggcgaaattcgtgatgaatatgatgaagatgaagcaccaccaattcaacatgtgaacgagcaacatatcattgttgatggaaaagtgcttatctcagaagtgaaagatttatttggattacacattgaagaagatgatgtggatacaatcggtggatggattatgatgcaaaatcatgaaatcgaagaaggacaacacgttgaggcggaaggttatgaatttaaagtgttagaaaaagacgcttaccaaattaaacgtgttgaaattcgtaagatggaagaggaacaagaagaagaaaaagcagcaactgtg

SEQ ID NO: 10354 - DNA, 1278 bp, Bacillus anthracis
atgactgtacaagaaatttcacgagtaatcgatggcaaacgcgttattgtgaagaaacctgaactgttaatccctgcgggtaacttagaaaaattaaaagtagctatccattacggggcagatgctgtatatttaggtggacaagaatttggtcttcgttcgaatgcaggtaactttacactggaagaaatggcagaaggtgtggaattcgcaaagaaatatggagcgaaaatatatgtaacaacaaatatctttgcgcataatgaaaatatggacgggctagaggaatatttaaaagggattgaaaaagctggcgtaacgggaattatcgttgctgatccgcttattattgagacttgtaaacgtgtagcaccttctgttgaggtgcatttaagtacacaacaatcactatccaactggaaagcagcacagtattggaaagaagaaggtttacatcgtcttgtattagctcgtgaagcaagctatgaagaaatgaaagaaattaaagaaaaagtggatattgagattgaagcattcgtccatggtgcaatgtgtatcgcatattcaggaagatgtacgttaagtaaccatatgacagcgcgtgattctaaccgtggtggttgttgtcaatcttgccgctgggactatgatttagttcaaacagtatcacaacataaagatgcaaaagagcttcctctattccaagaagaagatgctcacttcgcgatgagtccaaaagacttaaatttaattttatcaattccgaaaatgattgaaattggaattgatagcttaaaagttgaaggacgtatgaaatcaatccattacgtagcgactgtagcgacagtataccgtaaagtaattgatgcatattgtgcggatcctgataactttgagtttaagcaagaatggttagatgagcttgataaatgtgcaaatcgtgatacagctcctgcattctttgaaggggttccaggacatcaagagcaaatgtttggaaatcatagtaagaaaacaacgtatgatttcgctggtttagtgttagattataatgaagaaacgggcatcgtaacgattgagcaacgtaatcatttcaaaccaggacatgaagtggagttctttggaccagaaatagaaaactttacgcagacggtggagaaaatttgggatgaggatggaaacgaattagatgcagcgagacatccgttgcagatcgtgaaattcaaagtggatcaaccagtgtatgtgaataatatgatgcgcaaaagcatacttcaa

SEQ ID NO: 10355 - DNA, 699 bp, Bacillus anthracis
atgtcagtaatttctatgaagcaattgcttgaagctggtgttcatttcggacatcaaactcgtcgttggaacccaaaaatgaagcgttacattttcacagagcgtaactgtatctacatcatcgacttacaaaaaactgtgaaaaaagttgaggaagctttcaaagttatgcgtgacatcgctgctgaaggcggagacatcttattcgtaggtactaaaaaacaagcacaagcagctattaaagaagaagcaactcgtgctggtacgggcttagttggccaacgttggttaggtggaactttaactaacttccaaacaatccaaaagcgtatcaagcgtcttaaagacatcgaaagaatgcaagaagatggtactttcgaagtactacctaagaaagaagttgttcaacttaaaaaagagttagagcgtcttgagaaattcttaggcggtattaaagatatgaaaggtcttccaagtgcattattcgtagtagaccctcgtaaagagcgtattgcagttgctgaagcacgcaaattacacattccaatcatcggtatcgttgatacaaactgtgatccagacgaaatcgatcacgttatcccagcaaacgatgatgcaattcgtgctgtaaaacttcttacatctaaaatggcagacgcgatccttgaagcaaaacaaggtgaagaaactgttactgcg

SEQ ID NO: 10356 - DNA, 438 bp, Bacillus anthracis
atgaacaaacaagtaatcgaagtattaaacaaacaagtagcagactggagcgttttattcacaaaactacacaacttccattggtacgtaaaaggacctcaattcttcacattacacgagaaattcgaagaactttacacagaatcagctactcacatcgatgaaattgcagaacgtattttagcaattggcggcaaaccagtagcaacaatgaaagaatacctagaaatatcttctattcaagaagcagcatacggagaaactgcagaagggatggtcgaagcaatcatgaaagactacgaaatgatgctagtcgaactgaaaaaaggcatggaaatcgctcaaaactctgacgacgaaatgacatctgacctactactaggcatctacacagaactagaaaaacacgcttggatgctacgcgcgttcttgaatcaa

SEQ ID NO: 10357 - DNA, 363 bp, Bacillus anthracis
attgctggagaaaaaattcgacaagcaatacgggatgggtgatctcgataatattccgtgtaaaaggaaaaccactacaattagaagatctttcaatggtacctcccagaacttagaatgaggtataaaattttaaaaaatgcgggaaatgatcccccccccaatgggaacttccaaaaagatatattaaaaatagaggatttaattgcttgctgttatgatgaagaagagagaaaaaaattccaccaagagttaacggcaaaaacactacgttttcagcaagtaatggaaaaaagaaagattaaagatagttcagcatttcgtatgtatcaagataaagtatttcataaactacgtttagag

SEQ ID NO: 10358 - DNA, 369 bp, Bacillus anthracis
ttgaaaaagaaattaggtttactagccatggttgttgcattaatggcgattactgctggctgtagtgaagtaaatcagccaattacaccaaagagcactggaatttggaatgaatacttcgtatacccgctttctcagttaattacgtattttgccaacttatttggtagtaattacggtttagcaatcgttgttacgactcttattattcgttttgcattattaccattaatgattaaacaaacgaagagtacgaaagcaatgcaagcgttacaaccagaaatggtgaagttaaaagagaaatatagctctaaagatcaagcaacacagcaaaaactacaacaagaaatgatgccgttatatcaaaaa

SEQ ID NO: 10359 - DNA, 901 bp, Bacillus anthracis
caatggtaaaaaaatttacgggaaaaacactgccccaggattatgggatctgcaaaaaagctttaacagaaactaacgtgttacatgcgagaaggcaattgacttcttacgtgaaaaaggtatcgcgaaagctgctaaaaaagcagaccgcatcgctgctgaaggtttaactttcatcgaaacaaacggtaacgacggtttaaatcttagaattaaactctgaaactgatttcgttgcgaaaaacgaaggtttccaaacattaattaaagaattagctgctcacttattagctaacaaaccagctaacgttgaagaagctatgggctcaaacaatgggaaaatatcataaaagtagaagagcacatcaacgaagcaatcgctaaaattggtgaaaaacttacacttcgtcgtttcgaaatcgtatcaaaaactgatgcagatgcattcggcgcttacctacacatgggtggacgcattggtgtattaacagttcttgaaggatctactgatgaagcggctgctaaagatgttgcaatgcacatcgctgcagttaaccctaaatacatcgaccgcgatgctgtaacagctgaagaagttgagcatgagcgtcaagtattaacacaacaagcattaaacgaaggcaagcctgaaaaaatcgttgcaaaaatggttgaaagccgtcttgggcaattcttcgaagaaatttgcttacttcgaccaagcattcgttaaaaaccctgatatgaaagttcgtcagttcgttgagtctaaaggcggaacattaaaaggattcgcttcgctaccctggtggtgaaggtatctaaaaaacgcgaagacaactttgctgaagaagtaatgaaccaagtaaaaggtagtaactaatacagattagggaacaca

SEQ ID NO: 10360 - DNA, 1898 bp, Bacillus anthracis
ttacaaggcgcaaacggtacagaaattgcgaaagatttaaaaacagatgagcacggagtactagttattcctgacttagctcagagaagagtaccaatttattgaaacagccgctcctgaacattataaattagatcaaacaccctattaagttcacaatcgaaagaagtcaaacgaaacatgtcttcgttacagctactaacagcttaacgaaaggtagtgtgggagtaatttaaaagtgatgatgttgaataaaacacaacactcgagggtgctgtatttaaaattgttaataaggatggacacgatgtccgtactgatttaactactgataaaaacggccgtttagttgttgatgaattaccacctgggagactatgagtttatcgaaaccaaaagctcctactcattatgactttaaacaaaacacttatttagttccaggttaaaaaaggacaaaaaaaattcgcttccgttactgctacaattagcttaacgatatgcgctgctcgaactttctaaagtagatgacattgatgtgttccactcttaaagatgcagtatttaaaatcgtggatatgaacggcaatgacgttcgcactgatttaactactaataaagatggcaaaatctctgtttctgatttacggcccgggtgactatcagttcgttgaaacgaaagctcgtactcattacgacttaaaatcaaactcctatcaactttactgtgaaagagagtcaaaccgctacagcttctgttaccgctaagaatagcttaacgaaaggcgctgtggaattaacgaaagttgatgacatcgacgggactacttctgaagggagctatctttaaaattgttgatcaaaatggcaatgatgttcgcactgatttaactactgataaagatggcaaaatctctgtttctgatttacggccgggtgactatcagttcgttgaaacgaaagctcctactcattacgacttaaatcaaactcctatcaactttactgttgaaaagagtcaaaccgctacagcttctgttactgctacaaatagcttaacgaagggcgctgtggaattaacgaaagttgatgacatcgacgggggctactctgaagggagcagtatttaaaatcgtggatatgaacggcaatgacgttcgcactgatttaactactgataaagatggcaaaatctctgtttctgatttacgtccggggtgactatcagttcatcgaaacgaaagctcctaagcattatgacttaaatcaaaaccctatcaactttactgttgaaaagagtcaaaccgctacagcttctgttactgctacaaatagcttaacgaaaggtgctgtagaattaatgaaagtcgatgatattgacggaactactcttgaaggggctatctttaaaattgttgattctaacggacatgatgttcgcgctgatttaactactgataaagatggcaaaatttctgtttctgatttacgtccaggagactatcagtttattgaaacaaaagctcctactggatacgatttaaacgctaagccaattcctttcactattacgaaaggacaatctcaagttacttctgtgactggctttaaatagttaacaacgaggttcgatgatgttactaaaagttgatattgatcataacggaccacttgaaggtgccattttcaatattttagatcaagatggaaaagtagtacgagaaggcttaaaaacagatgggcatggtaaattaatcgtaaatgatttgaaacctggtaattatcaactagtggaaacaaaggctcctgaaggctatcaattagatgcatcaccaataagctttactattgaaaaagcccaagcttccaccactacaaattacagttcaaaataaaaa

SEQ ID NO: 10361 - DNA, 477 bp, Bacillus anthracis
gtgaatatctcgattatttcaattgggaaattaaaagaaaaatatttaaaacaaggtatagcagaatacttaaaacgattatctgcatacgcaaaagtagaagtaattgaattgccagatgaaaaggcaccagaaaatttaagtgaagcagaaatgctaattgtaaaagaaaaagaaggtatacgtatactagataaaatttctgatgatacgcatgtcattgcgttagcgatagaaggaaagcaaaaatcatcagaagaatttgcagtaagcttagatcgtcttgctacatatggaaaaagtaaagttgccttcgtgattggtggatcacttggactaagttcagaagtaatgaagcgttcaaatgaatctctttctttttcaaagatgacattaccacaccaattaatgcgattagtattgcttgagcaagtgtatagagcatttcgtattaatcgtggagaaccgtatcataag

SEQ ID NO: 10362 - DNA, 1452 bp, Bacillus anthracis
gtggccaacctatttaaaaagaaatccgttacgcaattgttaggggaaagtaaaagtaaaactttaacgaaaacgctaggggcatttgacctaacaatgctagggattggtgcgataattggtacaggagtactagtattaacaggattagtagcagcaagagatgctggtccagcagttattttttcattcatgattgcagcgatcgtttgtggatttgcaggtttgcagatttgcagaaatttgcatctattttttctggcttcacggagtgctgtgcgccatattcatatgtgacagtttgtgtgagtttattgcccatctaatgggatggacgagaattatccgtatattttgtaacatttgccgcagtagttgggtggatggacgggttattttaataacttagtaagtggatttggatgtagaaattccaacagagccgttaaagattccatcaccaggggggggattgtaatttccccagccgtagtttatcacattagttttaactttggtactatccagaggtacgaaagaaagtaagcgtgtgaaaatacatatggggtattaattaaaatgtgtaattgttattttattcattgcaggtggtgcggtttatgtaccaccacaaaaactggacaccatttgcacccatacgctattagcggaatctttgccggcggagcaacagaattctttgcttttcttaggattggatgcattagcactttctgctgaagaagtaaaaaatccacaagcgtgatttacccaattggtattattgcttcgttagttattggacacaattatttatgttgtagtttgtctcgttatgacaggtatggttttcttataaagaattagatgtaccagaagctatggcatatgtattagaagttgtaggacaagataaagtagctggtgtaatcgcagttggagctgtaattggtattatggctgtaatctttgcttacatttatgcaacgacacgtgtattcttcgcgatgagccgtgacggtttattaccaaaatcatttgcgaaaatcaataagaaaacagaagcaccagtattctcaacttggttaacaggtattggtagtgctttaattgctggatttatcgatttaaaagaattgtcgaatttagcgaatattggagcgttattaacatttgcgatggtaggtgtgtctgctattatgtcttcgtaaaacacatccaatcttaaaacgtggctttatggtaccacttgtaccaacgctaccgcttatttcaatcgcatgttgtctattcttaatgtttaacctgccattaacaacatggatttacttcggtatttggttagcaattggagtagttgtatactttgtttattcgaaaaagcatagtcatttaaaagacgatggaagttcgcaggataatttagaacaagctaattaaaagcttaattaa

SEQ ID NO: 10363 - DNA, 857 bp, Bacillus anthracis
ttagagctaaaaaacgtttgtaaaagttatgaagattttgcagtgaaaaatataagttttacgttaccacgcggatatattatgggatttgtcggaccgaatggggccgggaaaagtacgacaatcaaaatgattatgaaatttattaaaaaagatagcggcgaaataaaaattttgggcagggacataagaaagccgaaaaagaaataaaacaaatatcggctttgtatacgatgaaaatcattattacgaagattttacgtgcgaaccaatgaaacgtattattgccaccgctattaaaaaagtgggattgaaagcagtattcatcgtatatgcatagaatgcaagttccaaagtataaaaaaattaaagaactatcaaaagggatgaaaatgaaatttgcgattgccatcgcgctctcgcaccacgcagagtttatcatcatggatgaaccaacagcaggattagatccagttgttcgaagtgaattgcttgatatgttgcaagagattgtaatggaagatgaagtatctgtattattctcaactcatattacaacagacttagagcgcatcgcagattatattacgttcatcaatgatggagaaattatatttactggtgaaaaagacgacttaatggagaactacgtaatcgtaaaaggaagtaatgatttattagaccgagaaggaaaagaactatttgttggattacgaaaaaataaatttggttttgaaggtttagcgaaggataaacaaacaattatcgactggtttggaaatgaggttgtactagaaaagcctacattggacgagatcatcgtttacaccgcgaaaggaagaggtgcctatgcgtca

SEQ ID NO: 10364 - DNA, 1113 bp, Bacillus anthracis
atgggtactaaaacaaaaaagaccctatttaatgttgatgagcaaatgaaagctatcgcagctcaatttgaaacattacaaattttaaatgaaaaaggcgaagttgtgaatgaagcagctatgcctgaattatctgatgatcaattaaaagaattaatgcgccgtatggtgtatactcgcgtactagatcaacgttctatttctttaaaccgtcaaggacgtttaggtttctacgcaccaacagctggacaagaggcttctcaattagcaagtcatttcgcacttgaagcagaagatttcatcttaccaggatatcgtgatgtgccacaattagtatggcacggtttaccattataccaagcattcttattctctcgtggacatttcatgggtaaccaaatgcctgagaacgtaaatgcacttgctccacaaatcatcatcggtgcgcaaatcatccaaactgctggtgttgcgttaggtatgaaattacgtggcaaaaaatctgttgcaattacttacactggtgacggtggtgcttcacaaggtgacttctacgaaggtatgaactttgcgggtgcattcaaagctccagcaatcttcgttgtacaaaacaaccgttatgcgatctctactccagtagaaaagcaatctgcagctaaaactgtagcacaaaaagcagtagcagcaggtatttacggaattcaagtagacggtatggatccattagctgtatacgcagcaactgctttcgctcgtgagcgtgcagtaaatggtgaaggtcctactttaatcgagactttaacattccgttacggtccacatacaatggctggtgatgacccaactcgttaccgtacaaaagatatcgagaacgaatgggaacaaaaagatccaatcgtacgcttccgtgcattcttagaaaacaaaggcctatggtctcaagaagttgaagagaaagtaatcgaagaagcaaaagaagatatcaaacaagcaattgctaaggctgaccaagctccaaaacaaaaagttactgatttaatggaaatcatgtacgaaaaaatgccttacaacttagctgaacaatatgaaatttacaaagaaaaggagtcgaag

SEQ ID NO: 10365 - DNA, 537 bp, Bacillus anthracis
atgtctcgtattggtaaaaagattcttgaaatccctgcaggtgttactattacagttgcagaagacaatactgtaacagtaaaaggccctaaaggtgaattaactcgtactttcaatgctgatatgcttatcaaaattgaagagaatacattaacagttgagcgtccatctgaacagaaggaacaccgtgcattacacggtacaactcgtgctttaatcggaaacatggttgaaggtgtaactgaaggtttcgcacgcggacttgaattagtcggtgttggttaccgtgctcaaaaacaaggtgataaacttgtattaagcgtaggttattctcatccagtagaaatgactccggaagcaggtcttgaagttgaagtacctgcaccaactaagatcgtaatcaaaggtatcgacaagcaacgtgttggcgaatttgctgctaacatccgtgctgtacgtgctcctgagccttacaaaggtaaaggtattcgttacgaaggcgaagttgttcgtcgtaaagaaggtaaaactgctaag

SEQ ID NO: 10366 - DNA, 354 bp, Bacillus anthracis
atgccaagagtaaaaggtggtacagttactcgtcaacgtcgtaaaaaagtaattaaattagcaaaaggttactacggttcaaaaaatacattattcaaggttgctaaccaacaggttatgaaatctctaatgtatgcattccgtgaccgccgtcaaaagaaacgtgacttccgtaaattatggattacacgtatcaacgcagcagctcgtatgaatggtctttcttacagccgcttaatgcacggtcttaaaaatgctggcatcgaagttaaccgcaagatgcttgctgacttagctgttcatgacgaaaaagctttcgctgaattagcaacagttgcaaaaaacaacattaac

SEQ ID NO: 10367 - DNA, 1019 bp, Bacillus anthracis
ttagatgaaatctcctccaaagaaaaagctgccatccttattcgtacattagaaagaaggggtggcagcaaaagtcattgaatatatgacggctaaggaaaaagaagtattacttcgtgaaatcgcgaagtttcgtgtatataaatcggaaaccgttagaaaatgtactaggggaggtttttgttggaattaaagtgaaaaggaattaaccttggtgactccaggataaagaatattattcgtcgcataatttaaaaatatgccagaagaccgaactagaaaaaattattagaagattcttgggtataacaaggataatcccgttgaatttcttaaattcacttacagatttagaaccacttcttactgtacttaatgatgaatcgccgcaaacgaatgcgattatcgcttcgtatattaaaccgcagcttgcttctcatttatttgagaaattaccagatcttaagcgaggtaaaaccgtaatgggggattgcaaagctaaagcaagttgatggtgaatttaataaatcaaattgggggatttattaaaatcaaaattaaataatatggcatttaatgcaattaataaaacagatggcttgaaaacaatagtaaacattttaaataacgtttcacgaggtgttgaaaaaacagtctttctaattctggatgaaatggattatgagttatctgagaaaattaaagaaaacatgtttgtatttgaagacttactcggacttgaagatctcgcacttcgtcgtgtattagaggaaattacagataatggtgttattgcgaaagcacttaaaattgcaaaagaagaaattaaagagaaattatttacatgtatgtcttcaaaccgtaaagagatgattctagaagaattagatggcttaggaccgcttaagatgacggatgctgagaaagcgcagcaaacgattacagacacagtgaaaaagctagagaaggaaggaagaattatcgttcaaagaggtgaagatgatgtccttatttaaaaa

SEQ ID NO: 10368 - DNA, 255 bp, Bacillus anthracis
atggtatcggctaatacaaaaccactttccgaatttaagactggagagtttgtacaaattgagaagatacaattagaaggaactatgaaacgacgtttattagatttaggatttatccctggcgcaacaattaaagtattacaacgtagcccacttggagatccggtcgcttatcaagtaagcaacacaactatcgcactacgcaaggaagaaagttcccttattttcggggtattaataggagatgatttcaga

SEQ ID NO: 10369 - DNA, 687 bp, Bacillus anthracis
atgatggatcaatttctatgggtattgtttccctatatcatttttgcaatctttatcggtggacatattttcagatacaactatgatcaatttggttggacatcaaaatctagtgaactattagaaaagaaaatgctccgaatcggaagtatattattccactttgggattatgttcgtaattggcgggcatgttatggggattttaattccagaagctgtataccgttccataggtatttctgagcatatgtatcatgtagtagcaattagttttggtcttccggcaggtattgcttctatcatcggtttaattatattaacgtaccgccgcgtaactgtaaaacgtatcattgcaacaagtacaaagggagattatattgcgcttattctattacttatcgtaatgttagcaggactttcctcaacgtttttaaatatcgactcaaaaggatttgattatcgtacaacgatcggtccatggttccgaagcctcttcattttccaaccgaaagttgaatatatgacggaagtacctgtatggtttaaaattcatattcttgcagggctagggcttttcgcagtatggccattcacaagactggtacatgtatttagtgccccaattaaatatataagccgtagttatgttatttacagaagacgtattccgaatgaattgaaaaaa

SEQ ID NO: 10370 - DNA, 390 bp, Bacillus anthracis
atgaaacgtaggacggctagagaaagagcgatgcaagcattataccaaatggatattacaggtgagttagaaccgaaagtagcggtggaaaacacgctagatgaaggtgaagaaacaaatgagtttctagaatcacttgtagtaggttttgtagaaaataaagaagtaattgatgaagcgattcgtcaaaacttaaaaaaatggaagcttgagcgtattagtattgttgatcgcagtattttacgtgtagctgtgtatgaaatgaaatacatggaagaaattccacacaacgtaacaattaacgaggcaattgaaattgctaaaacatttggggatgaggaatctcgtcgttttattaacggcgttttatctaatataaaagatacactg

SEQ ID NO: 10371 - DNA, 1546 bp, Bacillus anthracis
gttattattagtatattactattattactggttgctttttgatcgccttttttattattacattttttattaaaaaaacggacgcatcattctattttaaaactacatccatacttaggaaaaaatgcgcctacttactggaaaagatagggccggaattccgacaatattggtttgatcacgatacagatggaaaacctttttcacgttacgactttcaaagtgttatgtttttagcgaagtatcgctatgaaatacttggttttggatcgaaacgagattttgaagcatcgggttattatattgctaatacgttgtttccggtattaacagaagaattaagtgtgaatgtaacgccagaacgtgaagggaaaaagtatgtaattcataaagaaggattattttcacggagagaaaaattgacagcggatacaacgaatctttggttatacgaagaagacgatgcaattatcatcggtgaaaatcgtaaatatccatggggaactgtatggcatgttttggagcatcagcaacttcttacaggtcgaattggtgaaattatattttagcgagtgggtttggagccgaaattggctggcgttcgttgaataattctgcgaaagtggcggtattccagaccattaccatacggggcaaatatcgtgcaacaaattgcccaggtttattggaatatgggatgaggacggtatttttcgatggagaaatttatgggaaagcgaagaggagtattataaaagcatttgaattgaatttgggcaaggtgcggatatacgtggtgctcattagacggggcaaaaagtaaacgagaaaattgctttggttcggaatgtacgagagggagagccaattaattcacggaatggattttcatttttaaataatgcagcagagacactttattttattcaccagttgcaagaaaacggcggtaaaccagttgggatgaaaattgtgattggacaccaggagccgttggaaaatttattcaaaacgatgaaagagttaaacatctatccggatttcattacaattgatggttcagaaggtggatcaggagcaacgtataaatcgatggcagatagcatgggaatgccgcttattccagcattattgacgtttattgatacagcaaatcattatgatattcgggataaattcaaagtgtttgctgctgggaaattaattacaccagataaagtggcaattgctttagcaattggtgcagacgctgtaaattcagcgcgtggttttatgatggcaagcggctgtataatggcgcttcaatgtaattctggccaatgtccatctggtgtggccacgggcgaatccacattatcaaaaagcgttagatccgtatgagaagaagtggcgagtcatgaattatattgttagtatgagatatagtttattttcgttagcagcggcggcgggagtgaagagcccgcgtcatttaaagagagatcatattgtatttaaagatgagatggggcgggtagtccctctctcagaattgtttcctactagt

SEQ ID NO: 10372 - DNA, 602 bp, Bacillus anthracis
tgggttccctgttcagcaaaggcccatacaaacaaagtagctattgtcattgatgacttcggcaataatatgaaggggactgataaaaatgttatcacttcctattccccctactggtgctggtatgccttttcttccttccacaaaggaagatgcgatagcggctcataagaaaggacacgaagttattatacatatgccaatggaacccattaaaggtaaaaaagagtggcttggaccaaaagccatttccaactgattaaagcgacgaagaaataaccaatcgacttgaccaagcattcagagagtacccacatgcaatggggatgaatattcatatgggatcaaaagtgactgcagacgaaagaattgtacgacttatacttgcagctgataaaaaacacggcttattttatttagatagcaaaacaaaccctaaaagtgtcgtcccaaaaattgggaaagaattaggggtgccaattatgaaaatccaattattttttgatgatgtgtatactgcggcacatatttcaaaacaagcccaattactcataaaaaaacttcaagaaaaaccgattatggtggctattggacatgttggc

SEQ ID NO: 10373 - DNA, 1317 bp, Bacillus anthracis
atggctgtagaaaatattacaatgcctcagctcggggagagcgttacagagggtacaattagtaaatggctcgttaatgttggcgatcacgtaaacaaatatgatccgcttgcagaagtaatgactgataaagtaaatgctgaagtaccatcttctttcactggtattgtgaaagagttgatcgctggtgaaggtgatacgttagctgtaggtgaagtagtttgtgtgattcaagtagaaggcgcagatgaagtagcagcaacagctgttgaggaaaaaacaaaagaagaaccaaaagcagaagtaaatacgcctgaaaaagcaccgaaagcaaaacaaccaactgatggaaaacctcgtttttcaccagctgtgttaaaacttgcaggtgaacataacgttgatttagatctagtagaaggtacgggagcaaacggccgtatcactcgtaaagatattttaaagctagtggaatcaggaaatattccgcaagcaggtgcggtgaagaaagaggaagcggtagcggcagtagtagaagcgcgtccagaagcaccaaaagcagcgccagtagcacaaaaagtagaagctgcgaaaccagtttctgtaccaacaatgcctggcgatatcgaaattccagtaacaggtgtgcgtaaagcaatcgcagcgaacatgttacgtagtaaacacgaagcgccacacgcttggatgatgattgaagtagatgtgacaaaccttgtgtcataccgtaattcaattaaaggtgatttcaaaaaacgcgaaggctttaacttaacgttctttgctttcttcgtaaaagcagtagcacaagcgttaaaagagtaccctcaaattaattcaatgtgggctggcgataaaatcgttcagaagaaagatattaacctttctatcgccgttgcgacagaggacgaactatttgtaccagtaattaaacacgcggacgagaagacaattaaaggtatcgctcgtgaaattacagaacttgcaggaaaagtacgtacgaaatcgttaaaagcggacgaaatgcaaggcggaacatttacaattaataacacaggatcattcggttctgttcaatctatgggtattattaattacccacaagcggctattttacaagttgaatcaattgtaaaacgtccagtaattatggaaaatggtatgttcggtgctcgcgacatggttaacttatgtttatcactcgatcaccgtgtactagatggtttaatttgtggtaagttcttaggacgtgtaaaagaaattttagaaaatacgtcagaaaataatacatctgtatat

SEQ ID NO: 10374 - DNA, 1197 bp, Bacillus anthracis
atgcgatcagaagtaactgtaaaaataaaaccgaaatttataaaagaaattaaaagtggatatccgcttattttaaaagatgcgattcaaaatttaaatgatgttcaggaagaaggaacaatcattaaagtggtagatgagaagaaccactttgtcggaaaaggttattatggaaaacaaaataaaggatacggttggattttaacgagaaaagagagtgaacaaattaatcaatctttctttgaaagtaaaataaaatctgccttacataaacgaaagcaattttacaaatcaagtgatacgacagcattccgcgccctaaacggtgaaggtgatggtcttggtggcttaatcatcgattattatgacggttattatgtagtgagctggtatagcgaagggatttatactttcagagatgagattatagctgctctccaaaaagtagcaaactttaaaggtatttatgagaagaagcgttttgatacgaaagggaaatacattgaaggcgatgatttcgtagcaggagagcgcggtgagttcccgcttatcgtaaaagagaatggtgtgaacttcgctgtttatttaaatgacggagcgatggttggtgtctttttagatcaacgtaacgtgcgaaaacaaattcgtgataaatatgcgaagggaagaaccgtgttaaatatgttctcttatacaggtgctttttctgtatttgcagcgcttggtggggcgagtaaaacgacgagtgtcgaccttgcaaatcgtagtttaagtaaaacaattgagcagtttagtgtaaatgaaattgattatgaagcacaagatattatcgtagaagatgtattcctttactttaaatatgcagcgaagaaaaagatgaagtttgatatggttgtattagaccctccaagctttgcacgctcgaaaaaatatacatttagtgcagcaaaagattataaaaatttattaaaagaaacaattgccattacagaaaataacggtattatcgttgcttctacaaattgtagtgcattcgatatgaaaaagtttaaaggctttattgatacagcatttaaagaaatgaatggtaaatataaagtattagaagaacattctttaccagaagatttccgtacaatcgatcaatttaaagaaggagactatttaaaagtagttttcatcgagaaaattaaaggg

SEQ ID NO: 10375 - DNA, 1160 bp, Bacillus anthracis
gaacgtttaaaagtaatgacaattttccggaacacgtccagaaagcattaaaatggcacctcttgtattagagttggcaaagcatcccaagaaaattgaatccaatgggaactggaacagcgcaacatcgtcaaatgttagacccagtattaagtatctttggaattacaccagatttcgatttgaatattatgaaagatcgccaaaactttaattgatattaccaccgcgtggtttacaacgttatggataaagtaaatgaagaagcacagccggatatcgtacttgtaccatggtgatacaacgaccacgtttatcgcaagcttagctgctttctataaatcaattccagtaggtcatgtcgaaggcgggacttcgtacatgggataaatattctccatacccagaagagatgaatcgtcaattaacaggcgtaatggcggaccttcatttctcacctacagcaaaatcggcaacgaacttacagaaagaaaataaagatgagtcacgcattttcataacaggaaatacaggggattgccgcatataaaagcgctgttaaaagaaacatatagtcatcctgtactagagaaacttgagaaaatgatcgttttgtacttaagcccagcttccctgttgggaaaggcttagggggagcccaaggcttaatttgtttccgtacaattaagcgttcttgttgataagcatgaagacgtccaaagtggtattccggttcaaaaagaatccctgttgttcgggaaaccgcaaattgatttttagggggattcatggccgccattcatttaattgaggccggttggatgtaattggatttccccaaaggtggcaggtggtttcatacttaatggttaacggattttggtgggggacaagaggaaggctccttcacttggtgtaccggttcttggtctttcgtgatacaacagagcgccctggaagttatgaaagcaggtacgtgaaaattagcggggaccagacgaagagacaatctttagtcttgctgatgagtgtttatcagacaaaagaagctcatgataaaatgtcaaaaagcatctaacccgtacggtgatggccgtgcatcagagcgtattgtagaaagcaattttaaaacactttaataagtaaaaaaagccaaatcg

SEQ ID NO: 10376 - DNA, 1725 bp, Bacillus anthracis
aaaagatatttgcaatttgttaaaccatatcgatggcttattgctattacgattatgattggtctagttaaattcggcatcccgcttattatgccgtggttattaaaatatattattgatgatgtaattcagggcgcagggtcacttcaagataaaacgtcccaactagtaacagcgattgggattgctttttttatttttgcagtattaagaccgccaattgaatattatcgtcaatatttcgcgcaacgtattgcaaatacaatactatatgatttgcgaaagcatatttttggtcatttacaaaagttgagtttacgctattattcgaatacaaaaacaggggagattatttcacgtgtcattcatgatgtagaacaaacgaaggactttgtaattactggtttgatgaatgtttggttagatacggcaacaattgctatcgctattattgttatgttttctatgaatataaaattgacatttgttgcgctattaattttacctatttatgtagtagcagtgaaatattttttcgggcgtcttcgtaaattgacgaaggagcgttcacaagcgttagcaacgatgcaaggatatttacatgaacgtattcaagggatgcaagtgacacgtagctttgcattagaagagtatgaggggaagcagtttgaaaaaagaaataatgaatttttgacgaaagcgttaacgcatacgagttggacggcgagaacattttcggcagtaaatacgttaacagatttagggccgttacttgtaattggttttgcagcatatgaagtgattcaggggcagttaacattagggactatggttgcctttgtcggatatatggatagtttgtatagtccgcttcgccgccttgttaattcatctacgacattaacgcagtctttcgcatcgatggaccgagtgtttgaactgttagatgaaaaatacgatattgtcaatgtgccaagtgcagtacaaacgaaaaaattaaatggtgaagtgatatttgataatgtatcttttcgttataatgcggatgaaaaagagatattacataacctttcgttaactatgttgccaggagagaaggtagcacttgtaggagcgagtgggggagggaagtcatctcttgctagtttaattcctcgtttctatgatgtttcctcaggggcagtttatgtagatggaatagatgtcagaaagtatgatatgagaaatttacgtagccatattggaattgtactgcaagataatttgttatttagcgatacaatcggggcaaacattttatatggaaatccgaaagctacagaggaagaagtaattgcagctgctaaagctgcgcaaattcatgattttattatagagttacctgatggttatgatactgtcgttggggaacgtggtgtgaagttatctggtggtcaaaggcaacgtgtagcgattgcacgagtgtttttaaagaatccatcattacttatattagatgaagcgactcccgctttagatttagaaaatgaacgatatattcaagaggcgcttcagacgttagctgctgatcgaacgacaatcataattgcacatcgattggcgacgattacgcatgtggatacgattatttacattgaagatggtgaaattaaagaaacaggttctcatgaagaattaatgaaaaaaagaggatattattacaacttatatcaacttcaacatata

SEQ ID NO: 10377 - DNA, 1074 bp, Bacillus anthracis
atggcaaatcatgaattagatcaattacgtaaacaggtagatgaaattaacttacaactattacaccttttaaacaaacgcggtgaaatcgttcaaaaaattggggaacaaaagcaagtacaaggtacaaaacgttttgatccagtacgtgagcgtgaagtgcttgatatgattgcagagaataacgaaggaccattcgaaacatcaacagttcaacatattttcaaaacaatcttcaaagctagcttagaattacaagaagatgataaccgtaaagcattactagtatcacgtaaaaagaaacaagaaaacacaatcgttgatgtaaaaggtgaattgattggtaacggcacacaaacgttcatcatgggaccttgcgcggtagaaagcttagagcaagttcgccaagtagggcaagcgatgaaagaccaaggcttaaaattaatgcgcggtggtgctttcaaaccgagaacatctccatacgatttccaaggtttaggagtagaagggctacaaattttacgtcaagtagcagatgagttcgacttagcgatcattagtgagattttaaatccaaacgatgttgaaatggcattagactacgttgatgtaattcaagttggtgcacgtaacatgcaaaacttcgatttactacgagctgtaggtaaagttaacaagccagtattattaaaacgtggattagcagcaacaattgatgagttcattaatgcagcggaatacatcattgcacaaggtaatgaccaaattattctatgtgagcgcggtattcgcacatacgaaagagcaacacgtaacacattagacatttcagcagtaccgatcttaaagaaagaaacacatttaccagttgttgttgacgtaacgcattcaactggacgtagagatttattattaccaacagcgaaagcggctcttgcaattggtgcagatgcagtaatggctgaagtacatccagacccagcagttgcattatcagattctgcacaacaaatggatattccggaattccatagattcatggaagagttaaaaggtttcaaaaataaattatct

SEQ ID NO: 10378 - DNA, 639 bp, Bacillus anthracis
atgaggttgaacgagtatatgcttgaaacgtttcccaatttagaacttagaccacctctattttataatggggatactggtattcgctttagattaggtgtgaactatgattgcaataacatttatgaaaactgcctatatttagaagtcgtttataatagagccattactttatttcagtctttacatgcaacagaagatgatatttatatcgtagtggatgtaaatgactatgcagacggtgaaagttttaaacacaaattgaatatattttctaagtatgtaaaagcgaagtcggatttgtttaagttacagaaaaatacaattccttatgtttttccagaagacgatgaagacggggtatataaaatgcatagatatattttgaaatgtaaagtttctgacttgaaatacattcctatgttaaaagcaattcgtaatcatgatatgggaataaaaccgggtattgctcatagagtgtatttcataaatagtaacaagaatactatatttcacgtttatgatgatagaggttgtgatgtattagctacctctcctaatacaattagggatatttatcatacatataatgattggatattagaatacgatagaaataaaattgataaagtatttaat

SEQ ID NO: 10379 - DNA, 744 bp, Bacillus anthracis
gaagaagtaaaaaaaggatatatcccagaacatatttgcgatcattatggatggtaatggaaagatgggcgaaggaggagagcaaatgcttcgtattgcgggacatcatgaaggtataatacgtatgtgagagaaaattacaaaatttgtaactaaacttaatgtgaaagtgttaactcttctatgctttttcgactgagaactggaaaagaccgaaaaaggaagttgattatttaatgcagcttccagaagaatttttaggtacatttttaccagaattgattgaagaaaacgtacaagtccgagtaatagggcaacaagatcgtcttcctacgcatacacgcagagcgatgtactctggccatggaagaaacgaaagagaatactggattaattcctaattttcgcgtttaactatggaagtcgagatgaaatcgttttctgctgtgcaacatatgatgaaagatagtgaggaagggaaaaattctgttgaagatggtaatgaagaaatgctttcttcctactaatgaagaagttcttttactgaacccgagttgtttatccgtaccaaaccgagagccacccattagtaaattcctggtatgggcaattgcatattccgaaatttgggtttacaaagtggattgggcccaattttaccgaggaacatttgctaaatgcgattacagactttcaacatagagggcgcagattcggaggcgtgtagaaagagagggtttggta

SEQ ID NO: 10380 - DNA, 1044 bp, Bacillus anthracis
atggaaaagcaaaaaacttttcatgtcgctgtagttggagcaaccggcgcagttggtgaacaaatgttaaatactttagagaaacgagaatttccaatcgggaagttaacgttactttcatctaaacgatctgcaggtaagaaacttgtatttaaaggcgaagaatttacagttcaagaggcaactcctgaaagttttgaaggagtagatatcgcactatttagtgcaggtggatctgtatcaaaacaattagcgccagaagcagcaaagcgcggtgcgattgttgttgataatacaagtgcattccgtatgacagaaaacgtgccacttgttgtacctgaagtaaatgaaaacgacttaaaagaacataatggtattattgcaaatccaaactgttctacaattcaaatggtagtagctcttgagccagttcgtcagcaatatggtttaaaacgagtaatcgtttccacatatcaagctgtatcaggtgctggtgcggcagcgattgaagaacttcatgaacaatcacaagcaatcttaaatggcgaagaagtgaaggcgaatgttttacctgtatcaggtgataagaaacattttccaattgctttcaacgcgattccacagattgataagttccaagataatggatttacgtttgaagaaatgaaaatgattaatgaaacgaaaaaaattatgcatatgcctgaattagaagtagcggcaacatgtgtacgtttaccagttgtatcaggtcactctgagtctgtttacattgaagtagaaaaagaaggcgtaacagtagaagaattaaagagcttacttgcaaatgcggaaggtatcgttctacaagataatccagaagagcagctatatccaatgccagctactgcagtaggtaaaaacgaagtattcgtgggaagaattcgtaaagatttaaataacgataaaggattccatctttgggtcgtatctgataacttattaaaaggcgcagcatggaattctgttcaaattgcagagcgcttagtaaaattacaattagtg

SEQ ID NO: 10381 - DNA, 6702 bp, Bacillus anthracis
atgttaaaaatatttcagcgaggtgagtttatggaagcaaaaaaatggtataggtacttaatccaacttatcgtagttgcattaatcgttacctccgtaccactgaatggattggcagaaacggcaccaccgtttacaccatctccaaattcagaacaaagtccagaaacagaaaagaaagaggaaaaggagttacccgctccacatccagatcagtcaaagaaggataaagctaaagcaaaggcaaatccaactgagattgtagaagaaagaacggaaacagagaaagttttcgataataatgatggtacgtatacgaaaagggtatatacggaaccgattcatattgagaaagatggaaagttagaagaggtttcaccgaaattagtagaagcaccaaatgaaaaaattataacggaaaatacaacattagaaccagaatttgagaaagcaacacaagatggaaagtacgttcaatttaaagtgaaaaatcataacattcagtataaactgataagtgcaaatggtgaaaaaggtgaattgaagccaacgccagtcactgcaacacatgaaaagaatacagtatggtataaaggaatttttccaaatattgatttaaagagtacgacgtttaacgaaaatgtaaaagaagattttgtattacgtgaatatacaggacatcacatttttacgtttgcattagaaacagatttaacaccgagcttacaggaagatggttcaatcgacttccaaaatgagaaaaaagaaaaagtttttacattaccgaaaccgtatatgaacgattcaaatgtggatcaacaatcaggtgaggctgtaacgtcagatgcagttcgctacaatattgagaagaaagatgaagaaacatatacattaactgttactgcagacccgcagtggttacaagcaccagagcgaaaatatccggtatatgtagacccttcgattcagttgaaagattttgataatgcatatgcttctagtgcatatccaactgtaaactattcaggaggaaagctttgggatgctggccaaaatgcttatacattaaaagtcggatattatgatggcgcatctgggacaaactttgcatttattaaaccagacgtttcaaattttaaaggggcaaatattgaaagtgcaacattcaatgcacataccatttggcattattatacgaatcaaccaaatggtgtttggttagacgaagtgacgggtgcctggaatgaaggtagtttaaattggaataataagcctggttcaaataatattgcgcatgctgatgtaacaagagggcaatgggcgagatttaacgtaactaacacagtaaaagcatgggtggaaggcacaaagcaaaataatggctttaagctacatgcaaacggaaatggtcaaaaccattggaagaaatttattgcagccgaaaatggaacaaatgcaccatacttagaagtaaagtattcttacgcaaaaccgaataaaccaagagtacaaacttattcaaatgggagtggtagtagttcaggccacttcaatgtacaatgggatgcagttccaggagcgaacggctataaagtagcaatatttaatgggcatgaatatgaagaaatcgaagttgggaatgtaacaaattggacaacaaaagataaaaaaatattcccaacgccagaagagattgcacaaggccgttattgggtgcatgatgacggaaaaggtgcagaagcaccagtcaatccaggtccaatttataaaaatgcatttttagataaaagcccgtatggagattatagtagtgcacgtggatattggattcgtatcatagcaacatacccaactggtgaggatagtccgctttctgatgaagcaattgtctatattccattggaacaagtgaaaaagccagatggctcagcgtatatcaatgcgacagatcaaacaactggttatgtaacattgaaatgggatgcagtaccagaagcagcagggtataaagtttggatttataacggaaaagattatgaagcgttcgatgtaggaaataaaacaaattggacaacgcaaaatgagaaaatttggccaacgaaagatgaaattgcaaaaggccaatatttacttcatcatgacaaaaaaggtgtagaattagcagttgatccatcacctgtgtataaaaattctggtggaatctatgcaggtgcgaaaaactattggttccgtgtaacggcatatagtaaagttggacatgctgaaagtgaaatttcacatgagtttgtacctagattctcccaagattctggatttataggaatgtttgattactgggcatcaattcctgtgttaaatggtaaagtaaatgctacaaatggtaactttatcatgagtgagaaagatattacgttatcagggcgcggaccggatgtatcagtagaaagaacgtataatagccaaagtaaaaaggtaggtttatttggtacgggttggtctagtggattagaggaaagagtttgggccgatggaaatggaaatttacttctaatttctactgacggtgcgaatattacctttactagaacaggagataataagtaccaagctcctactggtatatatttagagattaagcaagtatcaggcggatatgaaataaaagataaagatcaaactgttactttctataaatctggagatgcacaaggacgtattgagtatacaaaagataaatacggaaatacgacgacgtatgagtatgatggtgcatcccgtttatcaaaagtaaagaatgcttctggtaaagagttagtcttacaatatgacggtaataataaaaaagcagcaagagtaatcggtccagataacaagacgattacctttaattatgatggagatttacttgtttcttctacaacaccagaaggaaaagtatataaatatggatatgataatggggtactgacatctatttatgatccacaacatacagatgccaaaccatataaaacatcgtatgcatatgagaatgatagattagtaaaagtaacggacccattaggtaaagctacaacattagcatataatacaggttcgaaggaagttacgttaacgaaccctaaaggacgtaagactgtttatacgtataacgatgctgggaatccagtgaaaacagttgaagatgtgggacgtctgaatttaacgacatcgtatgaatataatgcgaataatttagtgaaaacaacaactcctaaaaaccaaacagaaacagcgacttatgacggtaatgggaatgtaacttctgttactgatgaaatgggaactgagaagtttgagtataataaagataatgggattataaaagcgacagataacgaagatcgtaaaacaactgttgcttatgtaggagcaaatacagaagtatctcaaacagaccaaggagcaaatacatcttctgttattcaccatgatcaatacggtaatccgattgaaacaagtaaagaattaagcgccggagggaacttaattcaaaatcctagttttgaaatgaatggtacggaaaaatgggtgaaagtagatacgaataatagcggatctatctcaaaagatgcaacaccagcaccaggtggtctgggcggggaatcatcactcaaaattacaacaaaagcaacgaataatgactggggctatattgctgccatccaagaagtaacgttagaaccaaatacaacgtatacgttaagtggtatggtgaaaacggatttagtcaatggtgctgccttctttaatgtacagtcattaaatgaaaatggtgctggtatagatggtggttggcatgatactcgtcacaataaagttcaaggaacgagtgattgggttaatcgtcaagttacctttaaaacaacagagcaaacaagaaaagtaaaaatctatttacaagtagaaaatggcggttctgctacgagcggttctgcatggtttgataaaatacaattggaaaaaggagaagtttcttcaagttttaatccagttctaaatagtagttttgaagaaaactggccggatggatttgtaccacagtgggtaagaagttgttctcaacattgtgaacgtaacgatgtatcggatgatagtttcacaggccactcgtctattgtaatggagagaagtgaatatggcccaaatgatattggataccgtaatcgtgtcattttaaaccagaaaaaggcagaaacagtaacacttactgcgatgtctaaatctgaaaatgtagtcaatgacgcaccagataaactttccaaagattatgcagttttagctgaaacctactatcaagatggaactgtagtaaattattatacaagtttcccaagcgggacaaatgattggaaccgtagtgcagctgttattccagcaaagaaaccaatccaaaagattgaaatattccttctctttagaaagaataacaaaggaaaagtatggtttgatgatattcgtttactagaaggaaacgctcttattaaaaacgagtacgacaacgatggaaatgttgttgcgacgtatgatgaagaaggacagaagaatacattcacatatgatgcatcaggaaataaaaagagcgaaacagatgaaaagggaaatacaaaactatatgattacaacaaagataatctattaacaaaggttacattaaaaaatggtacttctgtaaattatcgttatgatcataatggaaacacaacagagaaatctgtcatgtttggtgggaaaacacaaacacacaaatatgaatatgatgtagataataaaaatacagtgtatatcgatgcattaaaccgtcgtattgaaaacacgtacgatgaaaatgcaaacaagattaaaacaaaaatgccaaatggttctatcttagagtctgtatatgatacagctgatcgcgttgttggtgaaaagcgcaacggaaaagattcatttacattcgaacgtgatcaaaatggacaagttacgaaagtgaaagatcttgtcaacggtgtagaacgtacgaaaacatatgataaggctgaccgcgtcacaagcgcaacagatagccgaggcggaaaaattgactgggcatatcacgataaagcaaacagtaagacagaaaaattaaaagaacaaacggtaacgcaaggtggatatacaaataaagtatcgtatgactacaacacgttagatcaaaacatacgtgtgacagacggttcgcaaacgtatcgatttgattatgacgatcaaggaaatgttcgtacgtatacagctggtaatggttcaggttctaccttcaactatgaccaggcgaacaaaattaaagatttagtagtaggtacatcaaacagtattcttctatctgaacgatatgaatatgaccaatcgggtaaccgtacgaagattaaacatgaaggtgcgggcggaaaagtaacggaaacaaactttgtatatgacccgatcaaccaactattaaatgaggtattaccaaacggaacaactaaatcatacacatacgatggatttggaaaccgtacaagtgtgaaagttatagagaatggaaaagaaacaaagtctatagcggcaacattcaatgaaggaaatcaacttgtcaaattcggaaatgaatcattaacgtatgatgtaaatggaaatcgtacatctgatggaaagtacaaatatacatggaacgaagatgatcaaattgtagctatcacaaaacaaggtgagaacaatgcatttgcaacttacaagtatgatgaagataatcgtcgtattgaaaagaatgtgaatggtcaagtaacacgttatttctatgatggagatagcattaatccgttatatgagacagatggaaatggaactgtacttcgtcaatatgtatattctgcggatggcgcacgtttggcaatgaaagcacaaggtcaaacgttatactatcactataaccctcgtggtgatgtagttgcgatgacgaatcaggataaagaagttgtagcaacgtatgaatatgatgcatggggtaatgtattaacgagtgatacgaaaggtatcgcagcagacaatccatttggatatgcgggatacatgtatgataaagagattggcatgtattatctgattgcgcgttattataatccagaacatggtgtgttcttatcggtggatcctgatccaggtgatgaagatgatccggttacgatgaacgggtacacgtatgcggataataatccggttatgatgacagatccagatggtaagtgggcatggttagtaccggttgtaattgcaggtgcaatggtagcagctaggtttggtgcgaaatatgcaatccgctatggtgcgaaatatggtaaaaaagcggttaaatctgggtgggattatggtaaaaaggttgctaagtcaggatggaacaaagggaaaagtatagctcagaaaatccctagaatacacaaagtaggcaggattaagggagataatgataaaggaaaaggttattggggagtaatttattctactacaaagaaaacagggaaacggacttactcttcatttgaattccatacccctcacaatgggcatggatatcatttgcaaaaaaataaatattctaagtatcaaggaaaatggaatcgaggaaaggcgacgtggagacaaacaatatggaaggctaagaattgg

SEQ ID NO: 10382 - DNA, 666 bp, Bacillus anthracis
atgactgaaaaaatgacacgaatgacccaatttgtaaaagaagaaattgcaaatgcaataacacatggtatcggtgccattttaagcatccctgccttaatcatattgattattcatgcttctaagcatggtaccgcatcagctgtagttgcatttactgtttatggtgtaagcatgttcttactgtacttgttttcgacattgttacatagcattcaccatccaaaagtagaaaaattatttactatactagatcactcagccatttatttattaatcgctggcacattatactcttttttactttatcacgcttcgtggcccattaggttggacgttactcgcaattatatggacactagcaatcggggggtatcatcttcacaaattttctttgtacgtcgctttattaaggcatcaactctatgttatatcataatgggatggctcataatcgttgctattaaaccactttatgaaaatctaactggacatggtttttcactacttttagcaggtggaattttatattctgtaggagctatattcttcctttgggaaaagttacctttcaatcatgccatttggcatcttttcgtattaggtggtagtgcaatgatgttcttctgcgtactcttttacgtcttacctacagcataataaaaa

SEQ ID NO: 10383 - DNA, 1311 bp, Bacillus anthracis
atattcccttatcttgcagtgcaaatctaaatggtttttacttgaaaagagcaaacttcttcattctacactgattacgggaaatgtatgccccttggtatttgtactgattcgtcatataattgtacgcatgcaaaacaaagatttaaccgaaacattaaaagtgtttaataatcaattagagcaaaaagtatttcaaagaacagcagatttaataaaaaaatctaatgatttggtaaaaaatcaagagaggtttaagtccttatatgagtatcatccagaccctatattaactattgatccaaatggtaccgttttaaatataaaccagtctggaagtatattattagggaaggacagtgctgcattaataggaaaagagtgcttctctatttttttagatgaagataaacctgaattggaagcagccctaaagatggggaaaacgatgtagttcgtcttctttacagttacgtgtgaaaacataataatgagaaggatatatatttttggtatgtcactattgttcctattatgatagaaggacaaacttttgggagttatgtaatggtaaaagacattacgaaaatgaagcaacaacaagataagataaactatctagcattccatgatacagtgacggagattggaaatcgaatattcttccaacaagaattagaaaaatccattgaacgtgcacaaaaaacgcagggtgaatttggactcttgtatatagatttaaatcggttttaagaccattattgataccatgggacattcaatgggtgatagtgtgttaaaagaaagttgctaaacgttttaggacatgtctgtcaccgtctattcctctggctagaatagggggagatgagtttgcagtcttagtccataacccacacagtacatccgctattggatttatgtgaaaatctgtttcgtataactgaaaaaccatttgtagtcaatcagcatagtttttacttatctcttagtataggaatagcagtgtatccgtttggaggaataaacactactacacttttacaacatgctgatatcgccatgtatagcgcaaaggaaaaaggtaacaatgctgtttgtatgtacgacgagacattatctcaaaaaataacaagacgattacaattagaacacgattttcccgaatgcgattgaaaaataatggaggtgtttttattatatcaaccccccaagttgataattaaaggcacgtaaaggttattgggtggcacaaggcgtttaataactttggggcacaatccccagcttgggggccaatattcccttttt

SEQ ID NO: 10384 - DNA, 2515 bp, Bacillus anthracis
caagcagaaaagtttcatgaactcccgcttggagaagtgttaggggaacgctttgcacgttattagtaaattatattattccagatcgcgcacttcccgatgggcgtgacgggttaaaaccagtacaaagacgtattttatattctatgtatgtagaaagaaacgtacatgataaaagcgtcccgtaagtcggctaaaacagtcgggaacgttattgggtaactatcaccccgcacggtgattccctctgtatatggaagcgatggtacgttttaagtcaaaacttgggaaagtacgtaaatgtttagttgagatgcatggtaataatggtagtggtgacggggatcccgcagcagccatgcgttatacggaaagcccgattatcaccaattgcatctgagttatatacgtgatcttgataaagaaacagtagaattcgtatctaattttgatgatacgagtgaagaaccgggtggttttacagcagcgttccccaacttattagtgaacggatctacaggaatttcccgcgggttatgcgacagaaaattcctccgcatcatcttggagaagttattgacgctacaatgatgcgtattgataaaccgaatagtactgttgatgatttattaacagttatgaaaggaccagatttcccaacaggtggtattattcaggggattgatggtatttaaaaaggcgtattaaaacgggtaaaggtaaaattattattcgcgggaaagcagaggttgaaacggttcgtggcgggaaacagcaaatcgtaattactgaaattccatacgaagtaaataaagcaaaccttgttaagaaaatggatgagttacgtctagataaaaaattagatggcaatgcctgaagtacgtgatgacccagttcgtacagtttttccctttttcgtagatttaaaaaaggaagcaatttctgaagggttttttaatttatttataaaaaatacaggatttccaatttccatataactttaatatggtagcgataaataatcgtcgtccaacgcttatgacattcccgaaaaattttagatgcatatattgcccatcaaaaaagaagttgttacgagacgttcacaatatgaattacgaaaggcagaaaatcgtcaacatattgtagaaggttaaaagaaagcattatcgattttagaccaagttattgaaacgattcgtgcttcaaaagataagcgtaatgcaaaagataatttaagtgcgaaatttggttttacagaagcgcaagcggaagcaattgtatccttgcaattatatcgtttaacgaatacagatattacagcgctacaacaagaggcagatgagcttaataagaaaattattgagctacaggcaattttacaaagtgaaaaaagattacttcaagtcattaaaacagatttaaagagagttaagaaaacatatagtgatgatcgacgcgcgattattgaagatcaaatcgaggaaattaaaatcgatgtagaagtgatgatcccacaagaagatgtcatcgttactgtaacgaaagaaggatatgtgaaacgtactggatggcgctcacataatgcctcaaatggcaaagacttcggtatgaaagagggtgacatcttacttgaacgattcgatacgaatacgacagagacagtcctcttatttacgaataggaagaaactatatatattctgccagtatacgaaatgccagatattccgttgggaaaaattaggaacgccccggtgctaatatcggtttcactcgatcgggatgggaaccatctttggggcaactggtcgtaccgaactttgaggaagaaaagcgatttatcgtatttgtaacaaagaacggtatgattaagaaaacagaattaaaccaatataaagtacagcgttactcaagagcatttgttgctgtaaacttgaaaaaagatgatgaagttgttgatatatttgcgacagatggaacgagtgatatcgttcttgctacacacggtgcatatgcacttattttccatgaagatgaagtaagtccagtcggtgtaagagccgctggtgtgaaagcaattaatttaaaagaagatgactatgttgcttctggtaaaccattaaatgctgataaagatcaacttattctcgtaacgcagcgcggtgctgtaaagcgcctataagcatcagaaattgagaaaatcacgagggcgaagcgaggtcttggttattttcaaagaattaaaacgtaatccatcccgcattgtcggtattgaaatcgttcgagacgatgaactagttttacatgaagacagagaaacatatcgtagaagaaattgattcggaaaggtgtattgaaataagggccaggttatagtaacggtagttttagtgttagatgttaacgatactggtgaagttattgaaacgtggacgaaaaaacgaccggaataaaaaaagcatcttgccatgaataatggcaagatgcttttttctaagcaatttattatgtaa

SEQ ID NO: 10385 - DNA, 1719 bp, Bacillus anthracis
gtggcacttggaacgtcggccgcttatttttatagtgtgtatttaagcattcaatctatcggttcttcggaacatatgacagatttatattttgaaacgagcgcggtacttattacactaattattttagataaactatttgaagcaaaagcaaagggacgttcatcagaagcaattaaaaagttgatgggtttacaagcaaagacagctacagttatgcgagatggaacagaaatgaaaattttaattgaagaagtagtagctggtgatatcgtttatgtaaaacctggtgaaaaaattccggtagatggtgagattgtagaaggaaagtcagcaatagatgaatcaatgttaacaggtgaaagtattccagttgataaaacaattggggatgtagtaatcggttctacaatgaataaaaatggatttttaaaagtgaaagcaactaaggtaggaagagatactgcgttagctcaaattattaaagtagtagaagaggctcaaggttcaaaagctcctattcaaagggtagcagatcaaatttcaggtattttcgtaccggttgtagttgtgattgctattattacatttgcagtgtggatgatatttgttacaccaggtgattttggcggagcacttgagaaaatgatagcagtacttgttatcgcttgtccatgtgcattaggtcttgcgacacctacatctattatggctggatcaggaagatcagctgagtatggcattttatttaaaggcggggagcatttagaagcaacgcatcgattagatacagttattctagataaaacaggtactgtgacaaatgggaagccagtgttaacggatgtaattgtcgcagatggattcaatgaagaagaaatattacgtttagtaggtgcggcagaaaaaaaatctgaacacccacttgcagaagcgattgtagaaggaattaaagaaaagaaaattgatattccaagttcagaaacgtttgaagcgattcctggattcggtattgaatcagtcgtagaagggaaacaattattaattggtacacgccgattaatgaagaaattcaatattgatattgaagaagtttctaaatcgatggaagagttagaacgagaaggtaaaacagcaatgcttattgcaattaataaagaatatgctggtatagtggctgttgcagatactgtaaaagatacttcaaaagcagctattacaaggcttaagaaaatgggtctagacgttgttatgattacaggagataatacgcaaactgctcaggcaattgcggggcaagttggtattgaacacgtaattgcagaagtattaccagaaggaaaagcagaagaagtgaaaaaacttcaagcgcaaggtaagaaagtagcaatggttggagatggaataaatgatgctccagcacttgctacggcggatatcggtatggcaattggaacaggaacggatgtagcgatggaagcggcagatattacgttaatccgtggtgatttaaatagtattgctgatgcaatctttatgagtaaaatgacgataagaaatattaagcaaaatttattctgggcactagcttataacggcttaggaatcccgattgcagcgttcggtttcttagcaccttgggttgcaggagcggcgatggcatttagttctgtatcggtcgtattaaatgcattacgattgcaaagagtgaagttaaaa

SEQ ID NO: 10386 - DNA, 966 bp, Bacillus anthracis
atgatggatccaaatcgtttaaaaggaatcattatggttgtcatcggtgcttgtttatggggcttgtccggaacagctgcacaacaactttttcaatatgacaatatttctactgaatggttagttacaatccgattacttatatctggcattatcttactcattattgcatcattcggaacaagcaaaaaagaaatattcggcatttggaaacaaagatctgatgcttataaaatgatattgtttggtttattcggtatgcttgctgtacagtatacgtattttgcttctattaaagaaggaaatgccgccgttgcaacattattacaatatttagctcctatattcatcactgtatacttacttttcaaatggaacgttcgtccatcaaaaattgatttcatttcaattaccctttcattagtaggtactttcctcttactaacaaacgggtctgtgcataacttagctgtttctacaccagctattatttgggggattttatctggattatctctcgctttttatagtttatattcaaagggattactagaaagatggtcttcctctgttatcgttggatggggtatgattattgggggtattggtgtaacgattgtacactttatttctacgaaagaatttattttattatcaactgtgaaatatgtaaaattaagtactctaccgctcatcacatttgtcgtcatttttgggacacttattgccttttatttatacttagacagcatacgatacttgactccgaaagaaacgacattattcggttgtactgaaccactcgcagctattatttcttctgtacttatattacatgtaccgtttcaatcttttcagttattaggggctttttgtgtcattgtaatggtgctcatcttaagtcaaaaaccagatgaagggaaaccagaattaaagcttgttcatgagaaaaaggaaaatatacaa

SEQ ID NO: 10387 - DNA, 1284 bp, Bacillus anthracis
atgtttatagatcaggtcaagatatatgtaaaaggcggcgacggtggtaacggaatggttgcgtatcgtcgtgagaagtatgtaccaaaaggtggcccagcaggtggcgacggtggtaaaggtgcagatgttgtttttattgttgaggaaggcttacgtacattaatggacttccgctaccaacgtcatttcaaagctgatcgcggtcagcacggaatgagtaaaggtcagcacggacgtaaatctgaagatttacttgtaaaggttccgccaggaacagtagtaaaagatgaaaaaactggtcaaattcttgcggatttagtaacgcatggacaaacggctgtaattgcaaaaggtggccgcggtggtcgtggtaactcacgtttcgcaacagctacgaacccagcgccagaaatcgctgaaaacggggaaccaggtcaagagcgtgatgtcattctagaactgaaagtactggcagacgttggacttgttggattcccaagtgtaggtaaatctacattattatctgtcgtatcatcagcacgtccgaaaattgcagagtatcacttcacaacaatcgttccaaaccttggtgttgttgaaactggtgataaccgcagcttcgttatggctgaccttcctggactaattgaaggcgcacatgctggcgtcggacttggacaccaattcttacgtcatattgagcgtacacgtgtaatcgtgcatgttattgatatgtctggtttagaaggccgtgatccatatgaagattacgtaacaattaataatgaattaaaagaatacaatcttcgcttaacggagcgtccacaagttgttgttgcaaacaaaatggatatgccagatgcagaagaaaacttacaagcatttaaagagaaagtgggagacgaagtaaaaatcttcccaatctcagctgtaacgaaacaaggtgttcgtgacttactgtttgaagtagcgaacttaatagaaacaacacctgaattcccaatacatgaagttgtggatgagtctgacacaagtgtaatgtacaaatttgagactgaaggtgttaaatttgatattacacgtgaaagtgatggtacgtttgttatctctggttacgatatcgagaaaacattcaagatgacagacttctcacgtgatgaatctgtacgtcgtttcgctcgccaaatgcgcggaatgggtattgatgaagcgcttcgtgcacgtggtgcaaaagacggagatattgtaaaaattcttgaatatgaatttgaatttatcgac

SEQ ID NO: 10388 - DNA, 471 bp, Bacillus anthracis
atgttctcggttcaaccaatcgcatttgtacataatgaaagaaaggaaataaaagatgatgagtggggagaagtaagatcctgtattactttaactgaaatgtatacagaggaaagtatacaagggattgaagatttttctcatattgaaattgttttttattttcataaagtaactgatgaacaaattcaatatgttgctagacatcctagaaataatcatgattatcctaaagtaggtatttttgcacagcgcgggaaaaatcgtccgaatcgcataggggcaacaattgtaaaggtgattaaaagagaaggtaaatcaattattgttgaggggttagatgctattgatggcacccctatattggatataaagccaataatgaaagagtttatgccgagagaagaaattgtacagcctaaatgggcaacggatataatgagacagtattggaaggggaatggagtaaaa

SEQ ID NO: 10389 - DNA, 1839 bp, Bacillus anthracis
ttgaaaaaacgacaagatttacgtaatatagcaattattgcccacgttgaccatggtaaaacaacacttgttgaccagttattacgtcaagcggggactttccgtgcgaacgaacacgttgaagaacgcgcaatggattcaaatgatctagaaagagaacgcggtattacaattttagcgaaaaatactgcgattcactatgaagataaaagaattaacattttagatacaccaggtcacgctgacttcggtggagaagtagaacgtattatgaaaatggttgatggtgtattacttgttgttgatgcatatgaaggttgtatgccacaaacacgatttgttttaaagaaagctcttgagcaaaacttaactccaatcgtagttgtaaataaaattgaccgtgacttcgctcgtcctgatgaagtagttgatgaagtaatcgacttattcatcgaacttggtgcaaacgaagatcaattagagttcccagttgtatttgcatcagcaatgaacggaacagcaagcttagattcaaacccagcaaatcaagaagagaatatgaaatcattatttgatacaattattgaacatattcctgcaccaattgataacagcgaagagccacttcaattccaagtagcacttcttgattacaacgactatgttggacgtatcggggttggacgcgtattccgcggtacaatgaaggttggacaacaagttgctttaatgaaagtagacggaagtgtaaaacaattccgcgtaacgaaactatttggttatatgggattaaaacgtcaagaaattgaagaagcaaaagctggagacttagtagctgtttctggtatggaagacattaacgtaggtgaaacagtatgtccagttgaacatcaagatgcgttaccattattacgtattgatgagccaacactacaaatgacattccttgtaaataacagcccatttgcaggtcgtgaaggtaaatacattacatctcgtaaaattgaagagcgtcttcgttcacaattagaaacagatgtaagtttacgcgtagataatacagaatctcctgatgcgtggatcgtatctggacgtggggaactacatttatctatcttaatcgaaaacatgcgtcgtgaaggttatgaactacaagtatctaaaccagaagtaatcattaaagaagttgatggcgtaagatgtgagcctgtagagcgtgtgcaaattgatgtacctgaagaatacactggttctattatggaatctatgggtgcacgtaaaggtgaaatgttagatatggtgaataacggaaacggtcaagttcgccttactttcatggttccagcacgtggtttaattggttacacaacagaattcttaacattaactcgtggttacggtattttaaaccatacattcgattgctaccaaccagtacacgctggacaagttggtggacgtcgtcaaggtgttctagtttcacttgaaacaggaaaagcatcacaatacggtattatgcaagttgaagaccgtggtgtaatcttcgttgaaccaggtacagaagtatatgctggtatgattgttggagaacacactcgtgagaatgacttaacagttaacgttgtgaaaatgaaacaacaaactaacattcgttctgcgacaaaagatcaaacttcaacaatgaaaaaaccacgcttaatgactttagaagagtcattagagtacttaaacgatgacgagttctgtgaagtaactccagaatcaattcgtttacgtaaaaagattcttgataagagcgaacgtgaaagagctgctaagaaaaagaaatctgtagaagcg

SEQ ID NO: 10390 - DNA, 759 bp, Bacillus anthracis
atgacgaaaccagttgtagacgtgaaaaatgttcaaaaagtgtacggtaaaaaaggtgagaatcaatcacacgcattaaaaggtgtatcattctcaattcaagagggtgagtttgttggcattatgggaccatctggttctggtaaaacgacattattaaatgtaatttcaacgcttgataaagcaacaggcggcgttgttgaaattgcgggtacggacattacgaaaatgaagcaaggtgagctttctgatttccgctcgcaaaaattaggattcatcttccaagactttaacttattagagaacttatctatttacgaaaacatcgcattgccactttcacttcaaggtgttccatcacgtaatattgggccgaaagtagaaaaagtagcagatatgttaggcatttcagcaattcttcaaaagtatccatctgaagtatctggtggacaaaagcaacgttcagcagcagcgcgcgctttagtacatgagccagctattattttaggggacgagccaacaggagcgcttgattctaaaaacgcgacgagtttacttgatgcgatgacaaacttaaatcaagagcaaggcgtatctattatgatggttacacatgatccgtttagtgcaagttactgtcagcgtattttattcattcaagatggtgagctatataaagaaattcaccgaggtggtacacgtgaagagttttataaagaaattttagatgtgctagcagacttaggcacacaaaaagcg

SEQ ID NO: 10391 - DNA, 309 bp, Bacillus anthracis
atgcatgctcaactatgtgataaagtacaggtaatctctggtaaagacaaaggaaaacaaggcgttatccttgtggctttcccaaagcaaaaccgtgttatcgttgagggtgtcaatatcgttaagaagcactctaagccatctcaattaaatccacaaggtggaattattactaaagaagcacctattcacgtttctaacgttatgattttagatccgaaaacaggtgaacctactcgtgtaggcttcaaagtagaagatggtaaaaaagttcgtattgcaaaaaaatctggtgaattattagataaa

SEQ ID NO: 10392 - DNA, 1135 bp, Bacillus anthracis
atggaattagtagaaattagacagggaataggagaaaatggctaagagattagcggcttttaggggggtctctttgacctccctactaaggagaaacaaattgcagaattagaagagaaaatgatgggcgcaggattttgggatgaccaacaaggcgcacaagctgtaattaatgaagcgaatgcactgaaagatatggttggaaagttccgtcagctagatgagacgttcgagaatctagaaattacgcatgagcttttaaaagaagagtatcgatgaagatttacttcaaatcgcttgggtctgaagtaaaaggtttaattccaagaaataatgaagttaaaacttcagttactacttagcgatccttatgataaaaataaagcgattttagaattacacccaggtgctggtggaacagagtcacaagactggggctctatgttactacgtatgtacacacgttgggctgaaaaacgtggatttaaagtagaaacagttgactacttaccaggtgatgaagctggtattaagagtgttacgttattaattaaaggtcatacggcttacggttacttaagggccagaaaaaggtgtccatcttcttgtacagatttctccattagattatacaggccgtccgccatacatcgttcgtatcttgtgaagttgtaccctgagttcaatgatgaagttgaattggaagtgcgtacagaggccctagaaaattgatacgtatcgtgcaagtggagctggtggacagcacgttaatacgacagattcagcagttcgtattacgcatacgccgacaaatacggttgtaaacgtgtcagtcagagcgttctcaaaataaaaacccgtgagcatgcgatgaagaatgttaaaagcgaattatatccaaaagaatttagaagagccacaagccggagttagaatgaatttcgcgaagaaacaaaagaaaattggatgggggtagtcaaatccggttcttacggatttccacccggattcccttgggaaagaccaaccgtccaattacggaagtccgttacgggccaagcactttttggatggagaatatgacccattcattgatgctttactacgtttctcgcatctaatgagaaaaaggcca

SEQ ID NO: 10393 - DNA, 3582 bp, Bacillus anthracis
gctaacctgaatccacaaaaaacagtagatcgtgagtttgcaagtattggtgatacgctcacttatacgatcacccttcaaaatactggtaatatacctgcaactaatgtcattattacagattctatccctactggaactacatttattcttggtagcgttacggttaatggcattccacaacctaatttgaaccttgaaacaggaatcccggttggcacattaaatcctagacaaatagtaactgttactttcgaagtacaagtaacagctttaccaccaaatggaattatctcaaatgaagcaaatgtcacttacacatcccaaccagaccctactcttccgcctattacaacaacaacacctactccaatcgcagaaacaattgtacaaaatgcagagttagagtcagctaaaatagtagatttaccagtcgctaacattggagatgcactcacgtatacgattactcttgaaaacatcggaaatattcctatgacaaatgtatctgtcattgatccaccaccattaggtacacaatttattgtggattccgttacagtaaatggtatttcacaaccaggtattgatccaagtattggaatacctatcggtacaatacaaccgaatcaaatagtaaccatcacattccaagtaacgattacgaatataccgcctaacggggttgttacaaatgttggttcagtcaactttacatctcagcctaatccaaatgaacctcctgttacagaaacagagacaacaccaccagttaatactgaaatcattaatagcattattaatccatcgaaaacagctgatcgaaacaacgttgatatagacgatatcattacgtacaccgttacattccaaaacttacaaactgtcgaactaacaaatatcattttcacagatccaattcctgttggtacgactttcattccaaatagtgtaacaattaatggtatcccaactagcgatgttgatccagctcttgggattcctcttggaacattaaaccctagtcaatcagttgttgtaactttccaagttcgtgttgtttccataccacctaacggaattattgtaaatgaagctactatcacctacaccttccaacccaatcctggagaacctccagtaacagtgactactccaacgcctcctactactaccaatgtcaacacggcaacaacaaaccctacaaaatccgctgataaagtatttgctttattaggtgacacaatcacctatacaatctccttacaaaatacaggaactgtccctgcaacaaatgtacttgtaaccgaccctattccagctggcactactttcattccgaatagtgttacgataaacgacgttacacagccaggtattgttcctagttctggaattcttatcggtacattagaacctaacacttccgccgtcgtaactttccaagttcaagtaacatcgataccaccaacaggctttatcgaaaatcaagggacagtttcattccaataccagccagatcctactagaccacctgtatctgttactacgcctacacctactacaaagacgcaagtaagtgaagtcactattaatcctaacaaacaaggtaaccctcaaactattaatcttggtgatactgtcacatatacaattacgttccaaaatgtcgggaatattaatgcgacagatgttattattacagaccctactccagctggtactactttcattccgaatagtgttacgattaatggcgtttcttcgcctggagcaaatccaaatagtggtgtaaacgttgggactgttactccaggacaaattgttacgttaacttatcaagttactgtaaccgcactaccgccagatggtattattaaaaacactgcaactgtcacttacacattccagccaaaccctggcgaaccccctattaccattacagatcctactccaactgttgaagtatccgttattacgcctacacctaacccaaataaactagcagacaaacaaattgtagatataaatgaaattataacgtatactgtaaccttccaaaatcgcgggtcagtccctgcaacttccgttatcgttactgatccgttagcaaatgggctaacatttgttccaggtaccgttatattaaatggtattcctgatcttggagcaaatcctgtagaaggtatacctgtaggtacagtcaatccgaacgatacaattactgttcaattccaagcgagagtaacaagtgtaccacctggtggtatcattcgaaatcaagcaactgttactttcacatatgaaccaattcctggtgaaccacctgttactattacagaccctactccaattaacacgacggacgtaaatacagctatattaaatccacaaaaaacagctacgccggaaacagttacattaggtgatattattacgtatacaatttctctccaaaatacaggtaccattcctgccaacaatatactcgtaagcgatcctataccaaccggtacttcatttatccaaaatagcgttacgattaataatgtatctcagccaactgcaaatccagaaacaggtattcaaattccaacactttctccttctgaatcagcaacgatttctttccatgtcctagttacttcaattccaccaagtggagagatccaaaaccaaggtaacgtttcattccaataccaaccagatgctactaaaccaccggtatccgttactacgcctacacctactacaattactcctgtaaatgtcgggactattaatccgataaaaaccgctgataaatccatcgtttcagtaggtgatacaattacgtttactatcacattccaaaacgaaggtaccattcctgtcactgacatttctgttactgattcacttcctgcaggtacatcattcattccaaacagtgtcacaattaacaacattccagttccaaatgcaaatccatctacaggaattctagttggaactcttaatccattagactcagtaacaatttcattccaagtacaggttattacccttccacctaatagaatgattataaatatcgcattcattacgtctacttctcaaccagatcctactagaccacccgtcacaacaacgattacaacaccaccaattacagtagaagtaaaccctaatgagccaaacacatttattaagactgcaaatgtaaatagcgcccatcttggtgatttcatcacatatacacttacctttactaacaatggtgctatcccagcaaataatgtactcattaccgacccacttccacctgaagttactttctatccgaattcagtaacagtaaatggagtagcacgtcctggaactaacccaactattggtattcttatcgacactgttaatccaggtgaatccgttgttatccgttttatcgtccaagtaacagcagagccacgaggcggtctaattcgcaatactgctcgcattcgctatacactaagacctgatcctactcaaccaccgatttctgttgacgaaacttcagagccaaacattattccgtttatcggtccattcgtatcacca

SEQ ID NO: 10394 - DNA, 984 bp, Bacillus anthracis
gtgagtcagacagtagaaacattattttctatttttgattcttctgcggtagttttacgtaaagaattagatgtaacatatttagaggcgcttgtagaaacaggtgataacttgtttgaaggagcgattttacaagaggaattatccgaagcagcaattgaaaggctgaatcgtgaatatagtacgtttaatgaagaaacatataaaggtgaagaaattcgtaaagcatttcagttagccatcttaaaaggaatgaaagaaggcgtacaagcgaatcacgaaatgacgcctgatgcagttggtatgttcatgagctacttattccataaatttatgcaaggtcaaaatgaaattactgtgttagaccctgctattggaacaggaaacttaatgactacagtgtttaacagcgctaaagaaggactaacaatgagtggatttggtgtagaagtggatgaagtgctaattaaacttgctttagtaaatgcgaatttacaaaagcacgcaatcgaattcttccatcaagatggactagcaccgctttatatcgatccagttgatgcagttatttcagacttaccgattggttactatccaaatgaaatcggtgcaagtgaatataagttaaaagcagatgaaggaatgtcgtatgcccaccacctatttattgaacaaagtgtgaaacatacgaaagaaggcggatacttattcttcctagtaccaaacttcatttttgaaagtgatcaagcaccaaaattacatgcatttattaaagaaacatgttttatccaaggtttattacagctacctgtttccatgtttaaaaacgagaaaaatgcaaaaagtatatttgttctccaaaagaaaggccctagtgtaacgatgcaaaaacaggcgttattagtggagttacctaaattctccaacatgaaggcgatggaggacattatggaccaattaaatacttggtttgcaacgcataaa

SEQ ID NO: 10395 - DNA, 1546 bp, Bacillus anthracis
ttagattttggaagtcaatacaatcagttattagcacgtcgaattcgtgagttcggtgtatacagtgagcttcatccacatacaattactgcggaagaaattaaagcaatgattccaaaagggattatcttctctggtggaccaaatagtgtatacggtgaaggcgcattacattgtgatgaaaaaatctttgacctaggattaccgatcttcggtatttgttacggtatgcaacttatgacgcaacaattcggtggtacagtagagcgtgcaaaccaccgtgagtacggaaaagctgttctgaaagtagagaacgagtcaaaatttatatgcgacccttccagaagagcaagttgtatggatgagtcatggcgacttagtaactgttttacctgaaggattcgtagtagacgcgacaagtgagtcttgcccaattgctggtatgagcaatgaagcgaaaaacttatacggtgtacaattccacccagaagtacgtcactctgagcacggtaacgatttaattaaaaacttcgtattcggcgtatgtggctgttctgaaggatggaacatggagaactttattgaagtagaactagagaaaatccgtgaaactgttggagacaaaaaagtactatgtgcgcttagcggcggtgtagattcttctgttgtagcagtattaattcataaagcaatcggcgatcagttaacatgtattttcggttgacactgggttactttccgtaaaggcgaaccagaaggtgttatgaaaaacattttagggaaagccttccccatgaacgttatttaaagtggaatgcaaaagaaacctttcttgtaacaagttaaaaaggtgtagaagatccagaaacaaaaacgtaaaaattatccggtaacgaattcttttacgtaattggatgatgaagcttctaaataagaaggatgggacttctttagcacaaggtacacggtacccagatatcgttgaaggtggtacagcaactgcacaaacaattaaatctcaccataacgttggtggacttccagaagacatgcagttcaaattaattgagcctttaaacacgttatttaaagatgaagtacgtgtattaggatctgaactaggaattcctgatgagatcgtatggcgtcaaccattcccaggtcctggtcttggtattcgtgtactaggtgaaatcacggaagagaaattagaaatcgttcgtgaatctgatgcgattttacgtgaagaaattattaaagcaggcttagaccgcgaaaatctggcaatacttcactgcgcttcctggtatgcgtagcgtaggtgttatgggtgacgagcgtacttacgattacacagtggggtatccgtgcagtaacatctatcgacggtatgacagctgactgggcacgtatcccttgggacgtattagagaaaatctctgtacgtatcgtaaacgaagtgaaacacgttaaccgtatcgtgtatgatgtaacgagtaagccaccagcaactattgagtgggaatagtattataataaaagatcc

SEQ ID NO: 10396 - DNA, 983 bp, Bacillus anthracis
atttttgatgctttttcacatcatgtaacctttgttgataataaaggaaatataactttatgtaatcaggctgcagcagatgattttggtgtagtacgaaatgatataattggaaaaccaattcaacaattactaaaattgcctgaagaaaaaattaaagctctagaaacattaagaacaggcacagaaatatataatgaagaagtcttagacaaaaactatggcattttaaataaccgaattattcgtgattataacggagagatttttagggttattagtgtttttcattatttaaacacagaacgtgatgcagaaaaattttcgttagcagggcgaatcgcagctggtattgcacatgaagtacgtaaccctcttacaaccgtacgaggatatttacaatttttacaagaaaatgtttctccatctaataaagaactatttaaaaacttacttattcctgaattagatcgcgcaaatagtatcattacaaaatttttatctatttcaaaaacacgcgaatttacaagagaaccctttcccattaatacatttttacgtgagtatattcaacagttactagctagtgaagtctttttacataacatttcaattgattataatttttctactgaattagatgatattttagttcatattgatcgccatgaacttgtacaagtttttttaaacttattccagaacgctgtcgatgctcaaggagaaaaaaactttctatacaaatcactagttaccgccttgataattttgttcgtattactttcactgataatgggactggtattccaccagcgattcaagaatatatctttgatccattcttctcaacaaaagattccggcacaggtttgggcttgtcagtaacgaaaaaaattatccaaaatcataatggtacattaaaaatgactagtaatgaagatggtactacttttactatttcaattccaatcttacctaaaaca

SEQ ID NO: 10397 - DNA, 1428 bp, Bacillus anthracis
ttgaaagatacatttgttgaaaaggtagatgactttgtaaggcaacatgatgtattaaaggaacgttcaacaattgttgtaggggtttctggtggtcctgactctttggctcttctatattatttattagaaaaaagagcagcaaaacagtttgaaattgtagtggcgcatgtggatcatatgtttagaggtgatgaatctcatgaggacctacagtttgtgcaggacctttgtaaaggactgggagttatttgcgaaacgataaggattaatgtgtcgcaatatcaaaagcaatacgggatgaatgcacaggttgctgctagagaatgcagatatgcatttttggaaagaataatgaagaaatatgatgcgagatatgtagcccttggacatcatggtgatgatcaagtagagacgattttaatgcgtcttgtacgagggagtactccgaaaggatatgcaggaattgcagtgaagcgtccttttcataatgggtatttaattaggccgttacttggagtaacgaaggaagaaattgttaattactgtaatgagctaaaaataattcctcgtatagatccaagtaacaaaaaggaagtatatacaaggaatcgattacgtaaatatgttcttcctcatttgaaagaagaaaacccacaagtgcatgagaaattccaaaaatttagcatgcagatgcaagaggatgaggcgtatttgcaggaattagcttttgagaaaatgaataaagtaattacaaaaaaaagtgataaacaaattagcttatcaattcctacctttgaatccatgtctatgcctttacaaagaagagggattcaactaatattaaactatctttatgaatataagattccatcttctctttcctctatacatattgacaaggtgattgagttttttaagcggacacaaccttcaggttcacttgatttcccaggtgatttgaaaattgttcgcgcgtacgaggagtgtagctttggatttaaacaagaaattgtttcccctttcttacaagacttatcagtgcccgggacaattacgctatcgaacggggataaacttgtaacagaggtgagcgaagatataccaagtgacatgaatgaaacagtatttgttgctaagtataatgatatatcatatccaattcgtattcggtctagagaaaatggagatcgcatgtcaatacaaggtatgaatggcacgaaaaagataaaagctatttttatcgaagcaaaagtaccaagagaaaaaagagaagaatggccggtcgtttgtgatgcaagcgggaatattatttggttacccttgttgaagcgatctgcatttgctatctcgaaagagacagcaaagaaggataaatatatgattattcactacaaaagcaaggagtcttccgggaggataatgaaa

SEQ ID NO: 10398 - DNA, 1758 bp, Bacillus anthracis
atgaaaacagttgcaaactattcatattttgttatgatagtgttgcgaaaacgtttgcataaaatttccgatgggatgcaaaaggagagaatgactatgaataagacatggtggaaagaagcggttgcttatcaaatttatccacgtagctttatggattcaaatggtgatggtattggagatttacaaggtattattgcgaaactggattatttaaaagatttaggaatagatgtaatttggatttgtccaatgtataagtcacctaatgatgataatggttatgacattagtgattatcaagatattatggatgagtttgggacgatggaagactttgatgctttactagatgaagttcataaacgtgatatgaagcttattattgatttagttattaatcatacaagtgatgaacatccatggtttattgagtctcgttcatctaaagacaatccgaagcgtgattggtatatttggcatgatggtaaagatggtgcagaaccaaacaactgggaaagtatttttaatggttcggcatgggagtatgatgaagtaacaggacaatattatttacacttattctcgcgtaaacaaccagatttaaactgggagaataaagaagttcgagaagtgctatacgatacagttaattggtggcttgataaaggaattgatggtttccgagtagatgcaatcagccatattaaaaaagaagatggctttaaagatatgccaaatccaaaaggactaaagtatgttccatcttttgataaacatatgaatgtggatggtattcaacctttattagaagaattaaaagaaaatacgttttctaagtacgatattatgactgttggtgaagcgaatggcgttaagattgaagatgctgagctttgggttggagaagagcaaggtaagttcaatatggtattccaattcgaacatttaagtttatgggatgcagaaaagaagaaagatcttgatgttgtagggctgaaaaaggtattaacgaaatggcaaaaagggttagaaaataaaggatggaatgctttatatattgagaatcacgataagccgcgtatcgtttcaacttggggagatgataaacaatattggcgtgaaagtgcgacagctttaggagcaatgtatttctttatgcacggtacaccgtttatttatcaaggacaagaaattgggatgacaaatgttcaattcccaaacattgaagattacgatgatgtagcaattaaaaatttatatcgcgagaaaattgcagagggcgtatcccatcaagatatgatggaaattatatgggcttcttgccgcgataattcacgtacgcctatgcattgggacgatgagataaatgctggtttcacaacaggtacgccttggtttggtatgaatcaaaactacaaagaaatcaatgttgcaaagcaaaagaatgaagagaactctattttcaatttctataagaaaatgattgccctgaaaaaagagcatgatgtactgaattatggtacgtacgatttacttttagaagatgacccgcaaatttatgcatatactcgtacactaaacgatgaaaaaatagtcgtaattagtaatatctcaaaagaggaagctgtgtataatgaggatttatttgcactagaacgcaaacgtttgcttttaaataactatgaagttgcggaacatgaacaattaactacaatcacgttaaagccttatgaaacaagggtttatcgcatttca

SEQ ID NO: 10399 - DNA, 1035 bp, Bacillus anthracis
atggatattaatctgtttgattttcatttaccagaagaacttattgcacaagtcccattagaagagcgtgaaacatcaagattaatggtgttagaccgcgaaacaggggatattgagcataaacattttacggacattctttcttacttacatgagggggattgcttagttttaaatgaaacgaaagtaatgccagctcgtttgcacggtgtgaaagaagatacaggcgcacacattgaagtacttcttttaaaacaggaagaaggcgataagtgggagacgcttgttaagccagcgaaacgtgtaaaagaaggaactgttatctcttttggcgaagggaaattaaaagcaacttgcacaggaactgcagatcaaggtggacgtcagcttgaattttcatatgacggcatcttctatgaaattttagatgaacttggagaaatggccacttcctccatatattaaagagacgctagaagatcgcgatcgctatcaaacagtatatgcgaaagaaatcggttcagcagcagcgccaactgcaggacttcactttacagaagagttactgggagaagttaaaacaaaaaggcgttgagttagcatttattacacttcacgtagggcttggaacatttagaccagtttctgctgatacgattgaagagcaccatatgcatgcagaatattaccatatgtctgaagagacagcggcattattaaaccgtgtaaaagagaatggtggacgtattattacggtaggtacgacttcaactcgtacgttagaaacaattgcgacagatcatgacggcaagctttgtgctgcttctggctggacagacatttttatgtacccaggttatgaatttaaagcaattgatggtttaattacaaacttccatttaccgaaatcaacattaattatgcttgtaagtgcatttgcaaacagagataatgtacttcatgcttataatgaagcagtaaaagaaaaatatcgtttctttagcttcgggtgatgcaatgttcgttgcatctcac

SEQ ID NO: 10400 - DNA, 1188 bp, Bacillus anthracis
atgaaaaaatatattctttcattagaccaaggaacaactagctcacgcgcaattcttttcaataaaaaaggtgaaattgttcattcagctcaaaaagaatttacacaacattttccaaagccaggctgggtagagcataacgcgcaagaaatttggggatctattttagcggttatcgcaacttgcttaagtgaagcagatgtaaagccagaacaaatcgctggtatcggtattacgaaccaacgtgaaacagcggttgtatgggataaaacgactggtaaaccaatttataacgcaattgtatggcaatctcgccaaacagctgaaatttgtgatgagttaaaagaaaaaggttatagcgaaatggttcgcgaaaaaacaggtcttttaattgacgcatacttctctggtacgaaagtaaaatggattttagataacgttgaaggtgcaagagagaaagcagaaaacggcgatctattattcggaacaattgatacgtggcttgtatggaaattatctggtggtaaagcgcacgtaacggattactcaaatgcatcacgtacattaatgtttaacattcacgacttacagtgggatgatgagcttctagacatgttaacagtaccaaagagcatgcttccagaagtacgtccatcatctgaagtgtatggagaaacaattgactatcacttcttcggtcaaaatgtaccgattgcaggtgtagctggtgatcaacaagcggcattatttggacaagcttgtttcggtgaaggtatggcgaaaaatacttacggaactggttgcttcatgttaatgaacacgggtgaaaaagcagtagcttctgagcacggtctattaacaacaattgcatggggaatagatggtaaagtaaactacgcattagaaggaagtattttcgtagcgggttctgccattcagtggttacgtgacggaatgcgcatgtttaaagatgcaagtgagagtgaagtatatgcttctcgtgttgaatcaactgacggtgtatacgttgtaccagcattcgtaggattaggtacgccttactgggatagtgaagtacgcggcgctatgtttggtgtaacgcgcggtacgacgaaagaacacttcattcgtgcaacactagaatctttagcttaccaaataaaagacgtattatgcgcaatggaagca

SEQ ID NO: 10401 - DNA, 1271 bp, Bacillus anthracis
aaaacgaaagatcgagaaatatcagagagctgggaattagatacgcgtggaaaagggattacacgtccatattcggcagaagatgtaattcgcctgcgcggatcaattgatatcgagcatacattagcgcgccgcggtgctgaaaagctttgggcatcgcttcatacagaagattacattaacgcacttggggcattaacaggaaaccaagcgatgcaacaagtaaaagctgggttaaaagcaatttatttaagtggatggcaagtagcggccgatgcaaacctgtctggacatatgtatccagaccaaagtttatatccagcgaacagcgtacctgctgtcgtaaaacgaattaatcaaacacttcaacgtgcggatcaaattcagcatatggaaggaagcggtgatacagattatttcgtgccaattgtagcagatgcagaagctggatttggcggacaattaaacgtatttgaactgatgaaaggtatgattgaaagcggttgcgtctggcgtgcactttgaagatcaattatcttcagagaagaaatgcggtcatttaggcggaaaagtattactaccaacgcaaacagcagtgcgtaatttaatttcggcacgccttgctgcagacgtaatgggagtgccgacaattatcgttgcaagaacagatgcggatgcagcagatttaattacgagcgatatcgatcctgttgataaagcgtttattacaggagaaagaacaccagaaggattttaccgtacgaaagcaggtcttgaccaagcgattgcacgtggtttagcgtacgctccttacgcagacctcgtttggtgtgaaacttcagaaccaaatttagaagatgcaaaacgatttgcggacgcaattcataaggagcatccagggaagctacttgcatataactgctcaccttcattcaactggaaacaaaaactagatgaaaaaacaattgcaagcttccaaaaggaaatcgcatcttacggttacaagttccaattcgtaacacttgctggattccattcattaaattacggtatgtttgaactagcacgtggctataaagagcgcggcatggcagcatactgtgaattacaacaagcagaatcggcagttgaaaaaccgcggttactttgcaacacgtcatcagcgagaagtaggaacagtttacttgattgaagtggcacaagtgataccaggcggaacttcatcaacgacagcgttaaaaggatctacagaagaagcacagtttacgaaa

SEQ ID NO: 10402 - DNA, 861 bp, Bacillus anthracis
gtgaaagcttcaacattactatttaaaattgaaagtaatatggatcaattttcaccagctgaaaaaaaggttgccatgtacataatggagaatgcagagattgttccgaacttaacgacgaaagaagtgtcaacgaatgcaggcgcaagtgaggcgagtgttgttcgcttttgtaaatcgattggaatcggaagttttaaagcatttaaaatcgcgctcgttcgtgaattaacgattgctgattataatattaatgatttttcagtgatgaatacggaagatggaccgtatgacttgtttaataaagttacatatgtgaataaagctgcaattgaggcgagcgtgacggcgatagataagaaggagcttgagaaagcagcagatcgtattgtaaatgcggataaaattatattttacggagtaggtggatcagcaactccggcgatggacggggcttataaatttacaaggctcggatttactgcaatgatgctatctgattttcatatgatgttaccgcttgtgacgaatttaaaagagggcgatatatttgtagcgatttcaacatctggtcgtacgaaagatgtacttgaaatggcacaatatgcgaagagacaaggtgcaacagttattgcgattacgaagcttgatcaatcatcgccgttatataaagaggcggatattcgtctttgtatgccagatgtagaacaagatcatcgtattgcaagtattgcttcaagaatgacgcaattgaacatgatagatgctctatatgtgattacctttaatcgtattggtaataaagtgctggatcaatttatggaaacaagagaagaagctttgcgattacggaagctgaaa

SEQ ID NO: 10403 - DNA, 7155 bp, Bacillus anthracis
atgcctaatagtcaaaaggttcgtcattcgttatcatctgcgcagtctggtatgtggtttgcgcaacaattagatccgcttaatccgatttataatactggggaatatgtagaaataaacggaaatattaatcaagaaatttttgaattagcagtacgtaaagttgtaatggaagcagaggcacttcatgttcgtttcgaagaagatgaaattggtccatggcaagttattgaggaattacagtttcatatgcattttattgacgttcgtaaagaagaaaatcctgaagaggctgctaaagtatggatgaaaaatgatttatctatgccagttgatttgaaaaaagatacattatttactgaagcacttattcaagttgaaaataatcgtttcttttggtatcagcgcatccatcacattgtgatggatggctatggattttcacttcttagccaaaaggtagcgaaagagtatacatcattaatagaagaaacaaataagaatgaaaagccatttggctctcttgcaaaaattgtacaagaagatatggagtatggtgagtctaaacaattccaggaagatcgtgctttttggttagaaaagtatggagatgaaccagaagttgtaagtttggcagaacgagcaccgagaacatcaaatggatttttacgtgaaacagcgtatttatctagttctagtacgaaaactttactagaagatatcaatgtttcgttagcaagttggccggaatttattatagctgtaaccagtatttatatgcataagttaacaggagcaaatgatattgttttaggtttaccgatgatggggcgtctaggttctgcatctattcatacaccgagtatggtaatgaatttagtaccacttcgtctcactgttactccaaatataacacttgcggaattattacagcaggtttctaaagaaatccaagacgtacgccgtcatcataaataccgccatgaggaattaagaagagacttaaagttattaggtgaaaatcaaaggttatttggaccgttagtgaatgttatgccttttgattacgggcttaactttgctggaaatcgtggtattacacataatttatcagcaggacctgtcgatgatttatcgataaatgtatataaacgtttcgatgaaaatgagttaatgattcattttgatgcgaacccagaagtatataatggcgcggagctagcattgcataaagaaagatttatgaatgtattagaattagtgataaatgattatgaaaaagatgcgtcgattggaagcataaacattactcttcctgaagaaaatcaaaaagttttattcgaatggaatgaaactaaagaagctgaagagttaatttctctacctatattatttgaaaaacaagtacaaaaaaatccaaataaaatagcagttacttgtaacggaataaaacttacgtataaagagttaaatgaacgagcgaatgaactagcacactatttagtagaagaaggaatagggccaaatcagtttgtagctttagtatttccaagatcaacggaaatggtagttagtatgctagcagttttaaaggctggtgcagcgtatttaccgatagatcctgaatatccagctgagcgaatcaattatattgtaaatgatgcaaaaccagtgtgtatcatcacacattcatctgtatcatctattttagtcatagaagatgatataaaagaaatcgaattagatagtgaagaaatgacaatagcgttaaacacatattcttatatgaatataccattaaaaaatgatgaatcacttttaaacccagcttatacaatttacacttcaggctcaaccggcaatccaaaaggtgtaattgttcctatgaaagctttaagtaattttttattggctatggacgatatattttcactaaatgaaaacgatcatttattagcagttactacatttgcgtttgatatttcagctctcgaaatttatttacctcttattagtggggcaagtttaacaatcgcacaaaaagaagtaattcaagaaccttctgcgttaacggcattgttacaagaagaaagagtgacaattatgcaagctacaccgacgctttggcaggcgttagtaacggaatatccagagaagctacaaggactaaatgtactcgtaggtggtgaagcacttccagcccatttagcaaaaacattaaaagaattaggttgtactattacaaacttatatggaccaactgaaacgacgatttggtctactgtcatgaacatcgatgaaagagaaagtggtatgcctcctatcgggaaaccgatttggagtacagctgtatatgtattagacgcaggattacaaccagtaccacctggagtaattggtgaattgtatattgcggggggagggcttgcgaacggatatttaggaaaaccagagttaacggctgaacggtttgttgcaaatccttatggaaaaccagggcaacgcatgtaccgtacaggcgatctagtaaaatggcgcaaagatggcgttctagagtacatgagccgcgcagatcatcaaattaaaattcgtggtttccgaattgaactagctgaaattgaaatggtagtacaacgacatgaaaatattaagcaagcagtggttatggtacgagaagaccgtccaaatgataaacgaatcattgcgtatatcgttgccgaagagaaggaaacgattcatcttgcagaaattcgttcttatgtttcagaaagtttagcgaattatatggtgccagcagcatttgtattgctagaagaattaccattaacgccaaatagaaaggttgatagaaagaaattacctgctccagattataatggaatgaacaatgagagagttgctagaaatccgaaagaagaaatattatgtgatttatttgcagaagtacttggtgtttctcgcattagcattgatgataatttctttgaaatgggaggacattcgcttcttgcatctcgtttaatggcaagaattcgtgaaacattaagtgtcgaactaggaattgggaaactatttgaatcgccaactgttgctgaattagcgaaacaattggatcaagcaaaaaatgcacgaccagcaattaagaaagtaagtagaccaaatgaagttccactttcatttgcgcagcgtagattatggttcttaaattgtttagaagggccaagtcctacttataatattccgttagttattcgtttgtctggaaagttgaacgaggaagcattacaaggtgccattcatgatgtagttgagaaacatgaaacacttagaacaattttccctaacgtattaggtagttcttatcagaaaattttagatatggaaaatttaaatctagaaataattaaaacaaaaacatgtaaagatgaattagaaaatgtgcttacacaggcggtaagatatagctttaacctcgatggtgaaccagcagttcgtgtgcaactttttacaatgagtgaaaacgaacatgtaatactcattctattacaccatattgtaggggatggctggtcattacaaccgttaacgagagatcttacagcggcgtataaagcacgatgtcaagggaacagagtacagctggagacacttccggttcaatacgcagattatgcactttggcaacaacaattgttaggggatgaaactacacaagagagtctcatttcaacacaattagatttttggaagaaagaattaagaggtttaccagatcaattggagttacctacagattatcagcgtccaatggaaacgagttaccagggagaaacaattcattttcatatagatgcaagtatgcatagtaggttagtagagcttgcacggaaaaatggagttagtttgtttatggtattgcaagcaggactaagtgcgctatttacaagattaggtgcaggtactgatataccaatcggtagtccgattgctggaagaaacgatgatgcactctctgacatagttggtttatttgtaaatacattagtgttacgtacaaatacatctggagatccaagctttgaagaattattgaatagagtgaagcggtcaaatcttgcagcttatgaaaatcaagatgttccattcgaacgactcgttgaagtgttaaacccagtgcgtactcgaaatagtcatccgctatttcaagttatgttagctttccaaaatacgccagaagcaacctttgatgccccagatatagaagcgaaccttgaaattcaaagcgttggctctgcgaagtttgatctaacatttgaaattagtgaaagtaatggagttgatgggaatccaaatggcttacaggggttattagagtttagcacagatttatataaacgtgaaacggcccaaaaattagttgaacgatacattctgttattagatgatgcagtgaaacatccggatcaatcaattggtagattagaaatactaactctagcagagaaaaatacagtgttagaaaagtggaatggtggttttcaaatcgcatcagaaatgacattatcacaattatttgaaaaacaagctcatataaaaccaaatgctattgctgtcgtctttgaagatgaaaagttaacttatgaaaaattgaataaaaaatcgaataaattagctcgtttgctaatagcgaaaggaattggtcctgatcaacttgttgctttagcaatgccgagatctttaaatatggttgtgagcttactagctgttctgaaagctggtgccggatatttgccattagatccagattacccgtcagatcgtatttcatttatgctccatgatgcgaaaccgtcatgtgttttaacaaattcagatgtggaaattgaatgtgatgaggaattgaaaattttaattgatgatatagaggtaatagaagaaagtgagaaatatagtgaagacaatatagatgaaatggagcgtatgaagccgttaactccttcgcatatcgcttacgttatttatacttcaggctcaacaggcagaccgaaaggcgttatgatacctcatcaaaacgtagtaagacttttaggagcaactgatcattggttccaatttgacgcagacgatgtgtggacgatgtttcattcatatgcttttgatttctcggtttgggaaatttggggacctttattatatggagggcgtttagtcgtagtaccacatactgtaagtcgctcgccgaaagaatttttacagcttcttgttaaagaaaaagtaacggttttaaaccaaactccatcagcgttctatcaattgatgcaagcagaccgtgaaaatgaagagattggccaaaaattatctttacgatatgttgtttttggaggagaagcacttgagctaagtcgattagaagattggtatagtcgacatcctcataatgcaccgaagcttattaatatgtacggtattactgagacgacagtacatgttagttatattgaattagatgaaactatcgtctctttgcgagcgaatagtttaattgggtgcagtataccggaccttaaagtatacgtattagataactatttacaaccagtgccacctggagtagttggagaaatgtatgttgcaggtgcagggcttgctcgtggatatttaggaagagcaggcttaactgctgaacgatttatcgcagatccatttggcaagccaggtacaagaatgtatcgcacaggagacttagctcgttggcgtcatgatgggacgttagattatatagggcgtgcagatcaccaaataaaaattcgcggattccgaattgaattaggggaaatagaagcggtcataatgaaacaccctaaagttgagcaagtagccgttattgtacgggaagatcaaccaggggataaacggttagtttcttatatcgtcgcatcaaataatgaaatgattgatacgaatgaaatgcgccaatttgctggtggtagtttaccagattacatggttccatacgcgtttgtagtagtaaatgagttgcctttaactccaaacggtaaattagatagaaaggcattgccagctccagaatttatcgcatcagcttctagtcgtggaccaagaacaccgcaagaagaaatgttatgtgacttgtttacagaagttttaagtgtgccgcaaattggaattgatgatggattctttgatttaggtggccattcacttcttgcagtgcagcttatgagccgcatgaaagaagcgcttggggtggaactaaatatcggaactttatttgcagcacctactgttgctggattagctgaaagacttgaaatggggaatggtcaaagtgcacttgatgtattgcttccattacgatcaggtggagaccaattaccactattttgtgtacacccagcaggtggattaagttggtgctatgcaggacttatgaaatctttaggaacagattatccaatctacggtgtgcaagcacgtggtatcgctaaaaatgaagaacttccaaaaagtttagaggagatggcggcggattatttaaaacacattcgtgaagtacagcctcacggaccatatcgtttactcggttggtcgctcggaggaaatgttgtccatgcaatggcagcgcaactacaaaatgaaggggaagaagtggaattactcgttatgttagattcttatcctggtcacttcctaccgaatacggaagcgcctacggaagaagaagcgttaatcgcattattggctctaggtggatatgatccagataacatggatggtaaaccacttacgatggaaagtgcggttgaaatacttcgtaaagatggaagtgcattagcaagtcttgaagaagagacgattttgaatttgaaagaaacatatgtaaactcagtaggattgttagggaaatatataccgaaagtttataacggagatattttattctttagatctactgttataccagactggtttgatcctatctctccaaatacgtggttaaattatttagacgggcaaattgtgcaatacgatattgattgtagacataaagatttatgtcaaccagggccacttacagaaattggacaagtattagcgaaatatttgcagaataagaaaggggtaagtacagta

SEQ ID NO: 10404 - DNA, 1932 bp, Bacillus anthracis
atgaagaatccacttcttcgcattgaaaacttacagacttcctttcgtatacaagatcaatatcatgccgcagttgatgatgtttcgttaactgtccatgaaaatgaaattgtcgcgatagtcggtgaatcaggttgcggaaaagtgcacttgccctttccattatgcgactgcataatgaagcaaatacaaaattacaagggcagcttaactatagagataaggatttactaacgatgtcagccgcagagatgaataaagtacgcggatcaaacatcggcatgattttccaagaacctcttacagcactcgatcctcttatgacagttggaaaacaaatcgaagaaaatttagactaccacacaagcctttcaaaagttgaaaagaaagaacgcaccttagaactacttcatcaagttggtattccaaaaccagaacttacatataaacaatacccacacgaattatctggcggaatgagacaaagaattgttatcgcaattgcaattgcttgtaacccagcacttattattgcagatgagccaacaacggctcttgatgtaactatccaagcacaaattttagacttactaaaatctattcaagaacaaacgaaaatgggcatcattttaattactcacgatttaagtgttgtcgcagaaacagccgatcgtatcgtcgttatgtacgctggacaagttgtagaaacaggaaaagttgaagagatttttaacaaccctcttcacccatatactcgttctctattaaactccattccatctgcttacgctgaaaaagaaaaattgcatgttattcaaggtgttgtaccgacgttagctaagttacctcgcacaggttgtcgcttccaagcacgaattccatggattagacctgatcaacacgaggaaaatccaattttacatgaagtaaaaccaaaccattgggtacgttgtacttgctacaaacatttcaacttccaagataagaaaggagatgacgtaactcatggcactgcttaaagtagaagatttaaaagtacactttccaattaaaggtggtgttttcggtcgtacattagattacgttcgtgctgttgatggcgtaagcttcgaactacaacctggcgaaacgtacggaatcgttggggaatctgggagcggtaaatcaacaactggaaaagcaattatgcacttaacgaaagcgacgggcggtagtattcattttaataatagagatttaacaaagttaagtcgctcagaactaagagaacaacgaaaagatattcaaatgattttccaagatccttattcatccttaaacccaaagaaacgtgttatggatattatcgcggaaccacttcggaattttgagaaactctcacccgacgaagaacgtagagctgttcaagattatcttgataaagtcggcttaaatccggagtctatttataaatatccacatgaattttccggtgggcaaagacagcggattggtattgcacgcgcccttacactaaaaccgaagcttattatcgcagatgaacctgtatctgcacttgacgtgtcagtacaagcgcaagttttaaacttcttacaagatttacaatccgaactcggactaacatacttatttattagtcatgatttaggtgtaattcgccatatgtgtgaccgtataggtgttatgtatcgcggacgcattgtggaagaagcaactagtgctgaaatttataacaatccacagcacatctatacgaagcgcctaatatcagctattcctgatattcgtccagaaaaccgcgaacaacagcgtaaattgcgtcgtgaagtaagcgctgagtacgaaaaatcatacgaaaattatttcaatgaaaatggacgtgcttacgatttaaaaccaatctcgccaactcaccgggtggcattaccataa

SEQ ID NO: 10405 - DNA, 1662 bp, Bacillus anthracis
ctaaagaatgatcaagcagccgtttttgctttaggtggccttggtgaaatcggtaaaaatacatatgctgttcaatttcaagatgaaattattataattgacgctggaattaaatttccagaagacgaactcctcggaatcgattatgtaataccagattacacttattttgtgcgaaacgaagataaaattaaaggattattcattacacatggtcacgaagatcatatcggtggaattccttacttattacgtcaagtgaacattccaatttatggcggaaaattagcaattgcactaatcaaaaacaaattagaagagcacggattacttcgtaaagcaaaactttatgaaattcaagaagatgatgttattaaatttaaaaagacatctgtttccttcttccgtacaactcacagtatcccagattcatacgggagttgttgtgaaaacacctcaaggacaagtggttcatactggagatttcaaatttgatttcacaccagttggtgaaccagcggacttaacaaaaatggctgaaatcggaaaagacggtgtactttgtctcttatctgacagtacaaacagtgaaagtccaaactttacaatgtctgagcgccgtgttggtgatagtattcaagatattttccgccaagtagaaggtcgtattatctttcgcacctttgcatcaaatatcccatcgtttgcaacaagttgttgaagcggctgttgaaaataatcgtaaagtggctgtatttgggcgaagtatggaagcagcgattgaaatcggaccaaacctcggttatattcgctgtccgaaagatacattcatagatgcatctcaattaaatcgcctaccagctaataaagttgttattttatgtacaggtagtcaaggggagccaatggcagcactttcacgtattgctaatggtactcatcgtcaaattcaaatcattcctggcgacacggttgttttctcttcttcaccaatccctggtaatacaattagtgtaagccgtacaattaatatgttgtaccgtgcgggtgctgatgtaatccacggaaaactgtcaaacattcatacgagtggacacggtggacaagaagaacaaaaactaatgcttcgtctaattaaaccgaagtatttcatgccaattcatggtgaatatcgtatgcaacgtatgcatatgaagttagcaaatgattgtggtattccagaagaaaattgtttcattatggataatggtgatgttcttgccttacgttcagatgaagcaagtgtagctggtaaaataccatctggatctgtctatattgacggaaatggtattggagatatcggtaatatcgtattacgcgatcgtcgtatcctttctgaagaaggacttgttattgtagttgtaagcattgatatgaaagaatttaaagttgcagcagggcctgatattatctcacgtggtttcgtttatatgcgcgaaagtagtgatttaattaatgatgctcaaacattaattacaactcatttagaaaaagtaatggaaacgtaaaacaacacaatggtctgaaattaaaaatgaaattacagacacattagcaccattcctatatgagaaaacgaaacgtcgcccaatgattttaccaatcattatggaaatataa

SEQ ID NO: 10406 - DNA, 876 bp, Bacillus anthracis
atgaaagaatatattgcatttgatattggtggtacacaaattaaatatggaattgtttcagaaacaggaatagtactaaagcacaaaacagttccaacagaaattcatttgggcggggaacaaattattcaaaaactcattcttttatcaaaaaaattaatgagtgaacatacgatttcgggaattggtattagtactgcgggaattgttgacgttaatagaggggttgtgacgggaggggcggatcatattccgggctatagtacgattcctattattaatagattgcaagaggtattaaaagttcccgtatctattgaaaatgatgtgaattgtgctgcgctgggagaaaagtggaatggtattggaagagagaaagaaaatttcattatgctcacccttggaactggtattggaggagcgatttttatagatagagagttatatagagggcattcatatagtgctggtgaatggggaaacatgttaatagaaggaaaaacgtttgaagaggtcgcttccatttcagggttaattcatcttgtacgaaattataaaggaaaaggtaattggaatgggaaaacgattttcgaactgtatgataaaggcgacagggaagttacgcaagcagttgaggttttctttaaacatttagcgattggaattagtaaccttgcttatatttttaatccagaaacaattattattggtggaggaattactgatagaggaaatcagtttttaaaagaagtaaaagaagaggtaggaagatacttaaataaagagatttatagtgattgtgagattgaacttgcgcaaaacggtaatcgtgcaggaatgattggtgctatttaccacttcttacatcatcataag

SEQ ID NO: 10407 - DNA, 1878 bp, Bacillus anthracis
atgaaaattacagaactattaaaaagggatacagttattatgaatttgacagcttcaaataaagaagctgtcatagatgaattagttgagaaattaaacggggcaaatcgtttaaatagtaaagctgaatttaaagaagctattttaaagcgggagtcacaaagtacaactggcattggtgaagggattgctatacctcatgcgaaaacaaaagctgttaagcaaccagcgatttgttttggtagaagtgtaagcggtatcaactatgaatcgcttgacggacagcctgcgcatttattctttatgattgctgcgagtgaaggggcgaataatacgcatttagaaacgttatcacgcttatctacactattaatggatgaaggatttcgtaagcaattgttagaagcaaaggatgaagaggaacttcttcgtctatttgatgaaaaagaaaatgaaaaagaaaatgaaaaagaaaatgaaaaagaagaagaggtagaagttgcacaaccagaagggaatgaaccatacgtattagctgttacagcttgtccaactggaatcgctcacacatatatggctgcggatagtttgaaagcaaaagcagcagagctagggattgcaattaaagttgaaacgaatggatcaacaggtataaaaaacggtttaacgaaagaggatattgaacgcgcaacagctataattgttgcggcagataaacaagtagaaatgaatcgttttgctggtaaacatgtcattcaagtgccagtcgctgacgggattagaaaaactgaaaaacttcttaatcgtgctgtaaaacaggatgcaccgatctttaaaggaataaaagaagatggaaagacagaaagtacagagaaagaaaaaggattaggaatttataagcatttaatgaacggcgtaagtaatatgcttccattcgttgttggtggtgggattttaattgcgctagcgttttcgtttggtggtataaaagcagaaggccctttagctgaattgttcatgtctattggaggagggggaacaggggcatttttattccttgtaccaattttagcaggatttattgcgagttctattgctgatcgtcctggttttatgcctggtgttgtcgggggatttttagcggcacatgcgaatgctggctttttaggtggattaattgctggtttcttagctggatatgttgtcttagggctaaaaagactattttcaggattaccagtacagttagaaggtattaaacctgttttgttatatccagtctttggattattgattacaggagttgttatgcaaaaagtagtaattccgcctgtagtagcattgaatgaaatgttaacaggatggttaaatggtttgaacggtacaaatgctatattactaggtcttattttaggtgcgatgatggcaattgatatgggtggtccaattaataaagcagcatttacatttggtattgctgcaatagaagcacagaactttggggtgcactcagcggttatggctggtggtatggtaccgccgcttgcaattgcattcgcaactacattctttaaatcgaagtttacagaagcggaacgtaagtctggtttaacaaattatattatgggagcatcgtttattacagaaggtgcgattccatttgcagctgcagatccggttcgagtaattgtcagttgtgttgtcggttcaagtattgcgggtgcattatctatgttattccaaattacattaccggcaccgcatggtggattgtttgttatagcattagtaaataaaccagtgttatatattttctcgatattgataggggcagttgtttctgcacttatgatggggatttggaaaaagaaagttaaa

SEQ ID NO: 10408 - DNA, 702 bp, Bacillus anthracis
atgaagaatcgagaaacagatagcaatgtcgttacgttatatgttacaagacatggtaaaacaatattaaatacgaaccatcgcgcgcaaggttgggcagactctccgttagtggaaaaaggtgtggaagttgccacaaatttaggaacgggattaaaagatattcattttatgaatgcgtatagtagtgatagtggccgcgcgattgaaactgctaatttagtattaaaatatagtgagcaatcaaaattgaaacttgagcaaagaaaaaaattacgagaattaaattttggtatttttgaaggtgaaaaacttgataatatgtgggatgcggttggaaaagctgcgggcgttacatcaccagaagaacttttgaagttttctattcaagaagttattgatcttattagagcagcagaccctacaaaacaggcggaagattgggaattattttctactcgtataaaagcagagattgataaaattagtgaagaagcagctaaagatggcggcgggaacgttttagttgtcgttcatgggcttttgattactaccttaatagaaatgctagacagtagtaaaacaaaacttggcgtggaaaatgctagtgtgacaaagattgtatatcaagatggaatatatacagttgagtcagttggagatatgagctatgttgcaaaagggaaagagagtgtggaaata

SEQ ID NO: 10409 - DNA, 329 bp, Bacillus anthracis
atgatgactacagcagaacaaattccattccaattgattttaaatagtggtaatgcacgaagctttgcgatggaggcacttcaatttgccaaacagggggaaaatggcagaagctgatgaagcgatggtaaaggcgaaagaagcgatcaatgaagcgcatcattttcaaacagagctcttactatctgaagcaagaggaggaaaaacagagattagtgttcttttaattcccgcacaggatcatttaatgaatgcgattacagtaaaagaaattagcggcagagtttatcgatctttataaaaaattagaagcgaaagggggaaataag

SEQ ID NO: 10410 - DNA, 1236 bp, Bacillus anthracis
atcgcagcaggagtaatcgcagctagtatattatcttattcatctagtagtttcgccaaacaaaaatttttcccagatgtccaacaggggcccggggcagaagtattctattaactacttagcagaaaaaggcgcagttacaggtaacgagaaaggaatgttcgagcctggaaaggaaatcactcgtgcagaagcagctacaatgatggctaaaatcttaaacttgccaatcgataaaaatgctaaaccatcttacgctgattctcaaaaacattgggctactccaatcatcgcagctgtagaaaaagctggtgttgttaaaggtacaggcaatggatttgagccagacggaaaaatcgaccgtgtgtcaatggcatctcttcttgtagaagcttacaaattagagtctaaagtaaaccggtttccccagccaattaatttcaaaagttttaaaaaccataaacgggggtaaagaaaaaaggtaatattttaagtgaagttgggttttttttgttggtcccgggggacaaaggggcccttaagaaaatttttaataaaaggcagagccggttcattttattaaaaggccagattcgcttaaagtaggtaatcctttagtagaaaaggtagttattattgatcctggtcatggaggatttgatccagggaatccaggacaaggtgtagaggaaagtaaaattgtatttgatacatctttaagattacagaagttgctagaaaaaaatacgcctttaaaagctttgttaacacgtgaagagaacggaaatccaggaagtaacaaaaatgaatctcttgcgaatcgagtgaaatttggtcaagagaacaatgcagatatatttgtaagcattcatgcaaattcttctgaaaaacatgatggtcatgggttttgaaacgtattattataaaaaatcaaagcgtggagaagagacacagattgaaaaggatagcgaagtattagcgaagaaaattcaaaatagagtagtagaagcactacacacaagagatagaaagataaaagacgatcactcactttatgtagtaaataataatacagtaccagcagttttaacagagcttgcctttattgataatgatatagataatggtaaattagctactgaatcaggaagacaaattgctgctgaggcagtttatgctgggattttagattattatgaatggaaaggttttgatgtttccaaatatcgtttagct

SEQ ID NO: 10411 - DNA, 342 bp, Bacillus anthracis
atgtcaaaaaaagtacatgaatttaatgatatgatacgaaaacttcgaaaggaacttttcggaaaaggaccagaacgcattcatactgtttttgcagaaaatatggcgattgcgaccctttatggaaacttaacacctactgaaaaattcatttcaagtacgatggacggtgcggaaatggttcatatggctagaacgaaaatgattcaagaagtgtatgctgcaaattcccgtgaacatttggaggaacttgttggagcgaaattagtgaatttgttttcagatatgaaagtagaagaagatattgcagtttcggtatttgtttttgataaaaatataacg

SEQ ID NO: 10412 - DNA, 1330 bp, Bacillus anthracis
aaaaaggttcattaacccagttaagaaccatggtcaaatcatcccctgctcatatttaaagaaaagatgtatatcattttcgggtccaaaagaattcgccccgtgattggttagaatctcattattcagagctatttcggaaaccactttatgatttaacgggggcaaaattagctattcgctttatatttccccaaagtcaagcggaaggggggttgtttttttctcctggttaaccaaaatgcagcccaaagatgattttatctcttttccccccggagttggttaaccccaaaaatatccgtttgatacatttgttattggctcgggtaaccgttttgctcacgctgcttcattggccgtagccgaagcgccagctaaagcatataatcccctctttatttatggggggaatttggacttgaaaaaacccatttaatgcatgcaatggcccattatgtaattgaactattcgccaaatgccaaagtggtatatttatcatcagaaaaatttacaaatgaattcattaattctatttgtgataataaagcggtagattttcgtaataaatgccgcaatgtagatgttttattgatagatgatattcaatttttagcgcgaaaagaacaaactcaagaagagtttttccatacattcaatgcattacacgaagaaagtaaacaaattgtaatttcctagtgatcggccaccaaaagaaattccaactttagaagatcgtcttcgttctcgctttgaatggggactcattacggatattacgccaccagatttagaaacacgaattgcgattttacgtaaaaaggcaaaggctgaaggacttgatataccaaatgaggtcatgctttatatcgcaaatcaaatcgattcaaatattcgtgaactagaaggtgccactcatccgcgttgtagcttattcatctttaattaacaaggatattaatgctgatttagcagctgaagcacttaaagatattattccaaattctaaaccaaaaaattatctccatttatgatattcaaaaaggcctgttggagatgtttatcaagtaaaattagaagatttcaaggcgaaaaagcgcacaaagtcagttgcctttcctcgccaaattgcaatgtatttgtcacgcgaactgacagattcctccttacctaaaataggtgaagaatttggtggacgtgatcatacaaccgttatccatgcccatgaaaaaatttctaagctacttaagacggatacgcaattacaaaaacaagttggaagaaattaacgatattttaaagtagtagctgaatagtgtgaataacttc

SEQ ID NO: 10413 - DNA, 348 bp, Bacillus anthracis
ttgctcttatctactgagttttatgttgctggctcactagaagcagaggaaggggcgacagaagggatacttcgtttgcgtcatttccaaggagatggtagatggatcgttccgttctttacacaaatggaattttgtaaaagatgtgttgccagaaaggaacgccccttatttacgatacgtgggaaagaattatttggtagcattgagaaagatgccacagccgtattaaatgtcggtactgataatagtaaaacatttattccccgaagaaattgcagatatcgcatctggacgaatttttttactattataaataaaaggaaaagcgtaatcgcttttcctttt

SEQ ID NO: 10414 - DNA, 1413 bp, Bacillus anthracis
gtggccaacctatttaaaaagaaatccgttacgcaattgttaggggaaagtaaaagtaaaactttaacgaaaacgctaggggcatttgacctaacaatgctagggattggtgcgataattggtacaggagtactagtattaacaggattagtagcagcaagagatgctggtccagcagttattttttcattcatgattgcagcgatcgtttgtggatttgcagcgttgtgttatgcagaagttgcatctacacttccggtttcaggtagtgtgtacacatattcatatgcgacaattggtgagtttattgcccatctaatgggatggacattattatccgtatatgtcgtaacaactgccgcagtagctggtggatggacgggttattttaataacttagtaagtggatttggattagaaattccaacagagctgttaaagattccatcacaaggtgggattgtgaatttaccagcagtagttattacattagttttaacttggttactatcaagaggtacgaaagaaagtaagcgtgtgaataacataatggtattaattaaaattggtattgttattttattcattgcagttggtgcgttttatgtacaaccagaaaactggacaccatttgcaccatacggtattagcggaatctttgccggcggagcagcagtattctttgctttcttaggatttgatgcattagcaacttctgctgaagaagtaaaaaatccacaacgtgatttaccaattggtattattgcttcgttagttatttgtacaattatttatgttgtagtttgtctcgttatgacaggtatggtttcttataaagaattagatgtaccagaagctatggcatatgtattagaagttgtaggacaagataaagtagctggtgtaatcgcagttggagctgtaattggtattatggctgtaatctttgcttacatttatgcaacgacacgtgtattcttcgcgatgagccgtgacggtttattaccaaaatcatttgcgaaaatcaataagaaaacagaagcaccagtattctcaacttggttaacaggtattggtagtgctttaattgctggatttatcgatttaaaagaattgtcgaatttagcgaatattggagcgttattaacatttgcgatggtaggtgtgtcagttattattcttcgtaaaacacatccaaacttaaaacgtggctttatggtaccacttgtaccaacgctaccgcttatttcaatcgcatgttgtctattcttaatgtttaacctgccattaacaacatggatttacttcggtatttggttagcaattggagtagttgtatactttgtttattcgaaaaagcatagtcatttaaaagacgatggaagttcgcaggataatttagaacaagctaat

SEQ ID NO: 10415 - DNA, 570 bp, Bacillus anthracis
atgaatcgtgaggaagcacttcatattgtgaaacaacaaatgcatgaaaaaccttttattacccccattttggttaattggagccggccaattgaacttgcttaatttatgggttgtggaggaaaaaaaaggctgaagttgcagctatattccatgattatgcgaagtgtagagcgatttcagagatggaagagatcattaaaagtgaagatttgccgaaagatttactttgttataacaaagagttatggcatgcacctgttggggcatacttagtagaaaaagaagtaggcattacgggtcctgaaattctgcaagctattacatatcataccagtggtcatgagaaaatgaccatgttagataaaataatttatgtagctgattaccttgaaactgggcgaaaattttcccgggggagaagaaactcgtaaactcgcatatgcggatataaatcaagctttattatttgcgttaaagagaacaattcaatttttaatggaaaaaaatcaaacgatttatccattaacattccaaacatacaacgcagttatcaaggaggaaataagt

SEQ ID NO: 10416 - DNA, 231 bp, Bacillus anthracis; identical to SEQ ID NO: 9511

SEQ ID NO: 10417 - DNA, 927 bp, Bacillus anthracis
atgcgcaaaattattgtagggtcacgaaagagtaaattagcattaacgcaaacaaactggtttattgatcagttaaaagcgctaggtttaccatatgaatttgaagtgaaagaaatcgtcacaaaaggtgatgttattttagatgttactctttcaaaagtaggcggaaaaggtttgtttgtgaaagagattgaacatgcgttacttacgaaagaaattgatatggctgtacatagtatgaaagatatgccggccgtacttccagaaggattaatgatcggttgtacaccaaagcgtgttgaccctcgtgatgcttttatctcaaaaagtggagcgtcgtataaagagttagcagaaggcgctattttaggtacgagtagtttaagacgtagtgcacagctgctcgctgcaagaccagatttacaagtgaagtggattcgcggaaatatcgatacacgtttacgcaaattaaaagaagaagattacgatgcaattattttagcgacggcgggattacaaagaatgggctgggataatgaagttattacagaacatttagatgagacgttatgtgtacctgctgtaggacaaggcgcattagcgattgagtgtcgtgaggatgataaggatttactacagttgttagcgcatataaatgatgcagtaacagagaaaacagtggcagcagaacgagtatttcttcataaacttgaaggtggatgccaagttccgatcgctggatatgcaactattacagaaaacgatgcaatcgaattaacagctcttgtcgggtctatggatggttctgttttattgaaagagacagtagtaggaactgatccagagaaagtaggattagaggctgcggaccgtttaattaagcaaggcgcaaaagaactcattcttgctgcaaataaggggcaacaa

SEQ ID NO: 10418 - DNA, 360 bp, Bacillus anthracis
atgagtaacttagctgtaaagtacaaacaacaagcgcaagaagaggttcagattcaaacgcccccacagcaaatggttcagccaaaagctaaagcgaagattacaagaatcgaaaaactgttgtatgtagcgtttattggctttttattgtatgcctgtgtagcgtttattggaaataaagcaggcctttatcaagttaatgtagaagctgcgacgatagaacaaaaaattgtacagcagcaaaaagaaaatcaagagttacaggctgaagtagagaagttaagtcgttatgaacgaatcgctgaagttgcaaaaaaacacgggctagaaattaatgcaaataatgtgaaaggcctcaaa

SEQ ID NO: 10419 - DNA, 177 bp, Bacillus anthracis
atggctgttggagtaggcggaagtttagatgtatgggctggagaggtaaaacgtgcaccaaaatggattcaagcgatccatttagagtggttttatagattgtgtagcaatccaacgcgttggcgtcgtcagttagtattagcggaatttttaaaagaagttatgcgttcgaaaaag

SEQ ID NO: 10420 - DNA, 2007 bp, Bacillus anthracis
atgtcaaaagagatagcaaaaaaacgtatagaagaactacgtgatttgttaaatacatttaactatcaatatcacgtattagacaatccttctgtttctgatgcggagtatgaccgtaatatgcaggagcttataaaattagaagcagagaatccagagtttatgagtgaagactctccctctattcgagttgggggaacggttcttgatatatttgaaaaagtaacacataagtcaccgatgttaagtttaggaaatgcatttaacgaaggagatttacgtgattttgacagacgagtacgtcaaggaattgatgatgcgaatgtaagatatatatgcgaattaaaaattgacggacttgctgtttcacttcattatgaaaaaggacgcttcattcaaggggcaacacgtggtgatggtgtaacaggtgaagatattacccaaaatttaaaaacgattaaagcaatcccgcttcgtttaaatgaagaagtaacgttagaagcacgaggcgaagcttatatgccgaagcgttcattcgttaagttaaatgaagaaaaagagcaaaatggtgaagatgtatttgcgaatccgcgtaatgcggcagcaggttcaatccgccaacttgatccgaaaattgcagcgaagcgtaacttatctatgtttgtatacggtcttgcgaatgtagaagaaaaaacaatcccatcacatagtgaatcgcttgattacttaggtgaacttggattcaaaacaaatccaaatcgtcgtacatgtgaaacaattgaagaagttatagcttatgtagaagaatggcaagaaaaacgtccgcatcttgattatgagattgatgggatcgttataaaagtagatgatgttgctcttcaagaaagtctaggaactacagcaaagagtccaagatgggcgattgcttataaattcccagcggaagaagttgtaacaagattaacgggcattgaattaagtgttggtcgtacaggagttgtaacaccgactgcagagctagagccagtgcgagtggctggtacgatcgttcgtcgtgcttctttacataacgaagatttaattcgtgaaaaagatattcgaattggtgactacgttgttgtgaagaaagctggagatattattccagaagttgtaaatgttatttttgataagcgtactggtggggaagaagaatatcatatgccaacgcattgcccagcatgtgagagtgaactagttcgtttagaagaagaggtagcacttcgttgtataaatccaacttgtcctgctcaaattcgagaagggttaatccatttcgtttcaagaaatgcaatgaatattgatggtcttggagaacgtgttattacacaactctttgatgctgattatattcgtacatttgcggatttatattcgttgacgaaagagcaattattacagttagaacgattcggagaaaaatcagcaacgaatttagtacaagcaattgagaattctaaagaaaactcattagagcgattattattcggtcttggtattcgccatgtcggagcgaaagcagcacgtacatttgcagagcatttcgaaacgatggatgcacttgtgaaagcgacggaagaagaattaaaagcaattaacgagattggtgaaaaaatggctcaatccgtcgtggcgtattttgataatgaagacgtattagagctattacaacaatttaaagagtatggcgtgaatatgacatacaaaggtataaaaattgctgatttacaaaatgttgagtcgtactttgcaggaaaaactgtcgttttaactgggaaattagaagttatgggacgtagtgaagcgaagaagaagattgaggcattaggtggaaaagtaacaggaagtgttagtaaaagtacggatttagttgtcgcaggtgaagcggcaggttcgaaattagcacaagcggagaaacataatgttgaggtttggaatgaagagaggttcttacaagagctaaataag

SEQ ID NO: 10421 - DNA, 159 bp, Bacillus anthracis
atgttaatggcgattttaggtgtgttcaatattaatgcatcaggtttattagccggtgctggggtaattggtttagcagtcggatttggtgctcaaagtttagtgaaagatgttattacaggattatttatctttgttagaagatcaattttcagttgg

SEQ ID NO: 10422 - DNA, 414 bp, Bacillus anthracis
atgaagatttcaacgaaaggccgctacggcttaacaattatgatcgatcttgcaaaaaagtttggtgaaggtccgatttcattaaaatcaattgcgcaggcacatgacttatcggaacattacttagagcaattaatttcaccacttcgtaacgcgcgtctagtaaagagtacgcgcggggcatatggcggatatgtattatcagatcagccggctaacattacagctggggatgtaatccgtgtgttagagggtccgattagtgttgtagaaatgatagaagaagaagagccagcacaacgccaattatggatgcgtgttcgtgatgcggtgcaagaagtgttagatagtacaacgttagaagatttagtacgttatgaggaagaaaatcacgggggctatatgttttacatt

SEQ ID NO: 10423 - DNA, 2435 bp, Bacillus anthracis
ttagaaagaacgttgcgtgtattagaatataataaagtaaaagaacaattacttgaacatacagcatcttcacttggtcgtgacaaagtgaagcatttagtgccgagcactgattttgaagaaattgtagaaatgcaagatacaacggatgaagcagcgaaagttattcgtctaaagggtagtgcaccattaggtggtattacggatattcgttctaatgtgaagcgtgcaaagattggatgtatgttaagtccaaatgaactacttgatattggccatacgatgtattggtagtcgccatatgaaacagtttcattgaagatatggttgaaaaatggtgtggagcttcccattttagaaactcatgtcgctcaaattgtatctttatatgatttagaaaaagaaaattacaatttgtattggtgatggtggggaagtattccaatgccccaagtaataaccggcggggtattggtcttcaaatttgtactcaagaaagcgggtattggtaaaatgtaagaaaccatgacgcgttcttcaaacgcgcaaaagatgctgtctgactcgattgtaacgattcgtaatgagcgtacgtaaatcccagtaaacaaagaatacccgcggcgtatatggcggtattgttcatgatcaatcagcttctggacaaacgttatttattgaaccgcaagtcattgtagaattaaataacgcactccaagaaagcacgtgtgaaagaaaaacaagaaatcgaacgcatcttattaatgttaacagaagaagtggcagtagaagcggatatcgttttatcaaacgtagaagtagttgcaaatcttgacttcatatttgcgaaagctttttatgcgaagcgtattaaagcaacgaagccaatcgtaaataacgagcgttatatggatttaagacaggcacgtcatccgcttattgatccagaagttatcgtgccaaataacattatgctaggtaaagatttcacgacaattgttattacaggaccgaatacaggtggtaaaacagttacgctgaaaacagttggtatttgtgtgttaatggcgcaatctggccttcatattccagtaatggatgagtcagagatttgtgtatttaaaaatatattttgctgatatcggtgatgagcaatcgattgaacaaagtttaagtacgttctcctcacatatggtgaacattgttgatattttagaaaaagctgattttgaaagcttagttttattcgatgaattaggtgctggaacagatccacaagaaggggctgcacttgccatttcgattttagatgaagtatgtaatcgcggtgctcgcgttgttgctacgacgcattacccagaattaaaagcatacggatataatcgtcgagcaagttattaatgcgagtgttgagttcgatgtaaatacattaagcccaacgcataaattattaatcggtgtaccaggacgtagtaatgcctttgaaatttcgaaacgtcttggattatctaatcgcgtcattgatcaagctcgtaaccacattagtaccgatacaaataaaattgaaaatatgattgcgaagttagaagaaagtcaaaagaacgcagagcgtgactggaacgaagcagaagcacttcgcaagcaatctgaaaaactgcatcgcgaattacaacgtcaaattattgaatttaacgaagagcgtgatgaacgattattaaaagcgcaaaaagaaggggaagaaaaagtcgaagctgcaaagaaagaagcagaaggcattattcaagaactttcgtcaattgtcgtaaagcacagcttggcaacgtgaaagatcacgagctaattgaagcgaagagccgtctagaaggcgcagcaccagagcttgtggaagaaacaaaaagtaaacgtgaaaaatactgcgccgaaacaacagttacgtgcacgtgatgaagtaaaagtattaaccgctccgtcaaaaaaggtcaattgcttgaaaaaagtaaccgatacacaagtggagcgtacaaattggtattctgaagatgaaagtaaaagaatctaatatggaatacattaataccccgaaacaaacaggagaaaaaagcagttgccacagtaaaagggtagagactatcctggtttccctaaaaacttgattcttccggcggaacgaattgtaaaatgccatggggccgcggtgaaaaaatacttaaaacgatccccaggctggcagctatccctcggggatcaatccattcccgggaaaaggaaaggggacccttccccaaggtggttaaaaaatacttggaaaaacccccgcgggggaaaaaaaatctcgtttccggggaactgggcgaagggaaggcctggcggaaacaattgtgccaatattaatatagaaaacaacgaaacaaaggggaaaccattatatgtttatg

SEQ ID NO: 10424 - DNA, 288 bp, Bacillus anthracis
atgagaaagtacgaaattatgtacatcattcgtcctggcgttgaagaagaagctcaaaaagctttagttgaacgttttgcaggtgttttaacaaacaatggtgcagaaatcattaacacgaaagagtggggtaagcgtcgtttagcttacgaaatcaacgacttacgtgaaggtttctacatgatcttaaacgtgaatgctaacgcagaagcaattaacgaattcgatcgtttagctaagatcaacgaagatatccttcgtcatatcgttgttaaagaagaagaaaaa

SEQ ID NO: 10425 - DNA, 1773 bp, Bacillus anthracis
atgctttggagaagtgtagtagggaagttatggatgaccatattacttctcgtttcgttcgtgcttggatttgttgcgattttactttcgcagttttttagaacatattatgttgatatgagtgaagctaggcttcaaaaagttgcaacaagtgtttcagagttaattgaagaaggtgccgatgtaaaaacgattgagaacatcgcgtacaaattttctgatccactttcaaggattattattgtagaagagggtaaggaaatctcttcttcaccgaaacaagaagggttagttactctaacaatagatgatttaaaagaagataaagaattagctgctgtttttacggacaaaaaagaaattaaaaataaagttagaaaagcgtctaatagtaggaagaataaaaacaccgaaaatgatattatgattgtcggaaaaccagtacagtcaaaaaatgaaagtgcagtgtttgtatatgaatctttacaagtgccgatacaaggtatggaaagaacgactgattttatattcttatcagcagggattgcgattatattaacaactttctttgcattcttcttatctactcgaattacagcaccacttcgtaaaatgcgtgaggttgcttttgaggtgtcgcgtgggaagtttgatgcgaaagctcctatggtatctcaggacgagattggtgagcttgcaacggccttaaatcaaatgggaaaacagttgaagtttaatatgaatgctctgcagcaagagaaagaacagttagctagtattttaagtagtatggcagatggggttattacattaaatcaagaaggtgaagtcgttgtaatcaatccgccggctgaacatttcttacaagtttggcaagaagaaaaagagatagagctcagtaagaaactgccttctgaacttgttgaactattccatctcgttgtagaaagcgaacaacaacaagtggttggaattaatttacaaaaaggtaactatgtggttcttatgacgccgctttacaatcaaacgaaaattcgcggggctgtagctgtattgcgtgatatgacggaagaacgccgtcttgagaagatgcgtcaagactttattgcgaacgtatcacatgaacttcgtacaccgatggtcatgcttcaagggtatagtgaagcaattttagatgatattgtgcaaacgaaagaagaaattaatgagtttgttcaaatcatttatgatgaatccgttcgtttaggtaaacttgtaaatgaattattagatttagcgcgcatggaaagtggtaatgtagagttacatataggtgaagttgatattcatccttttgttgaaaaaataggtcgtaaattccaagggattgcgaaggataaagaagtcgcgttaacagttgatttcaaagattcaattgagcagtacccgtttgatgcagatcgtatggaacaagtattgacgaatttaattgataacgcaatacgtcatacgaacgcaggaggacatgtaacgcttgtaattgatacgaaaaataatggtcttatttttgaagtgcaagattcaggcgccggtattccagaagaagatattccatttttatttgatcgtttctataaagctgataaagcaagaacacgtgggaaaaagggtggaacaggactcgggcttgcgattgcgaaaaatattgttcaaggccatggtggtaaaatttctgtatcaagtgttgttggagaaggaactacattctctgtatatttaccgaatcgtataatt

SEQ ID NO: 10426 - DNA, 927 bp, Bacillus anthracis
atggtaaaaattcatccgaagacacgtattggttatgtggaatttaaagtgaaagatttagagcgtcaaattgctttttatgagaatgtagtagggttagaagtaatgaaacaagagggaaataaagcgcatttagttggaaaaggtggaaagaacacgttactagttcttgagaaattagaggacggggtactgcaagaaccgcgtacgactggtatatatcatgtagcctttttagttccgactcgtgagacgtttgcttctgcactatttgatgtgattcgtaataagaatgtaattgatagtccggttgagcaagagggacgttatacatattcaaatgaaattttaccaatttcaaggtttaatagcgcaagcgatcatacgtatagcgaagcgttttatttacaagacttagagggaaatggtattgaaatttatgcggatcgtccgcgtgatcaatggggagatgggccaggaggaagtaccccgcttgatttaaaagaactagcaacgcttgttgattatgagtttgatggattgcctgctaatactgtcgttggacatgtacatttacgaatagctaacgtagaagagtcacatgacttttatgtagatacagtaggctttgaagtgcagcaacgtgaagatgactgcttattcatttctgcaggaggatatcatcaccatataggcgcaaatacgtggaacggagtaaataatccgcatccaccagcacatgcaactggacttaaggtatatacgattgtattaccgcataaagaagcattagatgaagtaaaagaaagattaatagaaaaacagcatgaaatacacgaaattacaaatggatttactgtagtcgatccgagtggtattacagtacagtttgaaatagaagtagcatcagaaaagcgagaaagtgta

SEQ ID NO: 10427 - DNA, 379 bp, Bacillus anthracis
ttaaacagtgagattgcagcagtgcttgcttcacttgggcattcggattcgatggtaatcgctgattgccgttttaccaattcctgacggagtaaagagaattgatctagctgttgaaataggaaaacctagctttttagatgtattgcaagtggtagcggatgatatggcaattgaaaaagtgacgttagcagaagaagtcatttacaaccatgccgaaattaattaagaattcgaggtaaaattaattggaccagcgtttgaatatgtatgtcatggaccattttaagggccttccaaggaaggggaaggttataattgtacaggtgaggcttcgcctttttcccaagttatttttcaagcaggggggattttttaa

SEQ ID NO: 10428 - DNA, 105 bp, Bacillus anthracis
ttgagtgaagcaccaagtcatgggaaaccaattatgcagtatgacgctaaatcaagaggggcagaagtatatatagatttagcagaggaagtgattgcaggtggc

SEQ ID NO: 10429 - DNA, 1327 bp, Bacillus anthracis
atgcgtgcaactttaaaaccagcgcacatacttacggttagtttattactattcgcagttttcttcggtgctggtaatatgattttcccgccccttctcggcctttcttccggagaaaacatgtggatttccattacaggatttattattacagacgtcggtttatctttactagctatcgtcgctgttgcccttgccggtggtagttttaacactttagcaagccgtgttcacccaaaattcgcaagcaataattcgctaatccattatttatctttcaaatcgggcccactatttgttattccacgaactggatctgtatcttatgaaattgggattgcaccacttttcccagaccaatggtactctatgttaatctttagtgcgattttctttacagtcgtctacttcttatcattaaatccatcaaaattagtagatcatatcggaaaaatattaacaccaattttacttggaattattgcgattatggcaacaaaagcaattctttcaccaggaacgtttgcagaacctgttggtgactataaagaaattccgtttttcaaaggatttcttgaaggatttttaacgttagatgcaatcggtgcactcgtactatcaacgattgttgtaaatgcaattcgccaaaatggtataccagaagaagaaatcaattggcgaaatatacaattatttgcggaagcattgccgctctatttttaacaattgtgtacttcttactcggttatatcggggcttcaaacggcaacttaggacaattcgagaacggtggtcaactattagcaactgttatgtatcacttcttttgggacagccggaaatgttttattaagcatcgccactatcttccccttgtttaacgacagcaattggtgttgtaagtgcatttgccaactattttgcaacagtattaacaaatgtttcttacaaaaagctcgtactatacgtttgtatttttagcttcattatttcaaacttaggattaagtttactaattaaaattactttgcctgtattaattattctatatccaattacaatcattttaattttcgtatcatttatcgataaatatacgaaacgtaaaccttctgtctacatcggggcaatgatcgcagcattccttattagttgtattcatgcacttgataatgtgggaatgataccaaactttattgctaatattgtacacaccattcctttttataatttaggaattggctggattatcccagccatcatcggtggtataattggatactttattccgcaaacagaagctgaaggcgaagtttctacaaaataa

SEQ ID NO: 10430 - DNA, 868 bp, Bacillus anthracis
aataaggcgtacaagtttcgtctgtatccaacagaagaacaagcacatctcatacgtaaaacgtacgaggtgtgtactgctttgtatataataaaatgctggcttgaccaaaggacgtacatgaaaacaccccaagcgaatacacgaccaacctgcaggagcataaacttttctcccacctgcgaaaatacaaagtggagtatgaatggttgaaagaagttgattcattggcattggccaacgctcaattaaacttgcaaactgcttataagaatttttttagtggtcaaagtgattttcctacattcaaaagtaaaaagagtagaaaatcctatacaacgaatcgagtaaacggaaatattatgttatttcatggttatatcaaattaccaaaattgaaaatggtgaaactgaagcaacatagagaatccccgcccaaaacatatcatcaaatcgtgtacgatttcgatgacacctactggtaagtattacgtgtctattttgaccgaatatgaaaaagaaatcactccaaaagaagtagaacgtgtagttggattagacttcgcaatggatgtattgtacgtgagtagcgaagatgagaaagccaattatcctcgcttatatcggcagatggtacagaaattaacgaacgcacaacgagtattatccacgacctgtgaaagggtcagaacgctgggaataaacaacgcattcctgtaccgaaattgcatgaaaaggtcgccaatcaacgtaaaaattttcttcatcacaagtctaaagaattagctcccagtttttgaacgttgaacattccaagactttcatatgaaaggaagtgggaaaccctttaaatttgttacaaagtaac

SEQ ID NO: 10431 - DNA, 921 bp, Bacillus anthracis
atgaaaatttttgatgctcattgtgatgtgcttcttcagttatggagtgcacaagggaaaaaggattttaaacatgatccgcaattacatattacatttgaacagttaaagagaagaaaagaaagtatacaatggttttgctatatatgtgccagaaacagtggcatatgaaaaccgatttgaagtatcattgcaaatggtagatattttttataatgaaattttatccctcccgggtgtgaagtttattcagacaaaagatgatattaacatgttaaaacaggacgagattggggcgatattgacactagaaggatgcgaagcaattggaaaagatgcaatgaaattacggttgttgtatcgtctaggagtacgttcttttggactaacatggaattatgctaatctattagctgatggtgcgttagagacacgtggggcgggtttaacgacttctggtaaacatggttgtacaagaactgaatgcgttacatgtatggactgatgtgtctcatctgaatgaaagaagtttttgggatgtgatagaaattgcaaaaaatccgattgcttcccactcaaattgtatgaaactttgacagcacccacgtaatttaaacgatgaaccactttaaagctcttataaagcgaaatggcatgatcggtgtcacttttgtaccacagtttctaacaaatgaaaaacaagcgaatgtagcagatataataagacatatcgaatatatttgttcattaggtggagagaataatatagggtttggttcagattttgatgggatattagaaacagttgtaaatgtatcagcgtatcgagattatgaaaatgtagtgaatgagctttgtaaacactatgctgcatctactgtagagcgatttttatatgataattttgttgaacaatataag

SEQ ID NO: 10432 - DNA, 1176 bp, Bacillus anthracis
atgaaattatttcaaccttctgagatagtaacatcattgccaacacaattttttgcttcacttgttgcaaaagttaataaagtcgttgcagctggtcacgatgttattaatctaggtcaaggtaatccagatcaaccaacgccgcagcatatcgtaaaagctttacaagatgctgcagaaaagaccattcatcataaatatccgccatttcgcggacatgaaagtttaaaagaagccgtggcaacattctatcaacgtgaatatgatgtagtagtaaatccaaaaactgaagttgctattttgtttggtggaaaggctggattagtagaattaccagtttgttttacaaaccctggtgatacgattctcgttcccgatccaggctatccagattatttatcaggagttgctttagcaaaagcacaatttgaaacaatgccgcttattgcagaaaataattttttaccagattatacaaaaatcgatgactctattgccgagcgtgcaaaattaatgtttttaaactatccaaataatccgaccggtgctactgcatcaaaagatttctttgatgaaaccattcattttgctaataaacataatatattagtcgttcatgattttgcttacggtgcgattggattcgatggtcaaaaacctgttagtttcttacaagcagatggtgccaaagatacaggaatcgaaatttacaccttatcgaaaactttcaatatggctggctggcgcatcgcttttgcggtagggaatgaaagtgtgattgaaacaattaacttattacaagatcatatgtatgttagtatttttggtgccattcaagatgctgcccgcgaagcactattaagttcacagtcttgcgtcatagaccttgtaaatagttacgaatctcgaagaaacgctcttatttcagcttgtcactcaattggttggaatgtagacattccaacaggatcattctttgcatggcttcctgttccagaaggttatacatctgagcaattttctgatattttactagaaaaagcacacgttgcggttgctcctggtgttggatttggtgaacatggcgaagggtacgtccgtgttggtctcttgcatacagaagatagattacgagaagccattaatcgaattgataaattaaatttttttaaaaag

SEQ ID NO: 10433 - DNA, 327 bp, Bacillus anthracis
atgaaaattatggactattacattagactaagactacatgcacaagatcaacaacatatacgaaatagcttacaagaattagcggatgttttatattgcagtacgaaaaacgtaaagattttattaaagaaaatgagcgaggagcaattaattagctggactccaggacgaggacgcggaaataaaacggaaattctattttcacataatttcgtagaagccgatgaatcctatacagatgaactgttagcgcaagaaaaattaaaaggacgttttcctcctttaaaagaacctcttccccctgcaccttcaaaaaaggatgaaaat

SEQ ID NO: 10434 - DNA, 1052 bp, Bacillus anthracis
atgctaggagtatcaatttatctttcaaaagaagacgagtaaagaaacaagaagaatggctaaaagtagcgaagaaaaacggtatttttatttatttttacaaccactttatatcccagggaggatgatccaaaataggtataaaagagtttattcaaattacttgggaaaacaggctcctgaaaaatgaaatgggattaaatggtgatggtttcccaaaattcgctacaccatttagggaatgacgtacgaaaatgtggaagagttagtagagtggggaattacctggtttacgaaatggactatggcatcacgccgaagagaaatcgcgcgtgtatcccataaaatgaaagtagctttaaatgcaagtacaattacagattccttttggaaagagttactttcggaaaatataagagtaaagaaatgtagaagcgtggcataatttttatccgcgtccagaaacaggactagcaaaatcattcttacaaaaacaaaacgaatacttacatgagtgcggcataaaaacgatggcatttattccaggagatggtgaaaagcgtggtccactatatgaaggcttaccgacgctagaaaagcatcgttatatgagaccgctcgaagcgtacttagaacttgtacaaggttgtggtgtcgataaagtgttaatcggggatataagcggacgtgtagaaagtgtacaagagatagcgagtgccagtagagggattattccattgcgatatgagccattgatagagaaaagtgaagtgttaaaaatggtagaacaagtgcatacaaatagactagatccagcccgtgatgtcattctttctggagaatcacgaggaggaggataagtgattttacagccaatgaatgcaattgtaagaaagaaaggcagcattacaattgataatgaattgtacggtagatatgcaggagagatgcaagttgctatacatgatttgcctgcagatgagaaagtgtatttttttggcgtggtgttggaagaggatatttctttattgccgtatagttgcgctgaaaga

SEQ ID NO: 10435 - DNA, 489 bp, Bacillus anthracis; identical to SEQ ID NO: 10272

SEQ ID NO: 10436 - DNA, 537 bp, Bacillus anthracis
ttgaatcgccttaaagagaagttccaaaaggaaattactcctgctctagtgagcaagtttaactataaatctgtaatgcaggtaccaaaaatcgaaaagatcgtaatcaacactggtgttggtgacgcggtatctaactcaaaaacgttagacaacgcagtagaagaattaacacaaatcacaggtcaaaaacctgttgtaactcgtgctaaaaaatcaatcgctggtttccgtcttcgtgaaggtatgccaatcggtgcgaaagtaactttacgcggcgagcaaatgtatgagttcttcgacaaattagtatcagtttctttaccacgtgtacgtgatttccgtggtgtttctaagaaatcattcgatggtcgtggaaactacacattaggtgttaaagagcaacttattttccctgagattgattatgataaagtaagcaaagtccgcggtatggacatcgtaatcgttactacagcgaaaactgatgaagaagctcgtgaactgttaacacaattcggtatgccattccaaaaa

SEQ ID NO: 10437 - DNA, 594 bp, Bacillus anthracis
ccctattctaaactaattgatagttttatgaaattgccaggaatcggaccgaaaacagcgtttcgattggcatttttcgtattagatatgaaagaagatgatgtgttaggttttgcaaaaagcacttgtaaatgcaaagcgagacttagcgtattgttccgtatgtgggcatattactgaccgtgacccttgttatatttgtaacgattcacatcgagatcaatcagtggtttgtgtcgtacaagaaccgaaagatgtaatcgcgatggaaaagatgaaagagtatcaaggtgtatatcatgtgttacgtggtgctatctctccaatggggggaattggaccagaagacattaatatcccgcagcttttaaagcgactgcacgatgaaacggtacaagaagtaatattagcaacaaatcctaatattgaaggggaagctacagcgatgtatatatcccgcctcttaaagccgacaggtattaaaagtaactggttttgccacctggttctgcccggttgggggagatttagaatatggccgatgaagtggccccttttgaaaagccttagaaggttcgtagggaaagtataagg

SEQ ID NO: 10438 - DNA, 711 bp, Bacillus anthracis
atgcaacaatcaaaagaagaaagagtacatgatgtatttgagaaaatctctgataaatacgatgtgatgaattctgtaattagttttcaaagacataaagcgtggcgcaaagagacgatgcgcattatggatgtaaaaccaggtagtaaagcgcttgatgtatgttgcgggacagcggactggacaattgcgctagctggagcggtgggtgaacagggcaaggttgttggtttagacttcagtgaaaatatgttatctgttggtaagcaaaaggtagaggcgttacaattaaaacaagtagaacttctacacgggaatgcaatggaacttccatttgaagataacacgtttgattatgtaacgattggatttggtttacgtaatgtaccggattatatgcacgtattaaaagaaatgacgcgtgtagtaaaaccaggtggaaaagtaatttgtttagaaacatctcaaccaacaatgattggttttcgacaaggttatattttatattttaaatatatcatgccgttatttggaaagttatttgcgaaaagttataaagaatattcatggctacaagaatctgctagtacattcccaggtatgaaagaattggctaatatgttcgaaaaagctggacttgaacgtgtgcaagtgaagccatttacttttggggtagcagcgatgcatttaggcatgaaaccagaatcaaaa

SEQ ID NO: 10439 - DNA, 570 bp, Bacillus anthracis
ttgaacattttaactctgattttaagttatttaataggctcaatttcatttgctttaatagtcggtaaaatgttttataagaaagatattcgtgattatggtagtggtaatcttggtgcaactaatgcttatagagttttaggcataaaagcaggagtaattgttgcaattgctgatatattaaaaggtacatttgcttgtttacttccactaatacttagttctacgattaaccctattgtatgtggtttattagccatattgggacacatattttctgtatttgctagttttaaaggtggaaaagctgttgcgacagcaactggagtttttttatttttgtcacctttaggtgttttggttggttttgttgtgtttgtgctaactttgttatttactaagtatgtatcactaagttcaatgttggctggtatagcattatttatttatagtctaatatttgaagataaagttatcatagcactttctctactaataatcgtatcaataatcattcttcatcgacaaaatataaagagaattctaaatggaacagagaacaaaatagtc

SEQ ID NO: 10440 - DNA, 2312 bp, Bacillus anthracis
tatgaaaagcaagtggagcagttaaaagaaagtgaagagaaattggcgtttgttcgcgcagaaaaagagagtgcagaaaaacgaaagcaagattatgaaatattagcagcgcttgaaccgctcgttattgaaaaacgtgcgcatgagaaagtgttagaagacgagagcgggcaatttccggtaaacggaatggcgcgttatgaagcgattaaggcgaaaatggagccgctccaattacaagttgattcgctctataaaaaaatagagacagtgcaatcggaaatggaatcgattcaaatagatgaagaatttttacaaaaagagaagttatgtagaagaacttcgtatgcagcatatgtcttacgaaaatgcacgcccagaaaagcctgatgtggccggggaccattaccaatattaaagaaaaaactgccggaaatagaaccggccaatcgggggctacttttggaaaagaaaacagtcctttcatttggattgaggtttggcaccaaagaattatttcccccagccggtgcaaaaagcgcgtgaattagaaacgcaaaaaaccacaccttaaggttcgttttaaaggtagcgcaggggcgatttgaaggaccgggaggaaaattgaggccagtttcagaaggcaaatgtttgccggataaagaccgacatacccttaatttgagaaagaaaaatcctttccaagatgcggcgtttatcggtatgggtgctgagagaatgaagcgcaaatatgtatgaaaaagccaggagcagcgatgcaaaagaaaaaacagtggcaaagagtttgtcttctgttacttcttattaacacaggcgttttatttcacaagtttatttatagataaccgcttactcttatttattagtgtcattgtttttgtagggattgttcctggctttggttttatataaagaatccgtcaagcggggttacaagaagagcttcttactcttcagcaaagtgctggcgggagaccaaagtaaagaaagcgagtctttttcgttttcccagttagaaaaagcggaagggattcggtaagttatttgagcgggaattctatataattgcagccaaatggagcggagcgtaggataaagttcgtttcattcgtatgagaaatgggaaagaggaacgtttccgccatgagcgaacaagtaaatgtatatagaaagcgctatacggtccctgaattttatacatatgcacacatattgccggcgtttgagcgtatggaaaaaatgcagcccatttatttcgggattgagagaaccaagccccgcgaaaatcttcattataagaaaggattttcgcatttggaacataaaactagaaactgttatcggtagtgcggagtatagtaagctgcacgaggcacaaaggtcgtatgcaaaaatgagaaaagaaaaccgcccaaacttgtaagcagtcaaaagagaagttagcagaatggcaagaagaatatgcgcttatgcaagagcaatggaaacaactgttagtagaacgagatagtttatggcatatcgcacattctacagatgaagagatgtttttagaagcaggtaaactggcggaaaaacgtgaagatgctgagaagcaagtagggcgtttattaccgcaaattgatctgttagaacagcgtttaacgagtttatcattagctgaacattatgaagctgacggttatgatgaaaaattaaagcaagaaatgacagtcatgcaaaactgtcttacaaaggaaaaagaactgacagagcgtattgcgaaacatcgtatggaaattgcgaatttagaagaaggaagtacgtacggtgatttactacacgaatgggaaatgaaaaaagcgcaagtgcgtgaacaagtgaagaagtgggctgcgtatgcggctgcaaagacagtgttaacgaaaacgaagcaatattatcataaagtacatcttcctcgcattttacaaaaatcagaagagtatttcgtctatttaacaggcggacgatatagtaaaaatcttttcaccgtcagaagcagagccgtttatttgtgaaacgtatgatggtatgcgcttttatagtcatgaactaagccaagcgacggcggagcagttgtatttatcgctgagatttgcattaggaaaaacctttggagcctgatatcccatttataatggaagatagtttcgggcctttggatgcggtaagggccgaattgttcgattgactttataagggaaatgcaaaaggatagccaagtcatattcttttcaagtcatgggcatttactcgctttttttccagaa

SEQ ID NO: 10441 - DNA, 1320 bp, Bacillus anthracis
atggttacaacgatagacactcttcttcttatgatatataacattcatagggaaaggagccagacaaccatgaaaaagaaatttgcagcgttcagcgttttagcagcaggaacaatttttgtttctccattactatcacccgcatacgctgaaacgaatcaagataaattatctaatattcaatctgaattagaaggaaaacaaaatgacttacaaaataaatcagccgagaaagaacaaatagaaaaggaaattcaagaattacaaaagaaaatcgacgatttaactacttctattaataaaaacgaggctgaattaaacgatacaaaaaaagaaattagtaaaacacaacaagtaatcgctgaaaaaaagaaacatatagagcaattacaaacaaacatagatacacgccaggaagttattaagcaacgtttgcaatctatgcaagaaaaacctcgcacaaatattattacagaggtattaacaacttctacaaacatcgctgatcttgttgataatatgtactctgtaagtttaattttaaacaacgataccgatatcgtgaaaaaacaaacaactgaccaaaatgctgtaacgaaagaaaaagaggcggttgagaaaaaagagcaagaattaaaagaagctgaacagaaattagttcacaaacaacaagagttgcaaacgaatcagcaacagcagcaaacctttattagcgatctacatacgaaagtagcaaaagtagattcagagattgaaggattagaagaatctaaaggtattttagaaaatcagcgtcaagctgttcaaaaagcaattgaagaagaaaaacgtgcagaagaagcccgtaaggcagaagaagctcgtaaacaagctactacatctgctcaaaaagctcaagcagctccaacaccacacgatacaaatattggcggctttattaaaccagcagccggatcaaaaacttctgggtttggcgtgcgttctatagataaccataaaggaatcgatatcgcagcttcaggaaccgttccgattattgccgctgcagatggcgttgttattcgctcagaattatcttctagttatggaaatgttgtgtacttatctcaccgtattaacggaaaaacatacacaacagtatatgctcatatgagtagccgttctgtatcaaatggacaaactgtaaaacaaggaacacaacttggatttatggggaacactggtcaatcatacggacagcatttacacttcgaacttcaccttggagaatggaacgtcggcaagacaaacgcagttgatccatctccttatatcggatta

SEQ ID NO: 10442 - DNA, 387 bp, Bacillus anthracis
atggcacgtaaaacaaacactcgtaaaaaacgtgtgaaaaagaatattgaagctggtgtagctcatattcgttctactttcaacaacacaatcgtaacacttacagatactcacggtaacgcactttcttggtctagtgctggtgcacttggtttccgtggatctcgtaaatctactccattcgctgcacaaatggctgctgaaactgctgctaaagctgcaatggaacacggtttaaaaactttagaggttactgttaaaggtcctggtgctggtcgtgaagctgcaattcgtgctcttcaagctgcaggtctagaagtaacagcaattagagatgttactccagttcctcataatggatgtcgtccaccaaaacgtcgtcgtgtg

SEQ ID NO: 10443 - DNA, 195 bp, Bacillus anthracis
gtgagtatcgaaaatcatcataatataggtacgggaccttcaaaactggctcattactctgaagataatatcgtactcgaagcattcactcattattttaaagagcgcgcattattagaccgtatgaaattttggggtattccggatcatgtacaaatcgatgctgattatgacctcccaaaagaaggaggaaaa

SEQ ID NO: 10444 - DNA, 1473 bp, Bacillus anthracis
ttgaagattaaagcacaagtcggaatggtaatgaacctagataaatgcatcggctgccatacttgtagcgtaacgtgcaaaaacacctggacaaatcgtccaggtgctgaatatatgtatttcaataacgtagaaacaaaacctggtattggttatccgaagcagtgggaggatcaggagaaatataaaggcggctgggaattgaaaaatggtgaaattcagctgaaatccggttcgaaaatgaagcgccttatgaatattttccacaatccagatcaaccaacaatcgatgattactttgaaccgtggaactatgattatgaaacattaacaactagtccgcagcgtaagcatcagccagttgctcgtccaaaatcagcaattacaggcgaatttatcgacaaaattgaatggggtccaaactgggaagatgatttagctggtggacatataacaggattacaagatccgaacgtaaagaaaatggaagaagaaattaaaaccgattttgaaaatgtttttatgatgtatttaccacgcatatgcgaacattgtatgaatccatcttgcgtatcgtcttgtccatctggtgcgatgtataaacgggaagaagatgggattgttcttgtagatcaaaatgcatgtcgtgcatggagattctgcgtatcgtcttgcccatataaaaaagtgtacgttaactggcaaacgaataaagcggaaaaatgtacaatgtgtttcccgcgtattgaagctggtatgccaacaatttgttcggaaacatgtgtagggcgtattcggtatattggagtaatgctatatgacgctgacaaggtaaaagaagcggcttctgttgagaatgaaaaagatttatatgaatctcagcttactgttttcctagatccaaatgatccagaagtagtagctgaagcgaaaaaacaaggcattcctgaagaatggattaaagcggcgcaagagtcgccaatctataaaatgattatcgattggaaaattgctctgcctcttcatccagagtatcgtacaatgccgatggtttggtatatcccgccgcttagcccaattatgaacatggtggaagggaaaggtagtaactggcaagcagaagagattttcccagctattgataatatgcgtattccaattcaatatttagcgaatttactcactgcaggagatgaatcacatattcgacttacattgaaaaaaatggctgttatgcgaacacatatgagagcactgcaaattaataaagaaccaaatgaggctgtattaaaagaacttggcttaacgaaacaggatgtagaagatatgtatcgtcttcttgctatcgcaaaatataaagatcgttttgttatcccgacgtctcaccgcgaacaagttgcagacttatataacgaacaaggaagctgtggtttatcatttgcaggtggtccaggttcttgtatgacaatttct

SEQ ID NO: 10445 - DNA, 794 bp, Bacillus anthracis
atgaaaaaagtattattaagcattgtaagcggagcggtactattattaggcgcatgtagcgctggttcggataaagaagtaaaagcgttagatgagaaaaagattactgtcggtgtaacaggcgggccgcatgaacaaatttttgaaaaggtaaaagaagtggcagcgaaagacggtctcgaaattgatgtaaaagtatttaatgattatgtagcaccgaacgtatccctcgatgaaaaaagccttgatgtaaatagctatcaaacaaaatcatatttagacgtgtttaaagctgaacgtaatatgaaattaaccgaagtattttcaacagtaacattccctatgggcgtatattcaaaaagcttaaaggatgtaaaagacttaaaagatggtgatgcaattgctgtaccaaatgatccaacgaatgaacttcgagctttaaaactatttgaaaaagcaggagttttaaaagtggatccaaaagcgacagaaaaagcgactgcgaaagatgtaattgaaaaatccaaagaatttaaagatcgttgaattagaggcatctcaattaccaacacaactaagtgaagtaaaagcagctgcaattaatacaaactttgcattaggtgcaaaattaagccctgcgaaagattctatcttccgtgaaggaaaagattcaccatatgtaaactgggtcgttgttcgtactgaaaataaagatgatgcgtgatgtaaatagattaaagaaagcttatcaatctaaagaagtaaaagaatttattgagaaaaaattttgatgg

SEQ ID NO: 10446 - DNA, 981 bp, Bacillus anthracis
atggctgtaatgtcttatattgatgctattacattagcaatgcgcgaggaaatggaacgcgatgagaaagtattcgttttaggtgaagatgttggtaaaaaaggtggcgtatttaaagcgacacacggattatatgatcaatttggtgaagatcgtgcgctagatacaccacttgcagaatctgcaatcgctggggtcgcaattggtgcagcaatgtatggaatgcgtccaatcgctgaaatgcagtttgcggatttcatcatgccagcagtaaaccaaattgtttctgaggcagcaaaaattcgttaccgttctaataatgattggacttgtccaattacagttcgtgcgccatttggcggcggtgttcacggagcgttgtatcattcacaatctgtagaagcgatgtttgcaaaccaacctggtttaaaaatcgttatcccttctacaccatatgatgcaaaaggcttactaaaagctgcaattcgtgatgaagatccagtattattctttgagcataaacgtgcatatcgcttaattaaaggtgaagtgccagaagatgattacgtattaccaatcggaaaagcggatgtaaaacgtgaaggtgatgatattactgttatcacatacggattatgtgttcattttgctcttcaagcagctgaaaagttagcacaagatggcatctctgcacacattcttgatttacgtactgtatatccattagataaagaagcaatcattgaagcagcttctaaaacaggtaaagttcttcttgtaacagaagacaataaagaaggaagtattatgagtgaagtggcagcaattattgctgaaaactgtctgtttgatttagatgcaccaatcgcacgtcttgcgggtccagacgttccagcaatgccatatgcaccaacaatggaaaaattctttatggtaaatccagataaagttgaaaaagcaatgcgtgaacttgcggaattt

SEQ ID NO: 10447 - DNA, 622 bp, Bacillus anthracis
attcaaattgcgttaacgaaagggagattagaaaaacatgtgattccgctctttgagcagattggaattgattgttcagagctcaaaaataaaggaagaaaacttgtctttctaagtaaaaatacggatatctcatttattttagtgaaaacaacagatgttgctacttatgtagaacatggagtagcagatatccggagtcgttgggaaaagatattttaatgaaaaacgaggaaagatatttatgaaatggtagaattatgagtaggcgtgggtgaggttttgtgttcgcttctattcctacgcatttatccccaaaagctaccgcgaagaaatggctttgggaccgaaatatccacatattacttctaactattttcataataaaggagaggatgtagaaattattaaaatagaaggttctgtagaaattgctcctattcttggattggcagatgcgattgttgatattgttgaaacaggaaaaacattacaagaaaatggactcattgtatttgaggaaatgtattctatatctgctcgaatgattgtaaataaggctgccttaaaaactaaaaaagacgaaatattcagtattataaatatgatggagcaagaaatt

SEQ ID NO: 10448 - DNA, 171 bp, Bacillus anthracis
atgacgtcaaatcatcatgccccttatgacctgggctacacacgtgctacaatggacggtacaaagagctgcaagaccgcgaggtggagctaatctcataaaaccgttctcagttcggattgtaggctgcaactcgcctacatgaagctggaatcgctagtaatcgcggat

SEQ ID NO: 10449 - DNA, 1853 bp, Bacillus anthracis
gggaagttagtagagcgccctgcctcaggtcgtaaaagaacttgtggaaaattctatcgatgcgaatagtacatctattgaaatccactgtaaagaagccggtttatcgaaaattcgcatcattgataacggagatgccattgcagaagaagattgtatcgttgcttttgaacgacatgcgacgagcaaaattaaagatgaaaacgatctgtttcgcataagaacactcggtttccgcggtgaggcattgccaagtattgcctcagttagtgaattagaattaatcactagcaccggtgatgctcctggtacacaccttattattaaaggtggagacattataaagcaggaaaaaacagcgagccgaaaaggaacagatattacagtacaaaacttattctttaatacaccagcgcgtcttaaatatatgaaaaccattcatacagagcttgggaaatatacagatattgtgtatcgtattgcaatgtcgccatcaggaagtatcattaaagctttttcataagaaaaagaaattgcttcatacatcaggaaattggtgatgtaagacaagtacttgcatcgatttatagcacttcaagttggcaagaaagcttgtcccaattgaagctgaatcctttagatttcacacattaaagggtatgtaacatttaccagaagtaacgagagcatctcgtaattatatgtcaacaatcgtaaatggccgttacgttcgaaattttgtattaatgaaagctattcagcaaggataccatacattactgccagtcggacgatatccaatcggtttcttatcaagagaaatggatccaatgcttgttgacgttaacgtacatccagcgaaattagaagttcgttttagtaaagaacaagaattactaaagctgatggaaagaaacatgcaaagcagcattcaaaaaaatacagctcattccagatgcaggtgtaacaacgaagaaaaaagaaaaagatgaaagtgtgcaagaacagtttcagtttgagcatgcgaagccgaaagaaccatctatgccggagatcgttttaccgacgggcatggatgaaaaacaagaagaaccgcaggctgtgaaacagcccaacacaactgtggcaaccatccactaaaccgataattgaagagccaattcaagaagagaaatcgtgggacagtaacgaagagggctttgaactagaggaattagaagaagttcgggaaataaaagagattgaaatgaacgggaatgacttaccaccgctttatccaattggacaaatgcatggaacatatattttcgctcaaaatgataaaggcttatatatgattgaccagcatgccgcgcaggaacgtattaattatgaatacttccgtgataaagtaggaagggtagcgcaagaagtacaagaactactcgtaccatatcgtattgatttatctcttactgaatttttacgtgttgaagagcaactagaagaactaaagaaagtcggtctattcttggagcaattcggccatcaatcctttatcgttcgctcgcatccaacgtggttcccgaaagggcaagaaacagaaattatcgatgaaatgatggagcaggtcgttaaactaaaaaaagttgatattaaaaaattacgtgaagaagcagccatcatgatgagctgtaaagcttcaattaaagcaaatcaatatttaacgaacgatcaaatatttgctttactggaagaacttcgtacaacaacaaacccatacacatgcccgcacggaagaccaattcttgtgcatcattctacttatgagttggagtagcatgtttaagagggttatgtagggataatatgat

SEQ ID NO: 10450 - DNA, 1370 bp, Bacillus anthracis
atgaaaattacgataataggtaccggatatgttggattgattactggggtaggattggcaatttttgggccatccggttacatgttttgatgtccacgatgagaaatatgcacgcattagtcccaggggatctgcctatttatgaagctggcttatatgaattaatacatgatgcgtgtgagaataatcgtttaacttttacaacaagtaaagaggaagcatttaaagatgcagaatttatatttattgcagttggaacgccatcgttattagatgggacagcggatttaacatatattcaaaacgcatgtgttgatattgggacatatgcgactaaagacattattgttgttacaaaagagtactgttcctgtatggacgaatggtgctatgaggggatggattgaggagacatcaccaaaccgacatgaatttccttttgtatcgaatcctgaaattttacgggaggggtcaaggatttacaatttttttcagggaaaacttattgtatttggggcccaaaattgagaaagtcggaccgaaaagtggagaatttatatagtgaattacacttaaaaacatatgttacagatataaaaagtgcagagatgattaaatatgcatcgaatgcttttttagcgacaaaaattagttttatcaatgaaatttcaaaatatatgtgagaaaggtaggagcaattaattcataacgggcgctaagggatgggaattcatccaagaattggagcgtcttttttaaatgcgggccattggttccgggggatttggttttttccggaagattagaaaaggcctttggccaaattgcaggggaatgtggcccccatgattttcgcttggttaaaaacccgtcattggaagtgattaataaaccacccggtattattgattgagaaagcggaggaaagtaataattatgacccaagaagcggatttgcggtgctgggagcgccattaaaccggaatccaggtgatataggaggtgccccgtccccttattatgatacaagaggtaataaaatctaggtggcggacataagttctaatatgacccgaaaggcgatttcaaaataagaaaaataatctttggggagactattcaatatagtgaaatgtatagatgaatcgactcggaggagccaatggcggctctttatcttgaccgaatggcgaacaaattccgggacctatcccggtagaacacttacgccaacaccttatgaaaacgaacctattttattcgatggaagaaattgctatactaatgaagatgtcaagaagcaaggaatagattattattctgttggaagagaaagtatttataagagggatttttcccgttattcgtta

SEQ ID NO: 10451 - DNA, 729 bp, Bacillus anthracis
atggcaatgaaggtaaaagaagtagctaatttagttggaattagtgtgcgcacactgcatcattatgatgaaatcgggttgttaaccccagacgagacgacagagtctggatatcgtctgtattccaatgaaaatttagaaatgttgcagcaaattttattttttaaagaactaggcttccctttgaagaaaattaaagaaattatcatgagtccatcatttgaccggaaagaggcattacagcttcataagaaaatgcttcttgaaaagcgtgctaggttagataaagtgattgcgacgattgataaaacaattcagcatacaaaaggagagattgaaatgacgaacaaagagaaatttaaaggattcgatttcagccataacccatatgaagaagaagcacgtgaaagatggggagacgcagctgtagataaagcgaatgaatatgcaaaaggtatgtcaaaagagaagcaagaagagtttaatgctatttacagaaatttagcggcgcttagacacggtgctccagattccaaagaggcgcaagaagctatcaaagtatggtacgattacttgcaaaacttcagtcactattcattagatgcttttaaggggctcggtcaaatgtacgtcgctgatgagcgctttacgaaaaatatcgataagtttggcgaaggtttagcgcagtttatgtgcgatgcgatggaagtttatgcggatcgtaataaa

SEQ ID NO: 10452 - DNA, 672 bp, Bacillus anthracis
ttaaaaaaagcaatcgctgaatttattggtacatttgtactggtattattcggaactggagtagctgtcattggcggcggaattgaaggaattgggacattaggaatcgctatggcttttcggcctatctatttggggctatggcatatagcatccgaacaaattctgggatgtccctttaacccccgcagaatcagtaactatggttcctcattaaaaaaaatgaaccctatggaaacattgttaatttggtattaacctccaaattttaaggggggtcattaaggaacctgccacattgggtaaaccattttacaaacccgctaaaaacaccttttagaataattagggacaaaatgggttttgggaactcttgggtttatcctggagcatttctagttgaatttattttaactttcgtattcattttagtaatcgtcgctgtaacaggtaaaaaaggcagttcttctctagcaggattagtaattggtttcacattagttttagtccacttattaggtattccgttaactgggacttctgttaacccagctcgtagtatcgcaccagctttattcgttggcggagaagcactttctcaactatgggtattcattcgctgcaccaattcttggcggtatcgtagcagctatcgtaggcaaatttatttta

SEQ ID NO: 10453 - DNA, 1026 bp, Bacillus anthracis
atgcgctcatggattcagaacacaaaaaaattattacctgatctgctacctgttatgcaaacgagaatgcaaattcttcaatacattaggctcatgcagccgattggaagaagaaacttatcagcaagtctcggtatgacagaacgagtattgcgaagtgaagttcaagttttgaaagaacaaaacttagttcacgtcgcttcttctggaatgacattgacagaagaaggaacagctttagttcttgctttggaagactttatgaaagaaatttccgggttaaaggttttagaaaagcaacttaaggaaacattagacttggatgaagttttcgttgtccctggtgatagtgatgaatcgccttgggtcaaactggagatgggccgtgcttgtgtgacttgtataaaagaccgtctgacagcgaataatatcgttgctgtggctggaggaactacgctagctgctgttgcggacatgatgcagcttgattgcaaagatttacatatgctatttgtcccagcacgtggtggaattggagaaggcgttgaattagaagccaataccatttgtgccaaaatggcgcaaaatacgatgagtaattatcgcttattgtatgtcccagaccatgttagcagcgaagcatatgcgtctattgtgacagagccttccgtgaaagaagttcttgagttgattcgatcttccaatatcgtcattcatggaataggtgatgcgttaacaatggcacgccgcagaaatacttcagaagcagattggttaaagattcaggcaagcgaagcagttggtgaagctttcggttattactttaatgaacaaggaaatgttgttcataaagtaagaacagttggtatgcaacttgaggatttacaaaatgtatctcacgttgttgcagtcgctggaggttcttcaaaggcaaaggcaatacaggctgtaattaaacaagggcacacttcaattctaattacagatgaaggtgcagcaaaacagttaacaaagggtattaccctt

SEQ ID NO: 10454 - DNA, 1127 bp, Bacillus anthracis
gtcataattattggtggcggcattgctggtctatgtgcagcaatttccttacaaaaataggattagatgtaaaagtatatgacaaaaatactgaacctactgttgctggtgcgggtattatcattgccccaaacgcaatgcaagcacttgaactatacggcatttctaagaaaatcaaaaaattcggcaacgaaagtgacggttttaaccttgtatccgaaaaaggtactactttcaataagttaattattccaacttgctatccaaaaatgtactccattcatagaaaagatttacaccaattactactttctgaactaaaagaagatactgtcaagtggggaaaagaatgcgtaaaaatagaacagaatgaagcaaacgccttaaaaatagtatttcaagatggtagtgaagcactcggtaatatactcattgcggctgatggtattcattctgtcattcgaaaataagtaacacaaggcgataattatcgttatgcaggatatacgtgttggcgcggcgtaactcctgctaataatctttctttaacaaatgattttattgaaacttggggaacaaacggtagatttggtatcgtccctcttcctaacaacgaagtatactggtatgcgctcataaatgctaaagctagagatccaaaatacaaagcttacacaacagcagatttatataatcatttcaaaacttaccataatccaatcccatctattttacaaaacgcatcggatgttgatatgattcctccgggatattataggccttcacgccaatggaaacagtttttggccaaccgcatcgtatttaatgggggatgctgcccattcacttactcccaaattagggtcaaggtgcttgtcaaagcaattaaagatgcgattattctggctgaatgtatcaaaaataatgcttattatcgtcaagcatttacagaatttgaacaaaaacgacgagatagaattgaaaaaatctcaaacactgcatggaaagttggaaaaatagcgcaaatagaaagtaaacctttaactctagtaagaaacgaagtaatgaaacgtatgccaaaatgggtttctgaaaagcgaacacatgaactatatagttttcattta

SEQ ID NO: 10455 - DNA, 1514 bp, Bacillus anthracis
atggaaaagcaagtgagagtgcgctatgcgccaagtccaacaggacacttacatatcggaaatgcgcgtacggcattatttaaattatttattggctgcgccatcaagaggggtaagttttttattggttttgaaagatgctgaggtaaacccttattttggtgggggggaagaaagccaattaaaatacttgaaatggctcggtatggactgggatgaaggtgttgatgttggtgggtaaattaggaccatatggtcaagcaggaggttttagatattataaaaaagttataatggaggatttattgggagcgtggtttagcttacaaatgttatatgacagaagaagagctagaggcagaacgcgaagggcaaattgctcgtggtgaaacacctcgttacgcaggcaaccaccgtgatttaactgaagcgcaagtgaaagaatttgaagctgagggacgtattccaagtattcgttcccgcgtaccagctgaccgtgattacacatttaaagatattgtaaaagatgaagttgcattccattcaaatgatttcggtgattttgttatcgtgaaaaaagatgggattccaacttataactttgcagtagccagtagatgatcacttaatggaaattacacacgtacttcgtggtgatgaccatatttcaaacacaccaaaacaaatgatgatttatgaagctttcggttgggatattccgcaattcggtcatatgactttaattgtaaatgaaagccgtaaaaaattaagtaagcgtgatgaatctattattcaatttattgagcaatataaagagcttggatatcttccagaagcaatctttaactttattgcactactaagttggtcgccagtaggagaagaagaaatcttctctcaagaagagtttatcaaaatgtttgatgcagctctttctatcaaaatcacctgcattatttgattctcaaaaactaaaatggatgaaccaccaatatatgaaaaagcaagatttagataccgtgggagaattaagcttaccgcatttatatgaaagctggacgtataaggggaaactttaagtgaacaagaaaaacttgggattcgtgatggaattgccgtatattatggaaaaaatgaacttttggagctgaaattgtagagctttctgaaatgttcttcaaagatcacgttgattatgaagaagaaggaccaagagtattaaaaggtgaacaagtaccagaagtacttcgtgcatttgctgggtcagtagaagcactagaagctatggaaccggcagcaaataaggcggctattaaaagcgggtcaaaaggaaacaggtcataagggaaaaaacttatttatgcccatccgtgttgcaactactggtcaaacacatggccccagagcttcctaatgctattgcacttcttggaaaagaaaaagttttaaatcgtcttcaaaaagtaatcggttaacattttctaggtttagaaataatataaggatatctaaaa

SEQ ID NO: 10456 - DNA, 1083 bp, Bacillus anthracis
ggaattaaaacatataatttccgcaattgcagttgataatgataaagctgaagtgaaaactgttcttgagcaagcgaaagagaaagggaaatcaacaggattagttgctacttctgaaattacacatgcaacaccagctgctttcggtgcgcatgacattagtcgtaaaagtatggacgcaattgcaaatgattattttgatgagaaaattaaagggaagcataaagtagatgttatgcttggcggcggcgtaaaaaactttgttagaaaagatcgcaatcttacagaagaatttaagaaatctggttatagttacgtaacagatcgagatcaattgttaaatgataaaaatgatcaaattcttggtttatttgcaccaggcggtttagataaaatgattgaccgcaatgagaagacaccttcattagaagaaatgacaaatgcagcaattgagcgtttgaacaaaaataaaaaaggtttcttcttaatggttgaaggaagccaaattgactgggcaggacacgataatgatatcgttggtgcaatgagtgagatggaagactttgaaaaagcatttaaagctgcgattgagtttgcgaaaaaagataaaaaattggtttattcattgcaacggcaagattcacggttaggggcgggttatcttttagggtgggaatgggggagtccacctttaaaagtagatcccatttaaaggctgcaaaaccgcccccccggtctttcatgccaaaaggaaaatgtaaaagggtgcaaaatgtagaagaacccattgaaaaaaatatattgattttacaattaaccccttgaagaaattaaagccgttaaatgatatcgttctttcaaaaagatgtaacaaagattgataatgcgattgaagatattttcaataagcgttcggttacaggatggacaacaggtggacatacaggagaagatgtaaacgtatatgcatttggccctggtaaatacttgttctctggcgttcaagagaatacaaatctcgctagacgtgtctttgatattgttggcggtggtgatccgaataaaggaatacgctaattatag

SEQ ID NO: 10457 - DNA, 198 bp, Bacillus anthracis
atgaaaactaatgatattcgtgaattaaccactgccgaaatcgaaacaaaagttaaagctttaaaggaagagttgtttaatcttcgcttccaacttgctacaggacaattagagaatccaactcgcattcgtgaagtgcgtaaagcgattgctcgtatgaaaactgtagttcgtgaaagagagatcggaattaatcga

SEQ ID NO: 10458 - DNA, 1081 bp, Bacillus anthracis
atgaaaattacagctattcacctttacgcaattcgtttaccgcttcgcgatccgtttgttattagttatggttcttattctgatatgccttctattatcgtcaaaatgggaaacagacgaaggtattatcggttacggtgaaggcgttgctgatgatcacgtcacaggtgaatcatgggaaagtactttccatattttaaagcatacgctagcacctgcactaatcggacaaaatccaatgaatatagaaaaaatacacgatatgatggacaatccaatttacggtgttccaccagcgaaaagctgcgatgaatattgcctgttttggataaaaggggtaaaaaaatttaaaccacccgggtattcaattaaatggggggacgatcccatgaggaatttcttatcactccacgtattaagttatcgcagatccagaaagaaatgcccgaagaagctgcttctatgtttcagaagaggttaccaaatctttcaaaatgaaagtcggtacaaatgtaaaagaagatgtaaaacgaattgaagcagtacgtgagcgtgtaggaaatgacatcgcaattcgtgttgatgtaaaccaaggttggaaaaatagcgccaacacattaatggcacttcgttcattaggccatttaaacatcgactggattgaacagcctgtcatcgcagacgatattgacgcaatggctcacattcgtttgaaaacagaccttccgtttatgattgatgatcgcataaaggggctctcgtgaaatgcgccaaattattaatttagacgcggctgataaagtaaacataaaacttaatgaaatgcggcggcatatacccagctgtaaaacttgctcatcaagctgaaatggcaggcattgaatgccaagttggatccatggtcgaatcatccgttgcctcttccgcgggattccatgtcgctttttcgaaaaaaattattacgagcgttgaacttacaggtccattaaaattcacgaaggacatcggaaacttacattacgacgtaccatttattcgcttaaacgaaaagccaggactcggcattgaaataaatgaagag

SEQ ID NO: 10459 - DNA, 1937 bp, Bacillus anthracis
atgaagaaagtcggtttttttcaatctattcattttaaattttggactcctatatatgcgattaatattgatagctatgcaagttattggagtatatttcgtaagagagttagaaaagagtcttgtacaaggatttagagattctttaacgcaacaaacgaacttattatcgtataacttgaaacaagagtttaaaaaaagttatacaaaagcagagacagagtcaacagatgaaacgattaaaacttccattcgaaaatttgcctctgatcgaaaagaaagattttccaaggaggtaaggtttattggatgcaaatagaaaagttgttcgctatttcagatgagtcaaggcaaaccagggtaaatagaaacatcaacttgatattagccttttcaggcggggtattggtacaaaaaaaaaccaagaagtgaaaaattgagaaggatggtcgtacaaggtcaccgtggtacaaggttatgattactcctattatggatgataacaacaaagatgcacttggtgccatttacgttgttgcatccatggaagatgtttataagcagatgaaggatattaatcaaatctttgcgaccggaaccgttattgcattactcgtaacagctgtacttgggaattttggtagctccaacgattacgagaccaatctctgatatgcgaagacaagcgaattgaatggcaaaaggaaactattcaagaaaagtaaaagtgcatagccatgatgaaattggacaattagcattatctttcaataatttatcaaaaaaattacaacaagctcgttcttcaacagaaagtgaaagacgtaaattgtcatctgtattatcacatatgacagatggagtaatcgctactgaccgaaaaggggacattattttattaaatgatccctgcggaaaagatgctaaatgtttcgcgtgaaacggcgctcgatcaatctgttttagaagtattgggaatacaagaagaatttacgctcgatcatttatacgaaagagcctgattctgttttattagattttagtaccagaaatgaagcatatatttttacgcgctagttttttctggttatttcaaaagaaacaggaaaaagcaatgggtttaattgccgtaatattatgatgtggactgaacaggaacgtatagaaaagggaacgcccccaagatttgtgccaaaccgtctctccttgaataaagaccgccattaacgaaaattgcgcagcttacttataaggcctttacgaacggggcattggccaaaatcccaaaatttgcaccgcaattttttaacagttatacaagaagaaacagaaagaatgattagacttgtaaatgcgttattgcaactatctaaactagaatagtccgaaacttcgtttaatgaaagaatgggtcgactttactgacttctttaataacattattgatcgttttgaaatgtctaaagagcaaaacgtaagtttcaaacgatctttctctaaaaaatctcgatttattgatatggatacggataaaatttccgcaagtattgtataacattattttgaaagcatttaaggtattcaccagaagggtgaaacagtaacatatcgtttacgtgatcgcggagaattattagagattagtgtaagtgaccaaggaatgggtattccgaaagaaaacgtcgataaaatctttgaacgtttttatcgtgtagataaagcgcgctccagcgacaaatgggtgggtacaggactttggattagcaattgcgaaagaaatgatgagggcacatggtggctcgatttgggcgaagagtgaagaaggaaaagggacaacgatttatttcacattaccaatggcagcggatgaagaggacgaatgggaatgagtgtggaaaatgttaaaacgatagttttaattaacttagttgtaatta

SEQ ID NO: 10460 - DNA, 1860 bp, Bacillus anthracis
atgatcgattatgtatggctcataccgcttttcccgcttgtttcgtttttgttattaattatattcgggaagaaaattagagaaggaagcagtgtacttagtattttcttcgtctttctctcctttatatgtgcggtacttgtattaatagaaagactttcgacagtaccagtgaagcataagtgggtatggcttagaactggagatattgatatatcgtttggctttgaagtgacagcattaggggctttaatgttgtttatcgttacacttgtgagtttacttgtacatgtgtattcgaaaggttatatgaaaggtgaggaaagattaccaaccttttatgcctatttagggctctttacatttgcgatgctcgggctcgttatatcaccaaatttattacagctttatatattttgggagttagttggccttggctcatttttactcatcggtttttatttctttaaagaagaagcgagggctgccgcgaagaaggcttttattatgacacgtattggagatatcggtttatttattgggatgatcttaattttctggcatgcaggtagttttgaatatgacgcaatatttagggcgattcatacgggtgatcttacccctacgatgattacaataacggcgatattaatttttatcggggcgatgggaaaatcaggtcagttcccccttcatacgtggttaccggatgcgatggaagggccgacgcctgtttcggcactcattcatgcggcgacgatggtcgcagctggcgtatatttagtggcaacgatgtttccgctattttcagcaagtgcggtggcgatgcaaacggtggcaatcgttggagctttcaccgcgatctttgcggcttccatcggtcttgtgcaaacggatataaagagagtgcttgcttattctacagttagtcagcttgggtatatgatgcttgcattaggatctgccggttatgtagctggtgtgttccatttaacgacacacgccttttttaaagcgttgctatttttggcggcaggaagtgtcattcatgccgtgcatacgcaaaacattaataaaatgggcggcttacagaagaagatgaaagtaactgctgcgctatttttaatcggtacccttgcaataagtggtgtgccgctcctttccggtttctttagtaaagatgaaattttggcggcgacttggatgaacggcaattacgttttattcatattagcagtaattgcagcattcctaacagcgttctacatgttccgcttatactttctcgtctttacgggggaagcgaagacgaaggtagatgtgcatgaatcgcctcgcatcatgacatatccgatgattgtccttggcgtccttgcagtcgtggcaggttatataaatacaccgtggtttggaacgtttctcggaggttggcttacgaaagatgtagcatttaaagtgcaagaagcacacggcccagtttggattatgattgttgcgacgctcgtttctttggctgggattgctcttgcatatttcatatatggcaagaaatctattgctagagattgggctggtggcgaggaagcacctctttataaaattttgcaagaaaaatattatgtggatgaactatacaatatgacagtcattcctatcacgaaaggaatcgctcatgtgcttcacttatttgaagtgtatgtagtcgaagggattgccgttttaatagggagtttagttaaaggggtgagcggagtcggctctagactccaaaacggaaatgtacaagtgtacgggactgtaacagctgtttcacttgcagtgctcttcattattttgctctatacgggagcggatttacga

SEQ ID NO: 10461 - DNA, 630 bp, Bacillus anthracis
atgaaaaaagaaatcgcatcgcatttattagaaattggagcagtatttttacaaccaaatgatccattcacatggtcttcaggtatgaaatcaccaatttattgtgataaccgtttaactttatcttatccgaaagtacgccaaacaattgcagctggattagaagagttaattaaagagcacttcccaactgtagaagttattgcaggaacagcaactgctggtattgcgcacgctgcatgggtaagcgatcgtatggatttaccaatgtgctacgtacgtagtaaagcaaaaggtcatggtaaagggaaccaaatcgaaggaaaagctgaaaaaggtcaaaaagtagtagtagtagaagacttaatttcaactggtggtagtgctattacatgtgtagaagcacttcgcgaagctggctgtgaagtattaggaatcgtatcaatcttcacatacgagctagaagcaggaaaagaaaagctagaagcagctaacgtagcatcatattctttaagtgattacagtgcattaactgaagttgcggcagaaaaaggtataatcggacaagctgaaacgaaaaaattacaagagtggcgtaaaaatccagctgacgaagcttggatcacagcg

SEQ ID NO: 10462 - DNA, 1293 bp, Bacillus anthracis
atgaataaagatatatcaaaagatgaacatgtcccttctcaaagtacaactgttcaatcagcgcatttagcattaagcggacaaacgaaaggcttaaaaagactattaccattcttaggtcctgctttcatcgcttcagtcgcttatattgatcctggcaatttcgcgacaaatattgccgctggatcacaatatggatatttattactctgggtaattcttgcttctaatttaatggctgtattaatccaaactttatccgctaaattgggaatcgctacgggcagaaaccttcctgagatcgctcgagaaaacttcccaaaacctgtttccatcggtttatggatacaaggtgaactcgttattatggcgactgatttagctgaatttattggagccgcactcggattgtatttattatttgggattccgatgttacccgcagctttaattacagctgctggatcatttattattcttgaatttcaacgcagaggctttcgtccattagaagcgattataacggggatgatttttatcgttgttatcgcttttggtgtacaagtcttttatgcaaaaccggaattaagtcctttactttcagggcttttcattccgaaattccaaggtgtagacagtatattacttgcagctggaattttaggtgcgacagttatgccgcacgcaatctatttacattccgccttaacacaacgccgcgtagtcggaacaaatgatgaacaaaagaaaaagattttccgcttcgattttattgatatcattatcgcaatgattatcgctggagcaattaatgcaagtatgttaattgttgctgctgcactattctttaaaaacggcttgcatgttgaagatcttgatgttgcttttaaccagtttagtaacttagtcggtcctgtatcagctgctttatttggaattggtctcttatcagcaggactatctagctcttctgtcggtacaatgtcaggtgatattattatgcaaggtttcattcgaatgcacattccgttatacttacgccgatttattacaatgattccaccattagttattatcgctttaggtgtaaatccaacttacgctctagtcatgagccaagtcgtcttatcattcggtattgcctttgcattagtaccacttattatgtttacaagtagtaaaaaaattatgggtacactcgttaatcaccgcataactacctttatcgcttggattattgctgtacttgttatcattttaaatattttcttactgtatcaaacatttgtgggt

SEQ ID NO: 10463 - DNA, 873 bp, Bacillus anthracis
gtgcaactaaagaaagcgttttggaagttggcttcgcttcttccgttatcattacttctgttcctcggtggctgtgataaaaaactcgcagtattaaatccgcaaggacctgttgcaaaagcacagtatgatttaattgtttggtcattcttgcttatgtcattaattatcgcaattgtattcatcttgtttacagtcatcttgattcgttatcgtgaaaaaccagagaatatggactatgagccacctgaacaacacggtaacacattattagaaatcatttggacgcttgttcctgttattatcgttatcgcattatcgattccaacagtaaaagcaacttatgcttcggaagaggttccgaaagagtccaaacatattaaaccagtggagatttatgttacatctgcaaactggaaatggttattcagttacccagaggaaaaaattgaaaccgttaactatttaaacatcccagctggtgtaccaattcaattcaaactgacttctgtcggcccaatgaatgctttctgggtaccagaacttggtggtatgaagtacacaatggatggcatgattatggacctttatttacaagctgataagccaggttcttacctaggccgtagcgcgaacttctctggtgaaggatttactcacatggagttcgaagttgaagcaaaaactaaagagaaatatgacaagtgggttaaagaagtacaacaaactgctcctaaactaacagaagataagtacaacgaaattgttaaacctggtgtagttggtcgtatgacattctctagccatcacttaagttatgtagatccaaaatcacttgaatattgtgattacaactactacaaaaacaaaaaa

SEQ ID NO: 10464 - DNA, 270 bp, Bacillus anthracis
atgaacaagacagatttaatcaatgctgttgcagaagcaagttccctttctaaaaaggacgcaacaaaagcagtagacgctgtttttgattctatcttagaagctttaaaacaaggtgataaagtacaactgatcggattcggtaacttcgaagttcgtgagcgtgcggctcgtaaaggtcgtaacccacaaacaggtgaggagattgaaatcgctgcaagtaaagtacctgcattcaaacctggtaaagcgttaaaagatgcggttaaa

SEQ ID NO: 10465 - DNA, 891 bp, Bacillus anthracis
atggataaacaggaagcaaagcatattaatatgccatctccttccgcatgtgagtataagtctgtagaagcatatttatttattgatccactttgtaaagattgctgggaaattgagccctttattattaaactatggcttgaatacgggaaatacttttctattcgtcatatcgtaacaggaaaagtggacggaacgaacgcttcctcacacaaatggaataaacctgctaatattcgatttgtgtgggaaaagacgacaagtttacacggtttttcatatgatgggaaggtacatatgcaagaggcatcatcaacaccatatttagtttcgatggcaattaaggcagcggagttgcagggtcgaaaagcaggttcgaagtttttgcgaaaactccaagaatacattttccttgaaaatgtatcaaatcccgactgcgaattattacttgcatgcgcaaaagatagcgatattgatgtagaagaatttaaaaaagacctatattccgctagcgcaaaaaaagctttccaatgtgacttgaaattcacaaatgagatgcatattaccgaaataccttctctcgtattttttcatgcgaattcagatgaagaaggtattaaaatcgctggaacttattcctatgatgtgtacgtacaattattaaaagaacttgtaaaatgtgaaattgagccagaaccattaccatctttagaagtattactagaagcgacgcaatttatatcttcaaaagaagtagcatttatatatgactgctcgaagcaagaaattgagcgtgaattaaaaaaattacaactgaaacgaaaagtacaaatgattgacgtaaaatgtgagcgttattggaaatggatagcaaaagaaaaagacctggtg

SEQ ID NO: 10466 - DNA, 2640 bp, Bacillus anthracis
atgaaacaactaacaggcgcacaaattcgtcaaatgtttttagactttttccaagaaaaaggacacgcagtagaacctagtgcatcactagttccacatgaagatccatctcttctgtggattaacagtggtgtagcaacattaaaaaaatattttgatggacgtgtaatcccgcaaaatccacgtattacaaatgctcaaaaatcaattcgtacaaacgatattgaaaacgtagggaaaacagctcgtcaccatacattctttgaaatgttaggaaacttctcaatcggtgattacttcaaagaagaagcaattacttgggcttgggaattcttaacgagcgacaaatggatcggattcgataaagaattactatccgttacaatccatccagaagatgaagaagcattcacaatttggaatgagaaaatgggcgttccaaaagagcgcatcatccgcttagaagaaaacttctgggatatcggtgaaggaccaagtggaccgaatacagagattttctatgaccgcggagaagcttacggtaatgactttagtgacccagaattatatccaggcggagaaaacgagcgttacttagaagtatggaaccttgtattctctcaatttaaccataatccagacggttcatatacaccacttcctaagaaaaacatcgatacagggatgggtctagagcgtatgacatctatcgttcaagatgtacctacgaactttgatacagacttattcatgccaatgattggtgcaacagaaacaatctctggtgagaaatatcgtaatggtgacttagaaaaagatatggcgtttaaagtaattgctgaccatatccgtacagtaacattcgctgttggtgacggtgctcttccatctaacgaaggccgtggttatgtattacgtcgtttattacgccgtgcggttcgttattcgaagaaattaaacatcaaccgtccattcatgtttgaattagtgccggttgttggtgaagtaatgaaagacttctatccagaagtacttgaaaagaaagatttcatcgcaaaagttgtgaaaaatgaagaagagcgtttccatgaaacacttcatgatggagaagcgattttatctgaagttatcgcaaaagctaaagaagaaaaaacaactgttatttctggagtagatgcgttccgtctatatgacacatacggtttcccaattgaattaacagaagaatatgcagaagaagctggtatgacagttgatcatgaaggctttgaaaatgaaatggaaaaacaacgtgagcgcgcacgtgctgctcgtcaagacgttgattctatgcaagttcaaggcggtgtccttggagaagtgaaagtagcgagcgagttcgttggttacggtacagttgcaacagaaagtaacgttgttgcacttgtgaaaaacggcgaatacacagacagcttacaagttggagaagaaggacaattaatgcttgatgtaacaccattctatgctgagagcggtggacaaattgcagaccgtggctgtcttcttgctgatggcgtgaaagttcttgtaaaagacgtacaaaaagcaccaaacggccaaaacttgcaccaagttgttgtggaagaaggtacgttaacgaaagatgcagctgtaaaagctattatcgatacgaaaaaccgtagtagtgttgtgaaaaaccatacagcaactcacttactacaccaagcattaaaagatgtacttggaacgcacgttaaccaagcgggttctcttgtaacttctgaacgtttacgctttgacttctctcacttcggtcaagtacaagctgacgaattagaaaaaattgagcgtattgtaaacgagaaaatttgggaaagtattgatgttgagatttctcaaaaagcaatcgaagaagcgaaagaaatgggcgcaatggcattattcggtgaaaaatatggtgatgttgtacgcgttgtacaagttggcgattatagcttagagctttgcggtggttgtcacgttgataacacagcttctatcggtattttcaaaatcgttgctgagtctggtatcggtgcaggaattcgtcgtattgaagcagtaactggtaagtctgcttatgaattaatgaacgatcaagtaggtttattaaaagaagcagctggaaaaatgaaaacaaatccaaaagatattttaacaagagtagatggtttgtttgctgaagtaaaacaacttcaaaaggaaaacgaatctcttgcagcaaaattaagcaatattgaagctggaaacttaactgattcagtaatgacagttgatggcgtaaacgtattagcggcaaaagtaaatgttgcagatatgaacaacttacgtacgatgatggatgacctaaaaaataaattagaatctgcagttgtcgtattagcatctgtaaatgatgataaagtaaacatcttagctggcgtaacgaaagatttaattagccaaggataccatgctggtaaacttgtgaaagaagtagcttctcgttgtggcggtggcggtggtggccgtcctgatatggcacaagcgggcggtaaaaacccagcgcaagttgaggaagctttagcatttgtacaagagtacgttaaatctgtttcaaaa

SEQ ID NO: 10467 - DNA, 2166 bp, Bacillus anthracis
atggaaatggtagataatcgacaagcgttaatgaaaatgttagtgaaggaattaggctttaccgaaaagcaagttcgtcatgttattcaattaacagaagaaggtaacacagttccatttattgctcgttaccgaaaagaatggacaggctctttagatgaagtgcaaattcgtacaattttagagagatggcaatatataatgcagcttgaagataggaaagaagaggttcttcgtcttattgatgagaaggggaaactgacaggagaattacgtcagcaaattttgaaagctacaaagttgcaagaagtagaagatttatatcgtccatataaagaaaagagaagaacgaaagcaacgattgcaaaagaaaaaggattagagccattggctgaatggttattgttatatacgaaagaagatccgaatcagaaggcaatggagtttataaatgccgagaaagaagtgcaatctgcagaagaagcattacaaggtgctcaagacatcattgcagaaatcgtttcagatgaagcggcatatcgtagttggattcggaatgttacttttagaaaaggtgttatgtcttcggttgtaaaagatgaagagaaagatgaaaagaatatatatgaaatgtattacgattatgaagaaccgttgcagaaagtagtaccgcatcgcgtgttagcgatgaatcgcggtgagaaagaagatatattgagagtttctgttgttccgccagtagatgagatagtaactttcttatataagaaagtaattcgcgataacgattcaaaaagtgcacagtatgtaaagttagcaattgaggatggttataaaagattaattcaatcctctattgaaagagagattcgaaaagaattaacagaaacagctgaggaacaagcgatacatattttctctgagaacttacgtaatttgttattacaacctccaatgaaaggaaaggttgtgttagctgtagaccctgcatatagaacggggtgtaaattagctattgtagacgatacggggaaagttttatatattgatgttatttatccgcatccaccagtgcgtaaatatgaagatgccaaagcaaaagttctttctattatagataaataccaagttgagatgattgcgattgggaatggtacagcttctagagaatcggaagaatttatagttgatgtattacaaaatgtgaaacgagaagtcttctatattattgtgaacgaagctggtgcgagtgtgtattcggcttctgatttagcccgtgaggaattcccggatttacaggttgaagaaagaagtgcggtttctatcggtagacgtctgcaagatccacttgctgaacttgtaaagattgatcctaaatcagttggggttggacaatatcagcatgatgtatctcaaaaaagattaaatgaatcattaacgtttgtagtagagacagcagttaaccaagtcggtgtgaatgtaaatacagcttcagttgcattgttgcaatatgtttcaggcttatcaaaaactgttgcgaaaaatattgtagcaaagcgtgaagaagaagggaaatttacaaaaagaacagacttaaagaaaataccacgtctaggtgcgaagacatatgaacaatgtataggtttcttgcgtatattagaaggggcaaatccgttagaccgtacaggtattcatccggaacaatataaaaatgttgaattgttattaaagagtctagggttatcaaaagatgacgtagggcaaccacaattacaaaagagtttagaagaagtggagatttctaagttgtcggaagaaacgggaattggagagccgacattagtcgatattatagatgcactcattagtccagagcgagacatgagggatgagttgcctaaaccgcttctgaaaaaagggattttgaaattagaagatttaaaacgtggtatggaactggaaggaacagcacgtaacgttgttgattttggtgcttttgttgatgtaggtgtgaaacaagatgggttagtacatatttctaaactaagcaaacaatatgtgaagcatccgttagatgttgtatctgttggacaaatcgtcaaagtatgggtagatgatattgatacgaaaaaaggtcgtgttgcattatctatgttgccaattgaa

SEQ ID NO: 10468 - DNA, 2043 bp, Bacillus anthracis
ggagaagctctcctgctcctccatgtctttattcatatcggacaagggtcaagcaaacatttcctatagtatgattattgatgctcttatctcaccgaaccaatcgctagaacaccaaactttaattatgcttcgattacctagagctgtaatcgccattttagctggcggtgctcttgctgcatctggggtcattttacaaacgttaacaaaaaatccacttgctgaatccagtacaatgggtattcactctggtgcatatttctttctagtaaccggctacaatttcctacccaaagggctggcaaattaactcccttccttttcccatttattcgggggggcgataactgccttaattggattaccgaaatttctggtgaaaaaaagggaaccccacttagaatggcactagctggtatggtcgttacattaatgctttctgcctttactggaacaatggaactttttctatgaaaatgaaaaacctggtttatttttttgggggaactgggctctcctattcaaaataactgggatggcgttcaattttcttttccatttatcattatttctttcctagttttacttggcatatctcgcaaactcaacattcaaatcataggtgatgtatgttgcggtttttacttcggcgaaaaaacagcagtaacacgtcttatcgccttcattgctgcaatctttttaacagcagtcattgttactgtcgttggaccaattggttttgtcggcttagttgcacctcatttaatgcgcctgataggataccgtcaacactttactcttcttctctcttctttcttatggggagcagtattattacttggagcagatgttgctggtagactaatagatccaaccgggtgccgaactttcctgttgggggaatcacggaaatgaatggaacgcccttgccttaattactaatggaaccggagtgagaagtcaaaaacataaatgaaatgaaaacggggcgaaatacagctgggaactagttcccgctattactcttataaaaaagtaatcattatatctatcccactctgtattggtgacaattgctctttgtggttacaatcggtagtaacccttatatcgaaagcattacaaatgttatatcaggccaattaacacaatttgataaaaactgatgattcaccctctcgtttaccaagaatgctcgttgctgctatcgctggggccatgccttgcaaataaggcgggcttgtttccccaaggtatattacgagacccattcgcagatccttctattatcgggatttcatcaggagctggtgttggtgctttaactattaggtatgtctttcctacacttcctggtttcttctaccctataggtgcatttatcggggggactacttgcagttggaattgtcctcctcttctcatggaaatcaggattcagcccaacagctcttgctttaataggaatcggtatttcagctcttggctcagcgattattcaaatctttatcgttaaagcaaatttgaacgttgctgctgctttaacatggctatcaggtagtacgtatgcaggagggatgaaatcacttagaaaaatatcattctatatccatcgctaattcttgtattgattatctttttcttaataaaacaacttgacgttctcgtacttggagatgatttagcaacaggactcgggcgacccagtaaataaaacgcgccctgcccatcattgtgttagcaacactacttgcatctgtaaatatcgcagctgtcggtacaattgcctttctaggccttgtcgcaccacacttagcgcgaattgttgttggaatgaatcaccaaagactattcgtctagtactgcactgcttaggagcatccgttctttccatcgctgacttactcggacgaacgatttgataccccgaaagaaatcccttcaggcctctgtagtgctgtacttggcgcaccttatttcttatggctaatgagaaagagtgggaagaaggttaattaaaaaagaggcttcttatgtgag

SEQ ID NO: 10469 - DNA, 475 bp, Bacillus anthracis
atgtttcgaattggacaaggttttgatgtgcatgaattcgcggaaggtagaccgttaattattggtggaattacaattccacatgagaaaggattaatcggtcactctgatgcagacgtattattacatacaatcgcggatgcgtgtttaggtgcaattgcagcaggagatatcgggaaccatttccctgatacagacccccgcctttaaagatgctgattcagctgtattgtgcaaaaaggtttgggagtttgtgcgtgaacaaggttatgaattagggaatttagattgtacaattattgctcaaaagccaaaaatggcaccacatattgaaagtatgcgcaaacgcattagtgagctattagaaacgtctatcgataatatcaatgtaaaggcaacaacaacagaaaaattagggtttacaggtagagaagaaggaattgcttctcaagcagttgttttattacagaaaaaa

SEQ ID NO: 10470 - DNA, 2594 bp, Bacillus anthracis
atgatcggtattttaaaaaaggtgtttgatgtaaatcaacgccaaattaaacgtatgccagaaacagttgagcaaattgatgccttagaagcctctattaaggccctacctggggaacaatttaaaaggggagacgcttgaatttaaagaacgtctaacaaaaggtggaaacagtagatgatctactacctgaagcttttgcggttgtttcgtgaagctgcgactcgtgttcttggaatgcgtccgtatggcgtacagttaatgggtggtattgccttacatgaagggaatatctctgagatgaaaacgggtgaaggtaaaacgttaacatctacattacctgtatatttaaatgctttaacagggaaaaggtttccctgtcgtaccagtcaatgaatacttaacgccacgtgatgcgaacgaaatgggacaacttcctgagttcctaggctttaccagaaggaattaatttaaacagtatggcacgcgaagagaaacaagaggcttatgctgctgatattacgtatagcacaaaatagtgagcttggattcgattacttacgtgacacacacggttctatataaagagcagtgcgttcaacgcccgcttcactttgctattatcgatgaagtcgattctatcttagtcgatgaagcgcgtacgccacttattatttctggacaagctcaaaaatcaacagagctgtacatgtttgcaaacgcattcgttcgtacgttagaaaatgagagagtaattattcatttgatgtgaacgacgaaaaatgtaatgttaacagaagatggtattacgaaagcggagaaagctttccatattgaaaacttatttgatttaaaacatgtagcacttcttcaccatattaatcaagcacttcgtgcgcacgttgtaatgcaccgtgatacagattatgttgtacaagaaggcgaaattcgtaatgtaagaccaatttactggtcgttctaatgaaaggtcgtcgttatagtgaaaggttacacccaagctatcgaggcaaaagaaggcgtagaaattcaaaatgaaagtatgacgcttgcgacaattacgttccagaactacttccgtatgtacgaaaagttatctggtatgactggtacagcgaaaacagaggaagaggaattccgtaacatttacaatatgaacgttattgtaatttccaacgaacaaaccgattattcgtgatgaccgtgcggatttaatcttcaaatcaatgaaaggtaaatttaatgctgttgttgaggatattgtaaatcgtcataaacaagggcaacctgttcttgtcggtacagtggcgattgaaacgtcagagcttattttcaaaatgttaacgcgtaaaagcgtacgtcttaaaatcttaaatggcaaaacccatgcccgtgaaagcggatatcctttgcaaaacttggtatgaaaggtgctgtaacgatcgcgacgaatatggcaggggcgtggtactgatatttagcttggagacgatatttaaaacatttggtttagcagttatcggtacagagcgtcacgaaagtcgtcgtattgataatcagttacgtggtcgtgctggtcgtcaaggggacccaggtgttacgcagttctacttatcaatggaagtattaactaatgcgccgcttcggttctgataatatgaaagcaatgatggatcgccttggtatggatgattatcagaacaatcgaaagtaaaatggtttctcgtgcagtagaatctgcgcaaaaacgtgtagaaggaaataactatgatgcacgtaagcagttactacaatatgatgatgtacttcgtcagcaacgtgaagttatttacaaacagcgtcaagaggtaatggagtctgagaacttacgcggtattattgaaggtatgatgaaatctacagtagagcgtgcggttgcgcttcatacacaagaggaaattgaagaagattggaacattaaaggtcttgttgactacttaaatacaaaccttctgcaagaaggagatgtgaaagaagaagaattacgtcgccttgctccagaggaaatgagcgaaccaattatcgcgaaatttatagagcgttaccatgaccaagaaaagcttatgccagaagagcaaatgcgtggaagtcgaaaaaagtggtggatttccgtgttgtagatacgaaatggacagagcatatcgatgcgatggatcaccttcgtgaaggtattctttttcgtgcttacgggcaaatttgatccactttcgtgagtatcaaatggaagggattcgcaatggtccaagtcaatgatttccttcttattgaaaaaggaaattttctccctacctttatgaaaggttgaaaattgaacaaaactttagaaccgtcaagaaagttgtttcaagggtgaagctgtttcaccccatctaagtgatggcgaagaaagcgaagaaaaaacccagttgtaaaaagggggccaaagtccggccgcaaccgatttatgtaaaatgggtaggcggtaaaaaaatattaaaacttgcttttgttttcggaaagtaatccagggcggttagttttggctactttgcaaactt

SEQ ID NO: 10471 - DNA, 276 bp, Bacillus anthracis
atggctcgtagcttgaaaaaaggaccatttgtcgatgatcatttaatgagtaaaattgcaaagctaaatgaaactgagcaaaagcaagttgttaaaacttggtctcgtcgttcaacgatcttccctcagttcatcggtcacacaatcgctgtatatgacggtcgtaaacatgtacctgtatatgttactgaagacatggtaggccacaagttaggtgaattcgcaccaactcgtacgtataaaggtcatgatgctgacgataagaaaactagaaga

SEQ ID NO: 10472 - DNA, 654 bp, Bacillus anthracis
atggattactatgaaaatcgtaaagtaatggccgaagcacaaaacatttatgaaaaaagtccgatggaagagcaatcacaagacggggaagtgcgtaaacagttcaaagcgctgcagcaaattaaccaagaaatagttggatggattacgatggatgatacacaaattaattatccaatcgttcaagcgaaagacaatgattactatttatttcgtaattataaaggtgaagatatgagagcaggaagcatctttatggactaccgtaatgatgtgaaatctcaaaatcgaaatactattttatatggtcaccgtatgaaagatggttctatgtttggaagtttaaagaaaatgttagatgaagagttcttcatgtcgcatcgtaaattatattacgatacattatttgaaggatatgatcttgaagtgttctcggtgtatacaacaacaactgatttttattacattgaaacggattttagcagtgatacggaatacacatcatttttggagaaaattcaagaaaaatcgttgtataaaacggatacaacagtaacagcaggtgatcaaattgtaacactttcgacgtgtgactatgcactcgatccggaagcaggaaggttagtcgtacatgcgaaactagtaaaaagacag

SEQ ID NO: 10473 - DNA, 768 bp, Bacillus anthracis
atggaactattacaagggaaaacatttgttgttatgggcgttgcgaaccaaagaagtattgcatggggaattgctcgctctttgcataatgcaggtgcaaaattaatcttcacatatgcaggagaacgtttagagagaaatgttcgtgaattagcggatacattagaaggacaagaatcacttgtattaccttgtgatgtaacaaatgatgaagaacttacagcttgttttgaaacaattaagcaagaagttggtacaattcacggtgttgcacactgtattgcttttgcaaatcgtgacgacttaaaaggtgaatttgtagatacttctcgcgatggatttttacttgcacaaaatattagtgcattctctttaacagctgtagcaagagaagcgaagaaagtaatgacagaaggcggaaatattttaacgttaacatatcttggcggcgagcgcgttgtgaaaaactataacgttatgggtgttgcgaaagcttcattagaagcgagcgtgaaatatttagctaacgatttaggccaacacggcattcgcgttaacgctatttctgcaggtccaattcgtacgttatctgccaaaggtgtaggcgactttaactcaatcttaagagaaattgaggagcgcgcaccacttcgtcgtacaacaacgcaagaagaagttggggatacagcagtattcttattcagtgatttagcacgcggcgtaacaggagaaaacattcacgttgattcagggtatcatatcttagga

SEQ ID NO: 10474 - DNA, 2034 bp, Bacillus anthracis
atgaataacttacaacatacacttcgagcaagtcttgtattcggaggaggaggagctctcttgctcctccttttctttattcatatcggacaaggtcaagcaaacatttcctatagtatgattattgatgctcttatctcaccgaaccaatcgctagaacaccaaactttaattatgcttcgattacctagagctgtaatcgccattttagctggcggtgctcttgctgcatctggggtcattttacaaacgttaacaaaaaatccacttgctgaatccagtacaatgggtattcactctggtgcatatttctttctagtagcggctacaattttcttaccgaaaggtctgcaaattaactcacttcttttcacatttatcggtggtgctattactgctttatttgtataccgtatttctggtgaaaaaaagggaaccccacttagaatggcactagctggtatggtcgttacattaatgctttctgcctttactggaacgatgcaacttttctatgaaaatgaaacagctggtttatttttatggggagctggctctcttattcaaaataactgggatggcgttcaattttcttttccatttatcattatttctttcctagttttacttggcatatctcgcaaactcaacattctcttacttggtgatgatgttgcggtttctcttggcgaaaaaacagcagtaacacgtcttatcgccttcattgctgcaatctttttaacagcagtcattgttactgtcgttggaccaattggttttgtcggcttagttgcacctcatttaatgcgcctgataggataccgtcaacactttactcttcttctctcttctttcttatggggagcagtattattacttggagcagatgttgctggtagactaatagatccaaccggtgccgaacttcctgttggggcagtcacggcaatgattggatcgccttggcttatttacttagtgtatcggatgatgaagtcaaaacaatatatgaatgataacggtgcgaatacagctggagctagttcccgctattactcttataaaaaggtaatcattatatctatcacactctgtattgtgacaattgctcttggtgttacaatcggtagtaacgcttatatcgaaagcattacaaatgttatatcaggccaattaacacaatttgataaaaacatgatgatgaaccttcgtttaccaagaatgctcgttgctgctatcgctggtgcatgccttgcaataagcgggcttgttttccaaggtatattacgaaacccactcgcagatccttctattatcgggatttcatcaggagctggtgttggtgctttaactattatgtatgtctttcctacacttcctggtttcttcctacctattggtgcatttatcgggggactacttgcagttggaattgtcctcttcttctcatggaaatcaggattcagcccaacagctcttgctttaataggaatcggtatttcagctcttggctcagcgattattcaaatctttatcgttaaagcaaatttgaacgttgctgctgctttaacatggctatcaggtagtacgtatgcaagaggatggaatcacttagaaaatatcattctatatccatcgctaattcttgtattgattatctttttcttaataaaacaacttgacgttctcgtacttggagatgatttagcaacaggactcgggcaaccagtaaataaaacgcgccttgccctcattgtgttagcaacactacttgcatctgtaaatatcgcagctgtcggtacaattgcctttctaggccttgtcgcaccacacttagcgcgaattgttgttggaatgaatcaccaaagactattcgtttgttctgcactgtttggagcaatccttctttccatcgctgacttactcggacgaacaattgcatacccgaaagaaatcccttcaggtcttgtagttgctgtacttggcgcaccttatttcttatggctaatgagaaagagtgggaagaaggttaat

SEQ ID NO: 10475 - DNA, 1383 bp, Bacillus anthracis
gtgaaaaagtttgtgaaaaaagcatggccatttgcagttgtggcatcattagcagttacttcggtagcaacatggaattttacacgttctagtgaagtgagcgcagatgagaacggaagcaatgcaaagattaaaaatgttattgtgttaattggagatggtatgggcccttcatatatgacagctcaccgttatatgaaagataatccaaaaacattcgagatggaatctacagagtttgataaacatcttgtaggaacacaaaaaacatatccggaagatgaacatgaaaatatcacagactcagcatcagcagcaacagctatgtcagcaggaattaaaacatataatgcggcaattgcagttgataatgataaagcagaagtgaaaactgttcttgagcaagcgaaagagaaagggaaatcaacaggattagttgctacttctgaaattacacatgcaacaccagctgctttcggtgcgcatgacattagtcgtaaaagtatggacgcaattgcaaatgattattttgatgagaaaattaaagggaagcataaagtagatgttatgcttggcggcggcgtaaaaaactttgttagaaaagatcgcaatcttacagaagaatttaagaaatctggttatagttacgtaacagatcgagatcaattgttaaatgataaaaatgatcaaattcttggtttatttgcaccaggcggtttagataaaatgattgaccgcaatgagaagacaccttcattagaagaaatgacaaatgcagcaattgagcgtttgaacaaaaataaaaaaggtttcttcttaatggttgaaggaagccaaattgactgggcaggacacgataatgatatcgttggtgcaatgagtgagatggaagactttgaaaaagcatttaaagctgcgattgagtttgcgaaaaaagataaaaatacgttagtcattgcaacggcagatcacgctactggcgggttatctttaggtgcgaatggtgagtacaactttaaagtagatccaattaaagctgcaaaacgcacaccggacttcatggcaaatgaaattgtaaaaggtgcaaatgtagaagaaacattgaaaaaatatattgatttacaattaacacctgaagaaattaaagcggtaaatgatatcgctccttcaaaagatgtaacaaagattgataatgcgattgaagatattttcaataagcgttcggttacaggatggacaacaggtggacatacaggagaagatgtaaacgtatatgcatttggccctggtaaatacttgttctctggcgttcaagagaatacaaatctcgctaaacgtgtctttgatattgttggcggtggtgatccgaataaaggaagacgc

SEQ ID NO: 10476 - DNA, 1371 bp, Bacillus anthracis
atgaaaagactatcaataaaaatgagagtaaccctgtggtatacggggctaattgtaattattatggcactcgtgttagcttttattttaacttcttcagataaagttttgctttttaatatgaaaaatcaattgaagagcacagtaaaagaaagcgttgaagatatcgagtataagcatgggcaattaaagatggacgatgattttgaaacctttgaagatggagtaaatatcatcatttataataaacaaagtgagctgctggcaggtaatagtccaacaagctttaataaaaagatatcgcttaaatccgatgaaatacaaattattaaagacggtaataaagaatggatcgtatatgattttctccataatgcagacggcggtgagcaagtctgggtgcgtggaataatgacgatgagccgattatcatcaacgatgaatacacttatcgtattaacactgatctcatttccattacttattctcattgcggcagtgggaggatattttattacgcaaagagcgtttcgacctgtgcagcaaatgagtgattcagccagtaaaattggtgatggtaaagacctttcgaagagaattaatttaaaaggttcaccgaaagacgaaatgtatcatttagcacaaacttttgacaaaatgtttgagcgattggagacatcatttgaaagtgaaaaacaatttacatctgacgcatctcatgaattaagaacaccaacatctgttattatttcgcaatgcgaatacgctttatcccagagaaataatccgaaagaaatggaagaatcgttagaagtaattttaaagcaatcacgtaaaatgtccgcgctaatctcacaactcttattattagcaagagctgaccaaggaaatgataatactttccaatttgaatgtatcaatatgagtgaattaacggaaatcgttgtagaagaactttcattaatggttcaagaagcttcgattgatataacaactcatatagaggaagacctgtttataaaagcagatcaaacattgatgatgcgtttattaatgaatttattaacgaatgcgattgcttatagcaaagcgaacggaactgttcatatgcaactgttccgtgacgaaaccaacataataggtaaagtctccgataatggcataggcatcagtgagcaacatattacgaaaatttgggaccgcttctatcgagttgacgcagcacgaacatcttcaaacattggaaatacaggtttaggattgtcgatggtaaaatggattgtcgaactgcacggaggagaaataacagttgaaagtggattaggagaaggcagtacttttacctttaaactaccaattgaaaaacaagca

SEQ ID NO: 10477 - DNA, 539 bp, Bacillus anthracis
atgaaacatgtttttcaaaaaggaaaagatacgtcaaaaccagtgttgttattgcttcatggtacaggaggtaatgaattagatttattaccacttgcagaaataatggacccagaagcatctgtattaagtgttaggggaaatgtattagaaaatggcatgccacgttttttccgccgattggcagaaggcatttttgatgaagaagatttgattttccgtacgaaggaattaaatgaatttttagatggagctgcaaaaaacatatgaatttgatagaaataacattgtagctatcggttattcaaatgggagcaacatttgctgcaagttttattatcccataccgataatgcattaaaagccgctgtgcttcatcacccaatggtgcctagaagaggaacacaattgcctaatttagcaggaaaatccgtgtttatcgctgctgggaacaatgaccccgatttggtcatcagcagagtcagaagaaatggaaggtactattagaaaatgcgaacgctaatgtaacaatgcattgg

SEQ ID NO: 10478 - DNA, 1668 bp, Bacillus anthracis
atgaattctttagaacaagtaaaaggattaattaaagaagaaattcaagctgctgtattaaaggcagaattagcgacagaagaacagattccaaacgtagtattagaatctccaaaagataaaacaaatggtgacttctctacaaatatggcaatgcaacttgcacgcgttgcgaaaaaagcacctcgtatgattgcagaagaattagttgcaaacttcgataaagcaaaagcttctactgaaaagattgaaatcgcaggtcctggtttcattaacttctacatggataatagctacttaacagacttaatcccaacaatcgttaatgctggtgaagcttatggtgaaacgaatactggtaaaggtgaaaaagtacaagttgagttcgtatctgcgaatccaacaggtgaccttcacttaggacatgcacgtggtgctgcagtaggtgacactttatgtaatctattagcaaaagcaggatacgatgtatctcgtgagtactacattaatgacgctggtaaccaaattcataacttagctctttctgttgaagctcgttacatgcaagctttaggcttagagaaagaaatgccagaagacggataccatggtgcggacatcattggaatcggtaaacgtttagcagaagagtttggcgatcgttatgcgaaagctgatgaaaaagaaagctatgaattctaccgtgagtacggtttaaaatatgagttagcaaagcttcaaaaagacttagaaagcttccgtgttaaatttgatgtatggttctcagaaacatcattatacaaaaacggaaaaatcgatcaagctcttgctgtattaaaagagcgcgatgaaatctttgaagaagacggtgcaacttggttccgttcaatgacttacggcgatgacaaaaaccgtgtattaattaaaaacgacggttcttacacatacttaacgccagatatcgcatatcaccgtgataaattagagcgtggtttcgataagttaatcaacatttggggtgctgaccaccacggttacattcctcgtatgaaagctgctattcaagcgctaggttacgataaagaaacacttgaagtagaaatcatccaaatggtacaactataccaaaacggtgaaaaaatgaagatgagtaaacgtacaggtaaagcagttacacttcgtgagcttatggaagaagtaggcgtggacgcaatgcgttacttcttcgcaatgcgtagcggcgattctcatttagatttcgatatggacttagctgtatcaaaatctaatgaaaacccagtatactatgcacaatacgctcatgctcgtgtatgcagtatccttcgtcaaggtgaagaattaggattagctacaggcggagatgtgaactacaaacttgttacttctgagaaagaagtagaattactgaaaaaacttggtgaattcccagcagtagttgcggatgcagcacaaaaacgtctgccacaccgtattacaaattatgcatttgaattagcggcaacattacacagcttctacaatgcagaaaaagtattaaaccaagataacttagaattaagtaaagctcgttatgagttaatgaaagcagtacgcactacgcttcaaaacgcattagcaatcgtaggagtatctgcaccagaaaaaatg

SEQ ID NO: 10479 - DNA, 765 bp, Bacillus anthracis
ttgcgacacattgaactgaataatgaaatcacgcaaatgcaggacggtttttatcagcttcataaagataaagaggcattagaagtctttatggaagaagctagagagaataccgttcattttaatagcgtggcagagcgaatggagtatatgaaagaacatgattactattacaacgttctggacgagtataacttggaggaagtagaagaggtatataacatcgcttatggtgaaaacttcgagttccaatcttatatggcagcatctaagttttacaaagattatgcgttaaaaacaaatgatcaaaaacaatacttagaaagctatgaagatcgtgtagcaattgtgtcattatacttaggacgcggtgatgttgccaaggcaaaacaattcgcaagcatgattgtcaaacaaaactaccaaccagcaacaccaacctttttaaatgcgggaagaagcagaagaggagaaatggtgtcttgtttcttgttagagatggatgatagcttaaattcaatcggctttaacattaatactgcaatgcaattatcaaaaatcggcggaggagtagctttaaacttatctaagctacgcgcacgtggtgagcaaattaaaggtatcgacaacgctgcaagtggtgtagtacctgttatgaagttacttgaagattcgttttcatatgcgaatcagcttggccaacgaaaaggtgctggcgcagtatacttgaacattttccattgggatattattgaattcctggat

SEQ ID NO: 10480 - DNA, 5372 bp, Bacillus anthracis
aaacttttcaatatatgtttaattgtatttgtactattttcacagtttattagtttcccgtacaatcaggcaaaagctgagactttaaaggaaacttcattatttgacactgttgagatgaaagatgcaacggatcagattattgacgaagcaaaaaatcctaacaacttaataaagataggatcaaccattcaagtagaatatgcttggtcaataaaggatcaacaagttgtacatgcaaacgatacagcagtacttcaaataccacttgcattaaaagtatctaaagatttacaaggagatttagtaacagatcaaaaaaatattggtcaatattttataacagctaaagataataaattaaaactaatatttaatgatcaagtagaaaattcgaaagacgctaaaggaaaaattaaaattgatactgtgtttaacccaactttaaagactgaagaaaaatcagttcaaatcgcttttcctttaggaacactggttcagcctataacagttcctattcaagtagaagattctaaagaagatggaaccaaacaggatactaataaacaagtgcaagatcaagtagctaaacctactactgataatccggaacaaaattcagcaactaaacctgctactgacaatccggaacaaaatccagcaactaaacctgctactgacaatccggaacaaaatccagcaactaaacctgctactgataatccggaacaaaatccagcaactaaacctgctgctgataacccagaacaaaatctagcaagcgatcctgctgagattacaaattcaggtccaaagcaaataacaacaaacattttaacgggtgtaaagttgacggacaaagacggaaaaccatttacagaggataaccgtccaagtacagattcccctgccaatattgagtttacatgggaacttttaaaatcaatgaatgtgaaaagcggagattactatatttttgatcttcctaaacattttaagatttacaatacaattaacagccctttatacgatagtgaaaacaatccaattggtaattttactgttacaaaagatggaaaagtcacaatgacattcaacgattatgttgaagaacatccagatgttgttggtaacctacaattaaagacagaatttaataaagctgaaattaagggtacaacaacacaggaaattcctttcccaattaaagataaagatgtttctattacagttgactttaaacctaatgtacaaacggctacaaataaaaaagggttacctgatagaccaattaatacaaatgagattaattggacagtagagatgaacaaaacgaaagacacccttaaaaacgctgtttttaaagataacatcccacaaggtacaagtttaaataaggattctattaaagtttattatttagaagttgatgttaacgggaatgcaacacgtggtcaagaagctgatccagcagattacaaaattatttcatcagatggttcaaaattggagattgcttttaaagattctattaaaaaagcatatcaaatcgaatatgtcacaaaaatcactgatgaaaacgtaaaaagcttccaaaataacgttacgataacaagtgataatcaagggcaacaaaaagcaagctctactgtaacagtctctcgtggtacacatttaaacaaaacaagtaaatatgatccaaagacccaaacaattgaatggacgattacttacaacggtgatcaaagaaatatcaaaaaaaacagatgcacttttaaaagatatttttgacgatacacatgaattagatgtaaattctatcgttgtgaaaaacgcttcatacgacgataaaggaaggcttgtaacaggagacactgttaataattacactgtaactaacaagaagaatggattcgacttacagtttaatgaagatattaatagtgcgtatgtaattacctataaaacaaagccaactaataatgtcataaaagatggaaaaataaagaatacagttacagctgataatggctcaagtaaagaaaatgaggctggtttccagcagcaaaatattattaaatctaataataaagctgaaacaaactataaagacaaaacaacaacctggacaattacggtaaataataacaactatccattaaacaacgcgatcattacggatacctttgaccacggtggattacaattaaaagataaaaaactagaaattaaagacggagattatacccttcaggctgagactgattatgttttagatgtaacagataaaggtttcaaaattacccttataggtacatatcagtctaatatgacaaagacattaatcgtaaaatatacgacagactttgactatacaaaactagaaagtggtaaaacttcatttaaaaatacaggtaacctatcttggatagatgcagggtccaatccacaatcaaataaagttgaagcagactttgatcctgatactttcacaaaggcaaatggctataaatacggttcttataacgcccaaacgaaagaaatcacttggataataggttttaattataataatgttgagattaaagatccctatgttatagacgtaatacaagataaacaaaagttagtaccaggatccattgaagtgcgccatatgattttaaatggaagtccggataatgcaagacctggtgatgctgtaccaattgagcagtatgaacttgaagaacctacagataaaaataaaaacaccctacaggttcatttcaagcaatcaattaattcaccttactatattatctttaaaacaagccttgatggtgaacttatccaaaacacctacaaaaacgaggcagagttaaaagatggctctaaaattgtaaacactcttaaaggtgacgctcaagtaaataaaggtggcagtttcgttactaaaaaagcggtgcaagatgacaactatattaattggagtattgcaattaacgaaagccaatcgaccattgcagacgcagttgtaacagacgatccaacagacaatcaagtacttgtggaagattcattccacttatatcctacaactgtcgattactatggaaatgtaacaaaagatacagcaaatgaattaaaacaaggaacagactataagttaacgatcacaacagacaataataccggaaagcaacatttcgaaattgccttcttgaaaaaaattgatcgagcttatattttagaatatcgctcacttattaatgcagacgataaagaaaaagtgagtaataaagcaaaaatcgctggcaatcagttaacagttaagaatacagaaactgttgaaacgattgaagtgagaatgtcttccggttcaggtggaggatctgctactaatgggcgcggaaaccttgaaattataaaggtagataacgacaataagaaagtaccattgtccggagcagaatttactttatatgatcgtacaggaaaaaccgttatccgcaaaataacaacagacaaagatggtattgctaagtttaataacttaaagcgtgataaatatttattaaaagaaacaaaagctcctgagggctatgtaattagctgggatttaaaacagggaaaaattgttgaacttggttcacaagagactacaacatataaacttgcaaataagaaatttgtcggtaaagtagttttaacaaagtctgatgacctgaataaaaacgtaacactgcaaggtgccgttttcacactacttgataaagataaaaaaataatttcagaacacgaaaaattaacaacaaatgatcaaggacaaattactgtagataatttaaaaccaggaacttactacttacaagaaacaaccgctcctgagcactataaattagacagtacacctattcaattcacaatcaaagaagatcaaacaacagtaataaaccgaactgcaacaaacagtttgattccaggatcggccattttaacaaaagtcgataaagatggaaaaactttagcaggtgcggagtttagtgtacgcgatcgacataacaatgtaattcgtggatatgaaaaattaacgacaaatgatcaaggacaaatcgaagcaacaaatttacgtcctggagactatcaatttgttgaagaaaaagctcctaaagattacgacatagataaaacaccaattgagtttacaattgtaaaaagtcaaaagaaagcagttactgttactgcgacaaatcacctcattaaaggtggcgtcactttaacaaaaactgatgatatcgatggtacagctcttgcaggtgctatatttaaaattgtcgatgctaatgatgaaaagaaagtcattcgcgaaaatgtaaaaactggtgcggatggtaaagtaactgttaaagacttggagcctggtacgtataaatttattgaaacagaagctcctaaggattatgtgttaaatgcaaatcctatcgagtttacaatcgataaaagccaacagtcttttgctactgttacggcaacaaacagtttaaaaacaggagaagttgaattattaaaagttgatgaattcggtgataaaaaacctctaaaaggtgccgtatttaaaattgttgatgtaaataataatgatgttcgtactgatctaactacagatgctgatggaaaaacaaaagctgataagctacgtcctggtacgtataaatttattgaaacagctgctcctgaacattacgttttacgagcagaacctattgaatttacaatcgatagaagtcagaaagaaaccctacttgtgaaagctgaaaatgctttaaaaccaggcgatgttgaattaacgaaagttgatgatatcgatggtacagctcttgcaggtgctgtatttaaaattgttgatgctaatgatgaaaagaaagtcattcgcgaaaatgtaaaaactggtgcggatggtaaagctatcgctactggcttacgccctggcaattataaatttatcgaagtattacgataagaatacaagtccaatcaagttcacaattacagaaagtcaaacaacgtcagctactgttactgctaaaaacagcttaacaaaaggcggtattgaattaacaaaagtgaatgctgcagatgaaaaggaaacacttgaaggtgcagtatttaaaatcgttaatagagatacgaatgaagatgctcgtacgaaccttgttacgaatagtgaaggaaagttagttgtagacgacttacgtcctggtaactataaacttatcgaaacaaaggctccaacttattatgatgtaaatgtagaaccaattgaatttacaatcgaaaaaggacaacaaacacttcttccacttacatttaaaaatagtttaacgaaagga

SEQ ID NO: 10481 - DNA, 1008 bp, Bacillus anthracis
gacaaactacaacgtccgttaaaggcattagcgtatttcagttactgatcgctgtaattttcgctgtcgatattgtatgccagaagaaatatttggtccggaatactcgctttttgtctaatgataaaattttatcttttgatgaaattgaaaggataacgcgtattttcgtttctttaggtgttagaaaattacggattacaggcggagaaccgttacttcgaagaggtcttccacagcttattgagcgtcttaataaagtagatggtgtagaggatattggcttaacaaccaatggatcgttacttaaaaagtttgctcctgatttatataaggcgggtttatcacgtgtgacagttagtttagattccttagaagaagagcggtttttctatttaaatggtaatagaagcaaagtacaaagggttctggaaggcatacaagctgcagctgaagttggaatgaaaattaaaataaacatggtcgttcaaaaggggaaaaacgaacaggacatcttgcagatggcacaatactttaaggaaaacaaacatattcttcgttttattgagtatatggacgttggaaattataatggttgggagttaagagaggtcgtatctaaacaagaaatagtagatatgattcatcaagttatgccattagaacggatagaagcgaattatgcaggtgaggttgcgactcgcgtatagttatattggaagtgatgaagaaataggtgttatttcatcaggaacagattctttctgctcttcatgtacgagagctcgtatttctgcagaaggaaaattatatacttgtttattcgcttctaaaggaaatgacttgagagaactgcttcgatctgactacactgacgaggaaataacagatgtcgtacgcgacatatggaacaaccgagaagatcgttattcagatgaacggttaagtaatagtaataaaaaagctatgcctacaattgaaatgtcacatatcggtggttaatataaa

SEQ ID NO: 10482 - DNA, 820 bp, Bacillus anthracis
atgaaaaagattctattgtcagttgttacagcgctgtctgtatttacattagctgcttgcgggggaaaagaggagaataagcttgtcgttggagcttctaacgtaccgcacgctgttattttagaaaaaggcacagccgatattagaggaaaaaggggattaaattaggaaattaaaaattcccagattatgtggttgccaataaaggcgttaacgggataaggaattgatggcaactacttccagcacattccgtattttgataaggaaatcccgaaaaaaggatttaaatttgtaaacgcaggaaaaatccatttagagccaatgggtatttattctaaaagatataaaagcttaaaagacttaccagatggcgggacagtaattatgagtaataacgtagcggagcgtggccgtatgctagcattgttacaaaaaggcggcgttattaaactaaaagacggtgtagatgttgtgaaagcaacagtaaaagatgttgtagaaaatccaaaaaacttaaagtttaaaacagatgtagagcctgggctttcaccaaaattatatgaaaataatgaaggaaaagctttatttattaattccaactatgcaattgatgccaaactaaatcccacaaaagatgccattgccaatggagggaccgactctccatacgcaaatattattgcagttcctaaaggtgacgagaagaaaaaagaaatttaagagctagtagaagtactacattcaaaagaaaattcaagattttattaataaagaatataagggtgctgtactaccagtaagtgaataaatatgaagg

SEQ ID NO: 10483 - DNA, 1011 bp, Bacillus anthracis
atgcacgagaacatgaaagattctttaaagcggccacttcaagatttacgcatttcagttattgatcgttgtaattttaggtgcacatattgtatgcctgctgaagtgttcggacctgattatgcttttttacaggaagagtgtttattaacgtttgatgaaatagaaaggttagcgagattatttataagtatgggagttaataaaattaggcttactggcggtgaacctttattgcgtaaagacttaccgaagttaattgcaagacttgcaaagctagaaggcttaaaagatattgggctcacaacaaacggaattcatttagcaaaacaagctaaggcgctaaaagaagcaggattaaagcgtgtaaatattagtttagatgcaatagaggatcgtgtcttccaaaaaattaatggaagacatgtaagtacgaaacctgtactgaaaggaattgaagcagcgaaggaagctggattagaagtaaaggtaaatatggtcgtaaaaaaagggatgaatgatagtcaaattcttcctatggctcagtattttaaagaacaagaaatacagttacgtttcattgagtttatggatgtaggcagtacgaacggatggaactttgaacaagtcgttacgaaggaacaattaatagagaaaattaatcgtgtatatccaattgaacctgttaaacctcgttactttggagaagttgcgaaattgtatcgatatgtaggaaacgatgctgaagttggatttattacttcagtatctgagtcattttgttcttcttgtacgagagcacgtatttcggcagacggcaagttttatacgtgcttatttggagaaaaaggaacggatttacgatcgcttcttcgagaaaatatttctgatgcatcactactaaaaattctccaacatacatgggagtttagaacagatcgatattcagatgaaagaacggcggaaagtacaaataaacgtcaaaaagttgagatgtcttacattggtgga

SEQ ID NO: 10484 - DNA, 603 bp, Bacillus anthracis
atgtataaaccaattacattttcgttgaaatatatatttaaaacagctgggaaagtagaagtgcaaggaagagaaaagttaccagaaggtggcccatatgttgttgcgtgtacacatacaagttttatggatgtattaatgttagctacagggatgtacccgacggaaattcattacatggccaaaaaagaattatttgaagggaaattcaaaaattggttctttaaaaatgtaaatgcattccctgtagatcgtgcaaatccaggaccgagtacacttaaaattccatcacgcttattaaaagaaggaaaagtggtagggattttcccgagtggaacgagatcgacagaagacgtttcgttaaaagctggtgctgtgacaattgcgatgcgttctaacgttccattaataccggcagcttatattggtccctcaagtgtaaaagaattaataaagggaaaaagagcacaattaatttttggagacccaattcaaattgatgctgaagaacaaatagatcgaaaaacagctatgaaaatgatgacggatcaattaaatgagaagtttgaggggcttaaggaagctttacaatcaaatcaaaag

SEQ ID NO: 10485 - DNA, 1146 bp, Bacillus anthracis
tttcacctttgtgagatagtaacatcattgccaacacaattttttgctttcactggtcgcaaaagttaataaagtcgttgcagctggtcacgatgttattaatctaggtcaaggtaatccagatcaaccaacgccgcagcatatcgtaaaagctttacaagatgctgcagaaaagaccattcatcataaatatccgccatttcgcggacatgaaagtttaaaagaagcccgtggcaacattctatcaacgtgaatatgatgtagtagtaaatccaaaaactgaagttgctattttgtttggtggaaaggctggattagtagaattaccagtttgttttacaaaccctggtgatacgattctcgttcccgatccaggctatccagattatttatcaggagttgctttagcaaaagcacaatttgaaacaatgccgcttattgcagaaaataattttttaccagattatacaaaaatcgatgactctattgccgagcgtgcaaaattaatgtttttaaactatccaaataatccgaccggtgctactgcatcaaaagatttctttgatgaaaccattcattttgctaataaacataatatattagtcgttcatgattttgcttacggtgcgattggattcgatggtcaaaaacctgttagtttcttacaagcagatggtgccaaagatacaggaatcgaaatttacaccttatcgaaaactttcaatatggctggctggcgcatcgcttttgcggtagggaatgaaagtgtgattgaaacaattaacttattacaagatcatatgtatgttagtatttttggtgccattcaagatgctgcccgcgaagcactattaagttcacagtcttgcgtcatagaccttgtaaatagttacgaatcacgaagaaacgctcttatttcagcttgtcactcaattggttggaatgtagacattccaacaggatcattctttgtacgcgcttcctgtttccacaatgttatacatcatgagcaattcttctagatattattactatgaaaaagcacacgttgcggttgctcctggtgttggatttggtgaacatggcgaaagggttacgtcccggtgtggtcttcttggcatacaggaaggttggaattccgagaaa

SEQ ID NO: 10486 - DNA, 286 bp, Bacillus anthracis
atgttaagattagatcttcagtttttcgcatctaagaaaggtgtaggtagtacaaagaacggtcgtgactctcagtcaaaacgtcttggtgctaaacgcgcagatggtcaaacggtttcaggtggttcaattctttaccgtcaacgcggtacaaaaatttatccaggtgttaacgttggtcgtggtggcgatgacactttatacgcgaaagttgacggcgtagtacgcttcgagcgtcttggccgtgcaccgcaaacaagtgagcgtatatcctgttgctcaagaa

SEQ ID NO: 10487 - DNA, 945 bp, Bacillus anthracis
aatttgttatcatggggagccggaacgcggactttctgtttttattacgagggttaaaacaaatatccggtcgatattacagcagttgttacaatcgctgatgatggtggcagttcaggtagattacgtgatgagctagaaattccacccccaggtgacattcgtaacgtacttgttgcgttatcagatgtagagccactggtggaagctttatttcagcatcgtttcacaacccggagatgggctgaaaggtcatgcgttaggaaatttattattggcaggtatgacctcgattacaggagacttcttccatgccattacagaaacaagtaaagttttaaatgttagaggacgtgtattaccggcagcgaatcaaagtgcagtactgcatgcggaactagaagatggagaaattgtaacaggtgaatcaaagattccttatttccgcaagaagattaaccgtgtcttttttaactcccagaagatgtagagcccgttacatgaaaacgttgactggagattaaacgagctgattttacttgttttcgggccaaggaagtttgtataccagtatttttaccgaatttagtttgttaacaaaaattgggggacgctggtccttgctgcaaaagcgaagaagggtatatgtgtgtaatgttatgacgccagctggtgaaacaatgggatatactgcgtttggacatgtgcaagcgttacatgatccttttaggaaaccatttatccaaactgccattgtaaaaaaccgggaatattccttgtgaattacgtcagttatacgaggaagaaatgtcggcaccagttgtagtagatgaagagcgttttattgaaaataatattgatgtgattcaagatcaattagcgaagtatgatgaccgtgttgtaaggcacgatacattaaaattagcttctattttatattcactg

SEQ ID NO: 10488 - DNA, 2865 bp, Bacillus anthracis
atgacgaggaagaatacaacgacaaacccttgggccaagttccacggtccgaaccttggttatgttattgaacagtatgatctttacgtaactggagcaggttctgttgatccggaattacaagagctttttgaaatttttggagctccttcgtttcaagatgatgtcgtaacaggggacaacacagcaacacatttttctcctcaaaacacaggtaacattgaaaagattcttaaagtcgttcaacttgttgaacagattcgttctttcgggcatacgttggctcacatcaatccgatggaggatgctgcaaatggacaatctcttcttgagaaagcaatgaacgaactgagcgatgctgatttgaaagcgattccagcgaaaacagtatggcaagatgcaccagaaggtattcacactgcacttgatgtaattcatagattaaaagaagtgtatacacaatctttagcttatgaattttctcatatacaagatagtgaagaacgcgcgtggttgcatcaaatggtggaatcaaattcattgcgtcaaccactatcaaataaaaaacgaactgctcttttaaaacgtttaacagctgttgaaggtttcgagcaattcttgcataaaacattcgttgggcaaaagcgtttctctatcgagggcgttgatatgcttgtacctgttctagatgaaattgtgctagaaggagctaaaaacggcgtagaagatgtcatgattggtatggctcaccgcggtcgtctaagcgtacttgctcacgtattagaaaaaccatatagtcacatgtttgctgagttcaaacatgcaaaaatagaaggcgcagtggcaaattctggctggactggcgacgtgaaataccatttaggtagagaacaagtcgttagtaacgaagaagttagcactcgcgttacattagcaaataacccaagtcaccttgagttcgttaatcccgttgtggaaggtttcgcacgtgcggctcaagaaaaccgtaaaaaatctggtcttccagaacaagatacttcaaaatcattcgtaattttagttcatggtgatgctgcattccctggtcaaggtattgtatctgagacattgaacttaagcagattgaacgcgtatcaaacgggcggaacaattcatgttatcgcaaacaatgcagttggttttacgactgatagctatgactctcgttctacgaaatattcaagtgaccttgcaaaaggtttcgatattccgattgttcacgtgaacgctgatgatccagaagcttgtcttgctgctgctaaccttgcgattcaatatcgcatgctgttcaaaaaagatttcctaatcgatttaattggttaccgccgctacggtcataacgaaatggatgatccagcagttacacaaccacaagtgtacaaaaagattaaaaatcacccaactgtaagagcaatttatgcagatcaattacaagctgctggtgttctaaatgcagatgaaattgaaacaattacacaatttacgcaagagcaattaaaatctgactatgcacaagtaccgccagctgatacgagcgatgcaacaattcacgttaaagtgccagatgttgttgcaaaaggtattcagccaattgatactggtgttgagcttgactcacttcgtgcaattaatgaaggtctactatcttggccagaaggctttaacgtatatccgaaagtgaagaaaattcttgagcgccgtaaagatgctcttgaagagaacggtaaaattgaatgggcacttgctgagtcattagcattcgcttctattttacaagaaggtacgccaattcgtttaactggtcaagattcacagcgtggtacattcgcgcaccgtcacatcgtattacatgatactgacacaaatgaaacatattcaccattacatcgcttaccaaatatcaacgcttcattctctgttcataacagtccgttatcagaagctgctgttgttggttacgagtatggttataacgtattcgctccggaaacgcttgttatgtgggaagcgcaatatggtgacttctcaaatactgcgcaagcattatttgatcaatatgtttcagctggaagagcaaaatggggtcaaaaatctggtttagttcttctattaccacacggttatgaaggtcaaggaccagagcactctagtgcgcgtcctgaacgtttcttacagttagctgctgagaacaactggacagttgcaaacttaacgagcgcggcacaatacttccatatcctgcgtcgtcaagcatctatcttaggaacagaagctgttcgaccattagtattgatgacgccgaaaagtttattacgtcacccacttacgctttcaactgctaatcagttaagcgaaggacgtttccaacctgctttagaacaagaaaaccttggtacaaaaccaaacaaagtaaaacgtcttgttttaagtacaggtaaaatggcgattgacttagcagcagaaatcgagtctggtaggcatgagtacaacttagatgaaattcatatcgttcgtattgaacagttgtacccattccctgctgaaaaagttcaatctattattaaacgctttaaaaacttagaagaaattatttgggttcaagaagagcctcgtaatatgggcgcatggcattacatggctccaattctgttcgaactagctggagataaagtgaaaacaggttacatcggacgtccagatcgctctagcccatctggcggcgatccattcgctcacaaagctgagcaagaactgattgtttcacacgctttagatgtaaagtataacttccgtcaagataaactagaaattgaagttttcagcaac

SEQ ID NO: 10489 - DNA, 704 bp, Bacillus anthracis
ctaggtgttcctttttctacaatgacaatggatgaaacaatccaatatttgaagggacaactagaagtggagcgaacgcatacttttcaggtagtaacagcaaatcctgaaattgttatgtgtgcaaaaaaagatgaagcattctataaaacattattaaatacagatttaattacgcctgacggaattggggttgtaaaagcaagtggtatgctgggcacacctttaaaggaacgtgtagcaggttttgatttaatgtgtaatttatttgcgaagctatcagaagagaataaaccagtatctgttttcttacttggtgcaaaaccacatgttgtacaagctgcagcagatcatttaacgaagacgtattcagctgtatctattgtgggtatacaagatggatactttaaacaagaagaagaagagaatgttgtttctcgtattcaagaggcaaaaccagacttattgcttgttgcacttggtttcccgagacaagagaacttcatccaaacgaataagtatcgtttagaaacgaaaatggctgttggagtaggcggaagtttagatgtatgggctggagaggtaaaacgtgcaccaaaatggattcaagcggattgtattagagtggttttatcgcttttgtatttttaccaacgcgttggcgtcgtcagttagtattagcggaattttacttccagccacac

SEQ ID NO: 10490 - DNA, 1597 bp, Bacillus anthracis
gtcgcggcaggtattttagccgcaagtttattatcgtctccagtaagtagtttcgcagcagcgaagaagttttcggatgttcctaccatgggcgcaacaatcagttgattatttagtaggaaaaaaggcgcttgatggaaagccagatggaacgttttctccatctgaagcagtagatagagggtcagctgcaaaaattttagcagtcgttcttggtttaccagttgatccaaaagcaaagccatcatttaaagatgcacaaaaccattgggcagctccgtacattgctgcagtggaaaaagcaggtgtaattaatggggatggtactggtaaattcaatccatcaagccaaattaaccgtgcatctatggcatctatgttagtacaagcatactcattagataagaaaattattggagaacttccaacacagtttaaagatttggaacctcattggggtaagaaacaagctaatattttagtagctttagagatttctaaaggtacgggaaatggctggaatcctgaaggaactgtaactcgtgcagaagcagctcagtttattgcgatggctgaaaaaaaataaaacaaagtacatcaaaaagaatgtatatgaccagaaacgttattacatatcatcacccatcattatcttctggtattactgatgttcaccataagccacaaaatggtgaaagtgacagagcaaagagcagacggctgggtgaaaatgttaacaagtaaaagggagaagtgggacacttctaacagaaaaaacagaaacgatttaatgaaggaattttctacttatggaacagcttcacatagttctaaagtgctaggtacatataatgcacaaacagtaaccgttatggaaaaagagtggtagctggattcgtatccgcgtaggcgctggtttccagtgggttgataaaaatcaattaaatccagtaaaacaagagaactttttagaaggtaaagcaattattattgatccaggtcatggtggaattgactcaggtaatgttggttattacgagaaagaaagtgatactgtattagatgtatcattacgattaaagaaaataatttgagcaaaaagcaccatttactgttatgttcactcgtacagataatacacgtccaggagtaaactcaacagattcattgaaaaaacgagtagagtttgctcaggaacataatggagatatctttgtaagtatccatgctaatggttctgcagagaaaaatggacaaggtacagaaacattatattatcagtcagcaagagcaaaagtaacgaatccgcatgtagaagacagtaagttattagcacaaaaaatttcagaccgtcttgtagcagcacttggaacaaaagatcgtggtgtgaaacatcaggacttatacgttactagagaaaatacattgccagctgtattaacagaattagcatttgtagaatataaaagtgatggcagataaaattgctacaccaaaacagagacaagctgcagcagaagcgatttatcaaggtattttagattattacgaagcaaagggtaataacgtatcttctttccgttaatacatcaaaaga

SEQ ID NO: 10491 - DNA, 1098 bp, Bacillus anthracis
atgggattaacggctgggattgttggattacctaacgtagggaagtccactttatttaatgcaattacacaagcaggagcagaatctgcgaactatccattctgtacaattgatccaaacgtaggaattgtagaagtaccagatgagcgtttaaataaattaacggaattagtagaaccgaaaaaaactgttccgactgtatttgagtttactgatattgcaggtatcgtaaaaggtgcgagtaaaggtgaaggtttaggaaataaattcttatctcacattcgccaagtagatgcaatttgccaagttgttcgttgttttgaagacgaaaatattacgcatgtttcaggtaaagtagatccaattgatgatattgaaacaatcaacttagagctaatcttagcagacttagaatctgttgataaacgtatcgaacgtgttgcgaaattagcaagacaaaaggataaagaagcagtatatgagcatgaaattttagtacgtttaaaagaagcttttgaagaggggaaaccagctcgtactgttgaatttacagaagagcaaatgaagattgttaaaggtcttcatttactgacaacgaaagaaatgttatacgtagcaaacgtaagcgaggacgatgttatcgatccttctgaaaacaaatacgtacaaatggtaaaagaatttgctgcaaatgaaaattctcaagtaatcgttgtatgtgcaaaaatcgaatcagaaattgctgagctagacgaggaagagaaaaaagtcttccttgaagaactgggcattgaggaatctggtttagatcaattaattcgtgctgcatatgatttattaggacttgctacttacttcacagcaggtgtgcaagaagtacgtgcatggacgttcaaacaaggtatgaaagcaccacaatgtgccggcgtaattcatacagactttgagcgtggatttattcgtgcagaaacagtttcttacgaagacttaatgacaaacggttctatgacagctgcaaaagaagctggtaaagttcgtttagaaggaaaagagtatatcgtaaaagacggagacgttatgcatttccgtttcaacgtt

SEQ ID NO: 10492 - DNA, 642 bp, Bacillus anthracis
atggaagataaaacattaggtctactactagatgtagttggggaattattttcagatgaaatttcaattgctgtatcgaatacgaaagaatatatatactatcgcccgagtaaacgaattgatttaaagattagcgccggggatcctataaaggaagggacgattgctcataaagcaatggtgacaaaccaaaaaacctctgagtttattaaccgggatgtttttggtattccttatcatggtatggccgtgccgttttcaaacaatggaaagcttgaaggctgcgtgacagctatttatcctgctttaaccgacggaaagtcagtcgttactttaaaaacaacggacggctgggttccggttcctttttcaaaggtcatgtatttagaggcgaaagataaaaagacgtatgtgaatgcagaagagttaacaggaacacataaatactcgctacaagaattcgaatacttacttccgaaagattcatttattagatgccaccgttcatttattgtaaatgttaatcatattaaagcgatttatcctgatacacattctacttttgtactttcgatggacaacggagagagggtaccagttagtcaatcatacgctagttattttcgtaagcttctaggattc

SEQ ID NO: 10493 - DNA, 1435 bp, Bacillus anthracis
atgtatataaatgggtgagttaattacattgcaagaacaaatcgaagtaaataatccagcaacgaaggaaatatttgcgactgtaccaaagggcggggtaacagaggcaaagcaagctgttgacgctgcgcatgaagcttttaaatcatggtctaagttaacagcagcagaccgtgcagcgaaattaaaaaaatggttcacacttatcgatgaaaataaagaagagattgcagcaattatgacgaaagaacaaggaaagccgtttgcagaagcgcttggtgaagtgaattatgcaaatagctttgttgaatggtatgcagaagaaggaaaacgcgtatatggtgaaatgattcctgcttctcatccaaataagcgcattttagttatgaagcaaccagttggcgttatggcagctattacaccgtggaacttcccggcagcgatgattacgagaaaggtagccccagcgcttgcagcaggctgtacagccgttgtgaaaccggcaagtcaaacgccattaactgcgttaaaattggctgaattagctcatgaagcggacattcctaaaggtgtaataaacattgtaacaggtagtgcgaaagcaattgctgatacgtggatggaagatggacgcgtttgcaaagtttcctttacaggatcaacggaaattgggaaagagttaatggctagtgttgcacaaacgatgaaaaaagtttcacttgagttaggtggtcacgcaccgtttattgttatgaatgatgcggacttagataaagcagtagaagcggtgattggttcgaaattccgtaacgcaggacaaacatgtatatgtacaaaccgagtatttgttcaggaagaagtgtatgaagcgtttgtagagaagttcgaaaaggcagtgggacagttgaaagtaggagacggtttcggtgacggaacgactgtaggaccacttattgacgagaatgcagtttcgaaagtacaggagcatatcgaagacgctattcaaaagggtggaacagttttatatggtggtcaataaggttgcagagctagacggacactttatgcacccgactgtaattggattgcgaaacgatacgatgctttgtatgaaatgaagaaccattttgaccccggtgcaaccagtgcggaaaattaaaacgggtgaaagaagtaattgagcgtgcaaatcatacgccatatggtttagccgcttacattttcacgaaagatatttagtcaagcattccaaatttattgaagcgttagagtacggtaattttcggattaaatgatggccctccaatcagtttgccacagcacccgttccggaggggtttaaagaaaagcggtattggtcgtgaaagtggtcatttccgtatcgaggaatatttagaaatttaaatatatttcattaggactataattagtatac

SEQ ID NO: 10494 - DNA, 192 bp, Bacillus anthracis
ttgccctatatgatatttcatagcgaaaaagttgatgaaaccattgaggaaaaccgtggtaaaaacttagttggtactcatatagttgaagagtttgttaactcactcgaatcacctagaaagattttattaatggttaatgcgggggaaattacagataaagcgatgatttctctagtccctcaccctcga

SEQ ID NO: 10495 - DNA, 1152 bp, Bacillus anthracis
gaaatgcctcatggtacaaaaacacgtccagttaaagtcggtaccttaaccaattggcggtaataatgaattaattatccaagttatgccaccaacaaaaaccacatgatgtgaagccaacagttgctgaaattaaacgtttagaagaagctggctgtcaagtcgtgcgtgttgctgttccagacgaacgcgcagcaaatgccattgctgatattaaaaaacaaatcaacattccacttgttgctgatattcattttgattattcgcctgcttaaaaaagcaatgaagggtggcattgataaagtacgtatcaatccaggtaacattggtcgtcgccataaagtagaagctgttgtaaatgcagcaaaagaacgcggtattccaatccgtatcggtgtaaacgcaggttcattagaacgtcacattttagaaaagtacggatacccaactgcagatggtatggtggagagcgccttgcatcatattaaaattttagaggacttagatttccacgatattatcgtatctatgaaagcctctgatggtaactttagcaattgaagcatacgaaaaagctgcacgtgcttttgattacccattacatttaggtatcacagaatctggaacattatttgccggaactgtaaaaagtgctgctggtcttggagcaatcttaaataaaggtatcggaaatacactacgtatttcacttagtgctgacccagttgaagaagtaaaaagtgccgcgtgaactattaaagtcaatcgcccttgcatctaatgcagcaacatttatttcttgtccaaacttgtggtcgtattgaaattgatttaattagcatcgctaacgaggtggaagagtacatctctacactgcaagtaccaattaaagttgcccgtacttgggttgggtgctgtaatgggtcctgggtgaagctcgtgaaagctgatatctggtattgcccggtgcacgccggagaaggattatttattccgtaaagggcaagttgtgtcgtaaaggtacaaaaagaaataatggtagaaagaaactaaaaaaagaaaattgaccctaattgcttgctgaaaaggggtgctgaacgagaaaaagaaaaagaaacacaagacaatataaaagaaaggttgcccacaata

SEQ ID NO: 10496 - DNA, 1280 bp, Bacillus anthracis
ttccgggatttttttttcagccgcattgagtttgcgattgtaaaagtacgttcaagtcgtattgatcagcttgttgcagaaggaaaacgcggtgctttagcagcgaaaaaggtaacaacaaatttagatgaatatttatctgcttgtcaattaggtattacagttacagctatgggattaggttggttaggtgaaccgacaattgaaaaagtattacaccccgttatttggagaatggacctaaaacccttccatttcatcggaataaactttggggcttgcctttaagtgtaagacgtatttaccccctggaagaagggggattaactccctaaacgatggcaattcaaaaggctgaaaaagtaacattattatttgcagctccactaatgatgttctataaagggatgtatccattttatttgggtattaaatggttcagctccgtgtgataactgggtgtattccggtttaaaacccggcttcttgacatggaagtagctcctacggaaggaagaattacggccttattctttcagaatagctatgaaagtgggcgaaatttatccagctggataccaggatggtaaataacatttttgaatttgataatcgtattgcaaaagagattatggtaccgcgaacagaaatcgttggtttctacctggaagattcagtagaagaacacatgaaagtaatccaaaatgagcgatacacacgttatccgatttttggagaagataaagatgatattatcggtatggtcaacgtaaaagatttctttattcgatatatgaccgaggatcaaaaagatttatcatccattcgctcgtatatgcgtccgattattgaagtgatgggaaccatctcccattccccgatttattacttcaaatgcagaaaaaaacgaattccgaatggctgttttatatgatgagtacggaggaacagctggaattgtaacgtttgaggacatcttggaggaaatcgtcggcgaaattcgtgatgaatatgatgaagatgaagcaccaccaattcaacatgtgaacgagcaacatatcattgttgatggaaaagtgcttatctcagaagtgaaagatttatttggattacacattgaagaagatgatgtggatacaatcggtggatggattatgatgcaaaatcatgaaatcgaagaaggacaacacgttgaggcggaaggttatgaatttaaagtgttagaaaaagacgcttaccaaattaaacgtgttgaaattcgtaagatggaagaggaacaa

SEQ ID NO: 10497 - DNA, 3767 bp, Bacillus anthracis
agtcaatggacagatgatcagtggaaagcggttgtagcgaccggacgtgatattttagtcgcagcagcagcaggatcagggaaaacagcagtattagttgaacgtattattaaaaagattataaatgaagaaaacccagtcgatgtcgaccgcctgctcgttgtaacatttacaaatgcagcagcgcaagagatgaaaaacagaattggagaggctttagaaaaagtattaattgatgacccagtatctccagcacgtaagaaagcagctgagcttattaaataaagcttccattcaaccgatccattcattttgtttacaagttattagaggatattattacatgctgaatgttgatcctcgtttccgcattgcgaatcaaacagaaaatgatttattaaaagaagaaggtgttagatgacatattagaagaatgagtatggaatagaagataatacgatattctttgaactcgttgatcgttatacgagcgaccgtagtgatgatgatttacaacgtatgattttagcgcttcatacagaatcaagagcgcatccaaatccggaaaaatggctcgataaattagtagaagcatatgacgtcgaaggaaagacaattgaagatttagtgtacgcctcttacttattagaagatgtgaaattccagcttgaaacagcggaacagcatattcgtaaagcaactgagctcgcaatgcttcctgacggttccagcgcctcgcattgaaacgctgcaagcagatttagctttacttggaacgttatcagcagctgctcgtgaatcgtggacaaagcgtgtatgaaagggatgcaaaacgtatcggtgccaaacgttaaagcgcattaagaagagacgattataacgaggatattggcaaacaagtagactctcttcgtaataaagccaaagatgaaagtgaagaaataccaagaagagctatttagccgcaggcctgaaagtttcttacgagattttcaagatatgcatcctggaattagaaaagctcgttcagaaaaataaaagtatttacagagcgtttccgatatgtagaagcggagataaaggcatggtcgatttcacagatttagagcatttctgtttacaaattttaagtgaacaaagtgaagatggtgaaatgaagccatcagcagtagcacttcaatatcgtaataaatttgctgaagtattagtcgatgaatatcaagatacgaacttcgtacaagaatcaattattaaattcgtaacgaaagattccgagagtgaaggaaacttattcatggttggtgacgtgaagcagtcgatttatcgtttccgactagcagaaccaggattattcttaggaaagtataaacgtttcacacaagaaggattaggcggcggaatgaaaattgacttagcgaaaaacttccgtagtcgtcatgaagtgttagcgggtacaaactttatcttcaaacaaattatgggcgaagaagttggggaaattgattacgatgctgacgctgaattaaagctaggtgctagctatccagaaggtgaagatgtagcagctgaactattgtgcattcagcaaacagaggaagaagtaatagacggtgaataatgtgccggaagtagaaaaggcacagcttgaagcacgtcttatggcgcagcgcattaaagcgatggttgattcaggttatgaagtgtatgatcgtaaaacggatagtatgcgccctgtaaaataccgtgacttcgttattttacttcgctcgatgccgggggccacgcaaaattatggaagagttaaaatgccaagaattcccagtatacgctgaccttgccactggttactttgaagcgacagaagtaaatattatgatgaacgtatcccgcgttattgataatccgatgcaagatattccgctgccagcagtgcttcgctccccaatcgttggattaaatgatgaagagcttgcaacgcttcgtgctcacggaagaaaaggctcgttttatgaagtaatgagctcattcttaaaaggagcaccgcttgaagaagaaaaagaactacatgataaattagaatggttctataacttactgcaaggatggcgtggaattcccacgccaacagtctcctttctgattttaatttggaaagtggaccggtgagaacagggtattatgacctttgttcggcggtttaaccaacttggaaaagcaaaggcaagcaaacctgcgtgtactatatgaccgcgcaagacaatatgaagcaacatcgtttagaggactattccgcttcttacgctttattgagcgtattttagaacgcggtgatgatatgggtacggcgagagctttaggtgaacaagaagatgtcgttcgcattatgacaattcataaaagcaaaggacttgagttcccagtcgtattcgtcgctggacttggtcgtcgttttaatacgcaagacttaatgaaacgtttcttacttcataaagacttcggtttcggttcgcaatttatcgatccgcgtaaacgaattaaatatacgacattatcacaacttgcaattaagcgtaaaatgaaaatggaattaattgcggaagaaatgcgcgtcttatacgtagcgttaacacgggcaaaagagaagttaattttaattggaacggttaaggatgcaactaaggaaatggaaaaatggctggatgcgagggagcatagtgaatggttattcccagattcacgttcgggcccggagcttctgttatttagactggattgcaccttccttatatagacaccgtgatagtgaaatgcttcttgaattagggcaaaggaagtttcccagatgaaatttatgggttatgccactagctgaaaagtagaagttgttgacgggaacacgttacttgcgccagaacccgttcaggaagagaaacaagaattgttagaggcacttcgtgagaaaaaaggctgttccgttagagagtgaacggaaagaagaagtgtacgatagattaatgtggaagtacggatatggagaagcgacatctcatcgtgcgaagcaatctgttacagaaataaagagaaattatcaatctgaagaaggtagcgataacgcttttattaaaaaattacgtgcaccaattcaaacacgtcctcgttttatggagaaaaaagggctaacgtacgcagagcgaggaacagcagtccatgccgttatgcagcatgttgatttgaagaagccgattacagttgaaattcttcaagagcaaattgctggaatggtaaataaagaattattaacatttgaacaagcagaagaaatagcaattgaaaaagtgatttcattcatttgacagtgaccttggataaaagggttattaaggggcgaaaaagtgttgagcgggaaagtaccattttcgatgatccttccagcagaagaagggtatcaagttttgccaagggggagaacggggaaatccattctgtgtccaaggggtttatcgactgcttgattgaagaggaagatgttattcctttaatggactttaaaagggatccgattgaagggaagttcccgggaggattcgaacaagcgaaaccaatttttagaaactcgttacaaagtgcagctttcgttatatgcaaaggcacttgagaaaagcttacaacatcctgtgaaagagaaatgtttatacttctttgatggtaatcatgttataaaagttgaggaatagaggggcttgcaaaatggcagcgggaaaaacgtt

SEQ ID NO: 10498 - DNA, 1170 bp, Bacillus anthracis
ttgaattttcgtgtgtatattttagctatcgcggctttcgtagtcggaacagttgagctaattataggaggaacgcttgatttagttgccaatgatttaggagtatctattagtgcagctggtcagcttatcacaatattttcagtagtatttgctttatcaggtcctgttttattagcattaacagggaagtttgaaagaaaaacattgtatgttggggcattatcaattttcttaatcggaaatattatttcagcatgtagtgtgaattacggcatgttaatgttctcaagggtgatttgtgcggcgagtggttcgcttattattgcactgtcagtaacacttgcttctagcgttgtagaaccgcattttcgtgcgcgtgcaattggaattattttcatggggattagtggatcacttgtacttggagtaccgcttggccttgtactcggaaatgcatatggatggcgtgcaccatttgtactcatttcaatcttaacagttatggcaatcgcttgtatttcattattcttaacgaaagtaccaccgacatcggtattatcaataagagaacaaattgctacgttaaaagataaaaaaatcgtaagtgcacagttaacatcattcttatttttaacgggccatttaacactatatgcatatttaacacctttcttaaaagatgtgatgcatgtggaagcgaattggattagtgtattttacttcatcttcggaatcgcagcagtaattgggggcggcttcggaggctggcttgctgataaatggggatcgaagaaaagtattatttcaattattatcgtatttgcgtgtgcgatcttcctattgccattaatgacattctcgttcccgctgttcattattatgatgggaatttggagtatgctgagctgggctatttcgccagcacaacaaaattatttgattgaaattgcaccagaatcagctggtattcagcaaagtttaaataactctgcccttcacttagggattgcgctcggttcaacagtaggcggagttgttattgagaaatcgtctgttatatataatgcttgggtaggaggcggctttattatattagcgctgctttgtgcgattttctcgattacgagaggacgttctactcagtttgcaaaagaagaatctatcgtt

SEQ ID NO: 10499 - DNA, 295 bp, Bacillus anthracis
atttcggttgagaatgtaaaagcacgtagcacatttagcacgtcttgcgattactgatctagaagcagaaaaatttctaaaaccactagatgcaattgttacatttgctgaacaggttaatggattagatacaaccgatgtgaaaccccacaactcctgtatttactatgtaaaatgttatgcgtgaggatgtaccagaaaaaggtttacccgttgaagaagtattaaaaaatgcccgggatcacaaaagataatcaaatccgtgtttccagccgtattagaaataaagggaagg

SEQ ID NO: 10500 - DNA, 1197 bp, Bacillus anthracis
aaaacagttattttaagtgctgcaagaacaccggtggggaaatttggaggatctttaaaagatgtaaaagcaacagaacttggaggaatcgcaattaaagcagcgcttgaaagagcgatggttcaccctagggatggtgggggaggtaatatctgggacgggtattcaaggtggacagggacaaattccatcacgccaagctgcaaggctccgctggaatccccttggggaagtgcagacggaaactgtcaataaagtttgtgcatcaggggcttcgtgcggtgactttagcggatcaaattattcgtactggcgatcaatcactaattgtagctggtggtatggagtcgatgagtaacagtccttacattttacgaggagcaagatggggatacagaatgggtaacaacgaagtcattgatttaaacgttgctgacggtttaacatgcgcattttcaggtatacacatgggtgtttatggcggagaagttgcgaaggaggatggaatttctcgcgaagcgcaagatgaatgggcatatcgtagccatcagcgtgcagtttcagcgcataagaaaggacgttttgaagagggaatcgtgccagtaacgattccacaaagaaaagggcgatcctattgtcgttgcaaaggatgaggcgccgcgtgaagaatacaacaattgaaaaactagcaaaattaaaacctgtatttgataagacagcgacggtgacagctggtcatgcaccattggttaaacgatggtggcgctgcacttgtattaatgagcgaagacagagcgaagcaagaaggaagaaagccgttagcgacaattttggcacatacagcaattgcagtggagtctaaagatttcccgaggacgccaggttatgcaattaacgcattgcttgaaaaaacaggaaagaaaattgaagacatcgatttatttgagattaatgaagcatttgcagcggtagcaattgcaagtacagaaatcgcaggaattgacccagaaaaattgaatgtaattgggcggcgcagtggcgatgggacatccgattggagcaagcggagcgcgcattatcgttacactaatccatgcacttaagcaacgcggcggtggaattggaattgcttcgatttgtagtggtggcggtcaaggcgatgcagtgatgattgaagttcactaattaagattagaa

SEQ ID NO: 10501 - DNA, 610 bp, Bacillus anthracis
atgaaaattgatagaccaaaaatttcaccagagttatcctttaagagttttcacgatattttttatgaagaagatccaacattagaaatgtgtgaaattatcgattctacttttgaaaatgaatctgtcgatagagtgcgtttatatagtgcagtgataaaaaattgtaagttcacgaatacagactttagcaatattgatattacagatgtttgttttgagaactgtgatttatcaaatgttaatttaagcaattcttctgttcacagagtcgaatttaaaaacagtaaattaattggagttaattttacagaatctagcttagggaatgttgaatttagccacatttggaaattctaagctagaaaagattatatttaatgaagcttcattaaataatgcagacttttttgactgtaagctaaagaaggttgaatttgattcatgcagccttaacgaagcaaattttgatcaaccatcactaaaaggaatagacattagttcctctacttttgatacacttaccgtttcagtgaacgacctaagaggatgtaaagtatcaccatatcaagctattcagtttgcatctttattgggattaataattaaa

SEQ ID NO: 10502 - DNA, 264 bp, Bacillus anthracis; identical to SEQ ID NO: 10324

SEQ ID NO: 10503 - DNA, 576 bp, Bacillus anthracis
gtgaatttaccaaataaaattacaatatctagaatcttcttaattccaatttttatggtaattatgttagcaccctttgattggggttcatacacaattggtgatgttgatttaccaattcaacatttagtaggagcacttatctttattgttgcttcggctacagattggattgatggacattacgcaagaaagtataatcttgtaacgaatttagggaagtttcttgatccattagctgataaattacttgtttcagctgcacttatcacgttagtggagatgcaatacgtaccagcttggatcgttattatcattataagccgtgagtttgcggtaactggtttacgtcttgtactcgctggaacaggagaggtagttgcggcaaatcagctaggaaaaattaagacatggacacaaattatcgcgattgcagcatatttattacacgatgtacctttaaacttaatccatattccggtagctgacatctttatatggattgcattaatttttactgrtatttcaggatgggattatttctggaaaaatagagctgcttttgtaaactcaaaa

SEQ ID NO: 10504 - DNA, 1297 bp, Bacillus anthracis
atgaccagcaatgaaatatatgttagtcttgacatcggtacatccaatgttaaagtcatcattggtgaaatggtttaatgacagcttaaacattattggtgttggacatgtgaaatcaaatggtttaaagaagggatcgatagttgatatagacgagactgttcgatcaattaaaaaagcaattgaacaagctgagcgtatggtgggaatccacattgagcaagttgtagtaggtgtcaatgcaaaccaggtacagctacttccttgtcacggagtagtcgctgtttcaaatgaagatcgtgaaatcgggaatgaagatgtcttacgcgttctagatgcagcacaagttgtgtcaattgctccagaacgtgagtttattgatgtggtacctcgacagttcattgtagacggtcttgacgagattaacgatccacgcggggatgatcggtgtaagattagaaatggaaggtacacttattacaggctcgagaactttactacataacctacttcgttgtgtagaaaaagcaggtcttgaaattgttgatatttgtcttcaacctttagcggctgcaacagttgctatatcttcggatgaaaaaaatagaggagtagcccttgttgatatgggcggaggatctacaactttatctatttttaaagatggagagttacaagcgacgagcgtattaccattaggtggagaccatataacgaaggatattgcaattgggttgaaaacttcaacagaaaatgcagatcaaattaagttgaaatatggacatgctttttatgatacagcatctgaagaagagatgtttacggttcctattatgggaagcgaccaaacagaacaatattctcagttggaattatcggatataatagaggctcgtgtagaggaaattttaatgtttgttcaagatgaagtgcgtaagttaggagtaaagcaagtagcttctggttatgtactaactggtggaattgcttctatgccaggtgtccttgatcttgcatatgatattttacatgaaaatgttcgtatagcgactcctgattatattcgcgtgcgtttgacacaatatacaagtggagtaggattaattaaacattcttatcaaaaagctaaattacgtggaaaaatgtgcaggaaaagcaagagcattttgaaccagtaccagctccagcgccggtacaacagcaccctgcgaaacaaaaaactcgtaatcaaaacaataataatcaaaatgatgaccgtatgatgtcaaaagtaaaacgtgtattccgttatttatgg

SEQ ID NO: 10505 - DNA, 339 bp, Bacillus anthracis
atgcaagctaaagcagtagcgagaacagttcgtattgctcctcgtaaagttcgtttagttgtagacttaatccgaggtaagcaagtgggtgaagcgattgctatccttaaccacacaccaaaaactgcttctccagttgtagaaaaagttttaaaatctgcaatcgcaaatgcagagcacaattatgaaatggacatcaacagcctagttgttgagaaagttttcgttgacgaaggtccaacgttaaaacgtttccgtccacgtgcaatgggtcgtgcaagccaaattaacaaacgcacaagccacatcacagttgtggtatcagaaaagaaggaggga

SEQ ID NO: 10506 - DNA, 1317 bp, Bacillus anthracis
aaaaaaataatttttttcacgggtcttatgccaatttctttattttttgggggaggagaattaattttcccctccatgcttggacaaaatgcaggtgaaaacttttggccagcaatgagtggatttttactaacaggagtcggtttaccactactaactgttatcgcaatttctttatcaggaaatggtatgcaacaacttgcaagtcatgttcacccattattcggaatattctttacggtagttgtatacattgccattggtccttctatgggtattccacgcgttgcaaatgtcgcttatgaaatgggcgtaagttctttcttaccagaaacaatccgttctagcagcctagtgctatttgtatatacaatcatattctttgctatcgtattttggctgagcttgaatccatctaaacttgtagatcgcattggaaatatattaacacctattttattactctctattttcttattgtttgttaaaagtgtatttacaccactcgggcaatcaggtccagcgatgcaagagtatcaaactttcccgatcttcaaaggatttatggaaggatacttaacgatggataccatttcagcacttgcatttggaattatcgttgtaaatgctattcgctctaaaggtgtgaatgatcgtaaatccattgccatcgcaacagcaaaagcagggcttattgccgctactggtctcgtacttgtatatggtgcgcttgtgctggctcggtacaactagcgtctcgctcggatatgcaaaaaatggcggacagttacttactgttatcgtacaacaattattcgggccatacggcttacttctactagctctaatcgttacactcgcttgcttaacgacatgtgttggactcgtatctgcatgtagtcaatatttctcaacattattgactaaattttcatacaaaacatttgcaagtatcatttgtgctttagggttactagttgctaacttaggtttaaccaaaaatcattgccatctctgttccaattctacttgttgtatatccaattgcaatcgtacttgttctactatcgttactgcataaatacttcgggggatatcgttctgtttatgtaggtgctttaattggagcagctatagtgagcgtatttgatggattaaaacaaggggggtatttcagtttcatttatcccatcatattttgattttatccctttatataaagaaagaattggctgggctaggtccttgcattaaccgggagctcttattgggctttaccattcgctaaaataaggcgtgggaaaaaagttcccttta

SEQ ID NO: 10507 - DNA, 1499 bp, Bacillus anthracis
atgaaaattacagaactattaaaaagggatacagttattatgaatttgacagcttcaaataaagaagctgtcatagatgaattagttgagaaattaaacggggcaaatcgtttaaatagtaaagctgaatttaaagaagctattttaaagcgggagtcacaaagtacaactggcattggtgaagggattgctatacctcatgcgaaaacaaaaagctgttaagcaaccagcgatttgttttggtagaagtgtaagcggtatcaactatgaaacgctttgacggaaacctgccccattaattctttatgattggctgcgagtgtccgggccaaaaataaccctttttaaaacgtattcccccttattttacctaataaatggatgaaaggtttcctaacccatttgttaaaaaccaaagggaggagaaggaaccttcttcctccctttttgttggaaaaagaacaatgaaaaagaaaatgaaaaagaaaatgaaaaagaagaagaggtagaagttgcacaaccagaagggaatgaaccatacgtattagctgttacagcttgtccaactggaatcgctcacacatatatgggctgcgggatagtttggaaagcaaaaggcagcagaggttggggatttgccatttaaagttgaaaggaagtggtccaaccagttataaaaaaccggtttaagggaaagagggattatgaaacgggcaacagtttatattgtggcggcagataaccaggtggaaatggattgtttttgctggtaaacatgtcattcaagtgccagtcgctgagggggattagaaaaccggaaaaacttcttaaatcgtgctgtaaaacaggatgcgccgatttcttaatgcaataaaagaagatggaagggcaggcagtacagagaatgacaatggattaggaatttatatgcatttaatgaacggcgtaagtaatatgcttccattcgttgttggtgggggggattttaattgcgctagcgtttttcgttgggggtataaaaagcagaaggccttttagctgaattgttcatgtctattggaggagggggaacaggggcatttttattccttgtaccaattttagcaggatttattgcgagttctattgctgatcgtcctggttttatgcctggtgttgtcggggggatttttagcggcacatgcgaatgctgggcttttaggggggataattggctggggttcttagctggatatgttgtcttagggctaaaaagactattttcaggattaccagtacagttagaaggtattaaacctgttttgttatatccagtctttggattattgattacaggagttgttatgcaaaaagtagtaattccgcctgtagtagcattgaatgaaatgttatacaggatggttaaatggtttgatacggtacaaatgctatattactaggtcttattttaggtgcgatgatggcaaaagatatgggtggtcacaattaatactttccag

SEQ ID NO: 10508 - DNA, 762 bp, Bacillus anthracis
atggaagaagtattacccataaaaaacgtctcgaaactgtatgaaggaacagtcccctcatactgctttaaaaaatataaatttacatgtagataaaggagaattcgttgccattatgggtccatctggcagtggaaaatctacatttttaaacgtttatctctacaattgattcgcccatttctggggaagtcgttattaacggcaaaaagccacacacatttcgtagagaaaaattagctgttttccgtcgtcaagagttagggtttgttttccaaaactttaacttactcgatacattaacgatcggagaaaatatcgtattacctttaacattagacaatgttcctttaaaagagatggacaaaaagctcgatagcatctcaacaaaactaggaatcgatcatattttaaacaaacgtatttttgaagtttcaggaggacaagcacagcgtactgcagtagcacgcgccgttattcatcatccgtcccttctccttgctgatgaaccgccagtgtaatgagagactcgaaagcagctattgatgtaattggagttattttcgaaattaaataaagaagaagatgcaacgattttaatggttacccacgatccgtttgcagcaagttattgtaatcgcgttatttttattaaagatggggagctttacaacgaactgcaccgaggattgtatcgatgagaagttttatcaagaaatattagatgttttagcattactaggaggaagacgtggatgacat

SEQ ID NO: 10509 - DNA, 879 bp, Bacillus anthracis
ttggagattacattccaaaaagtagaacatcgttatcaatataaaactccatttgaaagacgcgcactttatgatgtagacgtgtcgtttccaagtgggggctattatgccattatcggtcatactggttcaggtaagtcgacgatgattcaacatttaaatggtttattgcagccgacaaatggcacagttcaaattggtgaacatttcatttcggcaggaaagaaagaaaaaaagctaaagccactacgtaaaaaggtaggggttgtctttcaattcccagaacatcagttatttgaagagactgtggagaaagatatttgtttcggccctactaattttggggtatcggaagaagcagcgaagcaaaaggcaagagaagcaattgaacttgtagggttagaaccagaactgttagcgcgttcaccatttgagttaagtggtgggcaaatgaggcgtgttgcgatagcaggcgtattagcgatggaacccgaagtgcttgtattagatgaacctacagcaggactagatccaaaagggcaaaatgaacttatggagatgttttataagctacataaggagaaaggccttacagttatccttgtaacgcataatatggaggatgctgctaaatatgccgagcagattgtagtcatgcataaaggaacggtctttttgcaaggaagtgcagaggaagtattttcacatgctgatgaactagagaaaattggcgtggatcttcctatgtctttaaagtataaacgtgcaattgaagagaagtttggcatttcaatcccaaaggctaccttatctttagaggatcttactcatgaagttgtgcaggtgttacgaaaaggtggtcatgaatcatgcagcagt

SEQ ID NO: 10510 - DNA, 2263 bp, Bacillus anthracis
caaattaaggaagagcgcatatattctgaaaaggggctaccagacgaagagtttgccatgtttgaaaggattctaggccgtctgccaaatttatacagaattcaggtgtattctcagtaaagtggtcagaacattgtagtgatagatattcaacagcagtgtttggaaaattcccaacaacaagtgagcgcgttatgcaaggacctggggaaggtgctggaattgtagatatcggtgatatcaaagcggttgtatttaaaatggaaagtcataaccatccttctgctattgaaccatatcaaggagcagcaacaggcgttggtggtattattcgtgacgtattctctatgggggcacgtccagtagctctattaaactcagcttcgctttggggaattaccatcaccccgggtgaaatacttattcgaagaagtagaaacccgcattgtcgggatacggaaactggatcgcgtttcccaactgttggcggggaaagaaacgtgtggtaccagctcaggaaggaaacccacttgtaaatgcaatgtgcgtaggcttaattaaccacgaagacattaaaaaagggccaagcgcccggtgctggaaatacagtaatgtacgtaggcgcatcaactggtcgtgatggtatccacggtgcaccattcgcatttgaagagttatcttgagagctcattcgcgaagcgtccagcagttcaagtaggagatccatttatggagaaacttcttattgaagcttgctttagaacttattcaatcggatgcactttgttggaattcaagattaggggtgcagctggttttaccatcatctttctgcagaaaatggcaagtaaagccagggatggggtatttgaatgtacttagatgatgtaccgcagcgagaaacaggaatgacaccatatgaaatgatgttatctgaatcacaagagcgtatgttaattgttgtgaaaaaaggtagagaagcagaaatagtagatttatttgagaagtatggtcttgccagcgttacgatgggggaaagtaaccgaaagacaaatgctttcgtttatcccataaaagtgaaatgggtagcttgaagtgcccaacagatgctccttgccaaaagaaacacccattttatcttaaaccaatccaaagaaagcaccataattttgctgaaattccacccagatgaaaatggaaacccccaaaagtagaaaatttttaagaaaacggtattccccttttttacaacaacccaccaattgcaagtaaagagtgggtttatgatcaatatgattatcaagttcgcacaagcacagttgttacaccaggttcagatgcagcagttgtacgtgtacgcggtacagaaaaaggattagcaatgacgacagattgtaactctcgctacatttatttagatccagaagtgggcggtaaaattgcagtagcagaggcagcacgtaatatcgtatgttctgggggagagcctcttgcaattacagattgcttaaacttcggtaatccagaaaaaccagaaatcttctggcaaattgagaaatcagtagatggtatgagtgaagcttgtcgtacgttacaaacaccagttatcggcggaaacgtatcaatgtataacgagcgtagtggtgaagcggtatacccaacaccgacagttgggatggttggacttgtacatgatttaaaacatgtaacaacacaagagtttaagcaagccggcgatttagtttatgtcattggagagacgaaagctgagtttggtggaagtgaattacagaaaatgcttcacgttacatattttcggccaatcaccaagtatcgatttagacgtagaattaaaacgtcaaaaacaagtattagcagccattcaagctggccttgttcaatctgcacatgacgttgctgaaggtgttatagcggttgcgatttcagaaagtgcaattggtgctagcggcttaggtgctactgtgaaattagacgggggaagcaacagctgcattatttgcggaatcacaatctcgcttcgtaataacggtaaaacgtgaaaataaagaagcgttcgagaaagcggtagaagccattcaagttggtgaagtaacaaatacaaatgaagtaacaattccttaatgaaggaaatggagtgttttctttccgccaaatgtggatgaaatggggaaaggcttggaaaggggggcattccccatgcttgggtgaaattgggggggtttaaagggagaatggtggggtt

SEQ ID NO: 10511 - DNA, 3042 bp, Bacillus anthracis
atggataggttaacgaagttttcattaaaaaaccgcgccgctgttatcatcatggtttttctcatttccatactcggtgtttattccggctctaaattacctatggaatttttacctagcatcgataatcccgcagtcaccgtcacaactttatctccaggactcgacgctgaagcaatgacaaaagaagtaaccgatccccttgaaaaacaatttcgcaacttagaacacattgacaacatcacctcttccacgcacgagggactatcgcgtatcgatatcgcgtatacatccaaagcaaatatgaaagatgccacacgtgaagttgaaaaggccattaatacaattaaattacctaaagatgcaactaaaccgatagttagccaattaaatactactatgattccactcgctcaaattgcaatccaaaagcaaaacggattttcaaaagcagatgaaaaacaaatcgaaaaggaaatcgtaccacaactcgaaagcattgatggcgttgccaacgttatgttttttggaaaatcaacttctgaattatctattatactagatccaaaccaattaaaggataaaaacgtaacaacggaacaaatattaaaggttttacaaggaaaagaaacttccactccagctggagctgttaccgttaataaagaagaatataaccttcgtgtcatcggggatataaaaaatgtagatgacattaaaaacatcactgttgcgcctcacgttaaattgcaagatgttgctcaaattgaacttaaacaacactacgatacaatctcacatataaacggtgaagaaggcactggattaatcatcatgaaagaaccaagtaaaaatgcagttgcaatcggaaaagaaatcgataagaaaattaaagatataagtaaacaatataaagatcagttttctattaaacttttagcatcaactcatgagcaagttgaaaatgcagttactagtatgggaaaagaagtaatccttggagcaattgctgcaactctaattatcttaatctttttacgtaacttccgaacgacactcatcgctgttgtcagtattccattatctattttattaacactctttttactacaccaatctaacatcacacttaacactctaacacttggtggtttagccgttgcagttggacgtctcgtcgatgatagcatcgttgtcattgagaatattttccgccgtttacaaaaagaatatttctctaaagatattattctcgatgcaacgaaagaggtcgccgtcgcaattacttcttctactttaacaacggtcgctgtttttttacctatcggcctcgtatcaggagtaatcggaaaattaatgttacctatggtattagcggttgtatattctatactatcatccttaatcgtcgcactaacagttgttccacttatggcttttttactactcaaaaaaataaaacacaaaaagccaagttcttcaccacgatatgtcgctacattaaagtgggctctttcgcataaattcattattctacttacttcttttttattattcgcaggatcgattgccgcctatgtactactaccgaaagcgaatataaaatctgaagacgacacaatgttatctattaacatgactttcccagctgattacgctcttgaaacacaaaaacaaaaagcctttgatttcgaaaagaagctactttctaattcagatgtaacggatgttattttacgaatgggatctagcgcagaagatgcacaatggggacaaacgacgaaaaataatcttgccagtatatttgtagtcttcaagaaaggctctgatattgatcaatatattaaagagttaaaaaaagaacataacgcttttgaacccgctgaacttgattatataaaaacgagttattcaagctctggtggcggcaataatttgcaattcaacgtaacagccactaacgaaacgaatttaaaaaaggctgctactatcgtcgaaacaaaactaaaaaacatggatgatctttctaaagtaaaaacgaatttagaagactctaagaaagaatggcaaatccatgttgatcaaacaaaggccgaacaactaggattaacaccagaattagcagctcaacaagtggcattccttatgaagaaatcacctattggtgaagtgtcaatcaataatgaaaaaactactattatgatagaacataaaaaagaaagcattactaaacaagaagacattttaaacacaaacatactatcacctattaatggaccaatccctttaaaagacattgcaactatttcagaaaaacaactccaaacagaagtcttccataaagatggaaaagaaacgattcaaattacagcagaagcttcaaatgaagatttaagtaaggtaagcgcagaagtgaacaaagcgataaccgacttagatttacctagcggagccaaagtaaatatcgcaggcgccactgaatctatgcaagagaacttcacagatttattcaagattatggggattgcaatcgggattgtatatttaattatggttattaccttcggacaggcgcgtgctccttttgcaatcttgttctccttgccattagctgctgtcggcggtattttaggattaattatttcaggaacaccagttgatgtaaattccttgatcggcgcattaatgttaatcgggattgtcgttacaaacgctatcgtattaatagaaagagtgcaacaaaatcgggaacatggtatggaaacaagagaagccttactagaagcaggatccactagattacgcccaattattatgacagctataacaacaatcgttgctatgctcccactcctatttggccaatcacaagcaggaagtatggtatcaaaaagtctagccgttgttgttatcggtggtttggcagtttcaactgttcttacattagtagtcgttccagttatgtatgaactattagataaaatcgggagaaaaagacgctctcgtagaaaaataaacacttctacagaaacacctgatatt

SEQ ID NO: 10512 - DNA, 383 bp, Bacillus anthracis
gcggtggagaaaacgatgtagctggtaacacagttgcagaaaggctggtatattagatgcggggattagtttatttgctgcgaaggaagattgttcaaagatcggctgtggagcaattaaatcgtgaaccagttaaaaatgcactcaacaatatgatgggggcaggagaagcattatcttcagttgatccggaagtaacgaaacaaattacatccagcttagttacgggattacaatttgcaacagatgaattaaatagtggtaaaaaaacaaaagtgatggatttctttaaagtgttaaaagatccagatatcaatagagccattacatttggttttagtttcttgaaagcatttggacaagggttagagaaaaaatagagt

SEQ ID NO: 10513 - DNA, 658 bp, Bacillus anthracis
atgttactcccccaacaaataaatcaatttaaatccgtttaagaaaaacaaacccaagacctagagcaaccgatacaaccacatgaaaatgaagatcgtgcatctgaacgcgaatctgttggagaattgtctagctatgacaatcaccccgctgatatggctactgaattatatgagcgtcaaaaggacttcggacttattgagctttggcataaacagctagaagatacgaaacatgccctgcaaaaaatagaagcgggtacgtacggcatttgcgaagtgtctggcgaagaaattccatttgaaagattagaagcaatgccgactgctacaacatgcatacagcacacgacaaacaaattaaatatggaaacgcgaccagttgaggaagaagtattatccccttcttttcataagcacgatgaagatcattctgttgagtacgatgcagaagttgcgtggcaagatgttgccaattatggaacgtctgaaacgccgtctgatttagaaagacaagattcaaaaaactacaatggcatgtacgtaaatagcgaagagaatgtaggctacgtagaggattttgaaaactttatcggtacagatatgtatgggaaaaatccgcaagttttcgcctccggaagagcatgaagaatacgga

SEQ ID NO: 10514 - DNA, 806 bp, Bacillus anthracis
ttgaaaaagaaattaggtttactagccatggttgttgcattaatggcgattactgctggctgtagtgaagtaaatcagccaattacaccaaagagcactggaatttggaatgaatacttcgtatacccggctttctcagttatttacgtattttgccaacttatttggtagtaattacggtttagccattggttgttacgactcttattatatacttttgcattattaccattaatgattaatcaaacgaagagtacgaaaagcaatgcgagcgttaccacccacaaatgggtgaagtttaaaagagaaaatattagctcttaagattcaggcacccccgccaaaaacttccaccagaaattgatgggggttttttccaaaaaaatggtgtaaatccattagcagggaaggttacccatctttggtcagatgccctattttattcgcgttttaccatgcgattatgagaacatcagaaattagtaagcatacattcttatggttcgacttaggacaggcagatccgtactatatcttaccggttgttgcggcaattacgacatttattcagcaaaaacttgcaatggcaggaactgctggtcaaaatccgcaaatggccaatgatgctttggtaaatgccaatcatgattttaatctttgcaattaacttcccagctgccttatcactttacggggttgttggtaatatctttggtatcgctcaaatgtactgatcaaaagggccggaaattaaggctagtaaggcaggaggatcaagcaagtgagtataattactgctaaaggac

SEQ ID NO: 10515 - DNA, 1257 bp, Bacillus anthracis
atgtttaaatttaatgatgaaaaagggcaattaaaatgttctttctgtggtaaaacacaaacacaagtccgaaagttagttgcaggtccaggtgtttacatttgtgacgagtgtatcgaactttgtactgaaattgtacaagaggagcttgcgaaagacgaagaagtagaattcaaagatgtaccgaaaccggtagaaattcgtgaaattttagatgagtatgtcatcggacaagataacgcgaaaaaagcactagcggtagcggtatataaccattacaaacgcattaattctaacagcaaaattgatgatgtagaattagcgaagagtaatatcgcacttatcgggccaacaggtagtggtaaaacattactggcacaaacgttagcgcgtattttaaatgttccatttgcaatcgcggacgcaacatctttaactgaagctggatacgttggggaagatgtagaaaacatcttacttaaattaatccaagcagcggattatgatgtagaaaaagcggaaaaaggaatcatttatattgatgagattgataaagtggcacgtaagtccgaaaatccatcaattacacgtgatgtatctggtgaaggtgtgcagcaggcacttctgaaaattttagaaggtactgtagcaagcgttccacctcaaggtggtcgtaagcatccgcaccaagagtttattcaaattgatacaacgaatatcttattcatctgtggtggagcgtttgatggcatcgagccaattattaaacgccgtcttggtgaaaaggtaattggatttggttctgagaagaaaaatgctgatgtaaatgagaagcatgttttatctcacgtattaccagaagaccttttaagatttggtttaattccagagtttatcggtcgtcttccagttattgcgaacctagagccacttgatgaagatgctcttgttgatattttaacgaaaccgaaaaatgcacttgttaagcaattccaaaaactattggagcttgacgatgttgagttagagtttgaagaaggtgcactaattgaaattgcgaaaaaagcaattgaacgtaaaacaggtgctcgtggacttcgttctattattgaaggcttaatgcttgaggtaatgttcgagctaccatctcgcaaagatatcgagaagtgtattcttacaaaagaaacagtagctgataatgcagcaccaaaattggtgttacaagacggtactgtacttgatacaaaaacatctgca

SEQ ID NO: 10516 - DNA, 1353 bp, Bacillus anthracis
atgccgaaaccagtaatagcaatagtaggccgcccgaacgtagggaaatctactattttcaatagaattgttggagagagagtttcaatcgtagaagatattccaggtgtaacgcgcgatcgtatttatagcgctggagaatggttaaatcatgaatttaacattattgatacaggtggaattgatattggagacgagccatttttgacacaaattcgtcaacaagctgaagtagcaattgatgaagcagatgttatcatttttatgacaaatggtcgtgacggtgtaacagcagcggatgaagaagttgcaaaaatattatatcgttcaaataaaccagttgtacttgcagttaaataaagtggaccaatccgggaaaaggcgcagggacaatttatgattttttatgcattagggatttggcgaagccatttcccaatttcaggtacaccccggattaggatttaggtgacttattagatgaagctgcacagcattttccaaagattgaagaagacggatatgatgaagatacaattcgtttctctttaattggccgtccaaatgtaaggaaatcatcacttgtaaatgctcttcttggtcaagagcgtgtaattgttagtaatgtagcaggaacaactcgtgatgctgtcgatacaccatatagtaaagatggaaaagattatgtaattatcgatacagctggtatgcgtaaaaaagggaaagtgtatgaaagtacagaaaagtatagggtacttcgtgcacttagaagcgaatgaacgttctgacgttgtttttgtccgttttaaacggtggaagaaggaattatttaaacaagattaaaaaaatcgcctggatacccctcatgaattcaggacgagcctgtcgttgattcgttgtaaacaaatgggacgcagtgaaaaaagatgagaaaacaatgaaagcatttgaagaaaacattcgtgctcatttccaatttttagagtacgcaccgattgtattcttatctgcaaaaacgagaaaacgtacacaaacgttaataccggttatcgatgaggtaaatgaaagccatagtatccgtattcaaacgaatgtattaaatgatgtaattatggatgcggtagcgatgaatccaacgcccaacgcataacggtagtcgtctgaagattttctatgcaacacaagttgcggtaaaaccaccaacatttgttgtgtttgtaaacgatccagaactattgcacttctcatatgagcgcttcttaaaaaatcgtttacgtgaatcattcggctttgtaggaacgccgattcacattatcgctagagcaagagactaatggagaggatgttgatttt

SEQ ID NO: 10517 - DNA, 507 bp, Bacillus anthracis
atgcatcgcattgacccaagtaaattagaacttgaagaacgtgtagttacgataaatcgggtcccgaaaagttgttaagggtggtcgtcgtttccgctttgctgcactagttgtagttggcgataaaaacggtcatgttggattcggtactggtaaagcacaagaggtaccagacgcaatccgcaaagctatcgaagacgctaagaaaaaacttaatcgctgtaccattagttggtacaacaattccacacacaatcaacggtcattttggcgctggtgaaagtattcttaaaacctgctgctgagggtactggtgttattgctggtggacctgttcgtgcggtccttgaattagcaggtgtacaagatattctttcgaaatctcttggttctaacacaccaatcaacatgattcgcgctactgtgaacggattaagcgaacttaagcgcgctgaagatgttgcaaaattacgcggtaaatctgtagaagagctactacgttaaggg

SEQ ID NO: 10518 - DNA, 1326 bp, Bacillus anthracis
ttgagtgaaattgaattaaaaaggaatgtaatcaagacagggagtgagaagaggattattcttcggtttatactcgctagtctcgttggggtgtttatgtttttcgtaccagttacgataaacggtgcttcgtccattatgattgatcatatcgtatcatggattcggacttcggttccgagcgtcgtaccttattacgcactacttgttatgataatgggtgcgatttatccgttttatacgaaaaaatggaatgtatccctcgtagacatttgtttttctattttaaaagtagtcggcgtcgtttttggcgtactatattgtttgaaagtaggaccagcttggttctttgcgccagacgttgggccgtttttgtatgaaaaattagtaatatcggtaagtttactcgttccaattggctcggcttttttagctttattagtcgggtacggattactagaatttatcggtacgttttgtagacccattatgagaccattatggaaaacaccgggacggtcagcaatcgatgcggttgcttccttcgttgggagttattccttagccttattaattacgaatcgtgtttataaagaaggaaagtatacaacaaaagaagctgctattatcgctacaggtttttctacagtatccgctacatttatgattatcatcgcaaaaacattagacattatgcatttatggaatgtttatttttggactactctcgttgtaacattcatcgtaactgctatcaccgtaagaatcccgccacttagtagaaaaccagatacatatgtaacagaagaaggattcccagagcctgtttataaagagaaaatgctagaacgcgcttgggaagatgcgttagaagtatcaaagtctgcaccgggtattatgaaaaatatcgcggtgaatttaaaagatggatttattatgacaatgggaattttaccatctattatgtcagtaggtttaattggtatcgtcttagcgaaattcacgccaatatttgattggatcagctatattttctatccttttacatgggttttacaattaccagaagcaggcttagctgctaaagcagcatccgttggtattgcggaaatgtttttaccatcattgttagttgtaagtgcaccacttgtgacaaagtttgttattgcggtggtttcggtatcatctatattgtttttctcagcttctattccttgtattttatcgacagatattccgttaaaagtatcggaacttattattctttacgtacaaagaacgattttaacgttacttattattacgccgattgcttatttgttactt

SEQ ID NO: 10519 - DNA, 1893 bp, Bacillus anthracis
gagggataatttatgagacaaatttttagtgacaaaaaaattgatgcgtcgctgtttctacaaatggaaaacttaatgtatgctcttctcaaagaagacgatgcctaccttgagtatggctataaagcatactacgacgaaattgaaaaaaaggttgtcattagtcacttttgggatgatcgaaaagaagaggatacagtaatcggattaaaaagcgaagtgtttttaaaagcacttggtaataaacattactcggacatgactttaattcgttcttatgcaattgaattacaagaatcacccttaaaaaagtttttaacacaattatttgttctattagaagatttacgtgttgaggaaatcgtaaaaaacttacgccctggcacaaagcatgtttttaaaagaagaaaagaaatgtatcgcaattactttagctcacaaaatgaaatcaatcgcgttcgtaactatcacggtgatcgtctattttgtctatgctatctttcattaacgagcgataaatatgaaatgtttaataatgaatatttcgagcaaattgaagctattctgcatgaaacattccaagctcgtaatacagaagatattatgtatatcgttgagaaaattcgctatcgtttagaggagcttcttgaaagtgatatgcttaacaattatttcggacatgctccgctctacttatctgttattgcagatgagaaagacagccgtcctgaaaaattaacaaatgatgatacgcaaatcgttgatgatgaaaataaaaataaaatgaatgaaagcttctcgacatggcatcgtgaaaataaaaacaatgaaaacgagaactttttacgctttgaattagaaagcggtacaaaaacaaatatgatgggtgacactgctcgcgaatcagaagatggtgaccaagcacttggttctgtacaaggtacttctcaaaaaagtacacaatctaactttgatggtgctgatacagaagaagcaagagcttcacacgcttctagtcaaaatgatggtgcatacggtaagtataacgttggtgcttctcatacatttaaagaagctcgcaaatcaactcctgacgagaaaaaggattaccaagccatcaaatcagtggttaataaagatgtaaaagaattaaagaaaattatcgaaaaaacgattgaaaataagacgaatgcaaatagtgataaatattacggaagacttcgtaagaaattccttcgtatttatactgaaaagcagccgcgcatgttttataaaaaaggacaagaatcgcaagagcttgacgttgcattccaactgttagtggactgttctggttctatgtataacaagatggaagaaacgaaaaagagtgtggttctattccatgaagctttaaaatctttaaaaatcccgcacgctattagcggattttgggaagatgcttctagtgcgaaacctgaagataaaccgaacgttatccatgaagttgtaacgtataaaaactcaacgttaccaaacgttggtcccgaaattatgcagcttcgtgaagaagaggataaccgcgatggatatattattcggatcgtttctgaaaagcttgcaaaaagaccagaaaagcataaattcttacttgtcttcacagacggtgagccttctgctttagactatcaacaagacggtattttagatacgcatgaagctgttaaactcgcgcgtaaaagcggaatggaagtaatcggtatcttcatcgaagaaggcgaagcgaaagaagcaacttatcaattaatgaagaacatttataaccatcacttcttagttgcaaatcacgctgaagatttacgtttgaagattaaaccactattgaaaaagttattactgaagacgattgaatag

SEQ ID NO: 10520 - DNA, 567 bp, Bacillus anthracis
atgaatcgtgaggaagcacttcatattgtgaaacaacaaatgcatgaaaaacgttatatacacacaattggtgtaatggagacggcaattgaacttgctaaattatacggtgtggatgaaaaaaaggctgaagttgcagctatattccatgattatgcgaagtgtagagcgatttcagagatggaagagatcattaaaagtgaagatttgccgaaagatttactttgttataacaaagagttatggcatgcacctgttggggcatacttagtagaaaaagaagtaggcattacggatcctgaaattctgcaagctattacatatcatacaagtggtcatgagaaaatgacgatgttagataaagtaatttatgtagctgattacattgaacctgggcgaaagtttccgggggtagaggaagctcgtaaactcgcatatgcggatataaatcaagctttattatttgcgttaaagagaacaattcaatttttaatggaaaaaaatcaaacgatttatccattaacattccaaacatacaacgcagttatcaaggaggaaataagtaaa

SEQ ID NO: 10521 - DNA, 1461 bp, Bacillus anthracis
atgacttattataaagacgatagctatgccttacatacagatttatatcaaattaatatggcttatacatattggaaagatggtattcacaatcgccgctcggtgtttgatttatactttcgaaagcttccattcgagaacggttatgctgtttttgctggtcttgaaaaaattgtagagtacatagaaaacttcagctttaccgaaagcgatatcgcttatttagcagaattacaatttgaagaagaatttcttcattatttacaaaatatgaaattcactggtacggttcgtagtatgcaagaaggtgaagttgtgtttaataacgagcctttattacgtgttgatgcaccgcttggtgaagcacaaattattgaaactgcactgttaaacattgtgaattaccaaacattaattgcaacaaaagcagctcgtatgaagcacgctgcaaataacgatgaacttttagagttcggcacaagacgtgcccacgagttcgatgcagccctttggggcacacgcgctgcctttattggtggtttctcctctacaagcaacgtacgggctggaaaacgctttgggatacctgtagccggcacacatgcgcactctttcgttcaagcttatcgcgatgaatatgttgcctttaagaaatacgctgaaactcataaaaaatgtgtctttctcgttgatacatatgacacattaaaatctggtgtgccaaatgcaattcgtgtcgcgaaagagtttggggatcgcatcgatttttatggcattcgcctcgatagtggtgatatggcttatttatctaaaaaggcaagaaaactactagacgaagccgggtttacaaacacaaaaattattgcttctagcgatttagatgaatacacaattatgcacttgaaatctcaaggagcaaaaattaatgtatggggcgttggaacaaaattgattacgtcctttgaacaaccagcgttaggagctgtttataaactagttgcgattgaagatactgatggaaaattaaatgatacaattaaaatttcatctaaccctgaaaaaattactactccaggacttaaacgaatttatcgcattatcaatcgagtaaacgatcatgctgaaggcgattatattgcattagattatgaagaacccggaaaagaagaacgcttaaaaatgtttcatcctgttcacacgtatataagtaaatttgtaacaaactttgaagctcgcgaactgcataaagacattttcgttaacggtgaaagaacatatgaactaccaagtatattagatattcaaaaatataatgaacagagcctctctctattttgggaagaatatatgcgaactttaaaccctgaagaataccctgtcgatttaagccaagagtgctgggatcataaaatgaattacattcaaacagttcgagaacaagttgaaaaaaacatacaaaag

SEQ ID NO: 10522 - DNA, 1140 bp, Bacillus anthracis
atgagatacattacagcctggagattcacatggcaccgcagttaacagttattttagaaggtgtaccagcaggtttaacgctggcggcggaacatattaataaagaattattaagaagacaaaaagggcacggacgcggaagtacgtatgcaaattgaaaatgaatacagttgaaattgtaagtggcgttcgtcatggtctgacacttgggctcacccattacgttaatcgtaaaaaatgatgatttcaaacattggacgaaagtaatgggtgcagagccaatttcggaaaaagaaagtaaagaaatgaaacgtacaattacgaaaccacgtccaggacatgcggatttaaacggggcaattaaatacggtcaccgtgatataagaaacgtactagagcgctcatctgcaagagaaacgacagttcgtgtagctgctggtgcagttgcgaaacaaattttaaaagaattaggcgtagaaattgcagggcatgtacttgaaattggtggagtaaaagcaaaacatatttcaaacttgtcaattgaagaaattcaaataattactgaaaactcaccagttcgatgtttagataaaacagtagaacaagagatgatggatgcgattgataacgcaaaaagtagtggagattcaatcgagtcgtatagttgaagtcattgcagaaggtatgccaattggcgtcggtagttacgttcattacgatcgtaaattagatgcaaaacttgctggtgcgattatgagtattaatgcatttaaaggtgctgaaattggcgttggttttgaagcggcaagacagccaggaagtaaagtgcatgatgaaattttatgggatgaagaaacaagatacacgagaaaaacgaataatgccggcggtttagaaagcggtatgacaaccggaatgccaattgtcgctaagaagtgtaatgaaaccaatacctacattatacaacaccgttagacaagtgttgatattgatacgaaagaagcaattcaagcgagtattgaaagatctgattgctgtgccgtaccaccaacaaggggaattaactggaactgttggagcatggggaacttgcacatgcactagtcgaacaattcggaaaagatcgtatggagttaattc

SEQ ID NO: 10523 - DNA, 219 bp, Bacillus anthracis
atgagacagaaaaaggagcagaagaaacaatcgaaaaagaaaaagactcatattccttttcggttaaatgtactattttatatcgtctttcttttattttcagctattataattcaattaggtaaagtacaaatcattgatggagaaacgtatagaaatgaagtgaacaaaaaggaagatgtaacggtaagtacacctgttcctagagggaaaatgttt

SEQ ID NO: 10524 - DNA, 362 bp, Bacillus anthracis
caccttgttgaatatatttgaaatccaataaaaaagagcttgtgtcaaaacataaactctctttaagttgaaacgaatattgcacacccctttagataaggacacggtagaacgacttagaatatggctagatttaatatttaaaaatgaacttcatcaggtggtcgactggaataaaattgataaagaagattatttactggcaatggaacgcagctcctcctaaagaattgaaattaagcatttactccaaaatgcactagtagatgaaataatatagtcgtgaaatattcatgaaaggtattaatatgagttactattatgagggatataccgaatatgatatagaggatttataaaac

SEQ ID NO: 10525 - DNA, 1451 bp, Bacillus anthracis
atggaatttgatacaattgccgcgatttccacagcgcttggagagggtgcaattgccattgttcgagtaagtggagatgatgcggttgaaaaagttaatcgtattttttaaagggaagagtttacagagggtcccttctccacgaattcattatgtgcatattgtggaatttgaaacaaaccaggttattgaagaagtgatggtatctattatgcgtgcaccaaggacttttacacgtgaaaatatagtagaaattaactgtcacggtggaacttgttttcggtaattaagtattgcagctcattttagcgcaaggggtacgattaccagagcctggtgaatttacaaaacgtgcttttttaaatggccgtattgatttatcacaagcagaagctgttatggacttaatcccgtgcaaaaacagatcgtgcaatgaacgtagcgattaatcaaatggaaggacgattatctaaattaaattggtcgtctgcggccagatatattagaaaacgttgcctcttgtttgaggtaaacctagatttccccagaaattgatggatgtgggaggaaatgacacataatattttaattgaggaaagctacacatgtttcgcgctgaaattggcaagaatattagaaacatccaagcaaggaaaggattttaggggaaggtattgttactgcaatcatcggtagacctaatgttggggaagtcatcgctattaaatagtctcgttcagggaaaaaaggcaattgtaactgatatggcaggaacaactcgtgatgttattgaaagagtacgttaatgtgcgtggggtaccacttaaacttatagatacagcggggattcgtgaaacggaagatgttgttgaacgaattggcgtagagcgttcaaaagaaatgatgagtcaagctgatttagtgttagttgtcgttaattatagtgaaaactttaacgaatgaggatgaagagctattccgtgccgtacaaggaaaagatttcattgttattgtaaataagacagatttaccgcaagcaattgatatggaacgtgttatagaattggcagcgggaaatcggtgttattccaacatcgtttaatgaaagaccaaaggattagatgacctgaaaaaaggcaatagctgatttattctttgaaaggaacaattgattctgcagatgtaacatatgtttctaatgcgagacatattgggttttttcccccaagccggaaaacccaattgggggatgcaattgaagggggataagaaaaatgtgtgttccaatttgatatggtggcaaaatgatttaaacaggaaccgtgggaaaatacttggtgaaattactgggtgatacggttcatgaaaagccttaatggaccagttgtttttctcaattttgttttaggaaaaataatatagtgatgtttcagaaagataaagattattta

SEQ ID NO: 10526 - DNA, 424 bp, Bacillus anthracis
ctacagggcattaaccatatttgtttttctgtatcaaacttggaaaaatctatctgaattctatcaaaaaatacttcaagcaaaattattagtaaaagggtagaaaatttagcgtattttgatttaaatggattatggattgctttaaatgtgaagaaagatataccaagaaatgaaattaagcaatcttatacacatatggctttcactgtaactaatgaagcattagaccatttaaaagaagtattaattcaaaatgatgttaatattttacctggccgagaaagagatgagagagaccaaagatctctttactttacagatccagatggccataagttttgagtttcacactgggactttgcaaaaccgggttgagtccttttaagaagaataaaaacctttgactttttacatataataa

SEQ ID NO: 10527 - DNA, 1336 bp, Bacillus anthracis
tttttttaggcggggatataacggaaatgcccccatggtaagagttccatcgaaaagcattataagggcgctttacatgaaccgaaagaacagtctagaagcattccggataaagcaggaaatattatcggcacagaaaaagtacccgaaggaaaaagtggaaataatttaatgtaaccagtggatatggagttacagaaaaaagtagagggaagtcttgaaaagaatttacgagcatttcattctgcagagccgatgatggatcgtgcattcgttgtaatgatgaatccgaaaaacggtcaaattttatcgatggcaggaaagaaaattgtaaataaagatggcgggatgcaaatagaagactatgctttagggacgatgacaagttcttatgagttagggtcaactgtgaaaggggctacattattagccggctatcaaactgacacaattaagccgtatacgcatttctttgatgcacccatgtattttaaaggaagctctaagccgaagaaatcgtggaaagactttggtgatattgatgatttaagagctttacaagtttcatcaaacgtatatatgtttaatacagcattaaaaatggcaggtataaattatgtgccaaacaatccattagacattaaacaagaaacatttaataaaatgcgctactattttagacaatttggtttaggtgtaccgactggtattgacttgccgaatgaaatccgtttggtcagatggggtaggaacggattaacattccctggtttttttacttggattaatgcgatttgacaagttcggataccatataccgccggttcagcttgctcaaatatatttcaacccattgcaaacgggtggttaccgaatgaaaccgcaaattgtgcaagaagtgagagaggccacccacctaggcccagaggtatgttgaaaaatttattcgatctattgacccagttattttaaatcgagtggatatgaacccttcatacattaatcatgtaaaagaaggatttagaagagtttttcaagagaatgacggaacaggtactgcaacgtttaaaggattaccgtataaaccagctgaaaaaacagggacagctgaaactgtgtatggcggagaaagtgaaattggaagagatgaaaacaataatcgaaaaaatgttataatttaactcttgccggttatgcgccgtatgatgctgatccggaagtagctttttcagttgttgtaccatgggtgaatgatgacaaatcaggaattaattccgcgattggtaaagagattttggatgcgtattttgaattgaaagcgaaaagagcaggtgga

SEQ ID NO: 10528 - DNA, 453 bp, Bacillus anthracis
gggtctttccgtcctgtcgcgggtakcctgcatcttcacaggtactataatttcaccgagtctctggttgagacagtgcccaaatcgttacacctttcgtgcgggtcggaacttacccgacaaggaatttcgctaccttaggaccgttatagttacggccgccgtttactggggcttcagttcagagcttcgcttacgctaacccctctccttaaccttccagcaccgggcaggtgtcaccccctatacttcgccttacggcttcgcagagagctgtgtttttgctaaacagtcgcttgggcctattcactgcggctttccgttaagaaagcaccccttctcccgaagttacggggtcattttgccgagttccttaaccagagttctctcgcacaccttaggattctctcctcgcctacctgtgtcggtttgcggtacaggcaccttttatct

SEQ ID NO: 10529 - DNA, 821 bp, Bacillus anthracis
ctgggaggatatatcatgtaactattaccaagggaaaattttgttgttatgggggttgcgaacaaaaaaaaaattgctggggggaatggtcgctccttgcttaatgcaggggcgaaattaatcttctcctatggcggggaaaaggttaaagagaaaagttcggggaatttacgggtacattataaaggacacgaatcacttggtattccctggtgagggaccaaagggaggaaaaacttccggcctggttttgaaaccattaaaccagaaattgggaccattccccgtgggtgcacccgggaatggcttttgcaaatcgtgacgacttaaaaggtgaatttgtagatacttctcgcgatggatttttactttgcccaaaatattagagcattctcttttacagctgtagcaagaggaacgaagaaagtaatgacagaaggcggaaattattttagcgttaacatatttcttgggcggcgaagcgcgtttggaaaaaacctaaaacgtttatggggtgtgcagaaagcttccattaagaagcgagccgggaaaatatttagctaacggttttaggccaaccacggctttcgcggttaacgctattttgcagggtccaatttggtacgttatctgccaaaggtgtaggcgcctttaactcaatcttaagagaaattgaggagcgcgcaccacttcgtcgtacaacaacgcaagaagaagttggggatacagcagtattcttattcagtgatttagcacgcggcgtaacaggagaaaacattcacgttgattcagggtatcatatcttagggataaatataata

SEQ ID NO: 10530 - DNA, 444 bp, Bacillus anthracis
ttgaaaaataaatttcatcatattgtacgagctgttatgataaaggataaaaaattgatagtagctgaatatattggccatcattattttctaccaggtggtcatgttgaagttggcgaatcagctgagagtgcattaataagagaactacaagaagaacttggagtaaattgtagtataaaacaatttttaggagtcatagaaaaccaatggcaagataaagaaatgcttcatcatgaaatcaatcatatttttgagatagattcagaagagttacatattgatttcataccaaaatctaaagaacctcatttagcgtttcactggatagattataatcgagacgctttacatacttataaaatcatgccagcaccttccgttaaagagttactagaaagaaaattaagtgatgaactactaaactgttggattagcaatttt

SEQ ID NO: 10531 - DNA, 171 bp, Bacillus anthracis
atgtcaaaaacagtcgttcgtaaaaacgagtctttggaggatgcacttcgccgttttaaaagatcggtttctaaaactggtacacttgctgaagcaagaaagcgcgagttttatgaaaaaccaagtgtaaaacgtaagaagaaatctgaagcggcaagaaagcgtaaattc

SEQ ID NO: 10532 - DNA, 220 bp, Bacillus anthracis
tcagcagcaaacctttacttctgctaaaaaggtgagccaattaacgttggctgaaagtgcaatgatggctgctgtagtaaaggcacctgcttattactcacctgcacaaaattacgataaagcagttgagagacgaaacgtcgttttgagattaatggagaaagaaggctatatcaatctgctacaagtagatgcaagcagttagtgagaaattagtcat

SEQ ID NO: 10533 - DNA, 1539 bp, Bacillus anthracis
atggtgagttcaaaatatatgattggtgtagacattgggacaactagtacaaaatcagttctattttctacagatggatctgttattgcaagtcatggaattgaatatcctttatattctcctacgccggaaacagcagaacaagacccagaagaaatttttcgtgcagtaatacatacgattaaagaaactgtacagacaagtagtgtacagccgcatgatattctttgtgtttcttttagttcggcaatgcatagtatcattgctgtagatgagaagggaaagccgttaacgagatgtattacttgggcagataatagaagtgcaagctgggcagagaaaataaagaatgatatgaatggtcatgaaatttatttacggactgggacaccaattcatccgatgtcaccactttcgaaattagtttggctacaaaatgagcaggcagaattgttcgcaaaaacttataaatttatttctattaaagagtatgttttttataagttatataaggagtatgtaattgattattctatagcatcagcaacagggatgtttaatttgaaatctttaaaatgggatgaagaggctttacatgttgcgggaattacagatgataaactttctaaactcgttccaacaacgcacagtttaacaggattagatgaagagcttgccaatgagatgaatgtacttgtttctactccatttgtagtaggagcgagtgacggaatcctatccaatttaggtgtaaatgcaattgatcctggtgttgtggctgttacaattggtacaagcggtgcgatacgtgctgtaacaaatcgacctgtaactgatccgaaaggtagaattttttgttacgccctaactgaagaccattgggtaattggcggaccagttaataacggtggtatgattttcaggtgggctcgtgatcaattaggtacttcagagattgagcttgcgaagcgcttaggaaaagatccatatgaagtgcttactgaaatagcagcaaaagtgaatccgggatctgatgggttattatttcacccgtatttagcaggagaaagagctcctttatggaatgcaaatgcgcgaggatcattctttggacttggattgcaccataagaaagaacatctgattcgtgcagttttagaaggggtaatttataacttatatacagttcttctcgctttaaaagaactcattggcgaaccgaaaaaaattcaagcgacaggcggttttgcaagatcggaactttggagacagatgatggcggatatttttcaccaagacgtatatgttcccgaaagtttcgaaagctcttgcttaggagctgccatactcggcttatatagtttaggtgaagtagatacgttacatgtagtttctgaaatggtaggtgcgaatttccaccatgaaccaaacatggaaagtgtggaaaaatataaagatttaacaccaatctatattcgtctgtcccgtcaattggaagaagaatatgaaagtatagcagattatcaaaaaaagtgggtt

SEQ ID NO: 10534 - DNA, 439 bp, Bacillus anthracis
atgcgtacgacttttatggcaaaagctaacgaagttgagcgtaaatggtatgtggttgatgctgaaggtcaaactttaggtcgccttgctagtgaagtagcatccattttacgtggtaaaaacaaacctacatttacaccacacgttgacacgggtgatcatgtaattattattaacgcttgagaaaattcatttaacaggtaataaattaaacgataaaatttactaccgtcacactaaccacccaggtggacttaaacaaagaacagctcttgaaatgcgtacaaactaccctgtacaaatgttagagcttgcaattaaaggcatgcttccaaaaggacgcttaggccgtcaagtttctaagaaactaaacgtgtatgctggagcagagcatccacaccaagcacaaaaaccagaagtttacgaacttcgcggataa

SEQ ID NO: 10535 - DNA, 873 bp, Bacillus anthracis
atgatttgtagtatgacaggatttggaaggtcgaaagtagaaagtgatacttttcaaattacagtagaaatgaaatcagtgaaccaccgttttctagagatgagtattcgactaccgaagcagatgatggtatttgaagacaaaattcgtaaaataattgcacagcaagttcgccgtggacgcattgaagtgtctattagtatagcgggtgaagggcttgttgaaagaaaattaagtgtgaattggtcgcttcttgagcagtaccaatcaattatggaagatataaaaggaaaatttcaattacaagattctattacactcgagcaattaatggcaatgccagaagtaacagcgattgaagaggtagaaaacgtaaatgaacaatttgagaacagtttatatgaggctgttcgccaagctgctcatatgttaaaaacgatgagagatggcgaaggagaacgattacataaagatatagcgtatcgtttacaagagattcacaattgtgtaaatgcgattattccgcatgcaccaattgttacaaaaaaatatcgtgaacgattagaaaatcgcttaaaagaattacataatcaagatctagatgaacaaagattgctaacagaagttgcaatctttgctgaacgttgtgatattcacgaagagttagttcgtttgcaaagtcatttagaacaattccgtgaaacactgcagattgaagaacctgttggaaggaaaatggatttcatcgtgcaagagatgcatagagaaattaatacgattggttctaaggcaaatgacttaacaatttcaaaatatgttgtagaaatgaaaaataaccttgaaaaaattcgtgaacaagtacaaaatattgag

SEQ ID NO: 10536 - DNA, 1147 bp, Bacillus anthracis
atgtcacattcaatcgaacaactttctatcaccacgattcgcacattatccatcgatgcgattgaaaaagcaaactctggtcacccaggaatgccaatgggtgcagcaccaatggcttatacattatggactcaatttatgaaacacaatccaaataacccaacgtggtttaaccgtgatcgtttcgtattatctgcaggtcatggttcaatgttattatacagcctacttcacctatctggttatgatgtaacaatggatgacttaaagaacttccgtcaatgggaaggcaaacctccaggggcatcctgagtacggtcatacagctggtgtagatgcaactactggtcccactggacaagggtattgcaactgctgtaggtatggcaatggcagaaagacatttagctgctaaatataaccgtgatgcgtataatatagtagatcattatacatacgctatttgtggtgatggagatttaatggaaggcgtttctgctgaagcatcttcattagctgctcatttacaattaggtcgtcttgttgtgcttatgatttcaaacgatatttcattagatggcgatttaaatcgttcattctctgaaagtgtagaagatcgttacaaagcatacggatggcaagtaatccgtgttgaggatggaaacgatattgaagctatcgcgaaagcaatcgaagaagcgaaagctgacgaaaaacgcccaacgctaattgaagtaagaacgacaattggtttcggttctccaaacaaatcaggaaaatcagcttcacatggttctccacttggtgtagaagaaacaaagttaacgaaagaagcatacgcttggactgctgaacaagacttccatgtagcagaagaagtatatgaaaacttccgtaaaacagtacaagatgttggtgaaactgcacaagctgagtggaatactatgctaggtgaatatgcacaagcatatccagaattagcaaacgaactgcaagcagcaatgaacggtcttcttccagaaggttgggagcaaaacttaccaacttatgaattaggatcaaaagcagcaactcgtaattcttgcaagtgctgtaattaatgcaattgcagagtagtaccatcatcttcgggatcttccagccactg

SEQ ID NO: 10537 - DNA, 219 bp, Bacillus anthracis
atgggatggctcataatcgttgctattaaaccactttatgaaaatctaactggacatggtttttcactacttttagcaggtggaattttatattctgtaggagctatattcttcctttgggaaaagttacctttcaatcatgccatttggcatcttttcgtattaggtggtagtgcaatgatgttcttctgcgtactcttttacgtcttacctacagca

SEQ ID NO: 10538 - DNA, 1469 bp, Bacillus anthracis
gacaaagcgtttgaaggacaattacaagttttattagaagagaaagaactttctacgaagaagaaagctatttcaaaagtacatagtttaggaaaaacagatgtgaaacgttattatttcgtggggttaaggaagaaaaaaatcttttacgaaagaaaaatttacggttccggtcttggttaaaacctttaaaaacctgccaagccgccaaagtacacgaatgccgcaatctttcctggattctttccgaaacaagaaaatataaccccattgatgttcgcccaaatttggggcaaaaataaaaaggccttggtacatatgagttacaaacgtataaatcagataaaaaggatcgtgtagagttagagaagtttacggctattacagcggaagatgccccgggaaattgaaggggcatttaccagtgggttacgtacatggagggccaccaaattcagctcgtacacttgtaaatatgccgcccaaacgtattaacagcaaccaagccttgctgagtatgcttttgagttagcgggaaaagtatgatatggaattataaagttcttgagaaagaagagaggaaatgagcttgggtatggggtgcattacttggcggtaacccaaggtagtgttggagcccccaaaaatgatcgctcttatttataaggaaaaagaagagtggacagatgttattggattcgttgaaaaaggaatcacatatgatccaggtggttattctttaaaaaccacgtgaggttatggtcggtatgaaaggtgatatggccggtgcagctgctgtattaggtgcgatggaaattatcggtgaacttccgcccagagcaaaatgtgatcgctgttattccatcaacagataacgttgtaagtggtacagcatttaagccagacgatgtaatcacatctatgagcggaaaaacaattgaagtattaaatacagatgcagaaggtcgcataagcataggctgacgggtattacgtatgcgaaaaaaataggtgcaaactatttgattgatgtttgcgacattaccaggtggtgtaatgtttgcacttggaaatcatacgacaggtgcgatgacaaaacatgaagaagttgttttgagcaagtactagaggcattctatggaaacagatgattctatttggcaatttaccgattttgaatcgtgataaagagcgcgtgagaaccagtaagtttgctgatttaaataactcgccagggccgcgaagaacatgcgtttatggcaggtccattcataggtgattgcgctgaagatacactttgggtacacttagacatcgctggaacatctgattcatcaggagcgcatgatttaggaccagctggagcaacaggtgcaatggtacgtacacttgcaacacttgttgaacgtttcggcgaagaataagattataagagaaggctgttcctacattttggaacagccttttta

SEQ ID NO: 10539 - DNA, 810 bp, Bacillus anthracis
ttatcattacttctgttcctcggtggctgtgataaaaaactcgcagtattaaatccgcaaggacctgttgcaaaagcacagtatgatttaattgtttggtcattcttgcttatgtcattaattatcgcaattgtattcatcttgtttacagtcatcttgattcgttatcgtgaaaaaccagagaatatggactatgagccacctgaacaacacggtaacacattattagaaatcatttggacgcttgttcctgttattatcgttatcgcattatcgattcccacagtaaaagcaacttaatgcttcgcgaagaggttccgaaagagtcccaacctatttaaccagctggagaattatgttacatctgcaaactggaaatggttattcagttacccagaggaaaaaattgaaaccgttaactatttaaacatccccgcttggtgtaccaattcaattcaaactgacttctgtcggcccaatgaatgcttttctgggttaccaaaacttggtggtatgaagtacacaatggatggcatgattatggacctttatttacaagctgataaaccagggtcttaactaagccgtaacgcgaacttcttctggtggaagaattactcactgggagttcgaaagtgaaagcaaaaactaaagagaaatatgacaagtggggttaagaaatacaacaaactgctccctaactaacagaagataagtaccacgaaaattgttaaaacctggtgtagttgggtcgtatgacatttctctagccatcactttagttatgtagattccaaaatcacttgaata

SEQ ID NO: 10540 - DNA, 120 bp, Bacillus anthracis
atgggctatgaagtaacggcaacgggaagaaataaaacaatcggtaaggtattagaacaaaatggaatcaagtttgttcattgtcctcttgaagacagggagccggtggttacaagtttg

SEQ ID NO: 10541 - DNA, 1104 bp, Bacillus anthracis
ttgactgaaacaattaaatgtattggttgcggtgtagaaattcaaacagaagataaaaatgaagtgggatatgctcctgcctcatctttagaaaaagaacaagtaatttgtcaacgctgttttcgattgaaacattataacgaaattcaagatgtctcattaacagatgatgatttcctacgtattctaaacggtattggaaaatcggatgcgttagtagttaaaattgtagatatttttgactttaatggtagctggttacctggcttacatcgtttcgtgggaaataataaagtattacttgttgggaataaagcggatttaattcctaagtcagtaaaacatgataaagtaaagcactggatgcgctatagtgcaaagcagctaggattaaagccagaagatgtctttttaattagtgcagcgaagggacaagggattgctgagctagcggatgcgattgagtattaccgcggcggaaaagatgtttacgttgttggatgtacaaatgtagggaaatcaacatttattaatcgtatgattaaagaatttagtgatgagactgaaaatgtaattacaacatctcattttccaggaacaacgcttgatttaattgatatcccgttagacgaagaatcttctttatatgatacaccaggtattattaaccaccatcaaatggctcattacgttggaaaacaaagcttaaagcttattacaccaacaaaagaaattaagccgatggtgttccaattaaatgaagaacaaacattgttctttagtggactggcacgttttgattatgtaagtggcggtcgtcgtgcatttacttgtcacttctcaaatcgcttaacaatccatcgtacaaagcttgagaaagcagatgaattgtataaaaatcatgctggggatttactaagcccgccaacaccagaagaattagaaaatatgccagagctagtgaaatacgagtttaatattcgtgaaccgaaaacggatgttgtattctctggattaggatgggttactgtgaacgaaccaggagcaaaaattgttgcacacgtaccaaaaggagtaagtgtttcattacgtaaatctttaatt

SEQ ID NO: 10542 - DNA, 1362 bp, Bacillus anthracis
aaaagaaaacaaaatttcacatgtcaagagtgtggttatcagtcaccaaaatatatgggggaaatgtcctgggatgtggtcaatggaatacgcttgttgaagagatggaacccgggtgtatcatcaagacgcctttattatgccaatggcatttcaacagaaagtaccaaaaccaaggcgccttacagaagtgggaacaaagtctgaggcgcgtatttgaaacaaaattccaagaatttaaccgtgtacttggtggtgggattgtagatggatccttagtacttattggtggagaccccgggattggaaaatcaacgttactattacaaatatcatcgcaattagcggattcttcatatgatgtactatatatatcgggtgaggaatcagcaaaacagattaaactgcgtgccgatcgtctacatgtaaatggtagtaatctatttgttgtatcagagacggatttacagcgaattgcaaccacacattgaagagatgaacccagcctttggtgttattgactctattccaacaatacatttacctgaagtaacatcagcggcgggggaatgtggccacagttcgtgaatgtaccagcggaaattaatgaaacttgcaaaaacgaaaggaatccctatttttatcgttggacatgtgacaaaagagggagcaattgcaggacctcgtatgttagaacatatggtcgatgcagttctttattttgaaggagaccgtcatcatacataccgtattttgcgagcagtaaagaatcgctttggttctacgaatgaaatgggtatttttgaaatgaaagaacttggtcttgcagaagtattaaacccttcttgaaattttccttgaggaaagacccagtgggggttgcgggatcaacagtggttgcttcaatggaaggaacaagaccagttttagtagaaatacaagcattaaatctctcctagtagttttggaaaccctcgaagaatggcaacgggaattgatcatacccgtgtatcgctatattatggcgggtgttagaaaaaagaacaggcttattattgcaaaatcaggacgcatatttaaaagtagcaggtggtttgaagttagatgaaccagctattgatttagctgtcgctttaagtatagcttcaagtttcagagataaatctacagcaccaaccgatgcagtaataggagaagtaggattaactgggagaaattgtcagagtatcaagaatttgacaacgtgtacaagaagcagctaaattaggatttcaacgtgctattattccctagaaaaaatttgggaggatcgacattcctcgatgggcatgacgtagtccgtgtatctaagtcaagagaagc

SEQ ID NO: 10543 - DNA, 933 bp, Bacillus anthracis
aatgtgaagaaattgttacaattattcgttggatattacaaaatggaaagaaattattcaaaaatatccaattgcaagttatcaaaatgatttgagaccattttgtgcaatttatggagcgagaagggtatatcctcttttttagatattacatacgcggatgttcgtttgtacttaacgacgttgccaggatgaaaagttagcccgtaaatctgtcgcaagaaaagtatcaagcttacgaagttataatcgctttttgatgggtggaaggtatcggaaagaataatcgttttgcactgcggtcactccccaaaaaaggaattgtcaaatccccaaagttttttatatgctgaagaattagaggaattgtttgaagtttcttgactcagaaaccccgttaggtcaaaggaatcaagctttattagaattgatgtatgcgactgggatccgtgtgagtgaatgtgtcaatttacaactgaccgatattgactttgcagtgggaacaattttagtaatgggaaaaggaaaaaaacaaagatatattccgttcgggagctatgcacaagatgctttaattacttatatagagaacgggagaaaacagttagccgaagaaactgaagaaacatctcatatggtatttttaaatgcgaaaagtacgccgcttgacagtcgaggggtacgctatgtatctaaatgaactcattaagaaagcttctctgacaatgcggataagtccccatatattaaggcatacatttgctacacatatgttagatgaaggggcagatttacgtactgtacaggagctactcggtcatgaaaatttgtctacgacacaaataaaatacgcatgtctctaaagaaagattgcgttctgtctacatgaagcatcacccacgggcataaattgcttttaaagctataaaaaca

SEQ ID NO: 10544 - DNA, 486 bp, Bacillus anthracis; identical to SEQ ID NO: 9192

SEQ ID NO: 10545 - DNA, 468 bp, Bacillus anthracis
atgagttggtcaaaagtaaaatacttcttttttgatacacctgaagaaaaagaagcagctcaatatagttatgaaaaggagcaaacagacatgaagaagcagcaagatccgccagaacaacaagatgttacgtttccaaaagcgcaaccgaaacaaaatgttgtgagcattgaaacagcaaagcaatcttcaaaagttgttttattagaaccacgcacatattcagaagcgcaaggaattgcggaccatttaaaaggtagacgagctgttgtaattaatttacaacgaatgtctactgatcaagctgtacgtatcgttgactttttaagtggtactgtatacgctataggcggggacattcaaaaaataggaccgaaaacatttatgtgtacgcctgaaaatgtagatattgttggtgcaatttcagagttattcggtgaagaagacgacacaaatataaagaggtgg

SEQ ID NO: 10546 - DNA, 3203 bp, Bacillus anthracis
atgtatgctagcttttcttgtaatgccatacgggaatgcttcagcaaaactagctgatggtacttacgatattaattacgtaattcaaaaagcggaaaatgattcagcttcaatggcaaatgactattttgaaaagccagcaaaattaatagtgaaaaacggtgagatgagagtacaagttccgatgaatcatagtgcttggattacagaatttaaagcaccagagaacgggaattttgttgatgcgaaagttgttagtaaagatgaatcggcagataaaagaacagtagagtttaaagtagatgatttatcaaacccggcagttgtaaaatttcatgttgttgtaccaaaatgcaaattatgccccccccctacacattcgtttttgcttttgatgcaaatgtaaaagctgtaggtggcgataacggcgtagctgctacaacaaaaaataatgatcaagcgaaaacagatacacaagtaaaagaagagaaaacaaaagtagagagtaagggaaacagctaaagaagtgaacaaagaaacaaaaaatgaaaatggaaaagctgaaaaaacagataatccaaaaacaggcgatgaagcacgtattggattgtttgcagcgttaattcttatttcaggtgttttcttaattcgtagagtgaaattgagtaaataaatcttttgaagggtgatgaatatatgtttaaacaatttaaaatgattattgccgtatttgctgtttttattacgtttattgcaacactaggtttaccagatgcaaaggctgctacaaaactagctgatggaaaatataatatttgcttttactgtatggaaaaggcgataaagaatgaatccgtctaggaatgaataaggtatttttgaaaagccccagcaaccatttaacggtttaaaaaatggggaaaacaatatgtttcatttaaagtgaaagcatagtacttctattaaaagtttccaagtagaaaaagatggtcaatttgtagaaacaaccgtgttaagtgaaaacaaaaaagataatttctagagtagtagaatttgaagttgctgacttggtcaaaaaactaaatggcaaggtgaaaattaatattccaattaataattataatgcttcatatgatatttcgctttgtatttgatgggacacagtattaaataattttcaaaagggaggagttgtttcatttgaccaggttatacaaaaaatcatggttgctatgttttttaatgatatttacattcgtatcaacattacaaccacttgcagttcaagcagctaccaagttggctgacggtgaatattcaacttgggttcaaagttttaaaagatacatcagatgaagaatcgatgatgaatcaatattcagtaagccccgggactttaaaagtgaaggatgggaaaaagaaagtatcctttacattaacgaatagttcatggattacgaagtttgaaacagaaaaagcaggtaagctagttgcgacaaatgtaattagtgaagataaagaaaaagatacaagagtagtagaatttgatgtagaagatgtagagaaggtattaaatgcaaaagtaaaagtagatattgattttttaaattatcatcatgagtacgacgttcgtattgcatttgatcaaaatagtattacaccgattcatgtggaacaaccaaatgaaaaagaggacccagctaataagccagatccaaatgaaaaaccggatttcaagtcagaagcccgaccaaaagcctgacccagatcaacaaccaaattctaacacaatttaaagatggagagtacagcattcccatttaaagtgttaaaacatccaaccggatgaagaaatctaagatgaatactttacctggtaaatcccgggagtattaaaaataggaaaccggtaagaaaaaagcaattgttaccttaaaaaagtagctccattatttaaaaatttccaaacggaaaaaagatggtgcatttgttgacgcaaaaagtaaaaagtgaaaataaagaaacagttccaaggattagtggagttcgaagtagctgatctatcaaaaaaactaaatacaaaagtatttattgagatgtcatcaagaaattataaacaaacgcatgatgtacaacttttatttgaacaagataaacttgaacaaattaaaaatgaagagaaacaaccagaggtagaaaaaccggaagtagaaaaaccagaagtagaaaaaccagaagtagaaaaaccagatgaaaataaaaaaacagatgctgaaacaattaaagatggtgaatacagcatcaattttaaagcgttaaaagatcaaacagacgaaatttcaatgatgaacacatatacaaaaagtccaggtttgctaaaagtaaaagatggtaagaagtatgtatcatttacgttaacgaacagttcttggattacaaaatttgaatttgagaaaaatggttcgtttgttgatgcaaatgtaataagtgaagataaaaaagctgatacacgtgtagtggaagtagcagtagacgatttatcgaaaaagttaaatgcaaaagtaaaagtagatatcgattcaatgaattatcaccatttctatgacattcaatttgcatttgataaaggtagcattaaaaccgttagacatctccaggcggaaacgacaaccaagggcggaatcaataaccaaggtggaaacaacaaccatgacgataacaaaacaattgatcccaatgctcttaaagacggtgaatacagtatcggttttaaagtgttaaaggataagactgaagaaatttcaatgatgaacacatatacaaaaaatccaggtgtgttaaaagtgaaagatggtaagaagtatgtatcctttacattaacaaatagctcatggattaccaagtttgagtttgagaagaatggtgcgttcgtcgatgcgaaagtattaggtaccaataaagagccagatcccaagagtagtagaagtggaagtagctgatttatcgaaaaagttaaatgcaaaagtgaaagtggatattgatttcatgaattatcacccatttctatgatattcaatttgcatttgataaaagaaatattaaatctttatggtaaccaaggtggagatactaaccaagatggtaatggtattccaggggggaacgcacacccagggggggaagtacccccccgggttatacca

SEQ ID NO: 10547 - DNA, 966 bp, Bacillus anthracis
atgttcaaaattggataccgtacagtaaaaacagcaatagggacaggcgcagccgtttttattgcccagttattagggttagaattttatagttcagcgggtattttagttatattatgtgtacaaaatacgaaacgtaaatcacttcaagtatcattacatcgttttttagcttgtgtattatcaatggtgttcgcgttttgtatttttgaaacaattggatatacaccactagcaattagcgtactattacttacatttattccgactgcagttatgctcaaaattcaagaaggtattgtcacgagttcagttattgtgatgcacctatattcattgaaacaaattacatggcttattgttgggaatgaaattgctatattaacgatagggattagcgtggctctattagtaaatatgtatatgccaagtagtgaaaataagctaaaagagtatcaagagaaaatagaaaataattttaaaacgattttgtttgaaatggttgtgtatttacgaaaccgagaaagtagttggagcggggcagaacttattgaaactgaacagatgctaaatgaggctagagatttatcatttaagaaacttgagaatgcatttatgcgagaagatgactattactatcgctatttcaatatgcgcatgcaacaattcgaaattttagagcgaatgattccgttagcagcttctttatcgtggacatatgaacaagctgatatgattgcggatgtggttgaaaacattggaaatgctattagccctcagagtaccggagttatttctttaagacagcttcaagaaatgagagaattatttagagatatgccattgccggctacacgtgaagaatttgaaatacgtgcgaaacttgttcaacttgtgtatgaaatggagcaatatttactcattaaaagtcgttttaagggaaaggataatataaaagaacttata

SEQ ID NO: 10548 - DNA, 349 bp, Bacillus anthracis
ggaaaggtaatgatcgagcaaggtaattttattaaattccatgtccgggttaagttagaggtgccagaatcattaacccatccatttattgggacagaagataaaaggttttatcatcataacggtttagattatatagcgattattagggcgtctgttgagaatataaaagctggtggtgttgtgcaaggcggtagcacaattacacaacagttatcaaaaaatgcttttttaacgaatgaacgtacattttctcgtaagtggaaagaaattttttatacgaaaaaaattgaacgtacatttacaaaggatgaaagtaaaaaaattatatgtaagtaatatttattgg

SEQ ID NO: 10549 - DNA, 941 bp, Bacillus anthracis
attgaaggtgtagtattattacataagcccaaaggccatgacatcacatgattgtgtattttaattaagaaagataattgcgtgagaaaacaaaatgggtcctacgggaacattaaatcccgatgtaacacggagtattgtcgaatttgtgttggggcgagcaacaaagattgcgcaattttttacgagtgggacgaaaacatatgaagggtgaagtgacattagggtttttcaacaacaactgaagatgcttctggtgaagttgtggaaacgaaatatgtagatcgtgttattactcgtaaagaagtggaagagggctcttgcgacattaacaggtacgattgagcaaatgcctccgatgttttcggctgtaaaagttaacggaaaaaaattatatgaatatgcaagagcaggacaagaggttgaacgtccagttcgtacaattacaattcatgaatttgtattactagatgaccgtgaagtgtttgaaggagaaaatatttcattcagtttcacgtgtaacgtgtagtaaaggaacatatgtaagaacattagcggtaatgattggtgaaaaacttggttttccatcacatatgtctcaccttgtaagaacggcttctggtgaatttttattagaggattgcatatcatttgaagaaattgaggaaaacgtgcaaaatggaacagtagagtctatcttcatttcaattgatgaagcattaagtaaattcccaaaaatggttgtagatgaaaagcaagcagaaaaaataaagaatggtatgttcttaaaaaatgaattgcaaataacggcgccatttataacagtgtttgataaaaacgattgttcccttggcaattttaggagcaccttccaaagcacccttgttatgttaaagccgatgaaagttcttgtgaataatcaagaactaaagctataatga

SEQ ID NO: 10550 - DNA, 873 bp, Bacillus anthracis
atgaaagattatttagtaaaagcgttagcgtttgatggagaagtgcgtgcgtatagtgtacgtactacaaacacggtaagtgaggcgcaaagacgtcatgatacatggagaacagcttcagcggcgcttggtcgttctttaactgcaggtacaatgatgggggcaatgttaaaaggtgaccaaaagctaacaattaaggtagaaggaaatggtccgattggtcctatcttagtagatgctcatgcaaatggagatgtacgtggttatgtaacgaatccacatgttgactttgaaggaacagaacaagggaaattacgtgtatatcaagcggtaggtactgaaggatttgtaacggtaattaaagatattggtatgcgtgagccgtttattggtcaatctccaattgtttcaggagaattaggagaagacttcacgtattattttgcagtttctgagcagacgccgtcttctgttggtgttggtgtccttgtaaatggagacgatagcatattagcagcaggtggatttatccttcaaattatgccgggtgcacaggaagagacaatttcattcattgaagagcgtttgcagaagattcctcctgtatcaacattgatcgaacaagggctttctccagaagagttactgtatgcagtccttggagaagacaaggtaaaagtattagaaacgatggatgttcaatttaattgcacatgctcacgcgaacgtatcgagagtgtgttaattagtttaggtaaaacggagttagagcaagttcgagaagaagaagaagaaacagaagttcattgtcatttctgtaatgagcgatacaagttctctaaagaagatattacaaatttaattgagaatttg

SEQ ID NO: 10551 - DNA, 1632 bp, Bacillus anthracis
ggttatacaaaatggggcaaaagaattttgccgatcgctatcaagaagaaagggtggtggctttggggaaacaattgggcggaaatgtttagaagagcgtgctgaaaaatatggagatcaattggcgggtgtaaggggtaataacgaatataacatatagtgagcttgataaaaaagtagatcgcttagcgtcaggtttactgaatttaggaataaagccagaagatcgagttgtaatccaactacctaatgttatcgagttttttgaaatgtgttttgcactatttcgaattggagcacttcctgtttttgcattaccttcacatcgcagtagtgaaattagttatttttgtgagtttggtgaggcaagtgcgtacgttatttcagataaggctcttggttttgattatcgaaaactagcaagagaagtgaaagagaaagtaccaactttacaacatgtaattgtagtgggagaaaaagaagaagttgggaacataagtgatttatatatagatcccgtttctatttgcagaagttcagccaagtgatgttgcgtttctccaattattccggaagggccaaccagggctttctaatattattccctagaacggcatgaggcttatatttatagtttccgtgttagcgctgaaatttggtaatttaagtgcagagagcgtctatatggcagttcttccagtagcacataattacccaatgagttctcctggaacatttggaaccttttatgcgggtggaaaagttgtgctggcaactgggggtagtccggatgaggcatttgcacttatcgaaaaagaaaaagttacgattactgctctcgtaacggccttaacaatgatatggctttgacgctgcatcttcccggtataacgatttatccaggcctaaaatggattcaggaaggcgggccaaatttaatgctggaattgccaaaacggatacgtcctacatttggatgtacattacagcaaagtttcgggtatgcagcaaggattagtgaactatacaagattagatgatccggaagaaattataattcatacacaaggtagaccaatgtctgcacttgatgaagtacgagttgttgacgaatatgataacgatgtaaaacctggtgaagtaggtagtttattaacacggggtccatatacaattcgtggttattataaagcagaagagcataatgcacgatcatttacaaatgatggattttatcgcacaggagatcttgtaaaagtaaatgaacaaggttacatcattgtagaaggaagagataaagatcaaattaatcgtggtggtgagaaagtcgctgcggaagaagttgaaaatcatctattagcacatgatgcagtacatgatgtagcgattgtatctatgcctgacgattatttaggagagcgtacttgtgcatttgtaatagctcgcggacaagctccggcagtaagtgattaaaaaaggttcttaagagaacgcggtatagcagcttataagattccagatcgaattgaatttattgaatcattcccgcaaacaggtgttggaaaggtaagcaaaaaagaattacgtaaagtcattgcggaaaaacttgttacggtaaaaagataaaaaaat

SEQ ID NO: 10552 - DNA, 1419 bp, Bacillus anthracis
atgatgaatcaaaaccaaggattaaaaagagaattgaagagcaggcacatatttatgattgcacttggaggagttattggtactggcctttttttaggatctgggtatacaattcatgaagctgggcctggaggagcgattgtagcgtatcttgtcggaggatttgttatgtatttaacgatgctctgtcttggagagttagctgttgcaatgcctgacgcagggtcttatcaaacgtatgcaactaagcacatttcccctgcagcgggttatgtagtcggatggatgtcgtggttgaactggtcagctacgataggtattgaactaattgcagttagtattttaatgaaacgatggtttccagatgtaccgtcatggatttggtgcgtagtgtttgcggtactgctttttgctattaatgcgttatcttcaagaagttttgcagaagttgaattttggtttgcaagtattaaagtcattacaatcattgcatttattattttgggcggggcagcaatgtttggttttctagatatgaaaggaaatgaaccagcaccaatgttctctagttttactgattatggtggattgtttccaaatggattatccgctattttaattacgatgattgctgttaacttttccttccaaggaacagaactagtcggtattgcagcaggtgagagtgaaaatccagagaaaacaatcccgaaggcaattaataatacagtttggcgtatactcgtgttctttgtattatctattttcattcttgcaggattattcccttggcaacaggcgggagtaatagaaagtccattcgtagttgtatttgataaaattggtattccttatgcagccgatattatcaatttcgttattattacagcggttctatccgttgcgaattcaggattatacgcaacttctcgtatgctatggtctatgtctaatcaaggaatgattagtccgatttttggtaagttatctaaaaatggtgttcctatttatgcattgattgtaagtacaattgtaggttgcctttcattactatcaggtatttatgcggaagatacagtttatttatggctactttctattgccgggttcggagcgatattagtttgggcatctattgctctatctaacttattagctagaaggtcatatataaagcagggcggagatgtgaaagacttgaaatttaaaacaccactgtatccattcgtaccgctgcttgcattagtattaaatgtaacagtaattgttggtatggcctttattccagaacaaagaatggcgttatattgtggaattccatttatgattgtttgcttactgttttaccgtgcgacaagaaataaggcacataaagtagaacatattgaaaagacagatacaacagaagtagacagttta

SEQ ID NO: 10553 - DNA, 1005 bp, Bacillus anthracis
atgattacattacaacgtacaccgttatttgatgtatacgcgaagtatggtgggaaaacaatcgacttcggtggttgggagttaccagttcaattttcaagcattaaagaagaacatgaagctgtacgtacagcggcgggtttgttcgatgtgtctcatatgggagaagttgaggtaaaaggtgtagatagattccgtgtttgatgttgatgttgttacaaatgacgtatctaccttaaaggtaggagggcgcacaatatacagcaatgtgctacgaaaatggtggtacagtagatgattatttaatctaccaaacgtgtgaagaaagactatttattagttatcaacgcatcaaatatcgagaaagattacgaatggttagctagccatgtaattggcgatgcgacagtagtcaatgtttctagcgaagttgcacagcttgcaattcaaggaccaaaagcagaaggcattttacaaaaagttgtgtcagaagatttaaaagaaattaagttctttaaatttaaaaacgatattcttgtagatggaattccagcacttgtatctcgtacaggttacacaggtgaagatggatttgaaatttactgtaagagtgaagatgcagcaaaactttgggagaaacttcttgaagttggagcagaagaaggcttaaaagcatgtggtttaggtgctcgtgatacacttcgcttcgaagcaacattaccactttatggtcaagaattatcaaaagatattacaccgattgaagctggaattggctttgcggtaaaaacaaataaagaagcagacttctttgggaaaagcaacgttaaaagagcaaaaagaaaacggtgcgccctcgcaaattagtcggcatccaaagtaatggaacgtggaattcctcgtacgcattaccctgtatttattggagaagaaaagatcggggaagtaacaagtggtacacaatctccaacgttaaagaaaagcattgtgtttaggccgttaatt

SEQ ID NO: 10554 - DNA, 934 bp, Bacillus anthracis
tctgtacaacatttgattgaaagaaatacaaaacagagaaaaaaaacgccgcgaaatcatcgaatcgttccatttattactaaaagtaattgctagcgtgtctattatgacgacacttggaattttattttacgctttcaaaatgaaacaataatgttttttcaaaaaataccattacaatcctttttgacggaaaaagaatggttacctttttttgaagatcctaagttccgtatattaccacttatatggggaacgggtcctggaacagcgagtgctatggtcctaaccattcccatcgggttaacggggggcggatttttaaacgaataagccttcaaacggtgcaagaaaagtattaagaccgatgttagaactattagcacgtataccgacagtatgtatatggcttttttgcattaacagttgatacaccgctttttccaacggataataccggattaacagtttttaaatgcgacttagtccaggtattgttattggatttatgatgatacctacaattgcctccctgtctgaagatgcaatgagatctgtagcaaaatgaacgaaagaagcttcagtgacactgggtagcactccggtagagaatgtgaaaacaagccgtgcttccttctgcttttacaggcatgatggcatcgaatatattacctgcctccagagtcatcggtgaaacgcatgatcgctgtaattgcagcgggatctacgccgaacgtatcgctggatccgacagaatctattcaaacgttaacagcttatattgtgcaagtgagtttaggtgatgctccgcatggaacaattacttattacagcatgtacgctgtaggcgcgacgttattcttatttacttttataatgaacatcatttcgcagtttattatgcgccgctttaggagggtgacataatatgcga

SEQ ID NO: 10555 - DNA, 1973 bp, Bacillus anthracis
tatgatgaaagtcaaatacaggtacttgaaggactagaagcagttcgaaaacgccctggtatgtatattggatctacaagtggaaaaggacttcaccatcttgtatgggaaatcgttgataatagtatcgatgaagcacttgcagggtactgtgacgaaattaacgctagtatccaagaagataatagtattcccgtaacagataatggacgtggtattccagttggtatacaagaaaaaatggggacgcccgctggagaagctattatgaccgctcttcctcctggtgggaaagtttggcggcgggcgttaataaagtttctggtggtttgcatggtggtgggggcatctgtaataaatgctctattcacagaactagaggtatttgtacatcgtgaaggtaaaatccattatccaaaattccgaaagaggtattccccggtgcggatttaaaaagcctttggtgatccagatccaacggggaacgataactcgatttaaaccccgatccccaaaatttttccgggagaccacacgtataccaaatttgttacactaacccaactcgtatgtgcggaatttacccattttttaatcgcaaaaattaaactgacccattgaagataaacggtgaacataagcaaaataaagaattccattatgaaggtggaattaaatcatatgttgagcatttaaaccgctcaaaacaaccaatccatgaagagcctgtatatgtagaaggatcaaaagatggtattcaagttgaagtttccttacagtataacgaaggatatacaaataatatttactcatttacgaacaacattcacacgtatgaaggtggaacacatgaagtagggtttaaaacagctttaactcgtgtgattaacgattatgggcgtaaaaatagtattctaaaagatgcagacagtaatttaactgtgtgaggacgttcggtgaacgtttaactgcaattgtatcaattaaacatccaaatccacaatttgaaaggacaaacgaagacggaaacttgggaatagtgaagcgagtacgattaccgagtctgtggtttccagaagcattttgaaaagttcttactagaaaaaccgaatcgtttcacgaaaaatcctacaaaaacgtaccatgggcaccccgtgcacttgtttcaaccaaaaaaccacttaatttgacccgtccaagaaccccgttaaaagtttcaagtttacctgtaaaattagcagaatgctccttccaaaaatcccgcaatttagggaaattttcctttggaaaaggggggactccgcccgggggatcagccaaaacaaagggggggtggtccgtcccctttccaggggtttttacccccgggaaggggaaattttttaaccgttgaaaagggaaaaattaaaaaaaatcttctctaacgatgaagtgcgctacattatttactgcaattggtacgaacattggcggagattttgatattgagaaagctcgttatcataaagttattattatgacggatgccgacgtagatggtgcgcatattcgtaccctattattaacgtttcttctatcgttatatgcgtcaaatattgtaccatggttatatctatattgcacagccaccgttgtttaaagtacaacaagggtaaaaaaattcaatatgcttataatgagaaagagcttgaaaagattttagctgaattaccagctcaacctaaacctggaatccaacgttacaaaggtttaggagaaatgaatccaactcagctttgggaaacaacaatggacccagaagtacgttcattacttcaagtttcccttcaagatgcaattgaagcagatgaaacatttgaaaattttaatggggggataaaggagagccacgtcgtaactttatccccaagaaaatggcaaaaaatccgggaaaaaaccttggatatttaaaatgagtaattgccaggaattct

SEQ ID NO: 10556 - DNA, 907 bp, Bacillus anthracis
cgtttaaaaggaatcattatggttgtcatcggtgcttgtttatggggcttgtccggaacagctgcacaacaactttttcaatatgacaatatttctactgaatggttagttacaatccgattacttatatctggcattatcttactcattattgcatcattcggaacaagcaaaaaagaaatattcggcatttggaaacaaagatctgatgcttataaaatgatattgtttggtttattcggtatgcttgctgtacagtatacgtattttgcttctattaaagaaggaaatgttctgccgttgcaacattattacaatatttagctcctatattcatcactgtatacttacttttcaaatggaacgttcgtccatcaaaaattgatttcatttcaattaccctttcattagtaggtactttcctcttactaacaaacgggtctgtgcataacttagctgtttctacaccagctattatttgggggattttatctggattatctctcgctttttatagtttatattcaaagggattactagaaagatggtcttcctctgttatcgttggatggggtatgattattgggggtattggtgtaacgattgtacacttttatttctacgaaaagaatttattttattatcaactgtgaaatatgtaaaattaagtactctcccgctcatcacatttgtcgtcattttggggacactttattggcttttatttatacttagacagcatacgatacttgactccgaaagaaacgacattattcggttgtactgaaccactcgcagctattattaccttacttcacttatattacatgtaccgtttcaatcttttcagttattaggggctttttgtgtcattgtaatggtgctcatcttaagtcaaaaaccagat

SEQ ID NO: 10557 - DNA, 183 bp, Bacillus anthracis
gctggaagaaaacaagtgcttcaaatggtgaaagaaggctatgtaaattcggtgaatggtgagaaagtagcagttcaggcgcagacaatctgtttacatggtgatggagaaaaagcagtacaatttgcgagaaaaatatacagaacattcgaacataataaaatttctatatgtgcaccgaaa

SEQ ID NO: 10558 - DNA, 1386 bp, Bacillus anthracis
gtgagtaaactttggggcggacgttttacggaagaagcggaagcgtgggttgaagagttcggggcatccatctccttcgatcaacaattagtaaatcaagatataaacgggagtattgcgcacgtaacgatgctagcaaagcaaggcatcgttacgaaagaagaagcagagaaaataaagataggtcttcaatatttattagaagaagcgaaacaaaataaattgcatttttccgttgaagcggaagacattcatttaaatatcgaaaagatgttaatggaaaaaatcggtgaagtaggagggaaacttcatactggccgaagtcgtaatgatcaagtagcgacagatatgcacttatatttaaaagaaaaagtagagcatattataaaagctataaaacaattgcaaactgttcttgttcatcaagcagaaaataatattgaaaccattatgcctggctatacgcacttacagcgtgcccagccaatttcatttgctcatcatattctcgcttacttttggatgttagagcgtgatgtaaatcgttatgaagattcattaaagcgtattaacatttcgccattaggagcaggtgcgttagctggaacgacattcccaattgaccgagaatatagtgcggagctccttggatttaatggaatctatgaaaatagtttagatgcagtaagcgatcgtgatttcatactggagttcctcagtaactcatctatgcttatgatgcacttatcacgcttttgcgaagaacttattttatggagtagccaagagtttcaatttattgaaatgagcgatcaatacgcaactggaagcagcattatgccgcaaaagaaaaatccagatatggcggaacttattcgtggtaaaacaggcagagtgtacggtaatttatttagtttacttacagtcatgaaaggattaccgctcgcttacaataaagatttgcaagaagataaagaaggaatgtttgatacagtgaaaacagtagaaggctgccttcatattatggcaggcatgttagagacaatgactgtaaacaaagaaaaaatggggcaagctgtaacgcaagatttctctaacgcaacagaaattgctgactacttagcaaacaaaggactaccattccgtcaagctcatgaaattgttggaaagctagtgctacactgcacacaaaaaggaatttatttaatagatgtaccacttgcaacatataaagaaatgagcgcgctatttgaagaagatttgtatgaagtgctgtcaccatatgcagctgtaaagcgtcgtaacagtgctggcgggactgggtttgagcaaattgaaaaagctttggagaaggcgaaaggattaacgaaagaagctattaagaat

SEQ ID NO: 10559 - DNA, 985 bp, Bacillus anthracis
atggatacactcttgatactgaccgttttagtagtcatttgcgctttagcttttgactttatcaatggttttcacgatacagcaaacgctattgcaacggctgtttcaacgaaagctctaaagcctagacatgccattgttatggcggctattatgaactttttaggtgcaatgacatttacaggtgtagcaaaaacgattacaaaagatatcgttgatccattcgccttacaaaatggttctcttgtaattttagctgctttgcttgcagcaatagcttggaacttaattacttggtactacggtattccaagtagttcttcgcatgcaattatcggctcaatcgcaggtgcagcaattgctgccgctgggattagctcgctaaatcttaaaggattcattaaaattattgaagctttaatcatttcaccaattatcgctttcgttattggttataccgtatacagtatttttaaagtagtatttaaaaactttaacttaacgaaaacgaataagaatttccgtatattccagattttcactgctgcattacaggcttatacacatggtacgaatgatgcgcaaaaagcaatgggaatcattacgatggctcttatggctaataactatcatacttcgagcgacatcccgttctgggtacaattatcttgtgcaattgcaatgggtcttggtacttctgtcggtggatggaaaattattaaaactgtcggtggacaaatcatgaaaattcgtcctgtaaatggtgtagctgctgatttatcatcatctcttgttattttcggggcaacatttattcacttaccagttagtacgacgcacgttatctcctcttctattttaggggttggtgcttctcatcgtgtaaaaggtgtaaaatggggaactgcaaaacgcatgttaattacttgggttatcacacttcctatttcagcttcattagctgctttattttactctttattac

SEQ ID NO: 10560 - DNA, 1254 bp, Bacillus anthracis
gtggatcgttttcatagtatttcggaagcgacgaatggacttggcaatacgaagcttttaaatgaggcgttatatgattatgtaacgatcggaaataatgaaggaattacgttagcgaaggagcatttgaatcatctatatgatgatgctgaatttgaggtgctcgttgcgaatttatttgaaaaagaaggggtacgtccagagtgggcgaagccttataaattacatacaacgacagatgggattacgattgcttttatcggattaacagttgcgtatccagagttttatcaaatgttagattggcatattgaagatccaatcgagcatttagagtctattttagaagaagtgagagatgaggctcatataacggttgtcctttctcatcttggaaaaagtatggatgagcatatggcggagcattatgatatagatgtgattttaggggcacatacgcatcatttatttgagcgcggtgttcttatgaataatacgttactttgttgttgtgaaaagtggggacgttatgttgggcacgtccagcttactgtggataaaaagacgaagaagctgttgaaaaaggacggtagagcgattaagacagaccgtttaggtgcttatagtaaaccgttatccacaattgaagcgctgcaggaagaaagtacacatattatggaagaacctgtcgttcatttgaaggaatcattaccggttgattggtttcatgagacagcattttcgcacatgttagcaaatgcgctgaaaacgtggtgcggtgcagagattggcatggtgaacgctggtgtacttcttgaaggattagatgaaggtgttgtgacgcgcggagatattcacagaatttgtccacatccaattaatccatgtttattaaaggtgccggggaaaacgctaagagaagttattttaaaggcacgtcgcccgaatatggagaaccttgaggtaaaaggattcggatttcgcgggaaagtgatggggaaaatgatttacgctggtgtagaagtcattccagatacgattcccgggaataaaattttactcgaagatgtattaattaacggagaatcgctggaattagatcgtatatatacagtaggaacgattgatatgtttacatttggctacttatacccagagctatccacactttctaacaaacaatattatatgccagaactacttagagatgtgttaacggacgtgttaataactcatacatcttctgtcaaacta

SEQ ID NO: 10561 - DNA, 412 bp, Bacillus anthracis; identical to SEQ ID NO: 9411

SEQ ID NO: 10562 - DNA, 234 bp, Bacillus anthracis
atgaaaaaaattgaggtttacacacaacctgattgtccgccatgtgtcattgtgaaagaatttttaaagcataataacgttgtatatgaagaatttgacgtaaaaaaagacgccgctgcacgcaatcgtcttttatatgactatgactcttattcaactccaacagttgtaattaatggtgaagtcgttgctggttttcaaattgaaaaattacaacaactacttaatatagaa

SEQ ID NO: 10563 - DNA, 573 bp, Bacillus anthracis
ttgggtagaaaaattagctttaacaaagaacgtgcactaaataaagctatgcatttattctgggagaaaggttatgacgctacatatatatcagatcttattgaaacgatgggtataagtcgctctactctttacgatagctttggagataaggatgcactatttaaactcgttttagaacagtataaaaactatggttctcaaaagagaaatttactttttagtgatacaaatacgaaagaatcactgaaatcctttttttatcaacatattgaaaaatgttattcagatgacattccaaaaggttgtattataactaattcttcattgctgattgggcaaattgatccttccatagaagaaatactcataaatgattttaatgaacttgaaaaagcatttaagcaagttatcgaagaaggaaaaaagaaaggagaaatttcacaagaggatgacactgaattagttgcatattctttattaagtttaaatcatagtcttaatttaatgtctatgtataaaaaagagaaaaagctagcatataatttagttgataaggctattgcagatcta

SEQ ID NO: 10564 - DNA, 629 bp, Bacillus anthracis
gtagaagaattaggaacgataacaaatatgcaacaaagcggagaagcaatgaagttaacgatacatgccaataaaattttatcagatgttcacttaggtgatagcatcgcggttaacggtatttgcttaactgtaacgagtttcacaacaacttcattttcacagtggatgcaatgcccgaaacaatgaaatcaacatcacttcgcctactcaaatcacactctaaagtaaatttagagcgagcaatggctgcaaatggacgattcggtggacatttcgtttcaggacatattgatggcatcgggacgatattaaacaaaaaacaacactataatgccatctattacaaaatagctatttctgatgaactgctgcgctattgtttgcataaaggatccattgctgttgatggaacgagcttaacaatatttgatatagacgaatcttccattacaatttcactcatcccgcacacagtaagtgaatctgttatcggagaaaagaatgccggtgacatcgtaaacattgagtgtgacatgattggtaaatatatcgaacgctttattactaagcctgtaaaacgaacaggttcaatgaccgaaaactttttacaagaaaacggatttcta

SEQ ID NO: 10565 - DNA, 1317 bp, Bacillus anthracis
atgaatgggaatactgcaaaaaacatagaatttcaagttgataatactacagtaaaaaatgagaaatatctagaccctaaaaagtggcataaacaggatactacctgggcattgagtctatttggaacagcaattggagcaggagtacttttcttacctattaatgcaggttcaggtggtttattatcgttgctgttaattaccatactggcatatcctgttatgtattactcacatagggcgcttgctaaaatgatatacgcttcaaattctgccgacgaggggattacaggtacaataagagaatatttcggaaataaagcaagtatcatttttaacatcgtatatttcgtctcaatttatacgatcgtgctgatgtattcggttgcacttacaaatactgcaagtagttttattgtacaccaattgcacatgccggagcctccaagggctattttatcacttgtattagtaatcggtcttatcactatactaaattttggtcaggatattactgtaaagataatgagcatgctagtatatcctttcattgcttcgctactttttattgcaatatctttaattccacaatggaatacttcaatgctaagtttttcaagtgtttctactgcttcaactggaacagggtatttcggaacgatttggatgatactaccaatcatcgtattctcgtttaatcattcacctatgatttcgtcattcgttatgaaacagagagctacgtatggaatagatgctactgatgccaagtgtgctcaaatacaaaaagtctgttatatcatgacattcgctgttgttatgttctttgtttggagcagtactttaagtttgactccagatgatcttaaggtggcgaaagaacagaatttgtcaattctatcatatcttgctaatgagcttaattcaccagtaatcactattgcggctcctattattgcgtttgtggctattacaaagtctttccttggtcattatataggagcgtatgaggtaatgcgtgacatgattatcaagtccggtaaaaaacgtgggaaagatataggagaaaaaacagttaagacaatgattcttacttttgttgtactaacatgctggtatgttgcttatacaaatccaagtattcttggaatcattgatgcccttagcggtccgttagtcgctgccatcttatgtctattaccgatgtatgcgattcgtaaagtaccagtgctagcaaaatacagagggaaaatgagcaatgtatttgtaattattatagggatacttactgttctagcaagtattaagtcattattc

SEQ ID NO: 10566 - DNA, 744 bp, Bacillus anthracis
atgacgaaatcaatggaatttctttatcctgaaaaatgcctttcaaaagcttctacaggtgatccgtgttgcaaaccaaattgaaaatgcccctttattgcaaggggggatttgaaaagcggtaccatactgtcagaaaataaaatagctgccgatttttctgtaagtcggtcacccgttcgtgaagcattaaaattactagtttctgaaaatattattcgcttagaaagaatgggcgcagttgtcattgggtttaacccgagaaagaaattgaagaaatatatgatgttcgtttacttatagaaacgtttatctttgagcgacttggaaagatggacacaaatgatttagtaagagaactaaataaaataatggaaatgatgaaaatccgccattaaatatcatgattttgatgaattttctaatcaagatctctatttccatgaacggattattcgaacccattgagcattcctccattcctgatgatttggaaataatttaaaagcctgttatggaaagcttaatcccttttatcaatgcgtactcggtttcaagaaaaaataccaagaaccttggaacggattatttaaaatcttgagctttttatataaagcaatcgaatcaaaagatcgaggcctcctgattgaaggctctacatcaaaactttgatgatggtcaggggaaagtcgaaaaacctctggatgtcacaacaaatgttatctaaaggagttgagcaaggac

SEQ ID NO: 10567 - DNA, 508 bp, Bacillus anthracis
ggtagaaaaattagctttaacaaaggagtagcactaaataaagctatgcatttattctggagaaaaggttatgacgctacatatatatcagatcttattgaaacgatgggtataagtcgctctactctttacgatagctttggagataaggatgcactatttaaactcgttttagaacagtataaaaactatggttctcaaaagagaaatttactttttagtgatacaaatacgaaagaatcactgaaatcctttttttatcaacatattgaaaaatgtttattcagatgacattccaaaaggttgtattataactaattcttcattgctgattgggcaaattgatccttccatagaagaaatactcataaatgattttaatgaactggaaaaagcatttaagcaagttatcgaagaaggaaaaaagaaaggagaaatttcacaagaggatgacactgaattagttgcatattctttattaagtttaaatcatagtcttaatttaatg

SEQ ID NO: 10568 - DNA, 705 bp, Bacillus anthracis
atgcaaaaagtgacgattcaagaagcggaacatttactgcaagaaattataagtgaagaggacgatcgctttcaaatattaataaaagatgaacgaaaaggggtacaaaaactcatttcgaagtggtataaacaaaaagagttagcacaaaaggaaaaagaaaaatttctagaaatgtctaagtatgaaaatgcgttacgtgaaaaaggccttacatatatcgcaggtatagatgaagtagggcgtggaccgctagctggacctgttgtgacggcagctgttatccttccagaagatttttatattccagggttaaatgattcgaaaaagctgagtgaggcgaagcgagagcgtttttatggtgaaattaaagcaaaagcaatcgcgattggaagtgggattgtatcacccgcaagtattgatgagataaatatttatcaagcgacgaaaccagcgatggtagatgctattgcgaattttatctgtacaccagaatatttattaattgatgcgatgaaacttcctgcaccaattccgcaaacatccatcattaaaggtgatgcgaaaagtatttccatttcagctgcatccattattgcgaaagtaacgagagatcgtatgatgaaagagcttggagaaaagtatccagcatatggatttgaacaacatatgggatatggtacgaaacaacatttagaagcgatt

SEQ ID NO: 10569 - DNA, 2978 bp, Bacillus anthracis
gtaaccgtagatggtaaagagttttcagcatcaggtgaaaagacgatactacaattatttaacgagagtaatttggaacatcctcaaatttgtcatgtaccagaagtagatccaattccaacttgtgatacgtgtattgtagaagtagatgggaagttaatgcgtgcttgttcaacggcaatagagaatggtatgcatatttgaaaacagtcacagcgtgcaaaagaggcgcagactgaagcgatggatcgaatatttaaaaaaccacttattgggattgcaactggatgggataacaataatggcaaatgtaaaggcccataatacactgcatatgatgggggattggaaaacacaaatattccgaatgagccccaaggtaaatgtttgtggaaaaggaaatgtcacattccggcttattccgaatggatccccaaccaatgtatttgcttgtggacagtgtgtagaagtatgtcaaaacctacaggttaatgaaacgatatcgatagactggagcttagatcgtccgcgtgttatatgggatcatggtgtaagcataaatgactcatcttgtgtgagttgtgggcagtgtgtaacagtatgtccatgtaatgcattgatggaaaaatcaatgttaggtgaagctggattcatgacaggattaaaaccagatgtgttagatccgatgattgattttgtaaaggatgtagagcctggatatagtagcattttagcagtttcagaagtagaggctgcgatgcgtaagacgaaagttaataaaacaaaaacagtttgtacattttgtgggtgtccgttggtcattcgaagtatggacgaaagatcgccatatactataagtgcaacctgtttcagatgcaccgggtaatgggtatttcgacatgtgtaaaaggtaaatttggatgggactttgtaaacagtgaaagatcgcattacgaagccattaattcgccaaggagatatgtttgttgaagcttcatggggaagaagcactagaagttgtggcttctaacatgcagcatattaaatcagcatatggcagcgatgcatttgggttcatttcttcttcgaaagtaacgaatgaagaaaattaccttatgcaaaaactagctcgtcaaatatatggaacaaataatgtagataactgctcgcgttattgccaatctccagcaacagatggtctatttaaaactgtcggtatgggcggcgatgctggaacagtgaaagatatagctgaagcaggtcttgtcattatcgctggtgccaatccaacagaaggacatcctggacttgccacacgtgtaaaacgtgctcctaaattaccccaacaaaaactggttgtagcagacctttccttaacatgaaattgccaaagcgggccggatttatttatttcacccgcgccaaggtacggattacctatggcttgctggggattacgaaatatattattgatcaagattggcatgataaaaagttcatagctgaaaaacgtaagaattttgatgaatatagcaaaatggtagaaaaatatacgctggaatatacagagaaaattacagggatttcgaaagaaaatctgaaagaaatggctcgtatggtatatgaagcagaccgtacttgtgtactttggggaatgggcgttacgcaaaaatacaggaggaagtacaacgtccgctgcaatttcaaatttactgcttgttacgggtaactatcgtcgtcctggtgcaggtgcatatccattaagaggacataataacgtacaaggtgcttgtgatatggcaacattaccaaactggcttcctggttatcaagcagtatcaggtgatacgcttcgtggtaaagttgaaaaaaagcatatggtactactatcccgaaagcctccaggataaataactatgccaatgttacttgcggccagaagcaggaaaaactacggggtaatgtatgtcatgggtgaagaaatggctttagtcgattcaaatgcgaaccatgtacaacatattttagcgaatttagatttcctcgttgttcaagatatgttcttatcaaaaacagctcgttttgctgatgttattttaccagcagcaccaagcttagcaaaaagaaggaacatttacgaatacagaacgccgtattcaaagattatatgaagtgttgaaaccgcttggtgattccaagccagactggtggattttacaaaaagttgctcgtgcactgggcggggattggaattacgaaagtccaagtgaaattatggacgaaatcgcatcacttgcaccgctatattctcaagcaacgtatgaccgcctagaaggttggaatagtttatgttgggggtagtcatgatggtagcgatacacctctattatatgtagatggatttaacttcccagataagctcgctcgtttatcattagatgaatggataccggcacgtgtagcgccacgatgagaatgatctacttttaaataatggacgcatgctagaacatttccatgaagggaatatgacgaataagtcggctggtattttatctaaagtatctgaagtattcgttgagatttcacctgaactcgctatagaacgcaatgtgaaagatggtggtcttgtggaattagcattcaccatttggaaaaattaaagtacaagcacttattactgatcgtgtaacggggaaagagctatatttaccaatgcatgcaacgataaatgaagaagcgattaatattttaactgggacggcaacagacctttatacggtgtacaccggcttataaacaaacgatggtaaaaatgcgtgtattacgtgaaaaaggaaatcgtccgttaccaccttcaaaccccgcgagataaaaatcgtaatccgcaaaatggtgttgaaatcgagcaaaagtggcaaagaaaacaatacgtatcacttgtggactagggggcggagatagtggcaaaagaaatt

SEQ ID NO: 10570 - DNA, 705 bp, Bacillus anthracis
atggaacatacatttactgaaacttctattgtcggtgagattgttacacaatttccaaaagctagtgatctttttaaatcctatagaatagatttttgttgtggcggtaataagccacttattgatgcaattcatgaaagaaatttatcagctactgaagtaattacagagttaaatacgctttatcataatacgaaacgattaaatgaatctgaaattgattggaaaaatgcttcttatcgtgaattgattgattatgtgattcataagcatcatcgttatttaaatgaagagttaccacagttaagtccttatgtgacgaaagtattacgtgttcatggagcaaatcagccgcatttagctaaaattcataagctatttcatgaacttaaaatggaattagaacagcatttaattaaagaagaaacagaagatttcccattaattttagaatttgaaaaaaatccaactgatgaaaactatgcaaagttacgtaaagtagtagatgaactagaaaatgaacataaccacgctggcaacattattaaagagcttcgtaaagttacaaatgactttactcccccagaaggagcttgcggcacttatcgacttgtttacaatcgccttgaagcgttagagtctgatttatttgagcacattcatttagaaaataatattttatttccacgtgccattacgagagcg

SEQ ID NO: 10571 - DNA, 890 bp, Bacillus anthracis
agtattttattagaaagcggaacaaatgaattagagattgttacatatactgttggtgaaaacctatttagtattaacgtaatgaaagtacgtgaaatcattaatccattccctgttacaactgtgccagaatctcatcatgcagttgaaggtgttgttcaagtacgtggtgaaattttgcctgttattaatttagcaacagctcttaatttaaaatcgacaaagccacttgatcaaacgaaatttattatctctgaattaaaccaaatgaaagttattttccgtgttgatgaagtgcatcgtattcaacgtatttcgtgggaacaaattgatgaaccagcttcattgtctatggggctagaagaaacgacatctggtattgtaaagctagatggcaaattattttgctattagattatgaaaaaattgtatgtgaaattagcggtactggttatgacaataaatcacttgcagggttagaacagaaaacagatcgagctgaaaaagttatttatattgcagaagattcagcaatgcttcgccaaatattagaagaaacattatcgtcagctggatatacgaaaatgaacttcttcagcaatggtgcagaagcgttagcacaaattgaaaaactagcgaaagagcaaggggaaaaaatgtttgaacatattcacttgctaattactgatattgaaatgccgaaaatggatgggcatcatttaacgaaagcggttaaagatagtgaagtaatgaatcgtttaccagtcattattttctcttcattaattacaaatgaattattccataaaggcgaagctgtaggagcaaatgctcaagtaagtaagccagatattcaagagttaattggtttagtagataagctagtgctt

SEQ ID NO: 10572 - DNA, 1265 bp, Bacillus anthracis
attggtttaatgttatttgcactatttttaggagcaggaaatttaatttttccaccagttttagggcaacaagctggagagaatgtttgggttggaaacaattggcttccttgtaacgggagtcggattacccctattagctgttacagctgtcgcgtttgtagagggggacttgaaagcgctatcttctagagttcaccctatatttgcatttgttttcccattaattagttatttagcgattggaccatttttcgcgattccgcgtactggagccgtttcatttgaaatgggtatgaagccatttttatcagaggcattggtttcagagtggtacatgctatttcttttcacgatattttcttcggaataacgtggtatttatcttaaactccatctaaattagtgattggttcggaaaatttcttaccaccagtattagtattgattgttgctgtatgtcgggaaaggcaattattgatccgattggagaaccagctgcgccgttagcggcatacaaagaaaatgctttctttggtgggtttattcaaggatatttaacgatggatgcaattagtgcacttgtatttggaattgtcgttgtacaagttatccgctctaaaggaataaaagagagcaatcaaatgcaaaaaataccagtagtatcaggtattatgccagtacttggttaacgttaaatttattatccacttgcttatcttggttcaacaagtacatcacttgggatatcagagaatggtggacttattttaacgaatgttgtaaatgagttatatggaacaggtggtaaaattttattagggcttgttattatacttgcttgtttaacaacttctgttggattaacatcagcttgtgctggcttctttacaaacttattcccaaaactttcgcataaaacgattgtaacaatggtatgtgtatttagtttaattgtatctaacttaggtttaacacaattaattgcagttactttaccagtgttaatgattatttatccagttgcaatcgtattaatcgtactttcttacttccataaatggattgggaagcgtaataccatttatattggagctattttaggtgcattgttaattagtttctttaacggtttagaaagtgcgaagattaaaattgacgcgatttctaatgtattacaaatattaccattatataacgaaggaataggatggttaatcccatcatgtattggcgggattctcggtttctttttctataaatca

SEQ ID NO: 10573 - DNA, 459 bp, Bacillus anthracis
gtgcaggcaacgcgaaaaagatgtgcagaagtaccagaaaaagtaaaaaatattgcacagggagcagcgttagcaacagacacaaaagtaaaaatccatcaattccaaaatgaaatcgatgaactgctcgtaacaaaaacatataacgacgtcgtagctgaagaactagaattactcggggaagacgtaaatcgtaaagaaagatttggtattggttcaaccgatgcaggaaacgttagccaagttgtaccgacaatccacccgtacattaaaatcggcccagatgatttaattgcacatacgaatgaatttagagaagcagcacgttcagaattaggagacaaagctctaattacatcagcaaaagcactagcaaataccgcgtatcgattaattacagaagaagggttgttagagaaggtgaaggaagagtttagagaggcgcagagaaatcagggg

SEQ ID NO: 10574 - DNA, 1479 bp, Bacillus anthracis
atgaagaaccatgaccaagcacttatctttgaagtgagtaaagaagacggcataggatatagcttaacaaaaattagatgtagaagaagtgaatctagaagatgtgtttgagagcgattatattcgagttggaagattgcagaagttaccaaaaggtatcttgaacttgatatttatgcgccactatacagcactttcaaacccgtaaccccggcgttgattctgggttctatccacttggatcttgtacgatgaaatataatccgaaaattaatgagagtgtagctcgtttcgcaggatttgcaaatattcatccgttgcaagacgagaagacagtacaaggtgcaatggaattaatgtacgatttacaagagcatttaattgaaattacaggtatggatactgttacattacaaccagcagctggtgcacacggagaatggacaggcttaatgttaattcgtgcataccatgaagcaaatggtgactttaaccgtacgaaagtaattgttcctgactctgctcacggaacgaatccagcatctgcaactgtagctggttttgaaacaattacagtaaaatcaaatgaacatggtcttgttgacttagaagatttaaaacgtgttgtaaattgaagaaacagcagcattttatgtaaccaaatcctaatacattagggttattgaaagaaaacattttagaaaatgcagaaaatcgtctatatgcagggcggtaaattatactatgatggtgcaaacttaaatgcagtataagcccaagcgcgcccaggagatatgggatttgacgttgtgcatttaaaccttacataaaacatttacaggtcctcacggcggcggtggcccaagttctggtccattacgtgtgaaagctgatttaattccgtacttaccaaaaccaattttacacaaaacggaaaatggctatcactttaactatgatcttccataaacaattgggcgcctgaaaccattctatggtcacttcagaattaatgttcgtgcatacacatacatgcgttctatgggtccatatggcttgcgtgcagtaacagagtatgcggtattaaatgcgaactatatgatgagaagattagcaccattctatgatctttcattcgatagacattgcaagcatgagtttgtattatcaagtacccgcctaaagaaacttggtgtacgtacattagatatcgcaaaacgcctgcttgatttcggttaccattcaccaaccatttacttgccgttaaatgtggcataatgtattatgattgagcctacacaaacagaatcaaaagaaactttagacggtttcattgatgagatgattcaaatcgctcaagagctagaataaacttctgaagttgtccaagaagcaccgcatacaacagtcattatacgtatagatgatacgatggctgtacgtataccagtattacgttatgcatagccagcatctgta

SEQ ID NO: 10575 - DNA, 1298 bp, Bacillus anthracis
gaaaagactgggttaggttctctactacttgatggagagcttattaaggagtgccgtttgacggagcagtatttttcgatgccggtgcataagtctatatttcagttaatgagaaagatggaaggagaggggcaaccgattgatcttgtgacttttacttctagggtagatccgaattttttgaaggggatcgggggaatggagtattttataggattaatggatggtgtgcccactactagcaacttctcatattatgaggggcttgttcgaggtgcttggaaaatgtatcaggctggcgtctttggggcacaagatgggagagcgtcttattgcggagaagagtgagaagattattggtgagacgattacggcactttgtgagttagaaggagaagactgtgtatgtgagtttgattttgaggatgcgctagttgatttatatgaaaagcttcatcaggatgcgaaagaaataactgggtatggagacgggttatacatcgctaaataaaatgacgtgcggatttgcacgaaagagatttttgtcgttctttggtgcgcgtcccttctatggggaagactgcgtttgcgctaaatgtgggactgcatgcggcgaagtctggagcaagcggtgggatgttttccgttagagatgagtagtaagcaatgtttaaaaagggatggcttcttgcgtaggtgaggtatcaggggggcagactgaaaaatccaaagcaccgttttgcgatagaagacctgggaaagctgaataagggcgttgccggaaattgctgagttaccccttgagatttacgatcatgcaggtggttacggtgcaagatatttggatgcaaactcgtaagttaaagaggaagcatgggtgacaaaaaagattttaattattgtagattacttgcagcttattacgggtgatccgaagcataagggaaatcgatttcaagagattagtgagatttctcgtaagcttaagttattagcacgtgaattatatgtttgcgtagtagcattatcgcaattgtctcgttctgtagagtcacggcaagataagcgtcctcttttatctgatttaagagagaccggacaaattgagcaagatgcggatgtcattatgcttatgtatcgcgaagattattacgataaagaaaccgatgcagaaagagatgacggagattcatgtggcgaaagcatcggaaatgggccctgtgggggaggttttaaagcttgcggttttatgaagggagtttgggtcggttttgtggagggggggatgataaaaatag

SEQ ID NO: 10576 - DNA, 874 bp, Bacillus anthracis
atgaaaagagtaggaaaagcgataatcccagcagctggattaggaacacgttttttaccagctacaaaagcaatgccaaaagaaatgttaccgattgttgataaaccaactatccaatacattgtagaagaagcagtaaaatcaggaatcgaagatattattatcgttactggtaaaacgaagcgttctattgaagatcattttgataatgcatttgagttagagcaaaacttattagaaaagaaaaagtatgagttactttgaaaaagtacaggcttcttcaaaaatggtagacattcactatatccgtcaaaaagaaccaaaaggattaggtcacgctgtttggtgtgcacgtaaattcatcggtgatgagccatttgctgttttattaggtgatgatatcgttcaagctgaaaaaccatgtttacgtcaattaattgaagaatatgataaaacgctttcttctgttattggtgtacaaacggttccagaagacgaaacacaccgctacggaattattgatccgttagagcaagaaggacgtcgttaccaagttcgcaatttcgttgagaaaccagcagcaggtacagcaccttcaaacttagcaattatgggacgttacgttttaacacctgaaatcttcatgttcttagaacaacaacatgttggtgctggtggtgaaatccagttaacagatgctattcaaagcttaaacgaaattcaacgtgtattcgcttacgatttcgaaggaaagcgctacgacgtaggtgaaaagctaggattcgttcaaacgacaatcgaaatggcactgcaacacccagaattacgtgatgacatggttacgatgatgaagaaaattttagaagaacaaacg

SEQ ID NO: 10577 - DNA, 1054 bp, Bacillus anthracis
atgaagttatttcatacagcggattggcatttaggaaagcttgttcatggcgtgtatatgactgaagatcaaaagattgtattagatcagtttgtacaagcagttgaagaagaaaaaccagatgccgtaattattgcaggggatttatatgaccgagcaattccacctacggaagcagtagatttattaaatgatgtgctgcaaaaaatagtaattgatttacaaacaccagttattgcagttgctggtaaccatgatattccagatcgtattcattttggaagtagtttaatgaagaaacaaggattatttattgtggggcaatttcaatttccctatgaaccaattatattaaatgatgaacatggcgaggttcacttccatctcgttccatatgcggatccgagtatagttagacatgtattgaaaaacgaagacgtacgttctcatgatgatgcgatgcgtatttttatgaatgagctttctgaaacgatggataaagaagctagacatgtatttgttggtcatgcatttgtaacttctgctggagaagcggaagagaatacaagtgatgctgaacgaccgttcactgtcattgcttgttgaatacgtaaatagtcattattttgataagtttcattacacagcgcttggacatttacatcaagcgcatttcgtacgtaatgagacaattcgatattcaggttcgccacttgcctattctatttctgaagaaaaacataaaaaaggatattatattgtggaaactgaacgagcaaggtgaagcaacaattgaaaaaaggttacttacaccacgtcgtaaaatgcgaacagtagaagcgaaaatagatgaattattactacatccagtaagtgaagattacgtgtttgtaaaattattagatgaaaatcctgtcttgcagccaatggaaaaaatacgctctgtatatccaaatgcaatgcatgttgaaagatccattcaaagacggggagtttacagagtcaaatgaaagcaccggttcaaagacataaaacggatgattttatcggttac

SEQ ID NO: 10578 - DNA, 1050 bp, Bacillus anthracis
atgaaagcattactttggcataatcaacgtgatgtaagagtagaagaagtaccagaaccaactgtaaaaccaggagcagttaagattaaagttaaatggtgtggtatctgcgggacagacttgcatgaatatttagcaggacctatttttattccgacagaagagcatccattaacacatgtaaaagcaccggttattttaggtcatgagtttagcggtgaggtagttgaaatcggtgaaggcgttacatctcataaagtgggagaccgcgtcgttgtagaaccaatttattcttgtggtaaatgtgaagcttgtaaacatggacattacaatgtttgtgaacaacttgttttccacggtcttggcggagaaggcggcggtttctctgaatatacagtagtaccagaagatatggttcaccatattccagatgaaatgacgtatgaacaaggtgctcttgtagaaccagcagcagtagcggttcatgcagtacgtcaaagtaaattaaaagaaggggaagcagtagcagtctttggttgtggtccaattggacttcttgttatccaagcagctaaagcagcaggagcaactcctgttattgcagttgaactttctaaagaacgtcaagagttagcaaaattagcaggtgcggattacgtattgaatccagcgactcaagatgtattagctgaaattcgcaacttaacaaatagtttaggtgtaaatgtaagctttgaagtaactggtgttgaagtagtacttcgtcaagcaattgaaagcacaagctttgaaggacaaactgtaattgttagtgtatgggaaaaagacgcaacaattactccaaataatcttgtactaaaagaaaaagaagtggttggtattttaggataccgtcatatcttcccagctgttattaaattaattagctctggtcaaattcaagcagagaaattaattacgaaaaaaatcacagtagatcaagttgttgaagaaggatttgaagcacttgtaaaagataaaacacaagtgaaaattcttgtttcacctaaa

SEQ ID NO: 10579 - DNA, 1125 bp, Bacillus anthracis
atgaataggtatgaagaactggattcaatagaggggatttcttcattagtagtaatgattggccatcatttaatgattttttcagtatttcaaaattacagttatgaagataataaaccatttgttatgtatctattaaaagaaacacctgctcgtcttgtttttagtagtggtaacgaatctgttattatcttttttgttttgagtggatttgttttgtatgaatctattcaaaaaaattatgatagctataggtcattccttgtaaagcgtatatgcagaatttatattccatatatcgtagcgatacttatagctattttatgccaaactacaatgagtgaatatggaatttctcatttaagtgaatggtttaatcgctcatggacgattgaaagttctttaagcctaatcgtgcagcatatattattggttgggaaatataatacagatgcatataacggcgtaatttggtcacttgttcatgaaatgcgaatatcaatcattttcccgttagttttgatggtttgtttacgaaaaacgttgagggattcgttattgacattgtttagttttagtatatgctctgttgcgatattatttttatttcgctcaagtttaacattaacaagctatatgttaacaccacattacacggtgctatttttactaggagcactatttgccaagtataaaaataatgtaatagttttttatagtaatcgtactaaaaatgagaaaattgcatggtttttattagcgattttactttatatgtatgaagggcttatcggagaaattaaagtgctcaataattttatattgcgagactacgtagtagcgataagtgcatgtttatttgtcatattaagtctatcagtatcaactttttcatcgttgttgcgtaataaatacttgttatatttggggaagatttcttacagtctttatttataccatatcatatcgttattttcccttatatacatgcttcatgaaatattgccgttgcctattattttaattttttcactcgttttttcgtttatacctggcgatgctttcgtatatatttgtagaaaaatttgcattcagagtcggaaagtatgtaacaaagcaagcgaa

SEQ ID NO: 10580 - DNA, 747 bp, Bacillus anthracis
atgcaacgttattttgtagaagagaaatatgtaaatgagacaagtattcgcattgtaggtgatgacgtacatcatatcgcaagagtgatgcgtatgtcagctggtgatcatatttattgctgtgtaaatggaaggacggcagtatgttcaattgatgaaattaccagtgaatttattaatacggctattgtagaatgggtagaggcgtcaagtgaacttcctgttttcgtgacgattgccagtggactgccgaaaagagaacagctagagttaattttccaaaaaggaactgagcttggggcagctgcattcttaccatttcaggcatctcgctctattgtaaaatgggatgcgaaaaaagctgataaaaaagttgagcgtttaagaaaaattgtgaaagaagctgcggaacaatcacatagaagtgaaatttcagaagtacatgctccggcatcatttaaacaatttgcttcaatgagtggtgagtatgatgttttccttgttgcttacgaagaggaagcaaatcaacgcgagaaatctaattttgcgaaagctttaacgatgatgaaaccaggtcaaaagttattgattgtatttggcccagagggcggtttagcagaggaagagattacagtgcttcgtgaacataattttgtaccatgtagtttaggaccaagaattttaagaacagaaacggcgccgttatacgcgttaagtgctgcttcgtatcattttgaattgatgggg

SEQ ID NO: 10581 - DNA, 980 bp, Bacillus anthracis
gcggtaaactggaacaaaaaagaagatgattttagtttaatgttttggaagcaaaacatcgctcagttttggacagaagaagaaatcgcggtgtccttctgacaaaaatatcttgggtgcaattatcaaaagaagagcaaattgcttataagcgtgtattaggtggtttaacacttttagatccaaaacaaggcgggcgaaagggagcccctttgttcttggttcttcttggaaaatttacaaaccaaaaggggtattagttttccaggggtgctagggaagaagtcccatgggaagagtattagttcatttttccacaacgttagctactgagaaagaaatcgatgagatttttgactgggtagatactcatccgttacttgagaaaaaggctgggtattattacaagttactatcgtcgtttattaaaacctgaagtgacgaaaaaagagttatacatggcaatggtagcaagtgtgttcttagaaagttacttattctatagtggattcttctatccactttacttagctggtcaaggaaaacttacggcgagtggtgagattattaacttaataattcgtgatgagtcaattcacggcgtattcgtcggtattttagcacaacaaatcttcgcagaactttctgcagaagatcaacaagaagtgcaaaaagaaacgcaagagttattaatggaactatatgaaatcgaaatggcatacacagaagaaatttacacttctatcggtcttgtagaagatgtaaatcgcttcgttcgttacaatgcgaataaaggacttatgaacttaggacttgagccgaagtttgaagaagaagaaattaacccaatcgttttaaatggtttacgtacagatacgaaaaaccatgatttcttctctgtaaaaggaaatggttacgtaaaagcaacgaacgttgaaaagttatctgatgatgacttcgtgtttaatttttaatatatg

SEQ ID NO: 10582 - DNA, 930 bp, Bacillus anthracis
atgaaaaaacgtcaattaggaaactcagatttatttgtgacagaaatgggacttggctgtatgtctctcggtacatctgaagcagaagctatgcgtattatcgacgaagcaatcgatttaggaaatcaatttttttgatacagcagatttatatgattatgggatttaacgaaagatttgttggaaaaaagcattaaaggggaaacgagatcaaattgttcttacaacgaaggttggaaatcgatggacagaagaaaaaaacggctggtcttgggatccttctaaaaattacataaaagctgaagtgaaagaaagtttacgtagacttcaaaccgattatattgatttatatcaacttcatggcgggacgattgaagatcctatagatgaaacaattgaagcctttgaagaattaaaaaaagaaggtatcattcgccattacggtatttcttctatacgtccaaatgtcatccgtgagtatgcaaaacgttcaaatatcgtcagtgtactaatggaatatagcctttttaatcgtcgccctgaagaatggttcccgcttcttaatgaacatcaaattagcgtcattgcccgcggaccgcttgcaaaaggaattctaactgacaacaatgcaagaaagatagaaagagtaaaagaaaaggattacctttcttattcttacgatgaattatatgggacactcgcgaatgtaaaagaattatttggggaaaatttttttaaccgggaccaggtttttcaattttgtttacaaacggaccttgtaccaagtttaattccttggtccaagtttctatcaaacaattgggagaaaattgtacaacccttgtagccaaccccctgttaccaccggaggaatttttccagtttcagcaaatcgttaaatgtgatacgtacgttttacatggttaaaaa

SEQ ID NO: 10583 - DNA, 1386 bp, Bacillus anthracis
atgcacagggagaattctatgtattcgtatattttctattgtatattcctgtgcgaaaaggaaatgaaaattacgataataggtaccggatatgttggattgattactggggtaggattggcagtattgggacattcggttacatgttttgatataaatgatgagaaaattgaacggataaaacaaggggatctgcctatttatgaagctggcttatatgaattaatacatgatgcgtgtgagaataatcgtttaacttttacaacaagtaaagaggaagcatttaaagatgcagaatttatatttattgcagttggaacgccatcgttattagatgggacagcggatttaacatatattcaaaacgcatgtgttgatattgggacatatgcgactaaagacattattgttgttacaaaaagtactgttcctgtagggacgaatggtgctatgaggggatggattgaggagacattacaaaacagacatgaattacatattgtatcgaatcctgaatttttacgggagggttcagggatttacgatttttttcagggagatcgtattgtaattggggccgataatgaggaagcggcacgaaaagtggagaatttatatagtgaattacacttaaaaacatatgttacagatataaaaagtgcagagatgattaaatatgcatcgaatgcttttttagcgacaaaaattagttttatcaatgaaatttcaaatatatgtgagaaggtaggagcaaatgtattagacgtcgcaaaagggatgggaatggataaaagaattggagcgtcttttttaaatgcgggcattggttacgggggatcgtgttttccgaaagatacgaaagcgcttgtgcaaattgcagggaatgtggcacatgattttcgcttgttaaaagccgtcattgaagtgaataataaacaacagttattattgattgagaaagcgaagaaagtaataaatatgaacaagaagcggattgcggtgctgggagcggcatttaaaccgaatacagatgatataagagatgcaccgtcccttattatgatacaagagttaataaatctaggtgcggacatagttctatatgacccgaaggcgattcaaaatatgaaaaatatctttggggagactatacaatatagtgaatgtatagatgaatcgattagaggagcgagtgcggcttttatcatgacagaatgggaagatatccggacttatccgttagaaaattacgtacaacttatgagagaacctattttattcgatggaagaaattgctatactaatgaagatgtcaagaagcaaggaatagattattattctgttggaagagaaagtatttataagagggatttttccgttattcgt

SEQ ID NO: 10584 - DNA, 1071 bp, Bacillus anthracis
atggactcacaagtgatttatgccattttggcatctttcatcactgtactcgtcgttactcctttagttattaagttagcttttaaaataggagcaacagataagccaaacgcacgtaaagtgcaccaaaagattatgcctcgtcttggcgggttagcgatatttattggtgtggctgttggatttgttgtcggtggcttatacgaacaaagaatgttatcgataacgctaggtgcgattatcattgtaatcatcggtattttagatgatatgtacgagttatctgcgaaggtaaaattcggtggacaactattagttgccattatgattgtaaaaagtggattattagtgcaagtattatatattccaatcctcggggatactgaacttggatggcttgcttacccaattacagtattttggattgtaggtattacaaatgcaatcaacttaattgatggcttagatggattatctgctggtatttcatctatcgtacttgcaacgctagcgtatatggccttcactagcccatggggcactggaacagctatcattttacctctagcactaattgcacttgcaagtacacttggatttttattctacaacttccatccggcaaaaattttcatgggagatacaggagcactatttttaggatactgtatttctgttatatcgttacttggattatacaaaagtgtaacgttattcagctttatcgttccagttatcattttaggcgtacctgtatttgatacgacatttgcaattatccgtcgtatcgtaaataaaaaacctatttcagcaccagataaatcgcatttacatcaccgtttacttgcaatgggcttctctcatcgtaaaacggtactaattatatacgcattcggtattttctttagtgtaaatgcaatcattttctctagtgcgacattatggttatccattattcttcttttcattttaatcttctttacagagattattgctgaagtaatcggtcttgtacatgaacgttacaaaccacttatttccttttataaaaaagtgaaaaaacgcgaagac

SEQ ID NO: 10585 - DNA, 1074 bp, Bacillus anthracis
ttggggggctttccccccgaccttggataaaacttaggaactgcgaacacgcttgtatatgtaaaaggaaaaggtgtagtgttacgtgaaccttcagtagtagcgttacaaactgatacgaaacacaaatcgttgctgtagttagggatgcaaaaacaaatgatttggtcgtacacaagggaaacgttgtgggcactttcccccgaagaaaaacggggtaattgcctgattacgaaacgaccgccaccatggtggaaaattacctttcaccaagtccaaaatccaaatggaattcttttcccgtaaaccatacgtaatggtatgtgtacccatctggtattacagctgtagaaagacgtgcagtaatcgatgcgactcgtcaagctggtgctcgtgatgcttatcctatcgaagagccatttgcagcagcaattggtgcgaacttacctgtttgggaaccaactggtagtatggttgttgatatcggtggcggtacaacagaagttgcaatcatttctttaggtggtattgtaacaagtcaatcagttcgtgttgctggtgatgatatggacgattcaatcattcagtacattaagaaaagctacaacttaatgatcggtgaaagaacagctgaagcattaaaattagaaattggtttctgcagggggaacccaagaaggttttcgaaccttaggagaatttcgcggtcggggatttagtaaggggttttaccaaaaaacagggttaattcaaccaggagaaatttgcagatgctttaaaagattccggaaatggcaattggaaaatctgttaaaaataccttagagaaaactcccccctgaattagccgccagacattatggacccgtggtatcgtattaaccatggggcgggagcattactacgtaactttagataaagtgattagtgaagaaacaaatatgccagtgcttgttgcagaagacccattagattgcgtagcaattggaacgggtaaaagcattagacaatatcgatcttttcaaaactgctgctcgataatatcgcaaaataaaaaatcaatgaaattaagag

SEQ ID NO: 10586 - DNA, 828 bp, Bacillus anthracis
gattcagtaagaataactttgtcattggatttacatgtagtagtaaaagagaagtctgataaattgcaagggttccctttccttggaggatccatttccgacagacgataaaaatttaattgttagcacggcatgtaaagtatgtccttctttatcaccccatataatagaagttactagtaacatcccgctaacaagaagttttgggaagtagtgcaccagcaattgtagcggggatagagcttgcgaatcaactaggcaaattgaacttaacgatggatcaaaaagttcaaattgttacaaattttgaggttcatcctgataatgtggctgcttctatattaggaggaactgtaatcggagcacttgatggaaaaaatgtatcggttgtgagaattgaaagtaaggaattaggtgtaatttcacttattccaaatgaagagctaaatacagatgaaagtcgttctgtattaccagatgtatttccgtttcatgaagctgttaaggctagtgcaataagtaatgtattagtagctgctttatgtcaaaagaaatggaaagttgtaggggaaatgatggaaagggatcattttcacgaaccgtatcgtttagagcttgtaccgttattaccatctattcgtaaatgtgcaaaagaattcggtgcatacggtacagcgctaagcggtgcaggaccatctatttttaatattaacgccgtatgagaaacgtcaagaaattgctgagcaattagcgagagtatttacgtctatgaaagtgtgtgagctagaaattgatcatagagggattactgtaaataagaaagaacat

SEQ ID NO: 10587 - DNA, 432 bp, Bacillus anthracis
atgtattcaacagttgaggctggcgaacatattgcatggtggagatcaccaacgtctgatccagcagttacattaacattagccgtgatggtagttaccctcacccattattatggaattaagatgaagggtacgaaagaatacgtaaaaggttatttccaacctatgaaattcttattcccattaaaggttattgaggagtttgctaacacattaacgttaggtcttcgtttattcggtaacatttatgcaggtgagatcttattaggattacttgctaagttaggtggagcaacattccttggagcattaggtgcacttgtaccgatgttagcatggatgggattcagtgtattcgttggatcaatccaagcatttattttcgttatgttaacgatgggttatatggctcataaagtaagccatgaccat

SEQ ID NO: 10588 - DNA, 1522 bp, Bacillus anthracis
gtgagtggaatcattactattttaggattaggtgctggtgaaattagatcagttaacgatgggtgtatatccgaaaataaaagaagcagatcacatgtttgttagaacgaaagaacatcccgttatagaagaagttggagaaagaaaggtatacaatatactgccctttgacaatgtatatggaagcgcttcgatacattttaaaatgtattatgaaacaatttgcgaatacattgatagaaaaagctgaaagggcagaaattattttattgtggtccaaaggcatcccctttgtaacgggaagaacaggtcccctaatgttggaaaaaggtgaagtagcgaatattgaggtgcgaattgaaggtggacaaagtttccttgatcctatgtttgccagtctaaagattgatccgattgaaggatttcaattaattgacgccacatcatttgaaagaggacaattagaattacgtcaacatttaatcttttgcccagtatatgacgcattcgttgcatctgatgtgaaaattacatttatgggagatggctgccccatgattattaaatgtatatcgtaacagctgcgggaacttcttttgaaccagttaaaaagggtacgcctgtacatgttagatcatggaaacggagtttaattaactttaacgagtgtgtatgtaccaccagttcaggaacgtgcgtccttgtatcaacagttttgatttgcttggagaaaattattgcaggacctgggtggaaccgaatggtttgcccgtggggataaaaggcaaaacacatcaatctttaaaggaagtattttattggagaacgctatgaaggttttggaacgcaatttgatgaagggggatgggattcctttagttgaggaaactggtgtttttttatttcaaattatgctgcatgcccaaatcggagaaagatgaaggttggttctctatagatgatattattccgaactttatcttgaaaaattggttcgtcccccccccgcctgtattttgggaaatacgaatgtagaatattgccgatgaagtaattgccaattgggaagaaattaaaaaacaagaaaaaggattcgtgaaagaatctgttttagatggagttccaaaaagtttgccacagttactacgtgcttatgaaatccagaaaaaagctggcaaggttggttttgattgggttgatgtacaaccgatgatagagaaagctttagaagaatggcaagagttccaacaagaagttacaaacatggatgaggcgaagatgttaagtgaatttggcgatttactatttgcatttgttaatatagctcgtcattataaaatagatccagaagaggcgttacattcaacgaatgagaaattcgtcggtcgttttttatacatggaagcaaaggtagctgaaatgaataaagagatgcaagatttatcattagagcagattagatgttttatgggaagaggcaaaacagacagagcgttaatagggggatttaatatgcgtctag

SEQ ID NO: 10589 - DNA, 735 bp, Bacillus anthracis
atggcaatgaaggtaaaagaaagtagctaatttagttgggaattagtgtgcgcacacctgcatcattatgatgaaatcgggttgttaaccccagacgagacgacagagtctggatatcgtctgtattccaatgaaaatttagaaatgttgcagcaaattttattttttaaagaactatcccctcaatatgtgggataattaaagaaatttccctgagtccatcatttgaccggaaagaggcattacagcttcataagaaaatgcttcttgaaaagcgtgctaggttagataaagtgattgcgacgattgataaaacaattcagcatacaaaaggagagattgaaatgacgaacaaagagaaatttaaaggattcgatttcagccataacccatatgaagaagaagcacgtgaaagatggggagacgcagctgtagataaagcgaatgaatatgcaaaaggtatgtcaaaagagaagcaagaagagtttaatgctattttacagaaatttagcggcgcttagacacggtgctccagattccaaagaggcgcaagaagctatcaaagtatggtacgattacttgcaaaacttcagtcactattcattagatgcttttaaggggctcggtcaaatgtacgtcgctgatgagcgctttacgaaaaatatcgataagtttggcgaaggtttagcgcagtttatgtgcgatgcgatggaagtttatgcggatcgtaataaa

SEQ ID NO: 10590 - DNA, 384 bp, Bacillus anthracis
atgattaattttttattatatttagcagtaacacttggccttttatgcattggtcttctcctaatggaagtgacaacgaaagtaaaagaatttaagctaatggcccaaggaaataaggcggtaagctatgtacttggagggcgattacttggtttagctattgttttatattcgacagcagctaattccatttcactttttgatatggtttcgtggggagcggttgggattttggctcaaattatcgtcttttatttagctgagtggcttacaccacgctttaatataaacaaaagtcttgaagaagataatcaagcagtcggtctttttcttatgtttttatcgctttcaattgggatcgtaattgctggttgtataacttat

SEQ ID NO: 10591 - DNA, 666 bp, Bacillus anthracis
atggaaaacaagtcctttttggatgaatggggtaaagtcatatgggaagcaaccattcaaacatttcaaatgacatctatttcactattcatctctatccttattgcactaccacttggtgtcacacttgttttaacaagacctggtgggcagcacgaaaataaaatcatttactcaattcttaatacaattattaatatcattcgctctcttccatttatcattctattattcttcattttaccttttacaaagtttctaatgggaacatccattggtgtgcaaggtgttatcgtaccgcttgtcgtcttcactgctccctatatcgcaagattgatggagacagctttattagaagtcgatcgtggtgtgattgaagcttaccaagcgatgggcgtttctactatacaaattatttggcacgttatggtgaaagaagctcgtccctcccttgtacttggattaacaattgcaacgattggcttaatcggtgctacagcaatggctggtcttgtaggcgctggtgggctaggggacttagcatatcgcttcggacatttacgctatgaacctgaagtaatgtatgcaactgtctttattttaattatcctcgttcaaggattacagtctttagggaatggtattgcacgaagattgaagaaagat

SEQ ID NO: 10592 - DNA, 1197 bp, Bacillus anthracis
gtgggcaaggtgaaagaaatttcgaagcgaaagctacttggtatagcggggcttggatggttatttgatgcaatggatgttggaatgctttcatttgtaatggtggcattgcaaaaagattggggattaagtacgcaagaaatgggctggataggcagcattaattcaattggtatggcagttggagcgctcgtttttggaatactatcagataaaatagggcggaaatcagtctttattattacattattattattttctatcggtagtggtttaacggctttaacgacaacacttgctatgttccttgttttaagatttttaatcggtatggggctagggggagagcttccagttgcctctacattagtatcagagagtgttgaagcacatgaacgcggcaaaatagttgtgttattagaaagtttttgggcaggtggatggttaattgcggctcttatctcgtattttgttataccgaaatatggttgggaagttgcgatgatattaagtgcgattccggcgctatatgctttatatttaagatggaatttaccggattctccgagattccaaaaggttgaaaaaaggccatctgttatcgaaaatataaagtcagtttggtctggagaataccgtaaggcaacaattatgttatggattttatggttttctgttgtcttttcctattatggaatgttcctttggttacctagtgtaatggtattaaaaggatttagtttaataaaaagtttccaatacgtacttattatgacgttagctcaattgccgggttatttcacagctgcttggtttattgaacgtcttggtcgtaagtttgttttagttacgtatttaattggtacagcatgcagtgcttacttatttggagtagcagagtcattaacagtattaatcgtagcaggcatgttactatccttctttaatttaggtgcttggggtgcattatatgcctacacacctgaacaatatccaacagttattcgtggtacaggtgcagggatggcagcagcatttggtcgtattggtggtattcttggaccgctattagtaggatatttagttgcttcacaggcttcactatcactaatatttacgattttctgtggatccattttaataggcgtatttgctgtaattatacttgggcaagaaacgaaacaacgagaattagta

SEQ ID NO: 10593 - DNA, 1476 bp, Bacillus anthracis
aaaaacacctggacaaatagtccaggtgctgaatatatgtatgtcaataacgtagaaacaatacttggtattggttatccgaagcagtgggaggatcaggagaaatataaaggcgtgcgtgggaattgaaaatactggtgaaattcagatgaaatccggttggaaaatgaagcgccttatgaatattttccacaatccagatcagcgcaacaatggatgattactttcaatccgtggtaactatgtattatgaaaacatttaacaactagtcccgcagcgtaagcatcagcccagttgctcgtccaaaatcagcaattacaggcgaatttattggcaaaattgaatggggtccaaagctgggaagtatgaaatagctggtggacatataacaggattacaagatccgaacgtaaagaaaatggaagaagaaattacaaccgattttgaaaatgtttttatgatgtatttaccacgcatatgcgaacattgtatgaatccatcttgcgtatcgtcttgtccatctggggcggaggtataaacgggaagaaagatgggattgttcttgtagatcaaaatgcatgtcgtgcatgaagatcctgcgtatcgtctcgccccataaaaaaaagggttcggttacctggccaacggaaataaagcggaaaaaatgtaccattgtgtttcccgccgtatgaaaggtggtacgccaacaatttgttcggaaaacatgtgtagggggtaatgcggtatatgggagtaatgctatatgacgctgacaagggtaaaagaaagcgtcttctgtggagaatgaaaaagaattatatgaatctccacttactggtttccctaaatccaattgatcagaagtagtaacttgagcgaaaaaaccaaggatttcctgaagaatggaataaaagcggcgcaagagtcggccaatctattaaatggataattcgattggaaaaattgctcttgcctccttcatccaaaaggatcgtaccatggccgattggtttgggtatatccccgccggcttagccccaattatgaacatggtggaagggaaaggtagtaactggcaagcagaagagattttcccagctattgataatatgcgtattccaattcaatatttagcgaatttactcactgcaggagatgaatcacatattcgacttacattgaaaaaaatggctgttatgcgaacacatatgagagcactgcaaattaataaagaaccaaatgaggctgtattaaaagaacttggcttaacgaaacaggatgtagaagatatgtatcgtcttcttgctatcgcaaaatataaagatcgttttgttatcccgacgtctcaccgcgaacaagttgcagacttatataacgaacaaggaagctgtggtttatcatttgcaggtggtccaggttcttgtatgacaatttcttaaataatgggggcggaaaaatatgaaacaaagtctaca

SEQ ID NO: 10594 - DNA, 1755 bp, Bacillus anthracis
atgaattctttagaacaagtaaaaggattaattaaagaagaaattcaagctgctgtattaaaggcagaattagcgacagaagaacagattccaaaacgtagtattagaatctcccaaaagataaaacaaaatggtgacttctctacaaatatgggcaatgcaacttgcacgcgttgcgaaaccagtttatgaaatgattgcagaagaatttagttgcaaacttcgataaagcaaaagcttctactgaaaagattgaaatcgcaggtcctggttacattaactttctacatggataatagctaggtaagcagagcttgatcccgaacaatcgttaatgctggtgaagcttatggtgaaacgaatactggtaaaggtgaaaaagtacaagttgagttcgtatctgcgaatccaacaggtgaccttcacttaggacatgcacgtggtgctgcagtaggtgacactttatgtaatttattagcaaaagcaggttgcgatgattctcgggagtaatacattaatggcgctggtacccaaattcaataacttagctctttctgttgaagctcgttacatgcaagctttaggcttagagaaagaaatgccagaagacggataccatggtgcggacatcattggaatcggtaaacgtttagcagaagagtttggcgatctttatgcgaaaacctgatgaaaaagaaagctatgaattcttcccgtgagtacggttttaaaatatgagttagcaaagcttcaaaaagacttagcaagcttccgtgttaaatttgatgtagggttgtcgagaaatcatcaattatacaaaaaccggaaaaatcgatcaagctcttgcaagtctataacagagaggatgaaatctttgaagaagaccggtgcaacttggttccgttcaatgacttacggcgatgacaaaaaccgtgtattaattaaaaacgacggttcttacacatacttaacgccagatatcgcatatcaccgtgataaattagagcgtggtttcgataagttaatcaacatttggggtgctgaccaccacggttacattcctcgtatgaaagctgctattcaagcgctaggttacgataaagaaacacttgaagtagaaatcatccaaatggtacatctataccaaaacggtgaaaaaaatgaagatgagtaacgtacagggtaaagccagttacacttcgtgagcttatggaagaagtaggctgctcacgcaatgcgttacttcttcgcaatgcgtagcggcgattctcatttagatttcgatatggacttagctgtatcaaaatctaagaagaaccccagtatactatgcacaatacgctcatgctcgtgtatgcagtatccttcgtcaaggtgaagaattaagattaactaccggcggaaaagtgaactaacaactttgttacttctgaaaaaagaataaaattcctgaaaaaacttgggggaatttccccaccagaaatttgccggatgccaccacaaaaaacgtctggcccaacccgatttacaaattatgcatttggattaggggcaacattacacaggtttgtacaatgcagaaaaagtattaaagcaaggataacttagaaattaagtaaagctcgtaatgaagttatgaaaagagtacgccctacgcttccaaacgcattaacaatcgtaggagtacctgcccccagaaaaaatgtaattaagaaaagcggaagcggctcgttcagaataggaggggggatggag

SEQ ID NO: 10595 - DNA, 1562 bp, Bacillus anthracis
attgtactgatcgataattatgattcattcacatataacttgtatcaactattaggcgaatacgaagaagaaattgttgtcgtaagaaatgatcaaataacgatagaacaattagaagaaatgaacccaaaaggaattgtgctttcgccaggaccaggaaaaccagaggaggctggtatttgtattgaagtaattcgtcatttttataagaacgttcccatattaggtatttgccttggtcatcaagcaattatatcagcatttggaggagagattgtaagagcagagcgcattaaacacggaaaaacatcgcgtgcgaaacataacggaacgtcaatcttttcgtatgtgacgcagccgctaacagcgatgcgctaccattctcttgttgccgcacaaacgagcttgccacaatgttttgacatattagcgacagcgatggacgatggagaaataatggcagttcgtcacaattattatccgctcttcggattacagtttcatccggaatcaatcgcgacagaagaagggggaaagttaatacgtgcctttttaggcgaagtgaaagaggaggaaagagtatgaataactatcttcgtaaattagtggagggacaacatttaacagaagaggaaatgtataaagcggggcttcttttattaaatgaaaacatattggaaagtgaaattgcagctttcttagttttactgaaagcgaaaggtgaaactgcagaagaaatatacggtctcgttcgagctcttcgcgaaaaggcattaccgttttcgaatcatatacaaggcgcgatggacaattgcgggacaggtggtgacggtgcccaaacgtttaatattagcacaacatccgcatttgtactggcaggagctggcgtaaaggttgcaaaacatggtaatcgtgctgtttctagtaaaacaggaagtgcagatttattagaagaactcggtgtaaacattagtagtacgccaaacgaaattgattatttattagagcatgtcggaatcgcatttttattcgcaccagcgatgcatccagcattaaagcgcattatgaaaataagaaaagaattaaacgttccgacgatctttaacttaattggaccgttaacaaatccggtgaatttagaaacacaatttgtcggcatttataaacgagatatgttactaccagttgcgcaagtactacagaaactaggaagaaaacaagcacttgtcgtaaacggaagtgggtttttagatgaagcatcattgcaaggagaaaatcatgttgtcattttaaaagataatgaaatagtagaaacgagtattgaacctgagaaatatggattctcaatagtgaaaaacgaagagattagaggcgggaattcgaaagaaaatgcaaagattacgctcggagtattaagcggagaaaaaagtgtttaccgtgatactgttttattcaatgcaggacttgcccttttcgcaaatggaaaagcaaagacgattgaagaaggaataacactcgcagcacatagcattgactctggaaaagcattagcgaaactaaac

SEQ ID NO: 10596 - DNA, 1290 bp, Bacillus anthracis
ttgacgacaggtgaaaaaattactgtaactaatggtgttatgaatgtaccaaacaatccgattattccatttatcgaaggagatggaattggtcctgatatttgggcagctgcatctcgtgtactagaagcagcagttgaaaaagcttatgatggtgagaagaaaatcgtttggaaagaagtgcttgcaggggaaaaagcattcaaccaaacaggcgagtggttaccagaagaaactttaaatttaattcgtgaatatttaatcgcgattaaaggtccacttacaactccagttggcggtggtattcgttctctaaacgtagcacttcgtcaagaattagatttatatgtatgtctacgtccagttcgttattttgaaggtgttccttcacctgtaaaacgtccggaagatactgatatggttattttccgtgaaaatacagaagacatttatgctggaattgaatatgcgcaaggatctccagaagcagaaaaagttcttgctttcttaaaagaagcaatgggtgttaataaaatccgcttcccagaaacatctggtattggtattaaaccaatctcagaagaagggacaaagcgtcttgttcgtgctgcaattcaatatgcaattaacgaaaaacgctcttctgttacattagttcataaaggaaacattatgaaattcacagaaggtgctttcaaaaactggggttacgaagtagcggaacaagaattcggcgacaaagtatttacttgggctgaatatgatcgtatcgttgagaaagatggtaaagatgcagcgaataaagcgatggcagacgctgaagtggctggaaaaatcatcgtaaaagattctattgcagacatcttcttacaacaaattttaactcgtccacgtgagttcgatgttgttgcaacaatgaacttaaacggagactacatctctgatgcacttgctgcacaagtaggtggaattggtattgcacctggtgcaaacattaactatgtgactggacatgctatctttgaagctacgcacggtacagctccaaaatatgcaggtttagataaagtaaacccatcttcagttcttctttctggtgtattattattagagcacttaggatggaacgaagctgcgaaattagtaactgcttcagttgagaaaacaattgcttcaaaagtagtaacttatgatttcgcacgcttaatggaaggtgcaacagaagtgaaatgttctgagttcgctaatgaacttattaaaaacatggatgtagcgataatcaaaaacgca

SEQ ID NO: 10597 - DNA, 1062 bp, Bacillus anthracis
atgtcactggacaaaattatgaatgaagcgattagtccatggatgaagggggatggccctgattctgatattgttttaagtagtcgaattcgtttggctcgtaattttaaaaaatatcaattctctactatgcaaaatgaagaagaaactaaacagattcaagaattatttaaaaaggaatttataaataaaacggtagaaccttttggagagtttgaactattaaaaatgaatgaattaacgcctcttcaaaggagagtattagttgaaaagcatttaattagtcccaaccttgcaggaacggaatatggagcatgtctcttgtcagaaagcgaacatattagtgttatgctgaatgaagaagatcatattcggattcagtgcttattttcaggattgcagttatcagaggcccttcaaagtgccaatcaaatagataattggattgagaaagaggttgaatatgcttttgatgaatcacttggatatattacgagttgtcctactaacgttggtacaggacttagggcttccgtaatgattcatttaccaggactcgttttaacgaaaagaattagccgtattatacaggtaattcaaaaattagggttagtagtaagaggaatatacggtgaaggtagcgaagcgttaggtaatatatttcaagtgtcaaaccaaatgacgctaggaaaatctgaagaagatattattgcagatttaaagagtgttattcaacaaatcatacagcaagaaaaaatggctagagaattaattgtacaaaattcaagtattgaacttgaagataaagtttatcgctcttatggcatactagccaacagtcgtttaattcaatctgcggaagcagccaattgcttatcagatttacgacttggcattgatttaggatatatacaaggtatatcgagaaatattttgactgagctaatggttcttacacaaccaggcattttacaacaatatgcaggaggacctttaggcccagaagaaagagattatcgaagagcaaccttaatccgtgagcgattacgtattgaaaaaaac

SEQ ID NO: 10598 - DNA, 394 bp, Bacillus anthracis
ttggcacaggttcaatactatggcactggacgtcgtaagagttcagtagcgcgcgtacgcctagtttcaggcgaaggacgcgttatcattaacggtcgtgattttgaaaactatatcccatttgctgcattacgtgaagtagtgaaacaacctctagttgcaacagaaactttaggtaactacgatgtacttgtaaacgtaaatggtggtggatacactggtcaagctggtgctattcgtcacggtatttctcgcgctttattaaaagctgatccagaataccgtctaacactaaaacgtgcaagtctattaactcgtgacgcacgtatgaaagagcgtaaaaaataccggcctaaaaggcgcacgtcgtgcacctcagttctcaaaacgttaa

SEQ ID NO: 10599 - DNA, 972 bp, Bacillus anthracis
gtgcttgagcaaggtttattagtaacggctggggtagcattcttaatttctgttgccctttcgccattgtttattccatttttaagaaaattaaagttcggacagagtattcgtgatgagggaccaaagtcacatcaaaaaaaatcaggaacaccgacaatgggtggtattgtcatatatgtatctatgatggtaacttcacttattatggcgattaagtttaatcatttaggtgcagaagtttcgttattactattagtaacatttggttacggattgattgggtttttagatgactacataaaggtagttaagaagagaaatcttggtttgacatcaaaacaaaaattagtaggtcagcttgttattgcaattgcgttcttttttattggaaaagggcaagcgttccacacatacattatgattccaggaacggatgttaagtttgaattaggttgggcgtattttgtacttgtactatttatgcttattggtggatcaaatgcagttaacttaactgacggtttagatggtttattatcaggaacagctgctattgcatttggagcttttagtattattgctgttgcacaagagcaatttggcgtagcgatattctgtatggcggttgtaggagctgtacttggatttttagtattcaatgcgaatccagcggaagtgtttatgggagatacaggttctttagctttaggtggagctattgcagccgtagcaattttattaaaacaagaattgctacttgtaatcataggcggagtattcgtaatggaaactttatcggttattattcaggtcatttcatttaaaacaacaggaaaacgtgtctttaaaatgagcccattacaccatcattatgaattatgtggttggtcagagtggcgtgttgttgtaacgttttggtctgtaggatttttattagctgtgttaggaatttatatcggggtgtggatg

SEQ ID NO: 10600 - DNA, 1254 bp, Bacillus anthracis
atgggtattttacaagatcttgaatttcgcggtctaattaatcagcaaacagacgctgagggccttgagcaattattagaaaaagaaagcgttaaattatactgtggtttcgacccgacagcggatagcttacacatcggtcatatgttaccagtattaatgttacgtcgtttccaattagctggtcaccaaccaatcgcacttgttggcggtggtactggtatgatcggtgatccaagtggtaaaaaagcagagcgtacattaaatacgaaagatacagttgcttactacacagaaagcattaaaaaccaactttcaaacttcttagagttcgaaaacgtggaaaacccagcaacgatggctaacaactatgactggcttggtaacttagatgtcatttcattcttacgcgatatcggtaaaaacttcggtttaaactatatgctagcaaaagatacagtagcatctcgtttagaaactggtatttcatttactgagtttagttacatgattttacaatcatacgacttcttaaacttataccaacaccataattgccgcctacaaatcggtggtagtgaccaatggggtaacattacagctggtcttgaattaatccgtaaatcagaagaagatgcgaaagcattcggtttaacaattccacttgttacaaaatctgacggtacgaagtttggtaaaacagaaggcggcgcaatttggttagacccagagaaaacaactccttacgagttctaccaattctggattaacacagatgaccgtgatgttgttaaatacttaaaatacttcacattcttatctcatgaagaaattcttgagcttgaaaagcaagtagctgaagcgccagaaaaacgtgcagcacaaaaagcattaggtgcagaaatgacaaaacttgttcacggcgaagaagcattagagcaagcgattaaaatttcagctgcattattcagcggttctgtagcagaactgactgcaagcgaaatcgagcaaggattcaaagacgtaccatctgtagaacgtactgcagaagatacagtattaatcgacttacttgtagaaagcaaaatctctccatcaaaacgtcaagcacgtgaagatgtaacgaacggcgcaatctacgtaaacggtgagcgtacacaagcattagactacgttgtaacagaaaaagaccgcatcgaaggtaaattcacaatcattcgccgcggtaagaagaaatatttcttaattcgttac

SEQ ID NO: 10601 - DNA, 1686 bp, Bacillus anthracis
gtgtcataccaagcgttataccgaacatggagaccgcaaaaatttgaagatgtagtcggtcaaaagcacgtgacaaaaacgttgcaaaatgcccttcttcaagagaaagtttcacatgcatatttattttctggcccaaggggaacaggaaaaacgacaattgcaaaagtatttgcaaaggcaatcaactgtgaacatgccccggtagctgaaccttgtaatgaatgtccctcttgtttgggaattacgcaagggtctatttcagatgtattagaaattgatgcggcttcaaataacggtgtagatgaaattcgagatattagagataaagtaaaatatgctccaagtgctgtagaatataaagtatacattattgatgaagtccacatgctttctatgggtgccttcaatgcgcttttaaaaacgttagaagagccgccaggacatgttatctttattttggcgacaacagaaccgcataagataccgcctacaatcatttcgcgttgccaacgtttcgaatttcgaaaaatatcagtaaatgatattgttgagagattgtcgacggttgtgactaatgaaggtacgcaagtagaagatgaggcgttacaaattgttgcgcgtgccgctgaaggtggtatgcgtgatgcgcttagtcttattgatcaggcgatatcttatagtgatgagagggttacgacagaagatgtattagctgtaacgggttctgtttctcagcaatacttaggcaacttagtagagtgtatacgtgaaaatgatgtatcaagggcgttacgtatcatagatgagatgatgggtaaagggaaagatccagttcgttttatggaggatttcatttactattatcgtgatatgcttttatatcaaacttcaccacaactggaacatatgttggaacgagtaatggtagatgagcaattccgtatgttaagtgaagaaatgcaaccggaagtaatctatgaaatcattcatactcttagtaagggacaacaggaaatgaagtggacaaatcatccgcgaattttcttagaagtcgttatggtacaactgtgtcaacagtttatgatgcaagcaaacggtgcagatcgtttacaagcaattatgaacaggatgcagcaattggagaaagagttagaacaagtcaaaaagaatggtgtgccggtcggtgtgcaacaggaagttaaagagacgcgtgcagcaccaaagccagtgcggacagggagtatgaagattcctgttggacgtgtaaatgaagtattaaaacaagcaaagcgtcaagatttagaacaattaaaagctgtgtggggtgagttactaggaagactcaaagcatacaacaaagtagcatttgccgttttattagaaaatagcgaaccagtagcagcttcggatgatacttacgttttagcgtttcaatatgagattcactgtaaaatggcaagcgaaaatcgagaagctatggatacagtggaacaagctttatttgaattgctaagtaaaaaattaaatatgattgccattccaaaaagtgaatggggtaaaattcgtgaagattttttaaaacgtgaaggtggaagttctgaagaaagcccagagaaaaaagaagatcctcttatagaagaggccataaaattagtagggcaagaactcattgaaataaaagag

SEQ ID NO: 10602 - DNA, 492 bp, Bacillus anthracis
ttgggtcgtaaatggaataatattaaagataaaaaagcatcaaaagatgcaaatactagccgtatatacgcgaaatttggacgtgaaatttatgtagcggcaaaacaaggcgagccagatccggaatcaaaccaagcgcttagagtggtattagaacgtgcgaaaacatacaatgttccaagaacaattatcgatcgtgcagttgaaaaagcaaaaggtggttcagaagaaaattatgacgagcttcgttatgaaggatttggaccaaatggagctatggtaattgtagatacacttacaaacaacgtaaaccgtactgcagctgatgtacgagctgcatttagcaaaaacagtggtaacatgggtgtaaacggttctgtagcttacatgtttgatgcgacagctgttatcggccttgaaaggaaaacatcagatgaagttcttgagattttaatggaagcaaatgttgatgcacgtgatattcttgaagaa

SEQ ID NO: 10603 - DNA, 813 bp, Bacillus anthracis
atggtggcaacagtagtaaatgtacaggtgaaaaacgaggagaaaattgagactgcgccaaagaaagtagtatttgatacgaaaaacttaaatctatggtacggagaagatcatgctttaaaagatattaacttaagcattcatgagaatgaagttacggcaattatcgggccaagtggttgtggtaaatcaacttacttaaaaacattaaatcgtatggtagagttagtaccaatcgtgcgaactacaggcgtaattgaatatagagagcgcaatatatttgataaatcatacccagttgaagaattacgaacacatgtaggaatggtgttccaaaaaccaaatccatttccaaaatctatttatgaaaatgtagcatacggtccaaaaattcatggtattagcgataaaaaaacattagatgaaattgttgaaaaaagtttacgtggagcagcaatttgggatgagttaaaagatcgtttgcatgataatgcatatggtttatctggtggacagcaacagcgtctatgtatcgcacgttgtttagcgattgaaccagacgttattttaatggatgagccaacatcggcactagatccaatttcaacattaaaagtagaagaattaattcaagaattaaagaaagactttagcatcgttattgtaacacataacatgcaacaggcagcacgtatttcagataaaactgctttcttcttaagtggagaagttgtggagtatacagatacaaataaattatttacgacaccttcagataagcgtacagaagattatattacaggccgattcggt

SEQ ID NO: 10604 - DNA, 903 bp, Bacillus anthracis
atgagaagatggggaattgagttattaattttagcagtcgttatcatttgggggattaattttacgattgcgaaatatggacttttagaatttacagcaattgagtttactgcacttcggatgatatcggcggcaccgcttatgttactccttacattttttattgagaagtcggtttatatggagcgaaaggatatacctagattaattatcgttagcgttgtaggtattgtactgtatcaaacgttatttatggaaactgtcaaatatacatccgctacaaatgcctctttactcatttctatttcacctatttttacaactgtatttgcgattttcttaaaacaagaaaagttttcttctcgaaagctcatcggttctatcattgcttttggtggggcagctttagttttagtagcagggcattcactggctagttctttttacgggaatgggattggactcattacatcaatatgctgggggctttatcctgttttagctggtccattaattaaaaaatattcagcattacgtgttaccgcatggtcagcattagttggcgcgattccgctcttattattaagtggaccacatgtatttacaatgccatttcacattacacatggaatgaccctatttgctttactatattctattttctttgtaacagtatttggtttagtgatgtggtatgtaggcgttcaaaaaattggggcgtcacatacgatggtatatatgtatataacgccgcgtgttgccgttttatttgcagctgtatgggcagatgaatatgtatcgtttcaacaaataatcggtggaattattattttcttcggtctatggtttgtgaaatcggagaaagtaaacattcattctactgcaggagaacctatatcaaaa

SEQ ID NO: 10605 - DNA, 846 bp, Bacillus anthracis
atgcctttagtttctatgaaagaaatgctaaacaaagcactagaaggaaaatacgcagttggtcaaatcaacatgaacaacttagagtggactcgaagctatcttagctgctgcggaagaagaaaaatctcctgtaatcctaggtgtatctgagggtgcagctcggcatatgactggtttcaaaacagttgtagctatggttaaagctttaatcgaagaaatgaacatcactgttcctgtagcgattcaccttgaccatggttcaagcttcgaaaaatgtaaagaagcaatcgatgcaggtttcacatctgtaatgatcgacgcttctcaccacccattcgaagaaaacgtagaaactactaaaaaagtagtagaatacgcacacgctcgtaacgtatctgttgaagctgagcttggaacagttggcggacaagaagacgacgtaatcgctgaaggcgtaatttacgctgacccagctgagtgtaagcaccttgttgaagcaacaggtatcgattgcctagctccaacctttaggttctgtacacggtccttacaaaagtgagcctaacttatgattcgctgaaatggaacaagttcgtgacttcactggtgtacctttagtattacacggtggtactggtatcccaactgctgatatcgaaaaagctatctctttaggtacttcaaaaatcaacgtaaacactgagaaaccaaatcgagtttacaaaagctgttcgtgaagtattaaacaaagaccaagaagtttacgatcctccgtaatttatcgggactggccccgacgctttcaaaactactgttattggtaaaattcccgaaattccgttc

SEQ ID NO: 10606 - DNA, 1305 bp, Bacillus anthracis
atggaaagaagagtgccaattacggttgaagaagctgttcgtaaagtaatggaatttgctaatgagggtttaaaggagctactacctattgaattagcttatggacgtgtattagcggaggatttagtagctgactatgacgtaccttcattcaatcgttccccgtatgacggatttgctattagagcagaagatacgaatgtagcaagttatgaaacgccaattgtatttgaagtagtgggtgaaattggtgcaggatcgctattcgatgagaaagtaggtccgtttcaagcagttcgaattatgacgggagcgcaaattccgaatggatgtgatgcagttgttatgctagagctgactcgtcaatatgaggaggctggcagtaagtatatggaattgaagcggtcattcaaagcgggcgataatatttcttttcaaggtgaagatgctcgtaaaggaacggttcttgcaaagaaaggaacatacattaatccaggtatttcagctcttcttgctacattcgggtatagcgaggtgccagttgcgagaaagcctgtagttggactattagcgactggcagtgaattactggatgtaaacgattcattacagccagggaaaatccgaaatagtaatacgtatatgatattgtctcaaatccgaagagcaggcggaagagtaaaatattttgggaagtttagcgatgattttcatacgtgttttacggctgtaaaagaagcattaagccaagtagatatgctcattacaacaggtggtgtatcagtaggggattacgattatttgccagctatatatgaaaaattaggtgcatcagttcttttcaataaagttgcaatgcggccaggaagtgtaacgactgtagcgcaattaaatggaaagttattatttggtttatcaggaaatccatctgcttgttacgtagggtttgaattgtttgtaagaccttgtattcggacgtatatgtttagtgaaaaagcacatgtaaaaagagaaaaagcgttattaggagaagactttttaaagccaaatccatttacaaggtttgtacgaggaaaactaacatataacgaagggcagttaatcgcttatccgtcagggtttgataaatctagctcagtttcctctctagcggagacaaatatatttattgtacttccaggtggtacgagaggttataaaaaagatatgttcgtagatgtgctcttgttggaagataacgaaggtagtgaatggccttggacattttataaagtgagaggtgattctaatgggacaagtgctatt

SEQ ID NO: 10607 - DNA, 270 bp, Bacillus anthracis
atgccaggtgttttaattgtagaggctttagcacaggttggtgctgttgctatgttgaaaaaagaggagaatcgtggtcgcttagcattcttcgcaggcattgataattgccgttttaaaagacaagtccgtccaggtgaccaactacgtttagaagttgaaatgacgcgtgtacgtggagcgattggaaaaggaaaagcaattgctactgtagatggtgaaattgcttgtgagacagaaataacgttcgctcttggagataaaaaagaa

SEQ ID NO: 10608 - DNA, 357 bp, Bacillus anthracis
atgactaaagaacaaatcattgaagcagttaaatctatgactgtattagaacttaacgacttagtaaaagctatcgaggaagaattcggcgtaactgctgctgctcctgtagctgttgctggtggcgctggagaagctgctgctgagaaaactgaatttgatgtggaactaactagcgctggtgcacaaaaaatcaaagttatcaaagttgttcgtgaaatcactggtcttggcttaaaagaagctaaagaattagttgacaacactccaaaagtaatcaaagaagctgctgctaaagaagaagctgaagaaatcaaagctaaacttgaagaagttggcgctgctgtagaagttaag

SEQ ID NO: 10609 - DNA, 1308 bp, Bacillus anthracis
atgccgaaaccagtaatagcaatagtaggccgcccgaacgtagggaaatctactattttcaatagaattgttggagagagagtttcaatcgtagaagatattccaggtgtaacgcgcgatcgtatttatagcgctggagaatggttaaatcatgaatttaacattattgatacaggtggaattgatattggagacgagccatttttgacacaaattcgtcaacaagctgaagtagcaattgatgaagcagatgttatcatttttatgacaaatggtcgtgacggtgtaacagcagcggatgaagaagttgcaaaaatattatatcgttcaaataaaccagttgtacttgcagtaaataaagtggacaatccggaaatgcgcagtgacatttatgatttctatgcattaggatttggcgagccattcccaatctcaggtacacacggattaggattaggtgacttattagatgaagctgcacagcattttccaaagattgaagaagacggatatgatgaagatacaattcgtttctctttaattggccgtccaaatgtagggaaatcatcacttgtaaatgctcttcttggtcaagagcgtgtaattgttagtaatgtagcaggaacaactcgtgatgctgtcgatacaccatatagtaaagatggaaaagattatgtaattatcgatacagctggtatgcgtaaaaaagggaaagtgtatgaaagtacagaaaagtatagtgtacttcgtgcactaagagcgattgaacgttctgacgttgttttagtcgttttagacggtgaagaaggaattattgaacaagataaaaaaatcgctggatacgctcatgattcaggacgagctgtcgtgatcgttgtaaacaaatgggacgcagtgaaaaaagatgagaaaacaatgaaagcatttgaagaaaacattcgtgctcatttccaatttttagagtacgcaccgattgtattcttatctgcaaaaacgagaaaacgtacacaaacgttaataccggttatcgatgaggtaaatgaaagccatagtatccgtattcaaacgaatgtattaaatgatgtaattatggatgcggtagcgatgaatccaacgccaacgcataacggtagtcgtctgaagattttctatgcaacacaagttgcggtaaaaccaccaacatttgttgtgtttgtaaacgatccagaactattgcacttctcatatgagcgcttcttaaaaaatcgtttacgtgaatcattcggctttgtaggaacgccgattcacattatcgctagagcaagagac

SEQ ID NO: 10610 - DNA, 810 bp, Bacillus anthracis
atgaaaaaattattactgacagcacttatttcaacttcaatttttgggttagctgcctgcggggggaaagataacgatgaaaagaaactagttgttggagcttctaacgtaccgcacgctgaaattttagaaaaggcaaaaccgttacttgagaaaaaaggaattgaattagaagtgaaaaaattccaagattacgtgttgccaaataaatcgttagcggataaggatttagacgctaactacttccagcacattccgtatttagaaaaagaaattaaagataaaaagtatgaatttgaagtagcaggaaagattcatttagagccaattggtgtatactctcaaaaatataagagcttaaaagagcttccagacggagcgacaattattatgagtaattcagttgctgaccatggacgtggtttagcaattttacaaaaagaaggtattttaaaaattaaagacggagtagatccagttaaagcaactccgaaagatatcgcggataatccgaaaaacttaaaattcaaaacggatattgagcctggtttattaccacaagtgtataacaataaagaaggcgacgctgttttaattaactcaaactatgcaatcgatacgaagttaaatccagaaaaagatgcaattgcaattgaaagcaatgattcaccgtacgcaaacgtagtagctgttcgtaaaggcgataaagataaaaaagaaattaaagagctagtagaagtgctacattcaaaagaaattgaagactttattaataaagaatataaaggggcagttgttcctgtaaaagaa

SEQ ID NO: 10611 - DNA, 948 bp, Bacillus anthracis
gtgtcatttgcatcagaaacaaagaaagagttgacgaatctagagatgaaggaatgctgtgagaaagcagaattatcagcgttgcttcgcatgaacggatcactttctttttcaaaccgtcgtctatcaatcgatattcaaacggaaaatgcggcaattgcaagaaggatttatacgcttttgaaaaaaggatatgacgtgacggtagaattacttgttcgtaaaaaaatgcgattgaagaaaaataatgtatatatcgtaaggcttgttgagaagtctcgcgaaatattagctgatcttcatatcgtacgagatgacttttcatttattcgaaatatatcacaagaattaattgagaagaaatgttgtaaacgatcgtatttacgcggtgcatttttagcaggtggttcagtaaataacccagaaacatcatcttatcatttagagatcttttcgttatataaggaacataatgatgctatatgtgaactgatgaacggatttgatttaaatagtaagacgttggaaagaagaaaagggtacattacgtatttgaaagaagcagaaaagattacagagtttttaaatattataggtgcacataatgcacttttgagatttgaagacattcgaatcgtacgtgatatgcgtaattctgtaaatcgtttagtgaattgcgaaacagctaatttaaataaaacaattggtgcagcgctaaggcagattgaaaatatccgctatattgatgagacggttggtcttgatatattgccggataaactacgcgaaattgcgcaactacgaagagattatcaagatgtaacattgaaagagttaggtgagatggtatccggggggaaaattagtaaatcgggtattaatcatcgtttgcgtaaaatcgatgatattgcagagaaattacgcgcgggggaaacggtagcaaaaaaa

SEQ ID NO: 10612 - DNA, 2136 bp, Bacillus anthracis
atgcataaacttcaaacgaataaaggcgcgcgctattttatgattgcttttattgttttgtttcttattatgcttttgcgttttttctatattcaagccgtaggggtcgtacataatgtgaatgtaaaggatcttgcaactgaacaacataataaaaatggtattttggaagcaaatcgtggcacaatatatgatcaagctggaaaagtcttagttcaagattccacaacgtatcgtgttgttgtgaatttgaaaggtaatggcaaattgaaaaataaagatgaaaccgcagcgcaattagctgatgcgcttgaaattaataaagaagatgtgttaaagaatttccatgaagggcgtacgcaagttgaaattggaaaagttggtcgaaatttaacgagagaaaagaaagaccaaattagaaagttaaaaatcccgggtgtatcttttatgcctgagaaagcaagggtgtatccgaatgaagattttgcatcttatatacttggttttgctagaccagacgataaaggaaatacagaagggaaatttggacttgaaaaaagtttggataaatatttgcgctcgacaaacgggaatatagagtatgtgggagggcgaggaggtatcccgcttacaaatgatataggaaaaatagaacctgctaaacatggaaataacgtatatcttacacttgataaacaaattaatagttttttagaagaagcgatgaataaggcgcaagatcactatgatccttctatgctattaggtatcatagcggatccaaagacggggaaagtgttagctatgtctagtaaacctagttttaaccctaataaaggggatattgaatactttttaaatgatccaattgccaatgcatatgaaccaggttcaacgatgaaagtatttacgttagctgcagcaattaatgaaggggtatataacggaaaagaatatttccaatccggaaaatatgcagttggttcatctgatataaaagatcataatggtggatttggatggggatctattacatttgatgaaggttttgaaagatcatcaaacgtagctttttctattttagaagatcagttattaaaaccaaataaatttaagcaatatatgaacaaatttggtttcaatcaaaaaactggaatagatttacctggtgaaagtaaaaatactttactattaaatacacaaattcaacaagtaacaacttctttcggacaaggttctacagtaactccaattcaattaatccaagccgctactgctatagcaaatgacgggaaaatgatgcaaccctatatcgttgacaaagttgtaaatccaacaaacaaacaagttattatggaaaatcaaccgaaagaaattgggaatccgataaaaaaagagacagcggacaaggtaagagacttaatggagcgtgttattacgtcttcaaaaggtactggtacaatgtataaagtggatggttacccaataggaggtaagacaggaacagctcaaattcccaatcctgaaaatggacgatacatggaaggaaaagaaaattatattttttcatttttaggtatggctccgattgatgacccggagttaattgtatacttggcaattaaacaaccaaagttaaagggagacgagtatggagctcagccgcttgcagaaatatttaaaccagttgtgaaaaatagccttgaatatttaaaggtgagaccatacacagaaaaacaaatggccgatgcaacggaaaaatcccaattaaaagtgcaaaactatgtgaatcaatcaatgggtacggtagagaataatgtaaaaaaagagaagctccaaccaataactttaggagaaggaaaaataataaaacaatatccgcagtctggcgaagtaatgagtgaaggagatcgaatatttttattaggaaaaaacgctacaatgcccaatttacaaggttggtccatgcgtgatgtgatgtatttttctaaactattaaaattagatttaaaaacttcaggtacgggatatgtaacaagtcaaagtatcaaaaaaggacaagctatacaagaaggcgatgtattagaactagaattagagccaccgttacaaccgttaacagaggcaaatacaaat

SEQ ID NO: 10613 - DNA, 994 bp, Bacillus anthracis
atgacgaagacgtgggagcagctttctgctatacaacccatcggtgtaaaaatgttggaattgaatagcaattcgcaaaagaagcgtaattatcccaccccttacttgttagcaaaggagagaaagggacaggggaaagtttgcgacagcaatttcaaatgggcaaagaagtttcctctgttctcagcgggaatagggtagagcctttgtcatgtatgtacaaattgtaagcgaattgattcaggtaaccacccgaacttacatattgtaaaaccagacggattatctattaagaagcaacaaattcatgatttacaagaagagttttccaaaacaggattagaagcaaataaaaaggtatatatcattgagcacgcagaccgtatgacagcaaatgcagcgaatgcactcttgaaatttttagaagaaccaagtagtgatacaacagctattttacttactgaacaaagtcatcaaattttaaatacgatattatctcgctgtcaagttgttacattgagtaacgttacctacggaatctttaattagaagattgcaggatgaaggtattacggtatctttatcgacacttgctgcacaactcacgaatagttttgatgaagctttaactttatgtaatgatgaatggtttgcacaagcacgagctttagtgataaaattatgtgaagcgctcgaaaaagataaagcctctattttttttgtacaagaaaaatggggaaaacactttggagagaaagagcaattacagcaaggtttagatatgttactccttatctataaggatttattatatgttcaacttggagaaagaagatcggcttgttttttcgtgagcagaaagagatgttttgaatctttctcctatgctcagaagcgcattggatcaactctctttaatataataaaggcaaaaaattaaatcaacgcctatgtgaaatgcgccactttgttgttccaacagatattggtgccg

SEQ ID NO: 10614 - DNA, 1062 bp, Bacillus anthracis
atgctaggagtatcaatttatctttcaaaagagcgagtaaagaaacaagaagaatggctaaaagtagcgaagaaaaacggatttttatctatttttacatcacttcatataccagaagatgatccaaatacgtataaagagttaattcaaatacttgggaaacaggctcttgaaaatgaaatggaattaatggttgatgtttcccaaaaatcgctacaccatttaggaatgacgtacgaaaatgtggaagagttagtagagtggggaattactggtttacgaatggactatggcatcacgccgaaagaaatcgcgcgtgtatcccataaaatgaaagtagctttaaatgcaagtacaattacagattccttttggaaagagttactttcggaaaatataagagtaaagaatgtagaagcgtggcataatttttatccgcgtccagaaacaggactagcaaaatcattcttacaaaaacaaaacgaatacttacatgagtgcggcataaaaacgatggcatttattccaggagatggtgaaaagcgtggtccactatatgaaggcttaccgacgctagaaaagcatcgttatatgagaccgctcgaagcgtacttagaacttgtacaaggttgtggtgtcgataaagtgttaatcggggatataagcggacgtgtagaaagtgtacaagagatagcgagtgccagtagagggattattccattgcgatatgagccattgatagagaaaagtgaagtgttaaaaatggtagaacaagtgcatacaaatagactagatccagcccgtgatgtcattcggtctgtagaatcacgagaagaacataaagtgattttacagccaatgaatgcaattgtaagaaagaaaggcagcattacaattgataatgaattgtacggtagatatgcaggagagatgcaagttgctatacatgatttgcctgcagatgagaaagtgaacgttgttggcatggttgtagaagaggatatttctttattgccgtatgttggcgctggaaaaatgtttcaacttttttgtgcgatagag

SEQ ID NO: 10615 - DNA, 551 bp, Bacillus anthracis
atgggtcaaaaggttaatccaattggtcttcgtgtccggcgttatccgtgactgggaatctcgttggttcgctgagaaagattacgctacattattacatgaagacatcaaaatccgtgagtacattaatgtacgcttaaaagattctgctgttgctaaagtagaaatcgaacgtgcagcaaatcgtgtaaatgttacaattcacacagcaaaacctggtatggtaattggtaaaggtggtactgaagttgaagcacttcgtaaagctgttaaccaattaacaggcaagcgtgtacacatcaacattttagaagttaagagagctgatcttaacgctaaattagtaggcgaaaacattgctcgtcaattagaaaaccgtgtatcattccgtcgtgcacaaaagcaagttattacaacgtgctatgcgtgcaggtgctaaaggtattaaaacacaggtttctggtcgtcttggcggagctgatatcgctcgtgcagaatcttacagtgaaggaacagttccacttcatacacttcgcgctggaattactagc

SEQ ID NO: 10616 - DNA, 1128 bp, Bacillus anthracis
atgacagatcaagaatatatgaggattgccctgcaattagcagaaggaacatgtgggcaaacaagtccaaatcctatggttggtgctgttgttgtaaaagacggaaacatcgtcggtatgggggctcatttacgtgctggtgaagaacacgcagaagttcatgctcttcatatggctggtgacaaagcaaaaggagccaccgtgtatgtaacccttgaaccatgtagccattttggaaaaaacccccccccttggctgggaatttgctccatcaaaaaaagaaagtcaaccgggttgttaattgctacttctgaatggcaatccgcttcgtttctggtaatggaaaaagaaaattagaggaagcttggcatcgaagtaactaccggtgttctggaagcagaagcagttttattaaatcgctacttttttcactacatgaaaacgaaacgtccatttgtaaacaataaaaacagcgatgagcttagacggaaaaacagcaactgttactggtgaaagcaagtgagattacaggtgaaaaagcacgagctgatgttcaccaataccgccatacacatgatgcgattctcgttggagtgaatacagttatagctgataatccgcatttaacaacaagattttcttagcgggggggaaaaatcctatacgagttattttagatacccatttacgaacgccaccatcttctcatgtcataacagattctttagcaccgacatggattatagttggtacggatgtaaatcaagagaaaatagcttcttatgaatctaaaaatatagctatattccccaatgaaaccgaagcagattgaataccaggatgttttttaccttactcggcggaaaaccaatttcctttttcttttcgtcgaaggggggcaaacagttcatgcaagcttcttacaaacaaagtatttcaatggaattgtaacttatataagcccaaaaattaattggtggcagtaaggcccctactttatttggcggaaatggtttttcaacattacaagatgcgctttccttggaaattcaagagatgaaacaaattggtgatgatataaaaatcgttgcgcatgcccgaaacgaggtgacgaaatgtttacaggaa

SEQ ID NO: 10617 - DNA, 1116 bp, Bacillus anthracis
gaaaatcattacttattattaacgccaggaccattaacggacaacaaaaggccggtaaaaagaaagtttatgttatcagattgggggttacgggggattgtgaattatacccggatcggtcaaaaaaggtagaagttaaatttgtttcgtttgccccgcaaggaagaagagaaatatacaacagtattaatgcaaggaagcggtacgttttcagtggaagcagtaatcggttctgtcattccaaaaaacggaaagcttcttgtttgtacaaatggtgcatacggtaaacgaattgtacaaatggcagagatgttacatatagatgtggtggtcagtcaaacagaagagtgggagcctactaatattgtagaagtagaaaagatatttccaccagataagggagattccccatattgcagttgttcattgtgaaacaacaacaggtattatcaatccaattgtagacgtatgtaaattaggggaagcaatacgggaaaagtaacactagttgatgcaatgagtagttttggtggtattgaaatagatattgctgagttgcaaattgactttctaattagtagtgcgaataaatgtattcaaggagttccagggttcggatttgttattgcacagcgtgatgaattattgaaatgtaaagggcaggcacgttcattatctttagatttatacgatcagtgggaaacgatggaaaatcaaaatgggaaatggcgttttacgtcacctacacatgttggtacacgctttttatcaagcattacttgaattagaaaaagaaggcggagtaagagcacgttacaatcgatattacaacaatcaaaaactattagtgaatagaatgggggaaattggttttaagaacactaataaatgaaaaatatcaatctcctattattacatcttttatttatccggaagggatctctcgaatttcaacagttatataatgagttaaaacgctacggatttgttatttatcctgggaaaatttcgaaagtagatacgttccgcattggaaatattggtgatgtacatgaggaagacataaatcgtttagtagatagtattgctaaaggggttgttataggttgaaagtat

SEQ ID NO: 10618 - DNA, 111 bp, Bacillus anthracis
attggtaatactgaccgtattgctaagtacaaccaattattacgcatcgaagacgaactaggcgaaatcgctgtttacgatggtatcaaatctttctacaacatcaaacga

SEQ ID NO: 10619 - DNA, 267 bp, Bacillus anthracis
atggctttaacacaagagcgtaaaaatgaaatcattgcacaatttagaactcatgagactgatactggttctccagaggttcaaattgctgtcctaacggagcaaattaacactctaaacgagcacttacgtactcacaagaaagatcatcattcacgtcgtggtctattaaagatggttggtaaacgtcgtaacttactaacttaccttcgtaatagcgatatcacacgttaccgtgaattaatcacaaagcttggcttacgtcga

SEQ ID NO: 10620 - DNA, 663 bp, Bacillus anthracis
atgaatccttatttacacaacgccacgcgcccgctaatactggtaaagaagcgactattacttgtacagggtggaagtattgtcaaaggcaaacccaatgtcgttatcctaacaattggcattcgaactgatagtaaaaatgtgaaacaagcacaagaagaaaatgcagtgcaatcaaaacaattgctggatgcacttaaacagcttggtattgctgataaagatatagaaacgatttcttatacgattactcctcaatacgagtatgtaaatgataaagcgttactacaaggataccgtgtggaacatttgtatgaaattaccgttttaaatgtacaaaaagcaggggaagtatatgatatagccgtttcaaatggagcaaacgtagcaaaaggattacgttttcgaatatctcacccaaataaatattatgagcaagctctcattcaagctctgcaacaagcggtagaaaaagctcgtgctattgcgagtacatacaatttaaatattaatcctgttccactctcattcgttgaagaatctgcccaattgccacgggaagtgacgtcctatgctactttacatgcacaagcagctcctcccattccatcgggaaaatttaaagatcattttccacaaaacgggcgattttttacgtattta

SEQ ID NO: 10621 - DNA, 1137 bp, Bacillus anthracis
atggtaaaggaaagaggcaataaaatgactgaacgtttaaaagtaatgacgatttttgggacacgtccagaagcaattaaaatggcacctcttgtattagagttgcaaaagcatccagagaaaattgagtcaattgtgactgtaacagcgcaacatcgtcaaatgttagaccaagtattaagtatctttggaattacaccagatttcgatttgaatattatgaaggatcgccaaactttaattgatattacaacgcgtggtttagaaggtttggataaagtaatgaaagaagcaaagccggatatcgtacttgtacatggtgatacaacgacaacgtttatcgcaagcttagctgctttctataatcaaattccagtaggtcatgtcgaggcgggacttcgtacatgggataaatattctccatacccagaagagatgaatcgtcaattaacaggcgtaatggcggaccttcatttctcacctacagcaaaatcggcaacgaacttacagaaagaaaataaagatgagtcacgcattttcataacaggaaatacagcgattgacgcactaaaaacgactgtaaaagaaacatatagtcatcccgtactagagaaacttggaaataatcgtcttgtacttatgacagctcaccgtcgtgaaaacttaggagagccaatgcgtaatatgttccgtgcaattaagcgtcttgttgataagcatgaagacgtacaagttgtatatcctgttcatatgaatcctgttgttcgtgaaactgcaaatgatattttaggcgattatggccgcattcatttaattgagccgttagatgtaattgatttccacaatgttgcagctcgttcatacttaatgttaactgattctggtggggtacaagaggaagcaccgtcacttggtgtaccggttcttgttcttcgtgatacaacggagcgtccagaaggtattgaagcaggtacgttgaaattagcgggaacagacgaagagacaatctttagtcttgctgatgagttgttatcagacaaagaagctcatgataagatgtcaaaagcatctaacccgtacggtgatggccgtgcatcagagcgtattgtagaagcaattttaaaacactttaataag

SEQ ID NO: 10622 - DNA, 327 bp, Bacillus anthracis
atgatgcgtggcggaatgggaaatatgaataacatgatgaaacaaatgcaaaagatgcaaaaggaaatggcaaaggcgcaagaagaactaggagaaaaaacagttgaaggtacagctggtggcggtatgatcacagttattgcaaatggtcataagcaaattcttgaagtaaaagtgaaagaagaagttgtagatccagaagatatcgaaatgttacaagacttagttttagctgcaacgaatgatgcacttaaaaaagctgatgaactttcaaactctacaatgggtaaatttacaaaaggcttaaacttaccgggtggaatgttc

SEQ ID NO: 10623 - DNA, 948 bp, Bacillus anthracis
ttggcttataatgacaaaagtcaaattacattttctgtacaacatttgattgaaagaaatacaaaacagagaaaaaaaacgcagcgaatcaatcgaatcgttccattattactaaaagtaattgctagcgtgtctattatgacgacacttggaattatttttacgctttccaatgaaacaataatgttttttcaaaaaataccattacaatcctttttgacggaaaaggaatggttacctttttttgaagatcctaagttcggtatattaccacttatatgtggaacggtccttgtaacagcgattgctatgttcgtagcaattcctatcggtttagcgtgtgccgtatttttaagcgaatatgcttcaaacggtgcaagaaaagtattaaaaccgatgttagaactattagcaggtataccgacaattgtatatggtttttttgcattaacagttgttacaccgcttttgcaacggattatacctgatttacagttttttaatgcgattagtccaggtattgttattggatttatgatgatacctacaattgcctccctgtctgaagatgcaatgagatctgtagcaaaaggaacgaaagaagcttcattagcactgggagcaactcggttagagatggtaaaacaagtcgtgtttccttcggcttttacagggattatggcagcgattatattagctgcttccagggcaatcggtgaaacgatgatcgttgtaattgcagcgggatctacgccgaacgtatcgctggatccgacagaatctattcaaacgttaacagcttatattgtgcaagtgagtttaggtgatgctccgcatggaacaattacttattacagcatgtacgctgtaggcgcgacgttattcttatttacttttataatgaacatcatttcgcagtttattatgcgccgctttaggagggtgaca

SEQ ID NO: 10624 - DNA, 563 bp, Bacillus anthracis
tttagcgagataaaaaaagaattaacaacacgaaattggtttccagcaacgagtggtaatatttctataaaggttagtcatgaaccactcacttttctcattacagcaagtggtaaaagataaaaccaaaacgactccagatgactttctactagtagatcatctaggggttcccgtattacagactgaattacgtccctcagcagaaacaatcttgcatacacatattttatacaataccaatgcttggggcggtccttcatgttcctacaactgatacccaatgtgatcacaaattttatatagtgatgccgtcacacttcaaaatcaagaaattattagagctctcgatatttggggagaaagtgccacaattcacattcctattatcgaaaaacatgctcctatcccaacgctttggagaaactttcccaagcatataacaggagattcgggggcagtattaatccgtaaccatggtattacggaatgggggccaaatagctcttgatgcgaagaaaagatcaaaagcttaggagtttttattccaattgcctagtaga

SEQ ID NO: 10625 - DNA, 1614 bp, Bacillus anthracis
aggaaaagactatggaatttatggaaaacgattacattgttagtttgtacagttgtaattttttctttacttgtgacagatatattaattagtcacaatgtagaacggacaacgggaggattagccaagcagagaaagcaaaaacaattgcacacattgtggcgaatgattcaattgtaatcgatggtttaattgggaaagcagatacttctgcaattcaaacgtatacaaatagaatattaaaaaacacaggtgttcaatttattgtagttatggacatgaatggaataagaaagtcacatccaaatcctcaaaaaataggtcatcattttattggggtgagatgaaggacctgcattgataggaaaggaacatgtatcggtggcagaaggaactttaggtatttccatgcgagtgtttgtaccaatattttctgaaacaggtgaacaacttggagcagtggctgttggtatttcagcagataatgtaaaagagagagttaaggaaagtagacatatcatttatattggtgtcggagttggtgtattagtcggaattataggagcaatattgctagctagacatataaagaaaagtttatttcggtcttgagccgcacaggatagcaaaaattcttgaagaaagaaatacgatgctacaatctgtaaaggaaggtattattgctgtagataaagaggctagagtaacgttaattaataatgaagcgaaacgtctatttaaaaaaagcggacttgaagaagattttatcggtaaagatgttgagttgtatatgccaaattcacgtataaaagaagtattgcaaacgggagaagtacaattaaacgaagaacaaaatatttacggaattacgattgtgacgaattggagttcctttatatgtaaaagaagaaaatagttggtgcaattgcaacattttcgggataaaccagagattagaaaactagcagaggaactaactggtattagactatatgcagaagcattacgggcacaatctcatgagtttatgaataagatgcatgtcgtattagggctttacacatatgaaccagtatgaagaattacagaagtatattagcggcatggtatcagagcattcatatgaaattggtgggagttatgaaaagaataaaaagtccagtatttgctggttttttactaggtaagctcagctatgctagagagaaaaatataaaattaattataagtgaagattcttatatgccagaaatagatgatgaaagtattactcatgaacttattacgattgtcggaaatttaattgataatgcattagaggcagttacgaattgtgaaaagaagcggagttgaagtttagatccaaccatgagggatatactagctattaccagtacaggattcggggaaagggtattcaagaaaaaggaattagaggatctatttacgaaaggttattccacaaagggagataaccgcggttatggtttgtatcttgtaaaagaaagtatacagcgaataaatggggaaattcatatgcattcattagtaggtaagggaacaacgataacaattgaaatacctaaagggtagggatgagaggcaaatatgatt

SEQ ID NO: 10626 - DNA, 576 bp, Bacillus anthracis
atgagaaagatttgtgtgtttgcaggttccaacttaggggagagaccagagttcaaagagcaggcgatagcgttaggaaaaatgtttgttgagaacgagtacgagcttgtatacggtggttcttgcgtcggattaatgggagaagtagcaaatgaagttcttcgtttaggtggtcgtgtaacaggtgttatgccgcgcgatctattccgaggagagatcgttcatacagggttaacagaattaattgaagtagaaacgatgcatgaacgtaaagcgaaaatggcagagcttgcggatgctttcattgcactgccaggcggatatggaacgtttgaagagctatttgaagcagtatgttggtcacaaattggtatacataataagccagttggtttattgaacataaaagatttctacggaccaattctgcaaatggttgaacgtgcagcagaagaaggattcatgaatccatcgaataaagagttaatcgttgccgctgaaacggcagatgcactcattcataagatacaaaattacgagcgtcctgttttaggaacgaagtggaagcaactatca

SEQ ID NO: 10627 - DNA, 522 bp, Bacillus anthracis
atgactacacatatagaaaagtgcacccttaaagatatacacaaacttcaagaaattagttatgaaacattttatgaaaacttttaaacatcaaaattcacccgaaaatatgcatcattatttggaaaaggcatttaacttaaagcaattagaaaaagaactatccaatatctcttctcaattcttttttgtctacttcaacgatgaaattgctgggtatctgaagatcaatactgatgatgctcagtctgaagaaataggcgatgaatcacttgaagtcgagagaatttatataaagagctcctttcaaaaacatggtcttggcaaatatctactaaataacgctatcgaaattgcaatagcaaataataaaaagaatatttggctaggcgtatggaaaaaaatgaaaatgctattgctttttataaaaaattagggtttgtaccagctggctctcactccttttatatgggagatgatgaacaagttgaccttatcatgattaaaacactcatataaatt

SEQ ID NO: 10628 - DNA, 1852 bp, Bacillus anthracis
atgctaaatttagtacttatgatgattgaacgcgtcggacttattgttattctaggatttttactttcgcaatattaaaaacattccaggccgcttttttccataagcaaggatggttatgtagataagcttaaagcttatttcgtattttttcggtgttttacaattgtaagcatttaccccgggatggaaatagcagggaattcggtttatgaatgaaaattggcttacagggtgtttcatcctcgagtaccattgcaaatacacgtattatgggtgttggaattagtggattgcttggcggtcctatcgtcggaattggagtaggatcgattgctggtattcaccgttatatgcttggcgggacgacagcgctaagttgcgcgatctcttcaattttagccaggcgttataactgggtatattggataacatttttaaaaagtataatcgtacaattacgcctaaattttcagcagttttaagtgtgtttatcgtttctttagaaaatgattatgaatccatttattggaaaaggagggcttaaccttggggaaaccaatggcaaaaccatggatcctggaaataacctttggaagtttaattttccttccaaggaaacaaccttttttccgccaggaaaaaaacccaaaggcccttcaaactcataaggaattacgtatggcgaataaaacgttaccgaattttcgccaaggcttaccaaaggaatctggtaggcatgtggcacaaataattcaccgcttttacagaaacgaaggcggaatcccttaccgatccggagaaaaaattacctcatgttggattagcgtcagatcaccatattccttcacatagtttaataaccggtttgtcgaaagaagtgttacatacaggggaaaataatgaaagcgaaatcccgtgagggcgttaatttgttcacctgaaaggtggtccctttgcaaccggcgattgttattccccttacctcccctgggaataccaaaagggacatttaaacctatatttttcaaaaatcctaaccagttaagtcgtgtggaagaggaattagcagaagggttagcaaaaatattctctacacaacttgaattaggtgaagctgagttgcaaagtaaactattgcaagatgcggagataaaggcattacaagcacaaattaacccacactttttatttaatgcaattaatacagtatcagctttatgccgagcgaaatgtagaaaaaggcaagaaagttattattacagcttagcgtgtatttccgttgtaatttgcaaggggcacgtcagttattgattccactagaacaagaattaaaccatgtacaggcatacttatcactagaacaagcaaggttcccaaataagtatgaagtaaagatgtatattgaggatgagctcaagacaactttagtaccaccgtttgttcttcaactatttggttgaaaatgcattgcgacacgctttttcaaaagaaagcaaacccgtaatggaagtggaaggtgccatttttttgaaaaagaggggtatggttcatttttgaagtaaagggatattggacaaagggatggaggaagaccgttttagaacaaattagaaaagatggtagttttcgtcaaaaaaaaggactggaaacaggtttatataatattaatgaacgtcttattggggtatttgggaagggaacgatgcttcatatcgaaagtgaaagtaatgaggggacagagattacttttgttattccaaaaaaagtaggggaggaagagcagattgttaaaagtattagtagttgatgatgaaatgttagcacgtgatgaactaaagtatttattaga

SEQ ID NO: 10629 - DNA, 2052 bp, Bacillus anthracis
gtgctgattggaaaacgcttaaatgaccgttataagctgctgaaaatgattggtggcggtggaatggccaatgtgtatttagctcatgatgatatactgggccgggatgtagcggtgaaaattattaagcctcgcttatttcaaataacgaaggagttttattaaccgtttcccatcgggaaagcgcagtttgtttacaactttgtcgcatccaaattttggtgattatgtatgatgtccgagaagaagatggtatataatatcttgtaaatggaggatgtaccgagtaaaaacattggaaagcatacataattgagcgagggatgttacctattggagaagctcttgacataatggagcagttaacatccgccatggcacatgccccatcattttaaaattggggccgcggtgatttaacccccgcccaatttttttatttggagggtgagggagtaataaaaagtaacaagatttttgaaattgcaccaggttacaaggtccaccaccaattcccacaatacaaatttcagttctgcgtttcggtgcattatttatccaccagaacaagcacgcgggtgggatagcaaaataaacaatcagatatttattccctagggatcgttatgtttgtagttggtaacaggaaagacaaccgttttttttgcgaaacctgcctgttggctatagctttaaaaacatttacgaagtgaaattccatctccaaaaagatggaatgaaaatattcctcagagtgtcgaaaatattatattaaaggcaactgcgaaagatccatttcatcgatatcaatctgccaatgcgatgaaacgagatattgaaactgcgctatatccagagaggataaatgagcagccattttacataccggaagatatggaagcgacaatagcgattccgattattgcatcagaacaattattacgaacatgttactgatgaaacaattgtttttaaaaggactaaaagtggatgacccgataagaaaagtatcaaccggattttagtaagaagaaaaaacgaagtaataaatggctcgaaattttaattacaacatttttactgttagcgattggaataacgttagcgcttactgttattccaggattctttattcccaaagatgtaaaagtacctgatgtggctggtatgaaatatacgacagcagtaaatacattatttgaaaaggggtttgaaggtacgggaacctaatattgtatatacagatgatgttgaaaccggtgacgttataaaaacagatcctgtagcaggtagagtcgtgaaagattatctctataattactatctatcaatcaggtgggaaaaagaaaagtaagatgattgatttcgctggagaagatttagtagagtataggaccagagttagaggagaaatataacccaggttccagtatattatattgaagatgataggccgaaaggagcaattgtaaagcaaattccgacgtctgaccaaatggtggtagaggccgagcaagaactgaaaatctgggtaagtaaaggcccttatcaaattacaccgggagatttttcaaggtggactgaaaatagtgtaactggtattttgaatgagagaaaactaactccagatataaaacgagagtattccgatactgttgataaaggacttgtaatttcgcaatctccaaaacccgggaacgccgttaaaagaaggggataaagtgacgattatcatctcagagggccctaagccgaaagtaacgaaaaccgtgaaagtggataatatttctattccgtatgagtcttctataataggtgagaaaaaacccgcaaacatagaaattttataagaaagatatgcaactgaaaatggatagaccaattgaaactagaacaatttcagagtcggcaactatttcattagaatttgtaattcgagaagatacaaaatgacgctataatattgtaagagatggtgtaacgattattgactaagaagtaccatatcccacacaataataatacattccacttttctttctagagagaatg

SEQ ID NO: 10630 - DNA, 2054 bp, Bacillus anthracis
aataaaaaaatggagcaattgaagcaccatgttacggataatcaacgcaaacatgctttaacaacaaaccaaggagtaaaaatagccgaggatgaattttctttaaagatgggcttaagaggcccaaccttaatggaggatttccactttcgcgagaaaaatgacccctctttgatcaccagcgaatttcccgaaagaaattgtttcatgcacgcgggagttgggcgctcatgggttattttcagctttatgaatcgtagaaagcatatacgaaagcagatttctttactaatctttccaagaaaacacctgtatttgtacgcttctcaaccgttcaaggttctaaaggatccaacgacgcagtaagagatgtacgcggattcgccacaaaattttatacagatgaaggaaactacgatttagtaggtaataatatgttccgtattgctttatccaagatgctattatatttcctgattttgtccatgcagttaaaccagaaccacataatgatattcctcagggagctagcgctcatgatacattttgggattttgttgcgcataatcccgagtctactcatatggttaatgtggcaaaatgatgatcgcgcaattccccgtaatttaacaatgatggaaagttttgggggtcataactttcgacttattaataaagaaggaaaagcccacttcgtaaaatttcactggaaacctgctcttggagttcattcattagtgtgggatgaggctcaaaagattgctgggaaaaatcctgatttccatcgtcaagatttatatgaagcaattgaaaaaggggattatccggaatgggagctcggattacagctaattccagaagaagatgagcatacatttgattttgatattttagatccaacgaaattatggccggaagaagaagttcctgtaaaactagttggtaaaatgacattgaacaaaaatgttgataacttctttgcggaaacggagcaggtagctttccaccctggtcatgtcgtaccacgtaattgatttttcaaaatgaccctcttctgcaaggaagaatactctccctatacagatacaacaatatctccgttaagacgccctaatttccatcaaaacccctattaaccagccccgtatgtccttttcataataatcaacgcggatgggatgcgtcaaatgcaaattcatcgcggtcaaacaagctatcatcctaatgggcttaaatgacaaatcaccagccacccgtgcaagctgaacagggggggatattagcattatcaagaaaagattgatggacactaaaattaaggggggcagtaaaaaccttcctttaacttttattctccagctaaaattttctacaaaaatataagcccatttgaaaaccgcctataaaaagaagttttttgctttgaagttgggaagtgtaaatcagacatggtgaaggcaaatgtaattgctctactgaatcatgtcgatcgtcaattagcgcaaaaaagtcgctaacattattggagctcccttgcctaaggaaaatcacgaagtaaattcagatgcaaaatcacctgcactaagtatgtccaatactatttttaaagctgattctaaaaatgttgcaattgtattaaatggtgacccaagcgtctcccttctgtccgaatggattcaagcttttgcacagcatcgaattaactatagcatcgtagataataaaatttatcagttcaataattccattaaagtaactgatacttatacaacaacagaattctcccctttagaaagcagtattagggtttagtagggaattccccattccccccccctgttttagaatttgcagaaactacttttaaacatttaaaccggatagctcatgtccttagtaatcctcatgctttggacaatagtaaaattaaattagatggagcaggaatttacaacttagcaaacacttcaattgaatcatttatagaaggcattgcccaaggacgattttggaatcgataatataatgtaaggagcggattagaatgagtaaaa

SEQ ID NO: 10631 - DNA, 549 bp, Bacillus anthracis; identical to SEQ ID NO: 9145

SEQ ID NO: 10632 - DNA, 627 bp, Bacillus anthracis
atgggaaaactgtatgtatttgatcacccgttaattcaacataagattacatatattcgcgacaagaatacaggtacgaaagattttcgtgaattagtggacgaagtagcaagcttaatggcttttgaaattactcgcgatcttccacttaaagacattgaaattgagacgcctgtaagcaaagcgacaacaaaagtgatcgctggtaaaaaacttggtttaattccgattttacgtgcaggtttaggaatggttgatggaattctgaaattaattccagcagcaaaagtaggacacgttggtttataccgcgatcctaaaacattgcaaccggtagaatactatgtgaaacttccaacggatgtagaagagcgtgactttatcgtactagatccgatgctagcaacaggtggttctgcagctgaagcaattaactctctgaaaaagcgcggtgcaaaacaaattaaattaatgtgtatcgttgcagctccagaaggagtaaaagtagtacaagaagaacatcctgatgttgatatttatgtagcagcattagatgagaaattaaatgaccacggatatgtagtaccaggtcttggtgatgctggtgaccgtttattcggaacgaag

SEQ ID NO: 10633 - DNA, 11806 bp, Bacillus anthracis
ttctacaggtacaaacatctccgctggaagacagggctgggacattacttccattgatatttctccttatttaacaaattctcaagtgtccgccgcaatccgtttaacaactaacggagacgcatatatgttgaatacagtcggtttacaaatcaacataaattcacctaacatacaagcaacaaaaagcgtaaataaaagtgttgcagcaattggagacgttctcacttatacagttactatccctaatacggggcttcttcccgccaataacgttatttttacagacattctccctaacggtacttcctttatacctggaactgtaacagtagataatgtcccgcaaacgaatgcaaatccggccgctggtatatctcttggaaccattaataacagcgcttctcgtacagtaactttccaagctactgtcgtttcttttccaagtcaaaatcctatctccaacactgctaatattacatttcaatatacaccaatcgccggaggaacgacttttaacggtcttgcaacaagcaactctgctggaacacaagttaacctcgcagatattaatggcacaaaatcagttaacaaactttttaccgatattggtgaaacgttaacttacagtatcgccttagctaatatagggaatattgctgcaactaacgtaatatatacggatccgattcctagcgggactactttcgttccggggagtgtaactgttaacggagttactcaggctggagcaaatcccgctactggtatatcaattggatctattgctgctaattctacgactactgttgcatttcaagtatttgttccttctattccccaaacaaatccaatattaaatagtggtacaacaacataccaatacattcctgttccaaatcaaccggcagtaagtgggactgatacgacgaatattgtctccactcaagtgaataacgctactgtaactatggcaaaagcagtagataaaaattttgctgatattggtgatacactaacgtacaccgtttcctttacaagtacaggtaatacaaatgcgaacaacgttatttttacagatgttattcctactggaacaacttttgttctaaacagtttaacaatagatggcacgacacaaggtggagcaaatcccgctaacggtgtgaacattggatcaatcccaactggcacaacaaaaaatgtttcatttcaagtagttgtaaatacaatacccgcgctaaatgtcgtatctaatggatcaagcgcttcttatcagtacactgtcaacccaagccaatcacccgttacaaaaaacatttcttctaatctcgtttccactcaaattaacaatgcgaatttagcattaacaaaatcaacaaataaacaatttgccacaattggtgaaacgataagttatacaattcttattacaaacagcggaaatacagctgcaactaacgtgcaactaacagacccacttccaaacggaacgatattgacccctggttctgtaacactcaacggcgttttgcaaaatgtagattccctcgttgctttacctatcggcacaattcctggcggggcgacttttacactttctttccaagtaacagtcatcaatattaccacccaaaatcctatcattaataatgctttcgcctcttatctatatactgtaaatccaagtctgccaccaacttcaaaaacagcaaattctaattctgttacatcaacaattagactagcaaaccttcaagctactaaatctgtagataaaacgtttgcggaagttggggatgtattaacttataccttttctcttacaaacgatggaaatgttgcggcgaacaatatagtactatccgattcaatcgcgaatggtactgcctttgtaccaaacagtgttacgattaacaatgttactcaaccaggcgttacaccagctagcatcaatatcggcagtaccactgctggtactacaattacagcttcattcaaagtattaataactagtattccaaacccaaatcctatttcaaatagcgcttctatttcctataactttatcgttgatccaaacgctttccctataagtaagaacacaacttcaaccactacatttactcaagtaaatgacgcaaatattatttcagcaaaaacagtggatcgagcgtccgctactgttggggatgtattaacttataccgttgttttaacgaatgcaggaagtgtttctgctgatagtcctactttcgtagatacgaatccagacggtactacctttatcccaaacactttccttattaatggtgtactccaaaataacgcagatccaaatgtcggtgttcccttaccttccattcctgcgaacggttcacttaccgtctcttatcaagtaactgtcacctctttaccaacacaaaatccaacaataaattcatctagtacacagtatagttttattttaaatccgggcgatccaccaactatagaaacatctttaagtaatactgtaagtacacaaattaatttagcaaatgtagttattgtcaaacaggtagatttaactattgctgacgttgggcaaccaatcacatatacaattgctttagctaaccctgggaatactcccgcaaataatgtagttgttaccgatatactccctcctggtacaactctcgtaccaaatagtatttttataggcggggctttacaacttggtgcggatccaagtgctggtcttcaagttggtacgattccagctggtggttttacaacaattgtcttccaaattggtgcaaatagtttaccttcaccaaatccagttcaaaacagtgctgtacttcaatataactttatcgcagatccaaattcacctcccgttgtaagaaactctgctagtaatatagtaactacacaaattaacactgctaatattgttgctacgaaactaacaagcacaaattttgctgatgttggcgatgtcataacttatgcaacgattttaacgaataacggcaatatccctgcctcgaatgtaacgtttacagatatcattccagctggtaccatcttcctccctaatactgtaacgattaacggtgtccctatagctaatgcaaaccctgctaacggcattttaattggtacgataggagcgaattcatcacgtactgttgcattccaagtttttgtaccaaccattcctagtgcaaatccgattgcgaatcaatcgagcactacattccaatacacgtacgacccatccaaaccagctgtcatgcagatggttgcttctaacactgtacagacaactattaataatgctacgattacctctgtaaaatctgcagataaacagtttgcgaacgtaaatgatatcattacgtacacgactactttaacgaataatggaaacacacttgcatcaaatatagtatttacagatgctattccaagcgggacatcttttattccaaatagtgtaacagtaaacggcactacactctctaatgcaaatccagcaaatggcatagcaattgatccgataaatccgaatgcaaatacgataatttcattccaagtgcaagtaaattctattccaaatccgaatcctatcccgaaccaaagtaacacaacgtaccaatatgtcgtaaatcctaacttacctccagcgtcctctaatacgctaagtaacgtaataacaactcaaattaataacgctacaatcatcgctacgaagtcagtaaatacaccgaatgctgcaattggagatatcgttacttatacgattgcagttacgaacacagggaatattcctgctagtgctacagttttaacagatggacttggaccaggtgcatccttcatcccaaattccgttacgataaataacgtatctcaacctggattagatccttcactaggtattcatttagacgatatttcaccagaaggaactacatttattacattccaagtgaaaatccttgctattccacctagtggcactttaacgaataatgctcttgtaaactacgaatatacagtgaatccaactgaaacgccagctgttggaagtaccgttacaaacacgacagttacacctatcgttgacgctaccttagtaataaataaaaatgctagtacaactttcgctacaattggagatacgattacattcacctcagttgttacaaacacaggaaatactaccgcgaataacattgtttttacagattcaattccaaatggtactacctttgtcccaaatagttttaaaataaacggtgtaacggtcccgaatacaaatccacaaaacagtatcaatattggtaacttgaatgcaaatgcatcggttacacttagttttcaagtaaacattacaactcttccaaatcctaatccaattccgaaccaatcatcgcttcaatatagatttattgttgatataaatgaaccgcctgtttcacgaaccgttcaatccaataaaacttttacacaagtaaactctgcttccgttatcgccacgaaaactgctagcagtgcatttgccgctgttggagatacaattacgtatacaacgactctcactaatagtggaaatactactgcaaacacacctgtttttatcgatatattaccagctgaactgtcattcgttcctgatagcgtacaaattaataccatcccacaacttggatttaggcctgatactggtgttcctttagactcaattccagttggaggaacgataacaattagctttcaagctatcgttggttcaataccagctataaatccaacattgaaccaatctagcacaacatactctatcatcgttgaccctacccagccaccggtgacagaaatagctacaagcaatccaactttaattcaaattaacgaagcgattattcaagcaacgaaaagtgtggatcgactattctctgacgtcgcacctggaaattcatttttaacgtacactgttttattagaaaatatagggaatacaactgctacgaatatcatttttacagatccgattccaaatcatacagtatttatagaagatagcgttcgagtaggcgggattttattacctggagtaaatccagcaaacggaataccaattggggatattattgcaggagattttataaacattaccttccgcgtacaagtagttagcattccaaatccaattttcacaattggacctggggggccaaattcaccggttgtaaatggcgcttctattaattaccaatttatgacaggacctaatttaccactcgcttcaagaagtacgacatccaatcctgtttcaacacaaataaattctggggaaatcgcacttgttaaatctgtagataaaactttcgtaacgatcggggatacactttcttattcaatttcattaagtaaccctggaaatgtcacttcacaaaatataattttcacggatgttttacctgaaggaataacttttatttccggaacacttacaaacgattctggtacacagcaaattggaaatccagctaccgggattcaaattggaaatataaatcctggtagtacggctactattgtgataaacgcacttgttacaaatattccaagtataaatccaatttcgaactttagttctgtacaatttgcacatgtggtcgatccaagccaaccttccgtatcacaaacgaatctatctaatactgtttcgacaactattaagagtgctatattaacgactacaaaaagtgctgataaatccgttatttctgtcggtgatacaattacgtatacaactactattacaaatacaggaaatacggcagcagcgaatataaagttcacgagtgcaattccagctaacactacctttataccaaactcagtcacaataaatggggttcagcaatctggtgtgcaaccagcacttggagtaaacataccaaatattgctcctggtgaaacagtaactgttactttccaagtaaatgttctttccgttccctcttcaagttcaattatggggaatgataccattttatattcgtatactgtcgatccaaacggaactcctgttacaacttctacttcaacgaatatcgttacaaaccctgtattagatgctatcattacgatggtaaaatccgtcgatcaaacacttgtaacactaggtgataccattacctatacgatacttttgacaaataccggtaatacaaatgctactaatatcactttcactgatcttataccaaatggaacaacgtttattactgatagcgttacaatagatggcatcacgcaaatcgggctcaatcctaatacaggtataacaattggagcaattgctcctaacagctcaatatctatagcatttcaagttaccgctacttctacacctgttcaaaatcctattgccaattccgctactgcttcttacacatttatcgctgatcctaatgcccctattgtttcaaggaccgttacttcaaacacagtgttcactacgattaatacagctaccattctttcattaaaacaagtcgataaatcctttagtcgtattggagacacactcacttatactgtcgctttaacaaacaatggaaactcatctgcgcaaaatgttatattcacagataccgtaccgagcggaacagcatttattgcagacacattttctattaatggaattcctcaaagtggcgcaaatccagtgaacggtgtaaatatcggatctataacagctgggactacagtaacagtttctttccaagttactgtaacgtcattacccacggaaaaccccattgtaaatttctcatcaacatcgtaccaattagtctcaccgcctgatgcagaaacttcaattagcaatcctgtttcaacgcaaattaaagaagccatattatccatggcgaaaaatgaaagtttatcctttgcaaatatcgggcaaactgctttttacactacttctatttcgaatataggaaatacagatgcaactaatattgtattcacagatgtattaccaaatggagtcacatttgttcctaacacattaactgtcgatggtgttttacaacctgacgcgaatccaaatacaggtgtattacttgcaacacttccgcctaatgaaatatatagtatcgtctttcaagttacagtgaacagcattccccctattaatccagcaccaaatacagcatcaacaacatatgagtttactgttgatcctgttaatcccccagtattaagtgcggctacttccaacactacgcttcttcaaataaacaacgcaaatattataagtacaaaaacaacagatcttacttttgcggatgttggtaatacaataacatttacacttaacctcccgaatacagggaatgtgactgcaactgatgttacagttatcgatacgcttgatagtaatttaacttttgttccaaacagtttcacagttaatgggcaaaccattctaaatgctgatttatctactggtgtaaatatcggttcaattaacggtggtactgcggcaattgtcacattccaagctaccgttacaaccctaccaatcaacaatcctatttctaattcagctcttacaacttatcgttacattgttgatccagaccagtcacctattacaacttccaatcaatctaatacaacgacaacacaaattaatagtgctattcttactgcacaaaaaagcacaaatgtatttacggtagatatcgggcaagatattgtctactccgttacaattacaaatagcggaaatgttaatgcaacgaatgttatttttaccgatgttattccagacggaacttcctttgaaccaaatagttttacacttaatggaactattatcgaaaatgcaaacatcattacaggcgtcccaattggtgatatcgcgccaaacgaatctgccattgtagaatttcatattacttcaaatgaaatcccggctattaatccaattactaatcaagctagcgttagctttcagcatatcgttaatccagctaatcctcctgtttcaaaaaacattacttcaaatagtgttacaacaacaattgaaagtgctattttaactactactaaaatcggtgataaagcttttgcaacgattggtgatacaattacgtatacaactacgattacgaatattggaaatatccctgccaataacgttattttctcagacccgataccatcgtggacacaatttgttgcaggatccgttattgttgatggcactccattaccatccgcttctatcaccagcgggattggcataaatacgatcattccaaatcaaactgtaacaatcatattccaagttcaaatcgtaagcaatccaccaacattcacacctgaactccaaaacttagcatttgttaacttccaatataacgtaggcaatgcattacaggctcagcctggcaatgtggaaacgaacgtcttcgttactgctattcattcagcaatactttcagctgtaaaaactgctagtacagcctttgcgaatattggagacacaatcacttatacagttttaatacaaaatagcggcaatacaaacgctacgaatgtaaatttctcagacctcattccaggaggaacgacctttgttgaaaatagttttgctgtaaatggaaataccattccaggtgcaaatccaaatagcggcgttaatatcgggaccgttagcgcgggtagttccttaaccgttactttccaagtcatagttacatctactcctccttccaacccaattacaaacgttgcatctattcaattcgcattcatcgttgatccggccgctcctcctgttacaggcacagtaacttctaatagtgcttctacacaaattaataacgctactgttacaacgcttttagaagcagatcgaacaatcgtatctattggagatataattacgtacactgcaacattaacaaacactggaaacttccctgcaaactcggtattactcattaacggtgttcctgaaggggcattatttgttccaaatagtgtcacgcttaacgggatttcacttccagatgcaagtccaactctcggtattccagttggtattatcgcaccaggtaattctgctacaattacgttccaatttcttgcaaactctattccgccgcaaggagcaattataaatcaagcacttacaagttacacatatattgtcgatccaagtcaacctccagttacagcaacatcttcatctaatacagttactacagctgtcgttgatgcatcgctatctgtaattaaaaatacagattccatcgtacaatctactgacggtacaatcacttacactgtcgtcattcaaaacaacgggaatacaactgcaaatacagttactttaacagatttggtcccagaaggaactgcattgattccaaatagcgtgaccattaatagcatctcaattccaggtgccgatccaaacgtaggaataccattaaactccattgcgccgtcagaaatcgtcaccgtcacattccaagttatcgttcaatctattccaagcgtgaatccaatttctaatatagcccgtattgactatacttttattgcggatccaactgctcctatcgtctctcgaacaattacttcgaatccagctttcacacaaatttcagatgcgaatgttctttctttaaaagccgtcaatgcacaacaagcaacaactggcgacattttaacctacacgataacactagaaaataccggaaatattccagctacaaatctcatattttcagatacgattccagaagggactacattcgtagaaaatagttttacacttaacggaacagctatactgggtgcaaatccaaatgtaggtgttactttgcctaacctagcagcaaacgctactcaccttattgctttccaagttcttattaacgatccattctcgcaacaatcgattacaaatcaatctaatacaacatatacaattcaaccagatccagggcaaccgcctattactgaaacatctacaagtaatattgtcattacaaatttcgtgcaagcacaattaacaattacaaaaacgtccaatccaataactgtagatattggcggaactatactttatatttctgaagtgaaaaatagcggcaatgttgacgcaataaatattatttttacagattcgattccagttgggactacattcgttctcgacagtgtcacaattaacggtgtacttcagcctgatgcaaatcccgaaaacggaataccaattggaacgattccaccaaacagttccaaaacaatactatttcaagtacaaacaaataatccacctactgaaaccgaaattgtaaatcaatcttcagtaacttaccaatatgtaagtattcctacagctccaccagtgaatcgctctgcaaattctaacattgttacaacatcacttcaaaatgcgaatattatttccgttaaaagcgcagatgtaactttcgtctccatcgggcaatttattacctacacaaatacactacaaaatatcggaacggttccagctaacaatacggtgttcattgacaacattccagaagggacaatattcattgaagatagcttatcaataaataatgtcattcagcctggtacgaatcctgaaaatggagtaactctcggcacgatacaaccagatgaaacagtcactatttcattccaagtacaacttacaaatatacctgaagacaatacagtcattaacatctcagacacttcatatgaataccaaattgaccctagttctccaattattcagcgtagatcattatcaaatacagtaaacacggaagtccgtacagcaaatgttagtgcaattaaatctgctaacagatccattacacgcatcggtcaaattatcacatataccatcgcagttacaaatgctggtacagtacctattacaaatactctcctaattgacgcaatcgctgctggcaccacattcgttccagatagcattcttgtagatggcataccaagacctaacgaaaatccaagtaccggaatctcccttaatattatccttccaaacaatacaattatcgttacattccaagtaaatgtagactcgataccttctcaaaataacatgaataatatcgccgtcatccactatgaatatcagccagaccaaagcttaccaccaatttcagaaacgacagcttccaacagtacaaatatacaatttattgaagctattcttttcgctacaaaatccgctaatacagtattagctaatattgatgaaactattgaatatacagtactcattcaaaataatggatccactacaactaactccatcttttttacagatacgatagaggatggatcaatatttatcccgggaagtgtaatagttaacaataccgtacttcctgcagcagatccgaatatcggcttttccatcccgaatatcgcatcaggtcaagtggctacaataacattccaagtttcggttacgaatttacctgttgcaaacccaacacctaataccgcaaacatcgtctacgactttattttcaaccctgactttgcaccaattcaaaaatcgactacttccaatactactttcgttcaaattaatgatgctgatatcgtttcacttaaaactgttgatttgacttctgtaacaattggtgatgttttaacttatacaacaactttaacaaatacagggaatacggatgccactgccgttgtatttacagacaatatt

SEQ ID NO: 10634 - DNA, 685 bp, Bacillus anthracis
tacggtattccaagtagttcttcgcatgcaattatcggctcaatcgcaggtgcagcaattgctgccgctgggattagctcgctaaatcttaaaggattcattaaaattattgaagctttaatcatttcaccaattatcgctttcgttattggttataccgtatacagtatttttaaagtagtatttaaaaactttaacttaacgaaaacgaataagaatttccgtatattccagattttcactgctgcattacaggcttatacacatggtacgaatgatgcgcaaaaagcaatgggaatcattacgatggctcttatggctaataactatcatacttcgagcgacatcccgttctgggtacaattatcttgtgcaattgcaatgggtcttggtacttctgtcggtggatggaaaattattaaaactgtcggtggacaaatcatgaaaattcgtcctgtaaatggtgtagctgctgatttatcatcatctcttgttattttcggggcaacatttattcacttaccagttagtacgacgcacgttatctcctcttctattttaaggggtggtgcttctcatcgtgtaaaaagtggaaaagggggaactgcaaaacgcatgttaattacttgggttatcacacttcctatgtcagcttcattagctgctttatgttactctgtattac

SEQ ID NO: 10635 - DNA, 810 bp, Bacillus anthracis
atggataataaaatcgtatatgtcgtatctgactctgtaggagaaacggctgatttggttgttcgagcagcaatgggccaattcccatttgctcctgatattagacgtgtaccgtatgtagaagatacagggacattaaaagaagtgatttcgattgctaagagcaatcaagcacttatttgttttacgttagtaaagcctgacatgcgccaatatttagtgacagaggctgcaaaagaaggtgtagaggcatatgatattatcgggcctctaatcgatcaaattgaagaaattacagggcaagtgccgagatatgagcctggtgttgttcgtagattagatgaagaatactttaaaaagattgaagcgattgagtttgctgtgaagtatgatgatggtagagatgcacgtggtattttaaaagcagatatcgtgttaattgggatttcgcgcacatcaaaaacaccactttctcaatatttagctcataacaaacgtctgaaagttgctaacgtaccacttgtaccagaagtagatccgcctgaagaattatatcaagtggctaaagaaaaatgcttcggtttgaaaattacgccagaaaagttgaatcatatccgaaaagagcgattgaaatcacttggactaagtgacggagcaacatatgccaatattaatcgtattaaagaagagattgatcactttgagaatgtagttagtaaaataaattgtcaagtaattgatgtatcgaacaaagcgattgaagaaacagctaacattattgtgaatgcagtgcaaaaccaaaaaatgttt

SEQ ID NO: 10636 - DNA, 1131 bp, Bacillus anthracis
atgatcacagtgaaaataccagttcgtatggatgacgggactgttaaaatatttacaggatatcgtgcacaacataatgatgctgttggtccaacgaaaggtggaattcgcttccatccgaatgtaacagaaaatgaagtgaaagcactttcaatttggatgagtttaaaatgtggtattgttgatttaccatatggcggaggtaaaggtggaattatctgtgacccgcgtgaaatgtcattccgtgagttagaaagattaagccgcggttatgtacgagcaattagccaaatcgtaggaccgacgaaagatattccagctccagatgtattcacaaactctcaaattatggcatggatgatggatgagtatagccgtattgacgaatttaattcaccaggatttattacaggtaagccacttgtattaggtggatcacatggacgtgaaacagcaacagcgaaaggtgttacaatttgtattcgcgaagctgcaaaaaaacgcgacattgatattaaaggtgcacgcgttgttgttcaaggattcggtaatgctggtagcttcttagctaaatttatgcatgatgcaggtgcgaaagttattgcaatctcagatgcttacggcgcgttacatgatccaaacggattagatattgattatttattagaccgtcgtgatagcttcggtacagtaacaaaactatttaataatacaatttcaaacaaagaattgttagaacttgattgcgacattttagttccagctgcaattgagaaccaaattacagaagaaaatgctaatgatattaaagcgaaaatcgttgttgaagctgcaaatggtccaacaacattagaagcaactaaaattttaacagatcgcggaattttacttgttccagacgtattagcaagtgctggtggggtaacagtatcttactttgagtgggtacaaaataaccaaggttactactggactgaagaagaagtagaacaacgtttagagaaagtaatggtaagatcatttgattctatttatgaaacagcacaagttcgtaaagtgaacatgcgtttagcggcgtatatggtcggtgttcgtaaaatggctgaagcaagtcgcttcagaggctgggta

SEQ ID NO: 10637 - DNA, 694 bp, Bacillus anthracis
atatgcgatataaggagaggaatgccatgaatcagtttccaagaatgggtgattatcaacattatcacattaattgtacttattggcggcgggaattgccggttattactaattacaatcaagcggaaaaattacttataaaccagacaatgccaaaaattgattggaaaaggtattccccattggcatccccactaacaagtaaattaactgactggaaagctgaagtaggtaagaactacaatgagaatgataaattaggtgctgtcactgatatcactcaccggaatggtagaacaaacagtagatgtaacaattccacaaaatgcaacagttgtacaatcaaacgcaacaacaaaatgctttcgttggagcaggtagcccgattgcttatgcatttgatatgaaccaattatggggtaacagcaaatattgaagaaacagatgttgatgattttcaaaaaaggtcaagatgtagatgtgtatgtagatgcatacccagatacaacgttaacaggaaaagtagagcaagtacgcttaacaacagcgaacacattctctatgttgccatcaaacaacgcaacaccgaactatacgaaagtaacaccagtagtacccagttaaaatttctttagatcataccaaatcactaaatattgttcctggcatgaatgtgaaacgtccgtaattcata

SEQ ID NO: 10638 - DNA, 1026 bp, Bacillus anthracis
atgactcgtgtggcaattaatggatttggacgtattgggagaatggtatttcgtcaggcaataaaagaaagcgcattcgaaattgtagcaatcaatgcaagctatccatctgaaacgttagcacatttaattaaatatgatacagttcacggtaagtttgacggaacagtagaagcatttgaagatcacttattagttgatgggaaaatgattcgccttttaaacaaccgcgatccaaaggaattgccttggacagatttaggtgttgaagttgtaattgaagcaactggtaaatttaattcaaaagaaaaagcaattcttcacgttgaagctggagcgaaaaaagttattttaacagcgcctggtaaaaatgaagatgtaacaattgtagttggtgtgaacgaagaccaattagatattacaaaacatactgttatttcaaatgcatcttgtacaacaaactgtttagcgcctgttgtgaaggtgttagatgagcagtttggaattgaaaacggtttaatgacgacagttcacgcttatacaaatgaccaaaaaaatattgataacccacataaagatttaagaagagcacgtgcttgcggacaatcaattattccgacaacgacaggtgctgcgaaagcgctagcaaaagttcttccgcatttaaatggaaaacttcacggtatggcacttcgtgtaccaacaccaaacgtgtctcttgttgacttagtagtagatgtaaaacgtgatgtgacagttgaagctattaatgatgcattcaaaactgttgcaaacggtgcgttaaaaggcattgtagaattcagcgaagagcctttagtatctattgactttaatacaaatacacactcagctatcattgatggtttatctacaatggtaatgggtgatcgtaaagtgaaagtgcttgcttggtatgataacgagtggggctactctcgtcgtgttgtagatcttgtaacgttagttgttgacgaattagcgaagcaagaaaatgtgcaacatatt

SEQ ID NO: 10639 - DNA, 642 bp, Bacillus anthracis
atgtttacaggaattgtagaagaattaggaacgataacaaatatgcaacaaagcggagaagcaatgaagttaacgatacatgccaataaaattttatcagatgttcacttaggtgatagcatcgcggttaacggtatttgcttaactgtaacgagtttcacaacaacttcattcacagtggatgcaatgcccgaaacaatgaaatcaacatcacttcgcctactcaaatcacactctaaagtaaatttagagcgagcaatggctgcaaatggacgattcggtggacatttcgtttcaggacatattgatggcatcgggacgatattaaacaaaaaacaacactataatgccatctattacaaaatagctatttctgatgaactgctgcgctattgtttgcataaaggatccattgctgttgatggaacgagcttaacaatatttgatatagacgaatcttccattacaatttcactcatcccgcacacagtaagtgaatctgttatcggagaaaagaatgccggtgacatcgtaaacattgagtgtgacatgattggtaaatatatcgaacgctttattactaagcctgtaaaacgaacaggttcaatgaccgaaaactttttacaagaaaacggatttcta

SEQ ID NO: 10640 - DNA, 267 bp, Bacillus anthracis; identical to SEQ ID NO: 10619

SEQ ID NO: 10641 - DNA, 366 bp, Bacillus anthracis; identical to SEQ ID NO: 9131

SEQ ID NO: 10642 - DNA, 1099 bp, Bacillus anthracis
atggaattagtagaaattagacaggaattagagaaaatggctaagagattagcggcttttagggggtctctttgacctccctactaaggagaaacaaattgcagaattagaagagaaaatgatgggcgcaggattttgggatgaccaacaaggcgcacaagctgtaattaatgaagcgaatgcactgaaagatatggttggaaagttccgtcagctagatgagacgttcgagaatctagaaattacgcatgagcttttaaaagaagagtatgatgaagatttacatgaggagcttgaatcagaagtaaaaggtttaattcaagaaatgaatgagtatgaacttcagttactacttagcgatccttatgataaaaataaagcgattttagaattacacccaggtgctggtggaacagagtcacaagactggggctctatgttactacgtatgtacacacgttgggctgaaaaacgtggatttaaagtagaaacagttgactacttaccaggtgatgaagctggtattaagagtgttacgttattaattaaaggtcataacgcttacggttacttaaaggcagagaaaggtgtacatcgtcttgtacgtatttctccattcgattcttcaggccgtcgccatacatcgttcgtatcttgtgaagttgtacctgagttcaatgatgaagttgaaattgaagtgcgtacagaagacttgaaaattgatacgtatcgtgcaagtggagctggtggacagcacgttaatacgacagattcagcagttcgtattacgcatacgccgacaaatacggttgtaacgtgtcagtcagagcgttctcaaattaaaaaccgtgagcatgcgatgaagatgttaaaagcgaaattatatcaaaagaaattagaagagcaacaagcggagttagatgaaattcgcggagaacaaaaggaaattggatggggtagtcaaatccgttcttacgtattccacccgtattctcttgtgaaagaccaccgtacaaatacagaggtcggtaacgtgcaagcagttatggatggagaaattgacccattcattgatgcttacttacgttctcgcatctaa

SEQ ID NO: 10643 - DNA, 2615 bp, Bacillus anthracis
caacaacaagcacgaattcgagaaattaatattagccatgaaatgcgtacctcatttttagatttacgcaatgagtgttatcgtatctcgtgcattaccagaatgttcgtgatggattaaaacctgtggcatcgtaaggttttaattgcgatgaatggatttaggaattacggctgataaagcgtataaaaaatcagcacgtattgttgggggaagtaatcggtaagtatcaccctcatggtgattcagctgtttatgaaacgatggtacgtatggcgcaagatttcagtcaacgttatatgcttgttgatgggccatggtaactttggatctgtcgatggagattcagcggcagcaatgcgttatacagaagcaagaatgtctaaaattctttatggaattaatacgtgatatttcaaaaaatacaattgatttatcaagataactatgatggttttgaaagagaagccgattgtgtttcccagcgcggtttccctaacttactagtaaatgggtacgacagggtattgcagtttggaatgggaaccaataattccgccgcatcaactttgtgaaagtaatggatggcgtatttggcattaagtcataatcccgatattacctattgcagaattaatggagtgcattcccaggaccagatttttcgacggcaaggttaattttaaggaagaagtgttattcctaaaagcttatggaacagggacgcggggtctatttatacttccggggctaaagttggaaattgaagagaagtcaaatggcaaacaatctattatcgtaacggaattaccttatcaagtgaataaggcgcgattgattgaaaaaattgcaaaaattagttcgcgataagaaaattgagattgatacagatttacgtgatgaatcagatcgaaatggtatgcgtattgttatggaagtacgtcgtgatgccaatgctaatgtattattaaataacttatataaacatacagcacttcaaacaagttttggtattaacatgctgtctcttgtaaatggagaaccacaagtactgaatttaaaacaaaatttatatcattacttggaacatcaaaaggtagtaattcgtagacgtactgcttatgaacttgaaaaggcagaagcacgtgctcatatcttagaaggattacgaattgctttaggcacgtctggatgaagttattacattaattcgtagttcgaaaacagcggaaattgcaaagcaaggtttaatggaacgttttggcttaagtgaaaaacaagcgcaagctattttagatatgcgtctgcaacgcttaacagggatagaaacgcgaaaaaattgaacaagaatatcaagatttaatgaagttaatcgctgaattaaaagcaatcttagcagatgaagaaataggttcttgagattattcgtgaagaattaacagaagtaaaagagcgcttcaatgataagagacgtacagaaattacaattggtggtatggagtctattgaagatgaagacttgattccagaacaaaacatcgccattacgttaactcataatggttatattaaagagggtgccagctttctacgtacaaaacacagaaaccgtggtggaacatgggtgtgcaggggaatggggaaacaaatgatgatgattttcgtagagcattttattaaccacttctacgcatgaccatattctattcttcactattaagggaaaagttttcccgttcggaaaggattttgaattccccaggagttattttcgtaccagcgaaaaggtatcccttattatttacctatttagggggtaaattaggggggaaatggatttaacgccattatttccaattcgtgaattgggtgaccgatgaaatttttattcttcacaccaaaaaccaaggtatctataaagagaacacccactttcatcatttggcgaatatacgtacaaaatggtttaattgcattctctcttggtgaagaggatgaagtaatatctgtacgtttaacatctggtgataaggatattattgtaggtaccagccaatggtatgctaattcgttttaacgagcaagatgtacgttctatggggacgtaatgcggctggtgtaaaagcaattacattaggtgaagaagatcaagttgtaggtatggaaattgtcgaagaggatgtaaatgttttaattgtaacgaaaaatggttatggaaaacgtactcgcgattgatgaaatatcgcttggaaaagccgtgggtggaaaaggttctgaagacttggtaatattccagataaaaacgggtaatttgagtggcttttaatctggtcaccggtgagaggggatttctgtttatttacggccagcgggtgtttatttttgtatgccagtgattcaaatctctcaaatggggacgtaatacacaaggtgttcgtctaattcgattagaggatgagcaagaagtagcgacagtagcaaaagcacaaaaggatgatgaggaagaaacgagcgaagaggtttcttcagaagaataagagaggagatatctcctctctttatttttttataataatacttgcatggggaagagaaagtctatataataggcagag

SEQ ID NO: 10644 - DNA, 1023 bp, Bacillus anthracis
atgaaaataaattggactgaagtaaagggaaaaattcgaccgcaaatttcaaaaccatcatatgaaacttggtttactaatactactgtttatttagaggatgatatattaacaatttattgtccaaatgaatttgcacgtgactggttagaatctcattataaagaattagtatttaatacattaagagaaatgtttaatacgtcgtttgaaattcagtttgatctatgtaatggcgaaccatctaacttgaaagatgtccaaaaagaaaagcttagtagctgggatgaagtaaagaaagcattaagacctaaaatagcagagaaaacatttatgacatggattagaaatacaaacgctacgataaaagataataaagtaataatcttttgtgaagatgcgtttcatcgtgatttgcttgaaggggagtataaaaatataatttcaagtaccgtacagaaaattactgatgaagaatatcaaatttggttcgaaataggatcaagcgctacttctaaagcacaggttcatcacatgaaaaataatcaacgtacttccggacaagaggaatcaaaaacaatttggaataaaataaaagataaaatgcaattaaaaatttcgagaccgtcatatgaaacttgggtcaaagaaacgacagctagaataaatgaagattcattgatcatttattttgaaaacgaattccaacaagagtgggttaaaaagtcttataaagatttaatttcgcaaatagctaaagagttaactggaaatacatatgaaattcaatttgaattaaaatcaaatacaaccagtaataatgaaaaatcaacaattaaagatatcacttccgaattaggggagcggttcaaagtctctaataacagtttaaaatataatgatgtagacgagagcaataaacgtattcgagcgttagaagaaaaaataatgaacttggaaaaggtcattggtacattagtagaaaaattagatgcagtagaattaaaaacacagttggaaaaa

SEQ ID NO: 10645 - DNA, 123 bp, Bacillus anthracis
ttagaaaatggagcagacttgcgtgctgtgcaagaaatgcttgggcatgcagatatttcaacgacacaaatttatacgcatgtttcaaaaactagattaaaagatgttaaattttgcctcaaa

SEQ ID NO: 10646 - DNA, 1437 bp, Bacillus anthracis
atgaattggtatgtaatcattccaatgataatttcgtttatcgttgtatttttaattggtgtatatgcttcaagacgtgtacaagcaaccgcacctaataaatttttacaagaatattttttaggtgggcgtgagcttggtggtttattattagcgatgacaatgattgctacatacggtagtgctagtagctttattggtggtcctggtattgcttacaatatggggcttggatgggtattgttgtctgcgattcaagttgtaacaggatatatcgttttaacggttatcggtaaaaagtttgcaattatcgctaggaagatggaagctattactcttattgattatttaaagggaagatacaataataaagcagttgttatactttctgcggtatgtattattatctttttattttcagcaacagtagctcagtgggtcggcggtggtcgattaattgagtcactaacgggtctctcttatacaacagcattatttttatttactttttctgtacttgtgtacgtattaattggtggatttcgtgcagttgctttatcagatacgttattaggtatcattatgttagttggaacgacaatcattttaattgctactgtcattgccggtggtggaattgaaaagattatgcaggaacttgttcaaatcaatccgaatttaattacaccatttggagcggatggtagtttaaccaaatcatatgtgacatcattttggattttaattggaattggcgttgtcggtttaccgcaaattagtgtgcgcgccatgtcttataaaaattcaaaagcgatgcatcaagcgttaataattgggacgattgttgtcggtacaattatgattggtatgcatttaacgggtgtatttgcacgagtcgtacttccgggtatagcggtaccagacaaagtaatgccgctactcgcaatggaagtgttacctccttggttagctggagttttcttagctgcaccgatggcggcaattatgtctacagtaaactcgctattattacttgtaagttcatcaatcattaaagatatatacgtaaattacataaataaagatgcggcagacagtacgattagaaaaggaagtttatggattactgctatcgtaggattgctcgtttatgcagcagcaattaaaccaccagattttttaatatggttaaatttattttctttcggtggattagaagcagcattcatttggccgattgtattagggttatattggaggaaaggaaatgcaacaggagcgcttgcctccattttagttggagtaagctcatatatgtgcattcatcttttctatccaaatccgttcggtatacatacagttgtcttcccgatttgttttgcgtttatcgcttatatcttaggaagcatggttgctgtgaagaaaaacagtataggt

SEQ ID NO: 10647 - DNA, 774 bp, Bacillus anthracis
atgaaagaacgagtattatctagggtgaactatcatcaaaaagttgcattaaatccaatgactaagtttttttataaagccattattttattattattgttaagttttacgttattattcattggaaatgtaatgatcgagcaaagtgatattagtaaattacatgtaccggctaagttagaggtgccagaatcattaacacatgcatttattgcgacagaagataaaaggttttatcatcataacggtttagattatatagcgattattagggcgtctgttgagaatataaaagctggtggtgttgtgcaaggcggtagcacaattacacaacagttatcaaaaaatgcttttttaacgaatgaacgtacattttctcgtaagtggaaagaaattttttatacgaaaaaaattgaacgtacatttacaaaggatgaaattttaaaattatatgtaagtaatatttattacggagaaggggcatggggaattgaaaaagcagcaaacctttacttcggtaaaaaggtgagccaattaacgttggctgaaagtgcaatgatggctgctgtagtaaaggcacctgcttattactcacctgcacaaaattacgataaagcagttgagagacgaaacgtcgttttgagattaatggagaaagaaggctatatcaatcatgatgagtatatgcaagcagttagtgagaaattagtcattcgtcatgatataaaaacagagcggtcgatgttaaatcatgcgcgcgaaaaagcagtgagc

SEQ ID NO: 10648 - DNA, 3324 bp, Bacillus anthracis
gtgaagtttgtgcatttacaatgtcaaaccgtttttagtttattaaaaagtgcttgtaaaattgatgagcttgtagtcagggcgaaagagctcggttattcatcgctggctattacagatgaaaatgttatgtatggcgttatcccgttttataaagcatgtaagaaacatggtatacatcctattatcggtttaacagcctctatttttagtgaagaagaagaaaagtcttatccgcttgtcttacttgctgaaaatgaaataggttatcaaaatttattaaagatttctagtagcattatgacgaagtcaaaagaaggtattccgaagaaatggcttgcgcattatgcgaaagggctaattgcaatttcaccagggaaagatggagaaattgaacaattattattagaagacaaagaaagtcaggctgaagaagtagctcgtgcatatcaaaatatgttcggcaatttttatatgagtttacagcatcatgcgattcaagatgaactgcttctgcaagaaaaattacctgcatttatgaatagggtaaatattccggttgtagcgacgaacgatgtacgctacatcaatcaaagtgatgcacttgttcatgaatgtttattatctgttgaaagtggaacgaaaatgacagatcccgataggccgaggctgaaaacagatcaatattatttaaaatcatcagatgaaatggaagccctattttctcacgtagaagaagcgatttataacacagtagaaattgcagaacgttgcagagtagaaataccgtttcatgtaaatcaattaccgaaattccctgttccatctaacgagacgaatgatatgtatttgcgccgcgtttgtgaagaaggattacagaaacgttatggtacgccgaaagaagtacatataaaccgtttgaatcatgaattaaacgttatttctagtatggggtttagtgattatttcctcatcgtatgggattttatgaagtatgcgcatgaaaatcatatattaacaggaccaggccgtggatcggcggctggctcactcgtttcttacgtattagaaattacagatattgatccgattgaatacgatctattatttgaaaggtttttaaaccccgaacgtgtgacacttccagatattgatatcgattttccggatataagacgtgatgagatgattcgatatgtgaaagataaatatggtcagcttcgtgttgcgcaaattgtaacgtttgggacgcttgcagcgaaagcggcaattagagatattgcgcgtgtaatggggcttccgccgagagatattgatatattctcaaaacttattccatcaaagcttgggataacgttaaaagatgcttatgaagagtcgcaatcgcttcgtgagtttattcaaggaaatcttttacatgagcgtgtatttgagattgcaaaacgtgtagaaggcttgccgcgtcatacgtctattcacgcagctggcgttattatgagtcaagaaccgttaacgggaagtgtagcgattcaagaagggcataacgatgtgtatgttacgcaatacccagctgatgcgttagaagaacttgggttgctcaagatggactttttaggattacgtaatttaacgttacttgaaaatattataaagtttatcgtgcaaaaaacagggaaagaaattgatataagaaatttaccacttcaagatgcaaagacattccaattattaggtagaggggatacaacaggtgtattccagctcgaatcaagtggtatgcgaaatgtacttcgcgggttaaagccgaatgaatttgaagatattgttgctgttaactcgttatatagaccaggaccgatggaacaaattccaacctttattgaatcaaaacatggaaaaagaaaaattgaatatttacatccggacttaaagccgattttagaaagaacatacggtgtaattgtataccaagaacaaattatgcaaattgcgtcgaagttggcgggcttctcgctcggagaagccgatttattacgccgtgcagtgagtaaaaaaaatcgtgatattttagatcaggaacgtaagcattttgtgcaagggtgtttacaaaatggttatgacgagacatctgcagagaaaatttacgatttaattgtaagattcgcaaattacggttttaaccgaagtcacgctgtagcctacagtatgattgggtatcagcttgcctatttaaaagcgaattatacgttggaatttatgacggcactattatcgagtgcaattggaaatgaagataagattgtgcaatatatacgggaaacgaagcgaaaaggttttcatgttttgccgccatctcttcagagaagtggttacaatttccaaatagaaggaaatgcaatacgttacagtttactttccattcgaaacattggaatggctaccgtgacagcattacttgaagaacgagagaaaaaaatgtttgaagatttatttgaattttgtttgcgcatgccatcaaagtttgtaacagagcgaaatttagaggcgttcgtctggtctggatgttttgacgattttggtgtttcgagaacaaatttatggaaaagtcttaaaggagcgttagagtatgcaaatcttgcgcgtgatttaggagatgctgttccgaaatcaaaatacgtacaaggagaagagctctcctttattgaacagttaaataaagagaaggaagtactaggtttttatttatcaagctatccgacagcgcagtatgtgaagttagcgaaagaattagaaattccatctctcgctcaggcgatgcgacataagaaaaaagtacaaagagctattgtgtatataacaagcgtgagagtgattcgtacgaaaaagttgcaaaagatggcgtttattacattttgtgatcaaaatgatgaaatggaagcggttcttttccccgaaacgtatatacatttctcagataagttacaagaaggagcaattgttttagttgacggcacgattgagcttagaaatcataagttacaatggattgtaaatggactatatccgttagaagaaatggatgcgtatgaggaaaagaaagatgcgtctgtttacgtgaaattgccgtctcagtatgagaaaaagcttttaaatcaggttactaaaatattgtttgactattcgggttttgcgaaagtactaatttattatgaaaaggaacataaaatggtacaattatctcgaagtttatcgattcacccaagtgaagaatgtttaggagcacttcgtgaaattgtcggggaagaaaatgtggttgtgaaaata

SEQ ID NO: 10649 - DNA, 447 bp, Bacillus anthracis
gtgaaccgcttttgggctgagaaaagaattgaattagaccttgatttagaaaaagtgcatataactgctgaccaagaaagtatgagtcaagtttggattaatttaattcataatagtattaaatttactccaagtagcggtacgatttcaatcaagctaaaagaatatgagacattagtagaagtacgtatacgtgatacgggaagtgggatatccgaagaacagaagcaacatatttttgagcgtttttataaagcagactcttcacgaaatcgtgcttatggaggaagtggtttaggtttagcgattgtgaaaaaagtactcgatcttcatcagggggaaataaaagttgagagtgaggaaggggaatgggacggatgtattgtttgtattccaattatgaaagagaatagtgttaggagggaatccctctacactatttctctt

SEQ ID NO: 10650 - DNA, 801 bp, Bacillus anthracis
atgtggaattatgaagctgaagaagcaaaggctgtaatcgttatcgtgcacggcgcaatggaatatcacggacgctatgaagccgttgcggaaatgtggaatcatatcggctaccatgtcgtgatgggggaccttccgtcacatggaacgacttcaagaaatagaggacatattgattcgtttgatgaatacatagaggaagttaaattatgggtgaaagaggcaagaaagtatcggttacctatttttctatttggtcatagtatgggtggtcttattgtcattcgtatgatgcaagaaacgaagagagaagatgtagacggcattattttaagttcgccatgtttaggtgtattagctggaccttctgcaccgcttcaagctgcctcaaaaatattaaatattatcgctccgaagttacaatttgcaacgaatcttacagtggaaatgtcaacgcgtaatcatgaagtgagagatgcgatggagaacgattcattgttcttgcgcaaagtatcagtacgttggtatagtgaattgattaagtctattgaaatcgctcataaaaaaatagatgattttccagatgttccgctcttgctaatgcaagcatgtgaggataaacttgtagataaaacacgtgtccgcacttggtttaataatgttaaaataagtgataaggcttttaaagaatggccgaattgttatcatgagttattaaatgagtatgagcgtgatgaaattttgaattatattcagtcatttactgaaatacgcatcaataacataatagaaacaaataag

SEQ ID NO: 10651 - DNA, 444 bp, Bacillus anthracis
atgacatcaaataatgaacgagaagatatttctcaatctttaaaagtatttattgcattatctcgtgtacatcgttctgttatggatactacaaataaatctatacaaagtaacgggttaaatccaactgagtttgctgtattagaactgctatatcataaaggcggccaaccacttcagcaaattggtgagcgtattttaatagctagtggtagcattacatatgttgtggataagctagagaaaaagggactagtaaaaagaattccgtgcccaaatgacagacgtgttatttatgcacaattaactgagtctggagagacctttattgcttctatttttccagggcatgagcaagttatacatcagtcttttgaaatgttaacgaaagaggaaaaggatgaattacttgatctattaaaaaagattggaaagtacgaaaaa

SEQ ID NO: 10652 - DNA, 1396 bp, Bacillus anthracis
ttaaaccgcggtttaaaagaacgacatattactttaatgtcactccgttcagctattgggcgttgggactatttttaggatctgcctctgctattaaactagctgggccctccattttactaggaaaatagattgctggagacccctattttttttcattatgcgagcgctcggagaaatggcaattgaacaacctgttgccggctcttttagtaaatatgcatatgattatctcggaccgctagctggttatattacaggttggaactactggttcttatgggttgttacttgcatggctgaaattacagcagctggcatttacatgcagtactggttcccagatattccgcgttggacttgggcgctactcgctttattatataatgagcgctttcaacttcttatccgtaaaagtatttggagaacttgaattttggtttgctcttattaaaattgtcacaattatctgtatgatagtagttggagctggtattattttattcggattcggaaatggcggaatagccaccggtatttcaaacctttggtcacatggtggctggtttccaaatggattttctgggttactactctccatgcaaatggtattattcgcttatttaggcgttgaattaatcggtgttacagctggtgaagctcaaaacccgaagaaaacactcgcaaaagcaatcgataacgtattttggagaatattactgttctacgttggagctctattcgttatgatggcaatttatccatggaacgaactgggtgagaaaggaagtccatttgtattaacatttcaacaaatcggtattgcaaaagcagcagggattattaactttgtcgtattaacagcagctctttcatcttgtaatggtggtttatttagtacaggccgtatgctatatacattagctcagcaaaagaaagcaccctgaagattcggtcgttttaataaaaatggcatttcaagtcaagggaattgtagcaactgcgatcggtttactccttggcggtataattaactatctccgacctggcaagggatttacatgggctcactaatatttccacttttccgggcgaatttggacttgggggaaactatatattcgcccccaattaaaattccgaaaaagtttgccaacgcaaaacagacaaaagttatcgtataaaaatgccttatcacccattaagttcatatttctcacttgctttccttgtactagtattaggtataatggcggtattcagaagatacacgaatcgcattaatcgtcggtcctatttgggctatcgggcttagctatcgtgtactacatgaaaggggtttcataaagatgatgaaacacctaattccaaaatttagtaaaacaaacatcccttc

SEQ ID NO: 10653 - DNA, 1959 bp, Bacillus anthracis
atgaaacaactaacaggcgcacaaattcgtcaaatgtttttagactttttccaagaaaaaaggacacgcagtagaacctagtgcatcactagttccacatgaagatccatctcttctgtggattaacagtggtgtagcaacattaaaaaaatattttgatggacgtgtaatcccgcaaaatccacgtattacaaatgctcaaaaatcaattcgtacaaacgatattgaaaacgtagggaaaacagctcgtcaccaatcatttttggaattgggaggaaatcttctgaatcgggggatttcttcaaaggaagaagcaatttcgtggggctgggaatttttaacgagcgacaaagggttcggattaaataaagaattactatcggttacaatccatgcagaagaggaagagcctttcacagtttggaaggagaaaaggggcgttccaaaagagcgcatcatccgcataaaagaaaatttctgggatatcggtgaaggaccaagtggaccgaatacagagatttttctatgaccgcggagaagcttacggtaatgactttagtgacccagaattatatccaggcggagaaaacgagcgttacttagaagtatggaaccttgtattctctcaaatttaaccataatccagacggttcatatacacctcttcgtaagaaaaacatcgatacagggatgggtttagagcgtatgacatctatcgttcaagaggtacgtacgagcttggatacagatttattcatgccaatgattggtgcaacagaaacaatctctggtgagaaatatcgtaatggtgacttagaaaaagatatggcgtttaaagtaattgctgaccatatccgtacagtaacattcgctgttggtgacggtgctcttccatctaacgaaggcccgtggttatgtattacgtcgtttattacgccgtgcggttcgttattcgaagaaattaaacatcaaccgtccattcatgtttgaattagtgccggttgttggtgaagtaatgaaagacttctatccagaagtacttgaaaagaaagatttcaatcgcaaaaagttgggaaaaaatgaagaaggaggcgttttcatggaaacacttccatgatggaggaaggcgatttttatctgaagttatccgcaaaaagttaaagaagaaaaaaacaactgttatttctggagtagatgcgttcggtctatatgacacatacggtttcccaaattgaattaacagaagaatatgcagaagaagctggtatgacagttgatcatgaaggctttgaaaatgaaatggaaaaacaacgtgagcgcgcacgtgctgctcgtcaagacgttgattctatgcaagttcaaggcggtgtccttggagaagtgaaagtagcgagcgagttcgttggttacggtacagttgcaacagaaagtaacgttgttgcacttgtgaaaaacggcgaatacacagacagcttacaagttggagaagaaggacaattaatgcttgatgtaacaccattctatgctgagagcggtggacaaattgcagaccgtggctgtcttcttgctgatggcgtgaaagttcttgtaaaagacgtacaaaaagcaccaaacggccaaaacttgcaccaagttgttgtggaagaaggtacgttaacgaaagatgcagctgtaaaagctattatcgatacgaaaaaccgtagtagtgttgtgaaaaaccatacagcaactcacttactacaccaagcattaaaagatgtacttggaacgcacgttaaccaagcgggttctcttgtaacttctgaacgtttacgctttgacttctctcacttcggtcaagtacaagctgacgaattagaaaaaattgagcgtattgtaaacgagaaaattgggaaagtattgatgttgagatttctcaaaaagcaatgaatgaagcgaaagaaatgggcgcctttccag

SEQ ID NO: 10654 - DNA, 726 bp, Bacillus anthracis
atgaaacgattacaaaaagtgattgcgcaagcaggtattgcatcgagaagaaaggctgaggaattaattcagcaaggaaaagtgaaagttaacggaaaaatagtgaaggagttaggaacgaaagtaactcctcaagataaagtagaagtaaataacatccctcttgaaaaagaagaacctgtttattttttactatataaaccaactggcgtaatttcaagtgtatcagatgataaaggaagaagtgttgtaacagactttttcccagaaattacacaacgtttattcccaatcggacgtttagattatgatacgtctggcgtattattaatgacaaacgacggggacttcgcaaacgtattaatgcaccctagatataaagttgaaaaaacatatgttgcaaaaataaaagggcctctaacaggtgaaaaaatccgcatgttagaacgtggtgtgacgttagaagacggaaaaacagcaccagcgcgtgtgaagattatttcttgggacaagcgtaaagaaatggcgattgtacaactaacaattcatgaaggacgtaaccgtcaagtacgtcgtatgtttgaagctttagactgtaaagtagtgaaactaaagcgtgaacgctacgcctttttagaagtgggtagcttgcgacctggtgatgcaagagaattgacaccacatgaggtgaaacaattacgtgcattggcttccacaaagcctcgc

SEQ ID NO: 10655 - DNA, 1233 bp, Bacillus anthracis
atatataagcctgtaaagacaaacaggttatggatgattcttgtattagggacacttacggcaattgggccgttatctattgatatgtatttgccttcgttaccgaagttaacggatgacttgcaaacgggtgcatctctagcacagcttacattaacagcttgtttgcttgggctttcagtaggacaattatttgttggctcaaattagtgattttcgcggaggccgcaaccttcttattattgctcttattatttatgttgcttcttctttactttgtgctgttgcaccatctatttggactttaggtgtaattccgtttcctacaaggagctacaggatcagcgggaaattgttatatcacgtgcaatggtacgtgacatgtattcagtttctgaaatgaggaaattcttctcactgcttatgttagtaaacggagcagcacctatttgggcaccgattatagggggacaattattacagttcacaacgtggcgcggatgtctttatcgttctcggagcaataagtgtatttatgttaatatcagctactttcgtattacgtgaaacattacctcctgaagaaagagaaacatgcggtttgtcaaggacgttagcgacgtatggaaaattgtttaaaggatcgtttgttatgggaatacccttttcccaaggatttagtaacgggcggcaatgtttgcatacatttcggggctcaccatttgtgttgcagaacatatacggagcatcaccacagcaattttagttatttctttgccatcaaccggattcgggattattattggcgagtcaggttaccgggtcgtttagcaggggaaagtgaatgagaagacattatttgtctctggtatcgttattgcagctgttggtggtttatctttactactaacaatcttattaggaatagggttaattggtgttttatgttcattattccttgttgtatcaagtgttggggttgtctcaacaactgggttctcattagcgatgagaaatcaaaaacaagctgcaggaacagcatcagctttattaggcttattacagttcatttcaggagcgcttgttgcaccgctagtaggtattggtggaagcaacaccgcattaccgatgggtattgtaatagccctttgtgaaattggtgcggtactatgctatttatttatggccagaagaagtgaaaagcagtttgaactgcaagcaagacaaaattta

SEQ ID NO: 10656 - DNA, 942 bp, Bacillus anthracis
atgagaaaaattattagcgtattagttattttctttatgacgggaagtatttttgctgggggagctgttcatgcgaaagcagaaggaaagcatgagtggaataagaataagtttttaaatattgcacatcgcggagcaagtggacatgcacctgagcatacttttgcttcttatgatttagtgaaaaaaatgaaagcggattatttggagttagatattcaattaactaaggatggccaattaattgcaatgcatgatacagcagttgatcgtacgacaaatggaacaggcgaagtacgagataaaacgttaagcgaaataaagagtttagatgcaggatcgtggttcaataaagcgtatccagaaaaggctaagcaagagtatgttggtcaaaaagttccgactcttgaagaaattttccaaaagtacggaagaagcatgaagtattacattgaaacaaaatcaccagatgtgtatccaggaatggaagagaaattattagctttattagaaaaatataatttaataggtcaaaacatgtcttctagccgtgtgatgattcaatcatttagtaaagatagtttaaaaaagattcatagtataaataaaaatattccgttagttcaattgctttggtattatccaaatgaaaataatgagattgttgaatggtctggcattacacatgagccgaaacgtgtaacgaatgatgattttcaagaaattaaaaagtatgcagtcggtattggaccaaacttacgtaatgataacggagatttaattatcaatgagtcatatatgaaaatggctaggcaaaatggtctgttaattcatccttatacaattaatgagaaaccagatatgagattgttaatgaaatggggcgctacaggaatgtttacaaattatccggatcgattacatactgtgttaaaagaaaaa

SEQ ID NO: 10657 - DNA, 418 bp, Bacillus anthracis
ggaagcttcggaggctggcttgctgataattgtgggatcgaagaaaagtattatttcaattattatcgtatttgcgtgtgcgatcttcctattgccattaatgacattctcgttcccgctgttcattattatgatgggaatttggagtatgctgagctgggctatttcgccagcacaacaaaattatttgattgaaattgcaccagaatcagctggtattcagcaaagtttaaataactctgcccttcacttagggattgcgctcggttcaacagtaggcggagttgttattgagaaatcgtctgttatatataatgcttgggtaggaggcggctttattatattagcgctgctttgtgcgattttctcgattacgagaggacgttctactcagtttgcaaaagaagaatctatcgtt

SEQ ID NO: 10658 - DNA, 894 bp, Bacillus anthracis
atgacaaaacaaacagaatataagcgcaagcccgaatggttgaaaattaagttaaacacgaatgaaaactatacaggcttaaagaaaatgatgcgttctaagaatcttcatacagtttgtgaagaagcgaaatgtccgaatattcatgaatgctgggctgtaagaaaaacagcaacatttatgattttaggagcagtatgtacacgtgcttgtcgtttctgtgcggttaaaacaggcttaccaacagagcttgatttacaagagccagaacgcgtagcagattctgtagtacaaatgggcttaaagcacgttgttataacagcggttgcacgtgatgatttaaaagacgggggagcagctgtttttgctgaaacagtacgcgctgtacgtcgtaaaaatccatttacgtcaatcgaagtattaccatctgatatgggtggagtagaagaaaacttaaaaatgttaatggatgcaaaaccagatattttaaaccataacattgaaacagtacgtcgattatctaaccgagttcgcgctagagcaaaatatgaccgttcattagagtttttacgtcgagcgaaagaaatgcagcctgatattccaactaaatcgagcattatggtcggcttaggggaaacgagagaagatttaattgaagcaatggatgacttacgtgcaaacaatgtggatattttaactcttggacaatacctacaaccatctaagaagcatttaccagttcttaaatattatccaccagcagaatttgcagagcttaaagaaattgcacttagcaaaggatttagccactgtgaagctggcccacttgtgcgttcttcttaccatgcggacgagcaagttcgttctgcaaaagaaaaaacagcagaagcaaaa

SEQ ID NO: 10659 - DNA, 1586 bp, Bacillus anthracis
tatatgattggtgtagacattgggacaactagtacaaaatcagttctattttctacagatggatctgttattgcaagtcatggaattgaatatcctttatattctcctacgccggaaacagcagaacaagaccccgaagaaatttttcgtgcagtaatacatacgattaaagaaactgtacagacaagtagtgtacagccgcatgatattctttgtggttcttttaattcggcaatgcataatatcattgctgtagatgagaagggaatgccgttaacgagatggtattacttgggcagataatagaagtgcaagctgggcagagaaaataaagaatgatatgaatggtcatgaaatttatttacggactgggacaccaattcatccgatgtcaccactttcgaaattagtttggctacaaaatgagcaggcagaattgttcgcaaaaacttataaatttatttctattaaagagtatgttttttataagttatataaggagtatgtaattgattattctatagcatcagcaacagggatgtttaatttgaaatctttaaaatgggatgaagaagctttacatgttgcggggattacagatgtatcaactttctaaactcgttccaacaacgcacagtttaacaggattagatgaagagcttgccaatgagatgaatgtacttggttctactccctttgtagaaggagcgagtgaccggaatctattcaatttagggggaaatgccaatggatcctggggtgtgggctggtacattggtaacaaccggggcgaacctggctggaacaaatccacctgttaactgatcccaaaaggagaatttttttgttaccccccaaatggaaacctttgggtaattggcgggaccacttaataacggtggtatgattttcagggtgggctcgtgatcaattaggtacttcagagattgagcttgcgaagcgcttaggaaaagatccatatgaagtgcttactgaaatagcagccaaaagtgaatcccgggatctgatggggtattatttcaccccgtatttagcaggagaaagagctcctttatgggaatgcaaatgcgccgaggatcattccttgggactgggattgcaccataagaaaagacatctgaattcgtgcagttttagaaaggggtaatttaataacttatatcccagttcttctcgcttaaaaagaacttcattggcgaacccgaaaaaaattcaaagcgacaggccgtttttgcaagatcggaactttggagacagatgatggcggatatttttcaccaagacgtatatgttccccgaagtttcgaaagctcttgcttaagagctgccatactccccctttttaatttatgtgaagaagataccctacatggaatttctgtaaaggggaggaggggaatttctcccctgacccccacctggaaagtgtggaaaaatataaagatttaacaccaatctatattcgtctgtcccgtcaattggaagaagaatatgaaagtatagcagattatcaaaaaaagtgggtttaaaggctatttagcagagaaatatggtaacgtataaag

SEQ ID NO: 10660 - DNA, 501 bp, Bacillus anthracis
atgaaggctattatttcatacgaaacacctctagaacaagcacatttcactgcaaaaaataatgaaaaagatatgttttataaagaaaatacagaagaatctgtagaaggttctcttaagtatgacgtactagacgctgttggagaatttaaaggtcaacctggctatatcgtttgtaataatatttctgtcacagacgaaggtcgccctgtatttgaaaaccgttttaaaaaccgcgcaggccttatcgaaaacgaaccaggattccaagcaatccgcgttctacgcccattaagtaacgatacatatgtcatcttaacgatgtgggaaacagagcaaaactttaaagactggacagaatcacgttcattcgaaaacgctcataaaaaacgtcctgcccaagcagaaggacaagctccatctcaagcgcatccacatgcagaacagcaaaagagtattttctctcgtccgtcatttgtgactacttttgacgtgttagtt

SEQ ID NO: 10661 - DNA, 987 bp, Bacillus anthracis
atgatagataatttttggcgtgatttaccacgaccattttttgtacttgcaccaatggaagatgtgacagacgttgtgtttcgtcacgtagtaagtgaggctggccgtccggacgtattcttcacagagttcacaaattcggatagctactgtcatccagaaggtatgaaaagcgtacgtggacgtttaatttttacagaagacgaacagccaatggtggcacatatttggggagataaccctgaatatttccgtcaaatgagtattggtatggcagaactaggatttaaaggcatcgatattaatatgggttgcccagtaccgaacgttgcatcaagaggaaaaggtagtggccttattctacgtccagatgttgcggcagaacttattcaagctgcaaaagcaggcggactacctgtcagcgtaaaaacaagacttggctttaaagagttaagcgaatgggaagattggttaacgcacatcttcaaacaagatattgcgaacctttctattcatttacgcacaagagaagaaatgagccaagtagatgcacactgggagctaattccggagattaaaaaattacgtgaccgtattgcaccaaatacgctcctaacgataaatggagacatccctgaccgtaaaactgggctggaacttgctgaaaaatacggcattgatggcgtaatgatcggacgaggcatctttaaaaatccatttgcgtttgaaaaagagccaagagagcatagcagtaaagagcatctagatcttttaagactacaacttgatcttcaagatcaatatgcagaagtattaccacgatccataacgggattacatcgcttcttcaaaatttatgtaaaaggcttccctggggctgctgaactaagaaatcaattgatgagcacgaagtcaacggatgaagtacgtgcattgcttaataagtttgaggagagtgttaatgtggtagaaggtagtgaaacggtg

SEQ ID NO: 10662 - DNA, 1158 bp, Bacillus anthracis
atgttagagtttgatactactcaagatcaattagcgaatataaaagttatcggtgtcggcggtggcggaaacaatgctgtaaaccgtatgattgaacacggtgtacaaggtgtagactttatcgctgtgaatactgatgcacaagcattaaatctatcaaaagctgaaacgaaaatgcaaattggtggaaaattaacacgtggacttggtgcaggtgcaaaccctgaagtagggaaaaaagctgcggaagaaagtaaagaacagatccaagaagcacttcgtggtgcagatatggtcttcgtaactgctggtatgggcggcggaactggaactggtgcagctccagttgttgctcaagtggcaaaagaactaggtgcattaacagttggtgttgtaacacgtccatttacatttgaaggacgtaagcgtgcaacacaagcggcatctggtattgcggcatttaaagaaaatgtagatacacttattgtaattccaaacgatcgcttattagagattgttgataaaaacacgccaatgttagaggcattccgtgaagcggataacgtattacgtcaaggtgttcaaggtatttctgatttaattgcaacaccaggtttaattaacttagacttcgcagacgtaaaaacaattatgtctaatagaggttctgctttaatgggtatcggttctggtaatggagaaaatcgtgctgctgaagctgcgaaaaaagcgatttctagtccattattagaaacatctattgatggagctcaaggtgttatcatgaacattacgggtggagctaatttaagcttatacgaagtacaagaagcagcagacattgtagcttcagcttcagatccagaagtaaatatgatcttcggttctgttattaatgaaggattaaaagatgatatcgttgtaactgtaattgcaactggttttgatgatagcattgcaactcaaccaccaaaaccaattatccgtccgaatgtgaatcacacgcaacaacagcaacagccagtagcgcaaccaccaaaacaacgtgaagtaaaacgtgaaatgaagcgtgaagagccggttgtacatgagcgtcattcagattcagattcagatgatatcgatattccagcattcttacgtaatcgccgtagacga

SEQ ID NO: 10663 - DNA, 2730 bp, Bacillus anthracis
acccctatgaatcagccattatttaaaagttaaggccagactatcaagatgccttttttttttttttccgctttaggcgatttttattgaaatgttcctttggaagatgctgttaaaagcagcccacgcaccttgaaattacattaacgagccgagacggtggtagtagtgaacgtataccgatgtgcgggtgtcctttatcattggggttaaaaatttttatggaacaacttgttgaaaaaaggatataaagtagccgttttgtagccaagtagaagatccaaaaccagctaaaggtgtagtgccccgtgaagtcgtacaattaattccgcccaggaacgatgatggaaggggcgtccgattgatgagaaagaaaattattttttaagccgcattaaccacatttgaaggatggttcatatgggttagcttgtaacgatttaacggctggacaaaaatccagtaacgttattgactggttcagtagaagatattttattagaagtgtatgcaactggtcgaaaagaaattgttgtagattcttccttttcaaaagatgaattaaacaagttaacggaaacgttaaagatgacgatttcatatgaagatgcaacggcaatcccagaagggttagaacatcttgtgaaaaacgtttcacaagcaaagctaattaaagcagttgggcgcttatttaactatgtaataagaacgcaaaaagcgctccttaagttcatttacgccctgtggaaattttttattcggatcgaatttaggaaattggatggccattcaaagcggaatttaaagctaacagaaaccatttggatggaagaaaaaaacaggatctgttctatgcgtatagaataagacgaaaacggctaggggggttcgtatgttaaaacagtggatggaacgtccacttattcagaaagaacgaattgaagagcgtttagaaatggttgaaacgtttgtaaatgattacttcctacgtgaagattaaaaagaaaagttaaaagaagtatatgatttggaacgtttagcagggaaagttgcatttggtaatgtcaatgcaagggacttattacagttaagacgatctttactgcaagtaccagctattttagaagcgattagtttgttagataatgcgtatgcagcgagattaattcaaggtgcagatccgtgtgagagtctaacagaattactaggaagaagtattcaagaaaatcccaccgctttcgatttaagatggagatattattaaagatggttataatgaccagctttgatcatatcgctatgtgagtaaaaacggaaaaacgtggatcgctgagctgaaaaaacgagagcgtgatattacaggaattaaatcgttgaaaattggatacaaccgtattttcggttactacattgaagtaacgaaagcgacaccttggagcattaccagaaggacgctatgagcgtaaccaaacgcttgctaatgcggaacgtttcattacagatgaactaaaagaaaaagaaacattaatcttagaagcagaagaaaaaattgtacagcatagaatacgatttatttacagcgcttcgtgaagaagtaaaagtattctattccgaaattacagcatttagcgaaagtaattagtgaattagacgtactgcaaagttttgcgacagttagtgaagaagaacagtttgtaaaacctgtactaacaacgaagcgcgaaatctttattaaagatggtcgtcatcctgtcgttgaaaaagtattgaacgggaaattgtatgtaccaaatgattgtattatgccagagaatatggatgtctttttaattacaggaccgaacatgtctggtaaaagtacgtatatgagacaattagcacttgtaacagttatgtcgcaaatcggttgtttcgtaccagcaacagaagcagtattacctgtatttgaccaaatctttacgagaattggtgcagcggatgatttaatttcaggtcaaagtacatttatggttgaaatgttagaagcaaaaaacgcaattgcaaacgcatcagaaagaagtttaattttattcgatgaaattggacgcggtacatctacgtatgatggtatggcacttgcacaagcaatcattgaacatattcatgaccaaattggtgcgaaaacgttattctctacgcattatcattgacttgactggcctagatgacagttagattcacctgaaaagaggtacccggttcaagctattgagaagaacggaaaagtagtattccttcataaaaattcaaaggcggggcagcagataaaagttacggaattcacgttgcgccaacttgcggaggcttccagatagcttaatcgctcgagcgaaagaagttgttagcggcatttagagcgacaggaagaaattgttatcccaaagcgtgtagaagtgaaagcgcaagagccaagaagtaattccagaacctatagttgtaaaagaggaaccgatagaaatagaagaaacgaaggtagacaatgaagaagaatcacaactatcattctttggcgcagagcagtcttcgaaaaaacaagacaagccagctctagatgcaaaagaaacggcagtgctgacgcaaattaaaaaaattgatttacttgatatgacacctttagaagcgatgaatcgatctgtatcgcttgcaaaataaagttaaagaaaggatgagtaagtagatggggaaaattcg

SEQ ID NO: 10664 - DNA, 252 bp, Bacillus anthracis
atggcaaaagaaaaaattcgtatccgtttaaaagcttacgatcaccgtattcttgatcagtctgctgacaaaattgtagaaacagctaagcgttctggggcaacagtttctggtccgatcccattaccaactgaaaaaactgtttacacaattcttcgtgctgttcataagtacaaagattctcgtgagcaattcgaaatgcgtacgcacaaacgtctaatcgacatcgtgagtcctactccacaaacagta

SEQ ID NO: 10665 - DNA, 300 bp, Bacillus anthracis
atgagaatattatttgttggagatgtagtaggatctcctggtagaggtatgattcaacaatacgtaccggcactaaagaaaaaatatacacctacagtaaccattattaatggagaaaatgcagcaggtggacgtggaattacggaaaaaatataccgagactttttagaatgcggagcacaagcggttacactaggaaatcacgcttgggataaccgtgaagtatttgaatttattgatgatgcaagatatcttgcaagaacagctaccttcccaaaagggactctaggaaaagggctt

SEQ ID NO: 10666 - DNA, 894 bp, Bacillus anthracis
atgttaaagattggatctcatgtttccatgagcgggaagaaaatgttattagcagcaagtgaagaggctgtttcatacggtgcaacaacgtttatgatttatacaggtgcaccgcaaaatacaagaagaaaaccaattgaagaattgaacatagaagcaggaagaaaacatatggaacaaaacggtattgaagagattatcgtacatgcgccatatattattaatgtcggaaatacgacgaagccagaaacattccaattaggtgtagatttccttcgtatggaaattgagagaacatcagcattaggtgtggcgaaacaaatcgttcttcacccaggtgcgcacgttggtgcaggagcggatgctggtattcaacagattattaaaggacttaatgaagtgttaacgccagatcagactgttaacattgcgttagaaacgatggcaggaaaaggaacagaatgcggccgtagtttcgaggaaattgcaaaaattattgatggcgtaaaatataatgaaaaactatcagtatgctttgatacatgtcatacgcacgatgcaggatatgacattgtaaataactttgacggtgtattaaacgaatttgataagattgttggtatcgatcgtttacaagtacttcatattaatgatagtaaaaatgtacgcggcgcaggaaaagaccgtcatgaaaatattggtttcggtcatatcggttataaagcattgcatcatattgtacatcatccacagttaacgcacgtaccaaaaattcttgaaacgccatatgtaggtgaagataaaaaagataagaagccgccatataaattagaaatcgaaatgctgaaaaatggtacttttgatgaaggacttcttgaaaaaattaaagcgcaa

SEQ ID NO: 10667 - DNA, 1374 bp, Bacillus anthracis
atgagtctagttaaaaaaggtgctgctctattaatggtagcaacaatggcattatctagtgctgcttgttcaaatagtaaaacagagggaaaacctgaagcacaggcaaaagtagcaccagttgaaaaaaatggtgataaaactgtaattcgtttttggcatgcgatgggtggaaaaacacaaggtgtactagatgggcttgttgcagactataataagtcacaaaataaatatgagataaaggcagaattccaagggacatatgaagagtctttaacgaaatttaaaacgatgtctgctacgaaagaagcaccagctcttgttcagtcgagtgaaattacaacaaaatatatgattgatagcaaaaagattacgccaattgatagttggataaaaaaagataagtatgatacttcaaaattggaaaaagcaattacaaattattattcagttgatggaaaaatgtattctatgccatttaattcatctacaccagtattaatttataataaagatgctttcgcaaaggcgggcttagatccagagaaagctccgaaaacgtatgcggaattacaagaagcagcgaaaaagttaacgattaaagaaggcggaaatgtaaagcaatatggattctcaatgttgaactatggttggttctttgaagaattgttagcgacacaaggcgctttatatgtagataatgaaaatggtcgtaaagatgctgcaaagaaagcagtatttaacggtaaagaagsacagawagtatttgggatgctagatgagttaaataaagctggtgcattaggaaaatatggagcaagttgggatgatattcgtgctgcgttccagtctggccaagttgctatgtatttagattcttcagctggtgttcgtgatttaattgacgcatctaagtttaatgtaggcgtttcgtatattccatacccagaagattcgaaacaaaatggtgttgttattggcggagcatcattatggatgacgaatatggtttcagaagaaacacaacaaggtgcttgggactttatgaaatatttaacgaagccagacgtacaagcaaagtggcatactgcaacaggttatttctctattaatccggacgcatataatgaaccattagtgaaagagcaatatgaaaaatatccacagttgaaagtaacagtagatcaattgcaagcgacgaaacaatctccagcaacacaaggtgctttaattagtgtattcccagaatcaagagatgcagttgtaaaagcgttagaagcaatgtatgatggggaaaatagtaaagaagcgctagacgaagctgcaaaagcaacagatagagcaattagtatttcagctcgtacgagtcaaaaa

SEQ ID NO: 10668 - DNA, 459 bp, Bacillus anthracis
atgtcgactcaatatctaaattctaatttgaaagtattctctttaaactctaataaggaacttgctgagcaaattgcaaagcacattggagtaggactaggaaaatgttctgttgatcgttttagtgatggagaagttcaaattaacattgaagaaagtatccgtggttgcgatgtattcattattcaatctacaagcttcccagtaaacgaacatatcatggaattacttattatgatcgatgcattaaagcgtgcatctgcaaaaacaattaatattgttattccttactatggttatgcgcgtcaagaccgtaaagcgcgttctcgtgaaccaattacatcgaaacttgtagcaaacttgcttgaaacagcaggtgcaacccgtgtaatcactctacatttacatgctccacaaattcaagggttctttgatatcccagttgaccctttcaaagca

SEQ ID NO: 10669 - DNA, 747 bp, Bacillus anthracis
atgcaacgttattttgtagaagagaaatatgtaaatgagacaagtattcgcattgtaggtgatgacgtacatcatatcgcaagagtgatgcgtatgtcagctggtgatcatatttattgctgtgtaaatggaaggacggcagtatgttcaattgatgaaattaccagtgaatttattaatacggctattgtagaatgggtagaggcgtcaagtgaacttcctgttttcgtgacgattgcaagtggactgccgaaaggagacaagctagagttaattttccaaaaaggaactgagcttggggcagctgcattcttaccatttcaggcatctcgctctattgtaaaatgggatgcgaaaaaagctgataaaaaagttgagcgtttaagaaaaattgtgaaagaagctgcggaacaatcacatagaagtgaaattccagaagtacatgctccggcatcatttaaacaattgctttcaatgagtggtgagtatgatgtttgtcttgttgcttacgaagaggaagcaaaacaaggcgagaaatctaattttgcgaaagctttaacgatgatgaaaccaggtcaaaagttattgattgtatttggcccagagggcggtttagcagaggaagagattacagtgcttcgtgaacataattttgtaccatgtagtttaggaccaagaattttaagaacagaaacggcgccgttatacgcgttaagtgctgcttcgtatcattttgaattgatgggg

SEQ ID NO: 10670 - DNA, 513 bp, Bacillus anthracis
atgaataatatagcttacattgcattaggttcaaatattggagaacgttatacgtatttaacggaagcgattcagtttctaaataaaaatccttatatcaaagttgaagatgtttcatctgtatatgaaacggaaccagttggctatactgaccaaagttgctttttaaatttagttataaaaatttctaccaatttatcaccgcaagaattattgaaagtaacgcaaaaagtagaaaatgacctaggaagaaaaagggaaattaggtggggccctaggactatcgaccttgacattttactatataatcaagaaaatattgaagcagagaatcttattgttccgcatccgcggatgttcgaaagagcttttgttatcgttccgttgttagagattaatcaagatataaaacaaaacatttcacgttcacaagtagaagaaatgaaaaggcgagagggagtaacggtatggaagcagaaaaatggggaagacgcattcgtgcttttcgaaaac

SEQ ID NO: 10671 - DNA, 1418 bp, Bacillus anthracis
atgggtaaatattttggtacagatggagtacgcggggttgcgaataaggagttaacacctgaattagcgttcaaaattggacgtttcggtggttatgtattaacaaagtgatacagatcgcccaaaagtaattattggccgtgatacacgtatatcaggacatatgctagaaggagctttagtagcaggtctattatcaactggagcagaagtaatgcgtcttggtgttatttctacaccaggtgttgcttatttaacaaaagcgttagatgcacaagcaggtgttatgatttctgcatctcataatccagtacaagataacggaatttaaattcttcggttcagacggtttcaaattaacagatgaagcagaagcagaaattgaagcttttattagacaaagaagttgatgaattaccacgtccaacgggtactaaccttggacaagtgagtgattattttgaagggtggacaaaaatatttacaatactttaaacaactgtaaaggaaagatttctctgggttacatatcgcttttaaatgggcccatgggcgctacagtcttctttacctccgaacctaatttgctgatttaaaagctgaattcctcaacaatggaaactttccccaacggttttgacatttaacgatggagtaggttctacacatccagaagtattagctgaattagtaaaagaaaaaggtgctgatattggtcttgctttcgatggtgatggtgaccgtttaatcgctgtagatgaaaaaggaaacatcgttgatggcgatcaaattatgtttatttgtgcaaagtacatgaaagaaactgggtcactaaagcacaatacagttgtttcaacagttatgagtaaattaggtttctacaaaagcacttgaagctaacggtattacaagtgataaaacagcagttggtgaccgctacgtaatggaagagatgaaacgcgggggatataacctaggcggagaacaatcaggtcacattatcttacttgattacattacaactggtgatgggaatgtttagggccctttcaactggtaaacatcatgaaaatggcgaaaaaacccattattctgagcttgcagggagaaaatgacaaaaattcccaccaatttctagttaaaacgttcgtgtacccagataaaaaacctagcatttggaaacggaaaaaaattaagaaaattatttcgtgtgttagaggaagaaatgaaccggtggatgggccgcatttcttgttcgtccatctggaacagaaaccactatttcgtgtaatggcagaagcaccaacacaagaaagtttgtggatgcatatgtgcatcgcattgtagaagttgtgaaagcggaagttggcgctgaataatttgataaaatttattgaaaaaggagcacaaaaagtgct

SEQ ID NO: 10672 - DNA, 2155 bp, Bacillus anthracis
aaaaaacaagagaaaaaaagtggtagagcagtaacaatgcggttaaacattctatttttttggggatttatattattttctgccatgatcataccattaggtaaagtacaaattatcgatgtgtcagacgtataaaaatgaagtagagaagagagaaaatgcaacggtaagcctttctgtcccgcgtggaaaaatatttgatcgagaagggaatccagtagttgataataagtctttacgtacaattacatatacaaagatgaaaggtgtaaaatcagaagaaatattaaaaacagcaagacaacttgcagacataattgaaataccacaagaagatatagataaactaactgagacggataagaaagatttttggatgcaattaaatccgacactaaccgaaaaattagtatctaaaaaagaaataaataagttcagagataaagatattaccggaaaaaatttagataaaaaaatttaagagttaaaaataaaacgagttacggataaaaatcttcatgatttaacagataaagatataaaagtgttagctattaaaagtaagatgacttctggttatcaaatggctccacaaattattaaaaaagacgttagtgaaaaggaatttactataattagtgaaggtttggcgaatctcccaggtgtaaacgtgtcggttgattgggagagagtgtatgtgaatgatggattattccgatccgttcttggaaatgtttctaattctgatgaaggattaccaagtgaacgattagattattacttagtacgtgattatagccgaaatgataggggttggaaaaagttatatcgagcagcaatatgaagatgtacttcatggtacaaaaaaagaagtaagaagcgttgcagataaacaaggtactacaattagaacggagacaatttcggagggaaagagcggtaagaacttaactttaacaatagatatggaattacagaaaaaagtagaagaaagtatagaaaaaatattaaaggcatataaaggatcagaatccatgttggaccgtgctttcgttgtaatgatgaatccgaaaaacggacaagtattatcaatggctgggaaaagacttgtagaaaaagacgggaaaacagaaattgaagactatgcattaggtaccatgactagttcatatgagttgggaatcacagttaaaggtgccacagttttaactggattttgaacgaaagctataacaccaggtacttatttttatgatgcacctatgaaagttaaagggactaggggagagaagtcttggaaaagagttggaaaaatatgatgatttaagagcgttacaagtctcttcaaacgtttatatgttccatacagcattaaaaattgcaggtgtggattatgtgagaaatagttcattaaatattaaacaggaatactttgataaaatgaggtactattttagacaattcggattaggtgttccaacgggtatcgatttaccgaatgaaacagctggacaaattggtaaaaaagataatcaacctggtttcttattagattactcaattggccagtacgacacgtatacaccacttcagctcgtacagtatatttcaacaattgcaaacggcggatatcgaatgaagccacaaattgttcaagaggtaagagagcaaacttcgcaaaaagatgagattgggtaagttgtgcatgcagtagaacccattagttttaaataaagttgatatgaaagaggaatatataaagcaagtaaaagaaggatttagaaagtatttccaagatgaggatggaacaggagtaagagcgttccaaaaagcatcttataaaccagcaggtaaaacaggaacagcacagacagtatacggtggagaaagtgatattggaagaaatgaaaagggcgagagaagagaatgttataacttaacgttagcagggtatgcgccatatgataatccagaagtagcattttccgtagttgtgccgtgggttatgaatgataaatctggtattaactctgatattggaaaagaagttttggatgcttattttgaattgaaaaataagcgattgactggagaaactttacaaaaagatagctctcaagaaggttaaaacatatgaaatagtatagaaattaga

SEQ ID NO: 10673 - DNA, 336 bp, Bacillus anthracis
atgatttcggataaaattaaattaacggcgaaagatattttagaaaaagaatttaaaacaggtatgagaggttatcaacaagaagaagtagacaagtttcttgatatgatcattaaagattatgaagcttttcacaaggaatttgagcaattaaagcaacaaaatgctcgtttaaagcgtgaactagaagagcaaaagctagcagcaacgcaagttccacaacaaccagttgtacaaacaccagttgcacaaccagtatataacaacacgaatacggacattttaaaacgtctatcgaatttagaaaaagctgtatttggaagtaagttatacgaa

SEQ ID NO: 10674 - DNA, 673 bp, Bacillus anthracis
ttaaaattagacaaagtaagtaaagtgtacggagaagggaatacggaagtaacagcccttcatccgatatcgcttgatgtaaaagctggagaatttatcggaatcgtcggtccttctggatcaggggaaaagtacgttatatcaaatcgcgggtgcattactatcaccatcaaaggggggatatatacattcgtgagcaaaatattacgaagttatcagaaaaggaaatgacagacattcgtttgaaaaaaatcggcttcattttccagtttgcaaaccttgttccatatttaaatgtaaaagagcaattactgtacattgcaaagctgaaaaaagaaaacaaacaagaatcagaaaagcgtgcggatcatttattagcggcatttggattaggagaaagaaaaaatcattatccaaatcaactgtctggcggggaaaagcaaaggggtagcaatcgctcgtgcgttcatgaacaacccagatttaatattagcagatgaaccaacggcaagctttagatctcaaaccgcgccacggaaagtcgtagaaatgatgaaccccgagtggaaagaaaccaaaaaagcaggctattatgtttacccatgaggaaagaatgcttgatgtatgggatcgtatatggacgcttcgagatggacagttaatataaagaaag

SEQ ID NO: 10675 - DNA, 1014 bp, Bacillus anthracis
atggctgagcggtattcacgacaacagttgttcaaaccgattggggatagaggacaagaaaagattcgaaataaacatgtgttaattgtaggggcaggcgcattaggaagtgcaagtgctgaaagtttcgtacgtgcaggcattgggaagttgacgattattgatcgtgattatgttgaatggagtaatttacaaagacaacaactgtactctgaagaagatgcgagagagaaattgccaaaagcaatcgctgctaaaaatcggctagaaaaacttaattcggaagtacaaatagatgctttcgtaatggatgcatgtgcagaaaacttggaaggactattagaaaatgttgatgtaataattgatgcaacagataatttcgatatccgatttataataaatgatttatcacaaaaatataatatcccgtgggtatatggttcttgcgttggctcgtacggtatgagttatacaattattccgcaagagacaccgtgtttacattgtgtgctgaagaacgttccagttacaggtgtgacgtgtgatacagctggaattattagtccgactgttcaaatcgttgcagcatatcaagtggcggaagcactaaaaattttagtagaagattttgcagcaattagaaaaacattttttatgtttgatatatggagtaatcaaaaccattttataaaactaggaaaaatcaagacagacgattgcccttcgtgcggtttgaatcgaacttatccttatttatcatacgaaaatcaaacgaaggtagccgttttgtgcggaagaaatacagttcaaattagaacggtagaaagtagacagtacaattttgatgatatagaaaaagtattaaaaaaactgggggaagtagatcggaatccgtatttactatcttgccaactagatgagtaccgcgtcgttatttttcgagatggtcgtgttttcattcatggtacaaatgatatttcaaaagcgaaacagttatattatcgcgtattcggt

SEQ ID NO: 10676 - DNA, 727 bp, Bacillus anthracis
gaacaatttcaatctatgctagaggagaagggtatcaccctctcttctagacagttagagcagttcgaaatctacttcgaaccattagtagaatggaatgaaaaaatgattttaacggctattacggagaaagaggaagtatatttaaaacacttttttgattccattacagctgctttttattatgatttttcaaaaaccattctcaatttgtgatgttggcgcaggagctggattcccaagtattcctttaaaaatttgtttcccgcatttaaaagtgacaattgtagactcagagcaaaaacgtattaatttcttaaatcatttagcacaaaagttgggaattaagtgacgtcgcgttttgtcacgatcgtgctgaaacatttgggaaaaaagaaggtgtacgtgaagcgtacgacattgtaatggcacgtggcagtcgcgcgtctttcagtattaagtgagctatgtttaccgctttgtaaaagttgggggaacattcattgcaatgaaaggtgccgcagcaaacgaagaaattgaaaatggcaagtatgctttagaggtgctaggcggggatctaaaggaaatgtctacgcttcaatttacgtttggaaagaagtgaacgtaatatttttattaatcgagaaaaagcgcaagacaccaaagaaatatccacgcaaaccggggaacacccaataaaatacctattgaaaaataattctattta

SEQ ID NO: 10677 - DNA, 635 bp, Bacillus anthracis
gggtctttccgtcctgtcgcgggtaacctgcatcttcacaggtactataatttcaccgagtctctggttgagacagtgcccaaatcgttacacctttcgtgcgggtcggaacttacccgacaaggaatttcgctaccttaggaccgttatagttacggccgccgtttactggggcttcagttcagagcttcgcttacgctaacccctctccttaaccttccagcaccgggcaggtgtcaccccctatacttcgccttacggcttcgcagagagctgtgtttttttgctaacagtcgcttgggcctattcactgcggcttttcgttaagaaagcaccccttctcccgaagttacggggtcatttttgccgagttccttaacccagagatctctcgcacaccttaggattctctcctcgcctacctgtgtcggtttgcggtacaggcaccttttatctcgctagaagcttttcttggcagcggggaatcaaagacttcgctccataaggagcttccccatcacagctcagccttcacgataagcggatttgcctacttatcagccctactgcttggacgtgcacaaccaatcgcacgcttcttctatccttctgcggcccctcattgctcaaacgaa

SEQ ID NO: 10678 - DNA, 756 bp, Bacillus anthracis
atgaccgttgcgcaattaattgatattgatgcaaaaagaacgaaaacgaataacgaagtatatcaaacatctacaatgcttgcgctattagatggtatatatgatggtgtgattagctttgaggaactaaaagaacgtggtgatttcggtatcggcacatttgatcaattagatggtgaaatgatcgcgtttgataatgaattttatcatttacgttcagacggttcagcagaaaaagtagagccggaggaaacaacaccatttgcgactgtaacgttttttgaaaaagaaatgagttatacgatagagcgtccgatgaatcgtgaagaagtggaagcattattacatgaattaatgccgagtaaaaacctattttatgcgattcgaatggatggtacgttccgtgaagtaagaacgagaactgttccaagacaagaaaaaccgtatacaccactcgttgaagtgacgaaatcacaaccaatcttctcatttgaaaatacagaaggtacgcttgctggattttggacgccagattatgcgcaaggtattggtgtagctggattccacttacattacattgatgatgaaagaagcggaggcggacatgttttcgactatgttgttgaaaactgcacaatccaaatttgtcaaaaagctcatatgcatttagcacttccagaaacagctgactttatggcggctgaattatcaagagaaaacttagaggataatattgcgactgcggaaggtgcagag

SEQ ID NO: 10679 - DNA, 494 bp, Bacillus anthracis
aagagaattgttacagcaacagttcgaaatcaaagtggtgtgttaaaccgaattacaggtgttatgacacgaagacattttaataaaaaaagtatttcagtaggtcatattggatagtacggacatatcgcggatgacgattgttgtacccgttgaaaatgaccagcaagtagagcagttatttaaccatcttcataagcaaatttgatgttttgaatagtatcgagatattacagaagaagcgatgattgcaagagaactcgcacttattaaagtagcaacatcagtagcaagagcagaattatacagtttaattgaaccgtttcgagccgctgtaatagatgttgggaaggattccatagttgtgcaagtaacaggtacgccaggaaaaagtagaagcattaattgaattacttcgtccatacggtttgaaagaaattgcaagaacaggggtaacagcctttacgcgtagcatgaaaaagcaagataagcaa

SEQ ID NO: 10680 - DNA, 759 bp, Bacillus anthracis
aaatggatggacgcctacgaaatttatttctttttttctaaaaagtggaaaagaaaactcctggtaaagggatacctaaaaaggggagttttaaagaaagtaccatttcccttgaaacaagaacaaacaatttgtaaataaaaagttctggtgtattatttgggagaatggtctgaaaattaagacaattcttagatgaaaaatagcaaaatacatttgttgatttacgttgttgaaaaatgacccgtcgtaatttctgcaatttccaatgcttgatttaaaaaggtattaaaagctcgtattgagcccaggtgcgaattattcgtgaccacgttgaaattgggcgacaacgctgttattatgatgaatgcaacaattaacatcggtgctgtaattggtgaaggttctatgatcgacatgaacgcggtacttggtggacgtgcaactgttggtaagaactgtcacgtaggtgcaggtgcagtacttgcaggcgttattgagccaccttcagcaaaaccagttatcgttgaagacgatgttgtaattggtgctaacgtagttgtgttagagggagttacagtaggtaaaggtgcagttgtagcagcaggagctgttgtaacagaagatgtacctccatatacagttgttgcaggtactccagcacgtgtaattaaagaaattgatgagaagacaaaagcaaaaactgaaattaaacaagagcttcgtcaattaaacccagagaaataaaaacataaaaag

SEQ ID NO: 10681 - DNA, 1587 bp, Bacillus anthracis
atgtggaaaaaaatcattcctgctgttgccgttttaagtaccattactttttcaagcgtatttgccgctcccccatctcagactccagctgaacaaaaccgctacatagacgtacaaatacttggtattaatgatttccatggacaactagatactgttaaaaaaattaataacaaagaagctggtggcgctgattacttagctacttatttaaaagaacgtaaaaaacaaaaccctaatacacttcttgtacatgctggtgatattgtaggtgctagtccaccagtttcagcattattacaagatgagcctacaattgaattcttaaatgatttaaaatttgatgttggtacaatcggaaaccacgaatttgatgaaggtattgaggaaatgcgccgcctcatttatggcggttaccatgagaaaactggcaattttaaaggcgcagacttcccttatgtcgctgcaaacttctataataaatccactggccgcttatttttaccgccatttactatcaaaatggtaaatggtgtgcctgtaggattcattggcgttgttacaactgatacaccaaatgtcgtgatgcctactatgcttaaaaatgtagaaatcactgacgaagtagaagctatcaataaatcagcacaacaattaaaacgtcttggcgttaaatccatggtcgtccttgctcatgttggcggaacaacagatgaatctggtgtgacaaatggagaccttactcgaattgcaaatgaaacagatccggaagttgatgttatttttggtgggcatagtcatacgtatgtaaatggtactgtaaataataaactaatcgtccaagcgaactcttacggaacagctttctcagacgtagatgtaacaattgatcgtaaaacaaaagatattgtaaagaaaaaagctgaagttgttacaacataccatgaaggtgtagaacctgataaacaagtaaagaaaaaattagatcagtataaagaaaaaatcgcaccacttgtaaatgaagttgtcggaaaatctacagcgcctatcgaccgtaaacaaaatgatgctggtgagtccactcttggaaatttagttgccgatgcccagcgccaaacgatgcaaactcaaatcgcacttatgaatccaggtggcattcgtaatgacttagatgctggtgatattacatggggcgaattatacggcattcagccttttggaaaccaattaattaaagtagatttaacaggccaagatattcgtgacattttaaatcaacaatggcaaaaaggaacgacgagaatgcttcaaatttcaggtattcaatatacgtgggatgcaaataaaccaaacggtgaaaaagttacaaatatacgtttaacaagcggagaagaattatctccatctaaaacgtatagcgtagttgcgaatgctttcttagcttctggcggtgatggatttgtatcatttaaaaatggtaaaaatacagaaactggtccaaacgactttgaagcgctagtcgattacgtaaaacaattaaaagaacctattcagccaatcatcgatggtagaattcaaaaaataaat

SEQ ID NO: 10682 - DNA, 3444 bp, Bacillus anthracis
atgacaaagctgcaacgtattcaaaaagtattggtagctaaccgtggagagattgcaattcgtgtgtttcgagcttgttcggaactgggattaaaaacagttgcaatctattccaaagaggatagtggttcttatcatcgttataaagccgatgagtcctatttagttggggaaggaaaaaagccaattgatgcttatctagatattgagggcattattgagattgcgaaaagtaatcatgtagatgcaatccaccctggatatggtttcttgtcagaaaatattcaattcgcaaaacgttgtgaagaagaaggaattatctttattggtccaaaaagtaagcatttagatatgtttggagataaagtgaaagcaagaacacaagcgcagctagcacaaattccagttattcctggtagtgatggaccggtagattcgttagaagaagttaaagaatttgctgaaaagtatgattacccgattataatcaaagcttcccttggcggtggcggtcgtggtatgcgtattgtacgtactagtgaagaattaagagaatcgtataatcgagcgaagtcagaagcaaaggcagcctttggtaatgatgaagtatacgttgaaaaattcgttgaaaaacctaaacatatagaagttcaaattttagcagatgaagagggcaatgttgttcatttatacgagcgagactgttctgtacaacgtcgtcaccaaaaagtagtagaaattgcacctagtgtgtcgctttcagatgatttgcgtcagcgtatttgtgaagctgctgtaaagttaacgaaaaatgtaaattatttaaacgcaggaacagttgaattccttgttaaagatgataatttctatttcattgaagtaaatccacgtgttcaagtagaacatacaattacagaaatgattacaggagttgacatcgttcaatcgcaaattttaatagctgatggacatgcattacatagtaaaatggtaggtgttccaaagcaagaggaagtggttgtgcacggttttgcaatccaatctcgtgtaacgactgaggacccactaaataatttcatgccggatacagggaaaattatggcataccgatcaggtggtggctttggggttcgtcttgatacaggtaatagtttccaaggtgcagtaattgcaccgtactatgattctttacttgtaaaagttacaacatgggcgcttacttttgaacaggctgctgcaaaaatggaacgtaacttaaaagaattccgtattcgtggtattaaaactaatattccatttctagagaatgtagtaaaacataaaaacttcttatcaggggaatatgacacttcatttattgatgcgtcacctgaactattcttgttcccgaaacgtaaagaccgcggaacgaaaatgttaaattacatcgggacagtaacagtaaatggtttcccaggagtagggaaaaaagagaaaccaattttcccggatgctcgtataccgaatgtattacactcagagccgatccaaaatggaacgaaacaaattttggatgagcgtggagcagacggattagtaaaatgggtacaagatcaaaaacgtgtccttttaacggatacaacgttccgtgatgcgcatcagtcattacttgcaacgcgtattcgtacaaaagatttacatcaaattgcagagccgacagcgagaatgctaccaaacttattctcagcggaaatgtggggcggtgcaacttttgatgttgcatatcgtttcttaaaagaagatccatgggaacgattactagatcttcgtgaaaaaatgccaaatgttttattccaaatgttacttcgttcttcaaacgcagttggctacaaaaactatccggataatttaattcaaaagtttgtggagtgttctgctcaagctggaattgatgtgttccgtatttttgatagcttaaactgggtggaaggtatgagagttgcgattgatgctgtacgagatactggtaaaattgcagaagcaacgatgtgctacacaggggatattcacgatccaatgcgtagtaaatacgatttgaattactataaaaacttagcaaaagaattagaagtatcaggagctcacattttaggtattaaagatatggcgggcttactaaaaccaaacgcagcatatgatttagtttcagcattaaaagagacggtatcgattccgattcacctgcacacacacgacacgagtggaaatggtattttaacgtatacgaaagcaattgaagcaggtgttgacattgtcgatgtagcagtaagttctatggctggtcaaacgtcacaaccaagtgcgaacacgctatactatgcgttaggcggaaacgaaagacagccagatgttaatatagattcattagaaaaactatctcattactgggaagatgtacgtaaatactacgcaccgtttgaaagtggtatgaacgctcctcatacagaggtatatatgcacgaaatgccaggcggacagtacagtaatttacaacaacaagcgaaagtggttggcttaggcgatcgcttcgatgaagtgaaagtaatgtatcgccgtgtgaatgatatgtttggtgatattgttaaagtaacgccatcatctaaagttgtcggtgatatggcattattcatggttcaaaatcacttaacagaacaagatgttttagagcgtggacattctatggacttcccaggatctgttgttgaaatgttctctggagacttaggacaaccatatggtggtttcccgaaaaagttacaagaaattattttaaaagggaaagaaccattaacagtaagaccgggtgaattattagagccagtagatttcgacgcgttaaaagaagagctattccataagcttggacgcgaagtgacgatgtttgatgtagttgcatatgcattatatccaaaagtatttatggattacgaaaaagttgctgagctttatggaaatgtatctgtgcttgatacaccgacattcttctatggtatgagacttggtgaagaaatcgatgtggaaattgaacaaggtaaaacattgatggttaaactagtatcaatcggagagcttcagccagatggaaatcgtgttctttatctggaatttaacggtcaaccacgtgagattgttgtgaaagacgaaagtgtgaaagcaacagttgcacaacgcgtgaaaggaaaccgtgaaaatccaaaccacattagcgcaacaatgccaggaacggttattaaagtagttgtaaaagaaggcgatgaagtgaaaaaaggcgattctatggcaattacagaagcgatgaaaatggaaacgacagttcaagcgccgttcaatggtaaagtgaaaaaagtatatgttaatgatggagatgcaattcaaacgggtgacttactcattgaattagatcac

SEQ ID NO: 10683 - DNA, 1686 bp, Bacillus anthracis
ttgagtacaggtgtaaaagcaaacgacgtgaagacaaaaacaaaaggagcagatcttgttgttgattgtttaattaaacaaggtgttacacatgttttcggtattccaggagcgaagattgactctgtatttgatgtactgcaagaaagaggaccagagttaattgtttgtcgtcatgaacaaaatgcagcatttatggcagctgcgattggtagattaacaggaaaaccgggcgtatgtcttgtaacttcagggccagggacatcaaatttagcgacaggtcttgttactgcgaatgcggagagtgatcccgttgttgctttagctggtgcagttccgcgtacagatcgattaaaacgtacgcaccaatctatggataatgctgcactattcgaaccaatcacaaaatatagcgtagaagtagagcatcctgataatgtgccagaagcattatcaaatgcattcagaagtgcaacttctacaaatccaggcgctactttagtaagtttgccgcaagacgttatgactgcggaaacaactgtagagtctatcggtgcactttctaagccacagcttggaatcgctcccacacatgatattacatacgtagtagaaaaaataaaagcagcgaaattaccagttattttactcggtatgagagcgagtacgaatgaagtgacgaaagctgttcgtgcattaattgcggatacagagcttcctgtcgttgaaacatatcaagcagctggtgcgatttcacgtgagttagaagatcatttcttcggccgcgttggattattccgtaaccaaccaggtgatattttactagaagaagcggaccttgttatttctatcggttatgacccaattgagtatgatccgaaattctggaataaacttggggacagaacgattattcatcttgatgaccatcaagcagatatcgatcatgattaccaaccagagcgtgaattaattggtgatattgccttaacggtaaatagcatcgcagaaagattaccgaaacttgtgttaagtacgaaatcagaagcagtgttagaacgattacgcgcgaaattatcagaacaagcagaagttccaaaccgtgattcagaaggtgttacgcatccacttcaagtgattcgtacacttcgttctttaattagtgacgatacaaccgttacatgtgacatcggttcccattctatttggatggcgagatgtttccgttcttatgaaccacgtagattattatttagtaacggtatgcaaacgttaggtgttgcacttccttgggcaatcgcagctactttagtagaaccaggtaaaaaagtagtttctgtatcaggtgacggtggtttcttattctcagcgatggagttagaaacggcggtacgtttaaattctccaatcgtccatctcgtttggagagacggcacatatgatatggttgcattccaacaaatgatgaaatacggcagaacatcagctacagagtttggtgatgttgatcttgtgaaatatgcggaaagtttcggtgcgacaggtcttcgcgttaacacgcctgatgaattagaaggtgtattaaaatccgcattagcagcagacggtcctgtcattattgatattccaattgactatcgtgacaatattaaattaagcgaaaaattattaccaaaccaattaaac

SEQ ID NO: 10684 - DNA, 1191 bp, Bacillus anthracis
atgaactacgcatatccagatgaaaaaggtcactacggtatatacggaggacgatacgttccagaaacgttaatgcaatctgtattagaactagaagaagcatataaagaggcgatggaagatgaagcatttcaaaaggaattaaatcattatttaaaaacgtatgtcggaagagaaacaccgctttatttcgctgagaatatgacggagtattgcggaggtgcaaagatttatttaaaacgtgaagatttgaaccatacaggagctcataaaattaacaatacaattggtcaggcacttcttgcggtgcgaatgggcaagaaaaaagttgtcgctgaaacaggggctggacaacacggtgttgcaacagctacggtatgtgcccttctcggtttagagtgcgtcatctttatgggagaagaagatgtgagacgtcaaaaattaaatgtgtttcgaatggaattactcggagcgaaagtagaaagtgtagcggcaggtagcggtacattaaaagatgcggtaaacgaggcgcttcgttactgggtttcacacgtgcatgatacgcactacattatgggatctgttctcggaccgcatccattcccgcaaattgtccgtgatttccaaagtgtaattgggaatgagacgaaaaaacaatatgaagcgttagaaggaaagttaccagaagcagtcgttgcttgcattggtggtgggagtaacgcaatgggaatgttttatccgtttgtacatgatgaagaagttgctctttacggcgtagaagcagctggaaaaggtgttcatacagaaaagcatgcagcaactttaacgaaaggaagcgtcggcgttttacacggatcgatgatgtatcttctgcaaaatgaagaaggacaaattcaagaagcgcactctatttcagcaggacttgattacccaggtgttggtccagaacatagcttgctaaaagatattggccgcgtttcttatcattccattactgatgatgaggcgttagaagcgtttcagttattaacgaaaaaagaagggattatcccggcgttagaaagctcgcatgctgtcgcatacgcattaaaattagcgccgcaaatgaaggaagatgaaggacttgtcatttgtttatccggccgtggtgataaagatgtagagagtataaaacgttacatggaagaggtg

SEQ ID NO: 10685 - DNA, 658 bp, Bacillus anthracis
ggttataaattaattgaagaagttgtaaaaacaaaagaaaatccaacattaggaatggctacaggaagctctccattaggtatttatgcagaaatgcgaaaaaataaacttgatacaagccgtgtaaccactgtaaacttagatgagtacgtaaatttaccacatgaagataaaaacagctatcattatttcatgcaagaacagttgtttgatcatcttccatttaaacaaacttatgtaccaaacgggatggcaagtgatttagaggaagagtgcaaacgttacgagggcattctagctgctaacccagttgacctacagattcttggaatcggtgaaaacggtcacatcggatttaacgagccaggaacaccgtttaattctccaaccaacattgttgaattaacagaatctacacgccaagcaaaccttcgcttcttcgaaaaagaagaagatgtgccaactcatggcaattacaatgggaattggtttcattatgaaagcgaaacaaattctacttgttgctatgggttctaaaaaggcagaagctgttaaagaattattgcaaggtgcatatagtgaagcgtgtcctgctacagttttacaacgtcatccgaatgtaaccgtaatcgctgatcaagaagctctatctttatgc

SEQ ID NO: 10686 - DNA, 1971 bp, Bacillus anthracis
atgcctgaattttataagaaacagtggtttttatatcctgtttatgtattggcattttttgtgtttgtgctcatttcaatcctctgctactttcatttaatgatggggataatctccttttttattttttgtatcgtcctttttgttgttgtacgatttgaacttactttccaaaagaattttgaaaaacatacgacagatatgattacaagggtaaagaaagtgagtaatgaagcatttaaccagatgccgattggtattttgttatacaataaggattatgggattgattgggcaaatccttatttatcttcatgtctgggacagcatgcattagctggatggcacctttatgatgtatcagaaacgttacttctttttattaagggagaaacttccgatgatatagtttctttaaataatcgaaagttccgtgtctttgtaaggaaagaagaaaagttaatttatttctttgatgtaacagaacaaacagaaatcgaaaaaatgtacgaagatcaacgtactgttttagctgtaatttatttagataattatgatgaagttacacaaggattagatgatcaattacgtacgaatataacaagtcttgtgacatcgcgtctaaatgaatgggccgttaagtatggggcgtatttaaaacgtgcatcttcggaaagattcttcgttgtactaaatgaaagtattttagcacagatggagaaagggaaatttagtattttagatcaagtacgtgaagaaacatccaaaaggaatataccacttacattaagtgtaggtgttggatcaggtgatttacctttatctgagcttggagctatggctcaatcaggtttagaccttgcgcttggacgtggtggagatcaagtagctattaaacaagcgacaggtaaagttaagttttatggtggtaagacaaatccagtggaaaaacgtactcgtgtacgtgccagagtgatttctcatgcattaaaggatttagtactagaaagtagcaatgtcattataatggggcatagggctcctgatatggacgcaattggtgctgcgattggtattttaaaagtggcgcaattaaatgaacgaaaaggatatattgtgctcgatgaaaatgattctgataagggaattaaacgtttaatggataaagtgaaacaaaatgaagagttatggtctcactttattacaccagaacaagcgatggaatttgcaaatgatgattcattacttgttgttgttgatacgcataagccttcaatggtgatggaagaaaaactgttacgcaaaattgaaaatgtagttgttattgaccatcatcgccgaggagaagattttattgaagatccattgcttgtttacatggagccatacgcttcttccacggcggaacttgttacggaattacttgaataccaaccgaaaaatttaaaaatgacaatgttagaagcgacagcattattagcaggtattattgttgatacgaaaagctttacattccggacaggtgctcgtacgtttgatgctgcttcttatttacgctcacacggtgcagatactgtacttgtacaagagcttttaaaagaagatatggatcagtatttacgggttgcaaaagccattaaaaatgcgtacatttatacaaatggaattgcgattgcaaaagttgatagcgatgattactacgatcaagtgcttattgcgcaatcagcggacacattattaacaatgacaggaattattgcatcatttgttattgcaaaacgtggcgagaatttcattggaattagcggcaggtctttaggtgaagtgaatgtgcagctaattatggaaaatttaggtggtggtgggcatttaacaaatgcagccacacaaatgaaaaatgttacagtagatgaagctgaggagaagcttcgatttgttattgatgactatttacagggaggcacacaatca

SEQ ID NO: 10687 - DNA, 1422 bp, Bacillus anthracis
atgaacggatatgtatatttagttggtgcaggaccaggtgatgaagggcttattacaaagaaagcgatagagtgtttaaagcgtgcagatattgttttatatgaccgtttactaaaccctttctttcttagctatacaaaacaaacatgtgaacttatgtattgcggaaaaatgccaaagaatcatattatgcgacaagaaatgattaacgcacaccttcttcaatttgcgcaagagggaaaaattgttgtccgattaaaaggcggagatccatctatttttggccgtgttggtgaagaagcagaaactttagcagcagcaaatattccatatgaaattgtaccaggcattacatctagcaccgccgctagtagctatgcaggtatcccccttacccaccgtaactacagtaatagcgttactttactaaccggacatgcaaaaggttctttaaccgatcatggaaaatataattcatctcacaatagcgatacgatcgcctactacatgggtataaaaaacttacctacaatttgtaaaaacctacgacaagcaggaaaaaaagaagatacgccagtagcagtcattgaatggggtacaactggtaaacagcgcgttgttacagggacactatctaccattgtttctatcgtcaaaaacgaaaatatttctaatccatctatgacaattgttggtgatgtcgtttcattacgagatcaaatcgcttggaaagaacataaaccattacatggtaaaaaagttttatttacatccgcaacaaataaaacaagtgtaatgaagcaaaagttacaagaagctggtgcagaaatatatcaaattccaactttcaaaaaggaagaatatacattaacacttgaacaaatcattgaaatttttaacgttaatcgccttgttttttgttcagctgaaagtgtagaaattttgatgcaatcatgtagtaaatacaagaaagatattcgttccttacaggcagagctacaacacatgaacgttgccactcaagaaaaacttatgcaatatgggctactaagtaaagaagcaaagttctcttccgatacaactgtttatttaggcagaaatattaatcggattgcttttattcaagagaaaattggtgccggctcctatatgatgactcataagtatacaattgatcatcgtttcgatgaagtccattctcgtatgctttcagaattcttatgggatagcattgtatttgaaggacgcgcttctattgatacgtttctagcagaagtaaaacgtcttggctttctcgatattgttactctcccattctcgtataccgacgttccaactttacgctatgcaaataaagtcgggtttcataacattgatcatcaattacaagaaactcttatgcagaaagacatggtaagacaa

SEQ ID NO: 10688 - DNA, 321 bp, Bacillus anthracis
atgatgactacagcagaacaaattccattccaattgattttaaatagtggtaatgcacgaagctttgcgatggaggcacttcaatttgccaaacaggggaaaatggcagaggctgatgaagcgatggtaaaggcgaaagaagcgatcaatgaagcgcatcatttccaaacagagctcatacaatcagaagcaagaggagaaaaaacagagattagtgttcttttaattcacgcacaagatcatttaatgaatgcgattacagtaaaagaattagcggcagagtttatcgatctttataaaaaattagaagcgaaaggggaa

SEQ ID NO: 10689 - DNA, 795 bp, Bacillus anthracis
atgaaatttacaattatgtcaaagggagatcaatcatcagatacactggcaagcacgatgaaagaatacttgctagattttggatttataatggatgaacaggaacccgatattgtaatttctgttgggggagatggaacgcttttatatgcgtttcatcgttattataatcgattggatgaaacagcatttgttggtgtacatacagggcatttaggtttctacgcagattggttaccgacagaagtagaaaaattagtaattgcaattgctaaaacaccattccaagtggtggaatatccacttttagaagtgattattcgctatatgaatgggagtaaagagtcacagtatttagcgatgaatgaagcgactgtgaaaagtgcagaaggtacattagtaacagaagtagaaatacgcggagagtactttgaaacgttccgcggggatggcctttgtatttctactccttcgggaagtactgcgtataataaggcgcttggcggagcaattattcacccttctattgaagcgattcaaattgcagaaatggcatcgattaataaccgtgtgtttcgtacggtaggttcgccactcgtattgccgaaacatcatacatgtgtgttgaagccgactgcaggaatgaacttacaaattacggtggaccatttaacgatggttcatcaagatgtgaaatcaattcagtatcgcgtggcaaacgagaaagtacgatttgttcgtttccgtccatttccgttctggaaacgagttcgtgactcgtttgttgcagataaa

SEQ ID NO: 10690 - DNA, 1893 bp, Bacillus anthracis
atgaaaatgttaactgtggaaaacttatcaaaatcatatggagaaaaaccgttatttgatggattatcatttagtattgcagaaggacaacgtgccggaattatcggtgtaaacggaactggtaaatcaactttattaaaaattattgcaggggcagaaattcccgatacaggtgatatgactcattcacgtggatatacaattagttatttatcacagcagccggagtttgatgagcaattaacagtattagaacaagtcttccatggtgatacacctttaattcgtcttcttcgtgactatgaaaaggcgctattacatatcgaaaaagatccaagcaatgaaaaagtacaggaacaattatttgcagtgcaacaacgtatggacgcaatgagtgtgtgggaagcaaatgcgaacgcaaaatcgttattaacgaaattaggaattacggatttcacagcaactgttggaaatttatctggtgggcagaaaaaacgtattgcgatggcgcagtgttttattgaaacaccggatctattaattttagatgagcctacgaaccatcttgaccatgagacagttgagtggttagaggaatatttagcaaggtacacaggtgcggtattacttgtaacccatgatcgttatttcttagatcgtgtgacgaatcgtattttcgaattagataatggaaaattgtatagttatgaagggaattacagtacgtttttagaagcgaaagcacttcgtgaagaacaagaacttgcacaagaatcaaaacgtcaaaacttatatcgccgtgaactagcgtggattcgccgtggtgcaaaagctcgttcgacaaagcaaaaggcacgtattcaacgatttgaagagttaaaaggtcaagaaggtccagctgcaaaacagtcagttgatattgcgcttagcggtagtcgccttggaaaaaaagtacttgagttaaaagatgtaacgaaaaaatttggcgataaaacagtattaaacaacttcaatcatatcgtgaaaccaggcgatcgtatcggaattattggagcgaatggaagcgggaaatcttcgctattaaatatgcttgcaggtaaaatatctcctgatagtggtgaaattgaagttgggcaaacagtaaaaatcgcttactatacgcaagaaaatgaagaaatgaatttaaatcaacgtatgattgaatacattaaagaaattgcggaagttattcatacgacagatggaaaagtaattggtgcgtctcaaatgttagaacgtttcttattcccaccgcattcacatggtacacctcttggtaaattatctggcggtgaaagaagacgtttatatttattacgtatattaatgggagaaccgaacgtactattactggatgagcctacgaatgatctagatccacaaacattaactgtattagaagattatttagaagatttttcaggtgtcgttttaactgtatcgcatgaccgttacttcttagataaagtagtagatgaattgttcatctttactggagaaggagaagtgcgcgaatttctaggtagttatacggattatttagaaatggaaaaaacgagagaacttattgagaaagcggaagtacagaaagagaaaaaagtagtagaagaagctccgaaacaacaacgtaagcgtaaactttcatataacgagcagcgcgaatgggaaactattgaagatacaattgcggaacttgaagaaaaactagaatcaattggagaagagcttgcgaatgttggttctgatttcacaaaagcacaagaattatctgaagcacagcaaaaaacagaagaagagctagaaaaaacgatggaaagatggagtgaactatccgacattgttgaaggattaaaa

SEQ ID NO: 10691 - DNA, 1461 bp, Bacillus anthracis
gtgcagaaagatataatgtataacactgagatggatgaaacgttaaaaattataaataaaggattaaagaagacgacgagcccgaagcaaattattgtagtaggggctggcatggctggattagtttcggcatctttattaaaagctgcgggacatgaagtgaagatttttgaagcaaataaccgggtaggtggccgcatagagacagttagaatggaagataccggtttatatttggatgtaggggcaatgagaattccgtattcgcatacattaacgatggcatatataagaaaatttgggctacaggtgagcccttttattaataggaatgagactgatatcatttacgtaaatggccggaaaacgacattaaaacaatatgaaaaagatccaagtatattaaagtatcctgtagaaatgaatgaagtggggaaaacgtctgaggagctattattgttagcggtacagcctattataaattttataaaaaagaacccagagaaaaattgggatgttgtagtaaaggattttgggagatactctacaggacaatttttaaagtatcatccgtatcaatataatacatatttttcgccagtaacgattgagatgatcggtgttctattagatttagaaggttttttagaacgttcatttgttgagacattacgttttttatatattatgcaagaggagagcggattttgtgaaatagtaggtgggaatgatagattaccaaagtcctttttaccacaattagaagaaaatattatatataatcaaaaattaatgaagctacatcaacgtgataacggtgtgacagctttctatcgaaacgaagaaacgtttgaatatagtagtattacaggggacttagttattgttaccattccgttttcgacaatgcgttttgtggaagttgagccctttgattctatatctcatgaaaagtggaaagcaattcgcgaattgcattatatgccagcaacaaaaataggaattcaatttaaaagtcgattttgggaagaacaaggacaattaggtggcagaattataacggatttgccaattcgttacgcttattatccaagctatggaattggagagaagggaccggctatgatgctaggaagctatacatggtcttatgatgcgttgttatgggatggattgtcaaagggtgaccgtatttattatacattacaaaacttagcaacgatattaggtggtcaagtatatgatgaattcttgtctggtatatcaaaaagctggacattggatccatatgcacttggagggtttgcgctatttcaggcaggtcaagaatcagagttgcaaccagcgattgtcaaaccagagggaagaatattcttcgctggagaccatacgacgttatatcatggatggattcaaggggcaattgaatctggggttcgtgtagcggaagaggtgaatgaa

SEQ ID NO: 10692 - DNA, 1247 bp, Bacillus anthracis
atggaaaaaaagagggtcgtaattacaggactaggagctgttacaccggtcggtacagatgttgaaacagcgtgggaaaacattaaaaagggtggtttttggaatcgggcgtctcacaagaattgatcgggaactatttcccagcaaaagtggcagcagaaattaccggctgtgaagtcgagaaatatattgataaaaaagaagcgcgccgtatggatcgcttttccacaatatgcagtagcagcagcgaaaatggcagttgcagatgcaaagcttgagattacagaagaaaacggacctcgaattggtgtatggattgtttctggtattggcggtatggaaacatacgaagaccaatttaaaatttttactgagaaaggcccgcgccgcgtgagcccattcttcgtaccgatgatgattccagatatggcagcaggccaagtatcaatcgcaacaggagcaaaaggaattaacacttggttctctaacggcttgtgcatctggtgcaaactcccttggtgatgcatttaaagcgattcagcgtggggatgctgatgcaatgattacgggcggggcagaggcaccgttaacaagtatggcattcgcaggatttagctcagcgaaagcattaacattcaatgaagacccagcaacagcttgccgtccatttgataaaaaccgtagcggtttcgtaatgggtgaaggttcaggtattttaattcttgaagaattagagcacgcattagctcgtggtgctcatatttatgcggaaatcgctggttacggtgcaactggtgatgcattccatattacaatgcctgctcctggcggtgaaggcggcgtgcgcgcaatgcgtcaagctttagcggatgcaggtctacagccagaagatattgattacattaatgcgcatggtacaagtacggatgcgaatgaaaagtatgaaacgatggcaattaaagaaacgttcggtgagcacgcgtataaagtagcgatcagctcaacgaaatcaatgacaggtcacttattaggagcagcaggtgctgttgaagcgatcttctctattaaatcaattacagatggagtaattcctccaacaattaactatgaaacaccagatccagaatgtgacttaaattacgtaccaattaacgcgagacatcaagaagtaaacgccgtgtgtaagtaattcttttgggattccggggggcataacgccggaattagtattttaaatcccgcttaat

SEQ ID NO: 10693 - DNA, 774 bp, Bacillus anthracis
atgagtgttcttgaagtaaagggattaacgaaggtgtatcaatcgaaaggttcagtagcgacgactgctttaaatgatataaattttaaaatagaagaaggcgaatttgtaggaattatgggtccttcagggagcgggaaaacaacgcttttaaatttattagcaacaattgataagcaaacttcaggtcatgtgcttgtaaatggagaagaaattaatcaaatgcgtgctgcaaaattagcggaatttcgccgtacacatttaggtttcattttccaagattttaacttacttgatacattatcgattaaagaaaatattattttaccgcttgtaatggcgaagaaatctgtaaatgaaatcgatgcgaaagtactggaaattgcgaagtttttaaatatcgaagaaattttaaataaaaaggtttatgaagtatcaggcgggcaacaacaacgtgcagcagctgcgagagcgatcattcatgaaccgactttaattttagcggatgagcctactggaaacttagattctaagtcagcaaaatcgttaatgagcgcgttgcaagacttacatgaacaaaagagagtgacaattgcaatggtgacgcatgatccagtagcggcgagttattgcgaacgcattcttttcattcgcgatggagagattttttcagaaattcataaaggaagaacgaagcaagcctttttccaagaaattctggacgtacttgcgatgctaggaggagaatatcatgaactttcgccagctcgcgct

SEQ ID NO: 10694 - DNA, 1307 bp, Bacillus anthracis
caattagtaaccgtcatgggcgcagttcttgcagagagtgaaagcagcttaccaaattgcaaagcgtggttgtccaagtaagattatacgaaatgagcccggtaaggcaaccgccagctcatcacacagataaattcgcagaattagtatgtagtacctcacttcgcgcaaacacattaacaaatgcggttggtgttattaaagaagaaatgcgtttaatggattctgttattattcgtgcagctgatgagtgctctgtaccagcaggaggggctttagcggtagatcgtcatgaatttgcggcgaaagtaacggaatatgtaaaaaaccatccgaacgtaactgtgatgaatgaagaaatcactgaaattccagaaggtcctactattatcgcgacaggtccacttacgtcaccggatctttctgcacaattaaaagaattaacgggtgaagactacttttatttctatgatgctgcagcaccgatttgtggagaaagacagccattgatatgaataagggtgtatttaaaatctcgttacgataaaggggaagcggcatatttaacctgcccaatgacggaagaggaatttgcccgtttttacgaggctttaatcgctgctgaaacagtacctttaaaagaatttgaaaaagaaattttctttgaaggttgtatgccagtagaagttatggcaagtagaggaagacaaacactagtatttggaccgatgaaacctgttggattagaagatccgaaaacagggaaaacgccatatgctgttgttcagttacgtcaagatgatgcagcgggaaccgtatataatatccgtaggtttccaaacgcatttaaaatggggaccacaaaaagaagtgttacagttgattccaggactggaaaacgcagagattgtacgttatggtgtaatgcatcgtaatacgtttattaattcacctaacttgcttcgtccaacataccaaaatataaacaacgtgatgatttattcttcgctggtcaaatgactggagtagagggatatgttgaatcggcagcttcaggattgttagcgggtatcaacgctgctcgacttgtaaaaggtgaagagccggttgtattaccacctgtaactgcaatgggaagtatggcgaattatattactgcgacaaacgcgaaaaacttccaaccaatgaatgcgaacttcggtctgtttgcaccgttagagaagaaaattaagaagaaagcagaacgtaatgaagcctatgcaacacgcgctttagaaatgattcgaaattttgtaaatatttagtta

SEQ ID NO: 10695 - DNA, 1130 bp, Bacillus anthracis
aaaacgcaagttgtcatcaatgccaaaatttatacaggtcaagaagtagtagaaaacggatttattcgttacgcagaaacaattaaagaaattggtttgatggctccatatgtatcacaagaaaatgaaactgttttagatgcagcaggggaggattgtgatttccaggaatgattgatgttcatattcatggtggatacgatattgatgcgatggatgcaaatagcgatgggttagtaactcctagggaaagaaatggtaaaagaaaggaggtacaacttacttcccaacaacaatgacacaagctccagaaagcatcgaaggcgcactacttgcttgcaaaggagccgaagaaaaagggagcccttttccaaataattcccttaaaaggaccgtatgtttcaaaaaaacgtgcaggtgcacaaccacttgaacatattgttcctgctaatattgaacaatttaaacaatggcaggaaacaagcggaaatctaattaaattagtaacatacgcaccctgaagaaaaaagagcattaggagttgagcagttatcttgttgaaactggtgttgtcggcacaatggggcatacagatgcaattgatgcgcaattaaaaaacagaaacattacacatgcaacgcatttatacaatcaaatgcgtggattacatcaccgtgaaccaggagttgttggtcatgtgttattaaatccagatgtaatggttgaagtaattacagatggtattcacattcaccctgatatggtgaaattagcatataaattaaaaggaccgaaaaaagtaagtgttattactgacgcaatgcgtgcaaaagttctgaaagatggattatatgagcttggcggacagcccagtacatgtaaaagatggtagtggctcgattaaaagattggaacgctagctggtagtattctaaaaatggatcaagctttccgaaaatgtaattgaatttacagggttgttcatcgaagatgcagtactgatgacatcagttaacccagcagaaggagttggattaatataaaaaggtgcatagcgggtaggaaaagatgcagactttgttgtgatgaatgaagattttacatgtatatgatacggttcgtttaggaat

SEQ ID NO: 10696 - DNA, 927 bp, Bacillus anthracis
tttatacatgcggctgatttgcatttggatagtccgtttaaaggaatggagatgaatgtaccgcagtctgtttgggagagaatgaagcagagtacgtttgaatcgttcgaacgtattattgataaagcgatttcaggagccggttgttttcgtattgtttcccggggattttgtatgatggggagacgagaaatttgagggccccaaatttttgtgccggaaccaaatgaagagcctttcgcagtacgatttccccttttttattattcacgggtacccacgatcatttggggggaagctggggcagcaattggagttgatcagaaaatgggcatgtgtttacagagccttacgtagaagagaaatcattttataaaaatggtgagttattagcttctattttcgggatttagttatttgcagccaagcggtaacggataatatgacagcgcaatatacgaaaatgagtgatgcgccttttcatattggcatgcttcacggtaagtgtggaaggcgatgcagagcataatcgctatgcaccgtttcaaattcgtgagctgaaagaaatgcagtttgattatttgggctcttggccatatacataaacgtgaaattttattagaagagccatacatcatttatccaggtaatatacaaggacgtcatcgtaaggaaacgggcgagaagggtgcatacctaattgaacttacgaaacaaggatcgcactgttcctttttccatacggcggatgttgtgtgggatgagatagaagtgaatattgatggacttgaaactgttgatgaacttatgacaaagtgtttcaactgcgatgaatgagtgcagaagaagagaaagaaagttacccaattaactgtcgtattacagggacaaggggccacttttctccttatttacgtgatgaaaagc

SEQ ID NO: 10697 - DNA, 246 bp, Bacillus anthracis
atgaaacttttaccaatcggaacagtagtgaaactagaaggtgtagaacctgtcattatgataattggaagaatgattgtatcagcagataaacgtgattttgattatgtgggtgttccttacccagttggctatctaggtgatgaaaaagtgttatgttttaatcacgataaaattgtagaggaaatgcatagagggtatatgactgagagtgaattggttctacgtgaaaaattagtagaattg

SEQ ID NO: 10698 - DNA, 1482 bp, Bacillus anthracis
atgagtcaactagctgtaaatcttcatgaaaaggtagaaaagtttcttcaaggtacgaaaaagttatatgtgaatggatcattcattgaaagcgcttccggtaagacgtttaatacacctaatccagcaactggcgaaacacttgccgtcgtttctgaagccggtcgcgaagatattcataaagctgtagttgcagctcgcatggcttttgacgaaggtccttggtctcgcatgagcactgcggagcgaagccgtcttatgtacaagttagctgatttaatggaagaacataaagaagagcttgcacagctcgagacgttagataacggaaagccaatccgtgaaacaatggcagcagacataccacttgcaattgagcacatgcgctattatgctggctgggcgacgaaaatcgttggtcaaacaatccctgtttccggtgatttctttaactatacacgccatgaagctgttggtgtcgttggtcaaattatcccttggaacttcccgcttcttatggccatgtggaaaatgggagcagcgcttgctacaggatgtacaatcgttttaaaacctgcagaacaaactccactatctgctctatacttagctgaattaattgaagaagctggattcccgaaaggcgttattaatatcgttcctggattcggtgaatcagctggacaagctctcgttaatcatccactcgttgataaaattgcatttaccggttctactccagtcggtaaacaaattatgcgacaagcatctgaatccttgaaacgtgttactttagagcttggtggtaaatcaccgaacattattttaccagacgctgatttatctcgcgcaattcctggtgcactttctggtgttatgtttaaccaagggcaagtatgctctgctggatcacgcctatttgttccgaagaaaatgtatgataatgtcatggctgatctcgtcctctattctaaaaaactaaatcaaggtgtcggtcttgaccctgaaacgacaattggtcctctcgtttccgaagaacaacaaaaacgtgtaatgggctacattgaaaaagggattgaagaaggcgctgaagtactttgcggaggaaataatccattcgatcaaggctacttcatttctcctacagtattcgctgacgtaaatgacgaaatgacaatcgcaaaagaagaaattttcggtccagttatttctgcaataccttttaacgatattgatgaagtaattgaacgagcaaataaatcacaattcggcttagcggctggtgtgtggacagaaaatgttaaaacagcacactatgttgcaagtaaagtacgtgcaggtacagtatgggttaactgttacaacgtctttgatgcagcatctccatttggaggatttaaacaatctggtctcggccgtgaaatgggatcttacgcattaaataactatacagaagtgaagagcgtttggcttaacttaaat

SEQ ID NO: 10699 - DNA, 891 bp, Bacillus anthracis
ttgaacagatttacattgaaatgggatatagaatcggctgaagaaggaactttagttagagaatttttaaaaacaaaagggatctccaaagctgcattaacggatataaagtttcacggcggagctattgaagtaaatggccaacatgcgagtgttcgtcatcagttgcaagttggtgaagaattacgtatcttttttccagtggaggaaagaagtgaagggatgattgcagaagatattcctttatgtattgtatatgaagatgatgcagttcttgtcataaacaaagaggcgaacatgtcaacgattccgtctagagaacatccgtccggaagtgttgcgaatgcgcttttatctcattatgataagcaatatcttccaagtacagtgcacatcgtaacgaggttagatcgtgatacttcagggcttatgcttattgcaaaaaatcgtttcgtgcatcatcttttatcgaaacagcatcaacaaaaagctgtgaaaagaacgtatgaagcgatcgttcacggtgagatggtagaacgagaaggaacgattgacgcaccgattggacgaaaatcggatagcattattgagcgcaccgtttgtgaggaggggcaaagagccgttactcattttagagtgattgatagtgccaatcataagacgcatgtatcgcttgagcttgatacaggaagaacgcatcaaattcgtgtgcatctggcacatataggacacccgctgcttggcgataatttatatggtggaaaaagggatgaaatgaaacgacaagcacttcacagtacatctttgacgttttatcaccctattttagagaaggaaatgtctttcgctgcaatgattccaagtgatatgcaagaggtattaagacagact

SEQ ID NO: 10700 - DNA, 1220 bp, Bacillus anthracis
atgaactacgcatatccagatgaaaaaggtcactacggtatatacggaggacgatacgttccagaaacgttaatgcaatctgtattagaactagaagaagcatataaagaggcgatggaagatgaagcatttcaaaagggaattaatcatttattaaaaagcgtagtcggaaggagaaacaccgctttatttcgctgagaatatgacggagtatggcggaggtgcaaagatttattttaaaacgtgaagatttgacccatccaggagctcataaaataccaaatacaattggtcaggcacttcttgcggtgcgaatgggcaagaaaaaagttgtcgctgaaccagggggctgaacaacccggtgtcgcaacagttagggtatgtccctttcttggtttaggagtgcgtcatctttaggggagaggaagatgtgagccctcaaaaaattaaatgtgtttcgaatggaattcctcggagcgaaagtagaaagtgtagcggcaggtagcggtacattaaaagatgcggtaagggaggcgcttcgttattgggtttcacacgtgcatgatacgcactacattatgggatttgttctcggcccgcatccattcccgcaaattgtccgtgatttccaaagtgtaattgggaatgagacgaaaaaacaatatgaagcgttagaaggaaagttaccagaagcagtcgttgcttgcattggtggtgggagtaacgcaatgggaatgttttatccgtttgtacatgatgaagaagttgctctttacggcgtagaagcagctggaaaaggtgttcatacagaaaagcatgcagcaactttaacgaaaggaagcgtcggcgttttacacggtatcgatgatgtatcttttgcaaaatgaagaaggacaaattcaagaagcgcactctatttcagcaggacttgattaccccaggtgtggtcccgaacttaagcttgctaaaagaaattggccccggttcctaaccattcccttaccgatagagaggcgtttaaaaccccttcccgttttttccgaaaaaaaaaggggttttccccggcgttagaaagctcgcatgctgtcgcatacgcattaaaattagcgccgcaaatgaaggaagatgaaggacttgtcatttgtttatccggccgtggtgataaagatgtagagagtataaaacgttacatggaagaggtgtaaaaaatgggagtagaa

SEQ ID NO: 10701 - DNA, 1452 bp, Bacillus anthracis
atgcagaaatcaattgcttcaaatattttttataaaatactgctcaatacgtttaatattatccttccaattttagttggtccttacgcatatcgaacgttaggagcaacttcaatcggaaccgttaatcttgctgaaacttttttcaattacttcttcgtgtttgccgtatttggcgtatatcaatatggtttacgcgaaattagcttaattaaaaacgataagaagaaagtttctaagttatttacaagtctctatgtaattaacttcacaactagtattttagctttatcatcctttgtgctctttagctatattggatatggacatgaaagtctatttcctgttcttcttattttcggttttaattttatatctaacatgttttatgtggaatggtttaatgaagcatatgaaaattatgacttcatcactaaaaaaacagttatcgttcgattaatctatgtcgtacttcttttctctttcattcatggggttgacgattataaaacatatgctggtttattagtattatcaacatttttaaaccactctattagctttgtatatgtgaaacgccaagtgaaatttgatttttccgacttaacgattattcctcatttaaaaccgttactattagtattgattttttcaaatgctaatattttatatactcaattagatcgtcttgttttaggagtatatgttggaaaagaagaagttgcatattacgtaatggcttttcaaattatgatgattattaacacacttatgttaagtgttgtacaagtaaccgttccaaggctatcttacttatcaggaaatgcatctgaaatggagtatgaatctttactaaataaaatttcaaaagtatatttcattaccctattccctgctgcaattggtttaatgctcattgctcatggagctgttgttatttacggtggacaacaatttgctgcagctggtaatacattaattgtcttcgccttctatatgattacggttggtattgagtccattttatcgaatcaaattatttatgtgaaaaagaaagaaagcattttagtgcgatttttattcatttgcggatttatcaacttagcatctaatattgcactcatattcttccatgtacttacaccaacaacagcgattttcacaacaacaattgcgaactgcttcttaattacatttgaatatatttatgtgaaaaagaaactaaaagtgaattatacgttattcgatatacaaaaacttaaatatctattttattccctaacatttataccgatagcattcgttattgatatgattgtatctggacaaatactacaagttatcctagtaataataacgtgtggattaacgtatgcccttatcctctttataacaaaggatgaaattctcttttcgctacttgaaaagatactagcacgattcaaaaaggct

SEQ ID NO: 10702 - DNA, 1367 bp, Bacillus anthracis
cttaagaaagacctcaaaatacgccacattacaatgatctcaattggcggcgtaataggagctggtttgtttgttggaagtggggcagttgtgcattcagcaggaccaggttctatcgtttcatatgcattagcaggacttttagtcgttttcgttatgagaatgcttggggaaatggcagctattaacccgacaagtggatcatttgcaacatatgcaagagaagcaattggtccgtgggccggttatacaattgggtggctatattggtttttctgggtaattgttattgcgatagaagccacagcgggtgctggtattattcagtactggattccagaaatcccgctttggttattaagcttaatattaacgattttattaacattgacgaatgttttttcagtgaaatcatttggagagtttgaatattggttttcttttattaaagtaataagtattgttttgttcctttgtcttggactagctgttattttaggatttgttcccgggaaccggaaggcccctggccttttggattttaggggggcaagggaggatttttcccaaaccggtaaaagtggggtgcaactgggaattactgtcgttatattttcatttatgggatcagagattgtagcggtagcaagtggtgattttgcagaccctgtaaaagcagtaaaacgagcaacaaatagtggtaatttgccgtattctcgaatttttcattggatctatcgctgtagatgttacacttctttccggggaaatcagccaacatactaaaaagtccgtttgtagcggtgctagaacatatagggataccagcggcagcgcaaattatgaattttatcgttttaacagctgtactttcttgtttaaattctggtttatatacgaactcaagaatgcttttttcgatggcggaaagaggagatgctccaaaggcgttcttgaaattgaacagtagtggtgttccagttcgggccgttttattcggaacgttcttcgcttatattggagttgtttttagttacatatctccagataaagtctttttatttttagtgaatgcctctggtgggattgcgttactcgtttatctcgttatagctatttcgcatttaaagattcgtaaaaaaatgggaagggtagaacaacaaaatttgaaagtgaaaatgtggtttttccccgtatgtgacgtatgttacaattgcagctattatagcagttttaattgcgatgcttgccattgaaatctttacgtttcacaagcacttttgacgatgcttgtcactgttcttataatcatttcttattttatttttaatagaaataaaaatagtacagtgttgaatactaaaagt

SEQ ID NO: 10703 - DNA, 894 bp, Bacillus anthracis
gtgaacgagcaatggattttcttaaatggagaatttgttccaaaagacgaggcaaaagtatcagtatatgatcatggttatttatatggcgatggagtatttgaaggaattagagtttatagcggtaatgttttccgtttgagagagcatcttgtccggttatatgaatcagcaaaatccatcatgttagaaattccatattctttagatgaaataacgaatattgttgttgagacgatccgacaaaataaattatctaatggatacattcgcctagttgtatcgagaggagcaggaaatcttgggttagatcctgattcttgtacgaaaccgaatgtagtagtaattgcagagcaactatctttattcccgcaagagtattatgaaaaagggattccagttgtaacagttgcaacgcgccgaaaccgtccagatgtattgtcgcctcaagtaaaatctttaaattacttaaacaatattttagttcgcatcgaagcgaaattggctggagtacaagaagcgcttatgttaaatgatcaaggatacgtagctgaaggctcaggagataacgtgtttattgtaaaaggaaataaattaattacaccaccaagttctgctggagcgttagaaggtattacacgaaacgctattttagaaatcggtgaaaaacttggatatgacgttagagaagagttatttacaagacatgatgtatatgtagctgatgaagtatttttaacaggaacggctgcggaagtaattgctgttacgacagtagatggtagaacgatcggtttagggcaaacaggtccacatacgaatcgtttattagaagaattccgaaagttagttatagaagatggagagaaaatttacgaagaaaataaagttgga

SEQ ID NO: 10704 - DNA, 1061 bp, Bacillus anthracis
atgagtaaaattatcggtattgacttaggctcaacaaacgaagatgtagctgttatggaagcttcatataagtaaagttttcccaaatccagaaggaaaccgtacaacaccttctgttgtagctttcaaaaatgaagagcgtcaagttggggaaagtgcaaagcgtcaagcatttacaacccccaaatccaatcatgtctgttaaacgtcatatgggtacagactacaaagtagaagttgaaggtaaagattatacacctcaagaaatttctgcaatcattttacaaaacttaaaagcttctgctgaagcatacttaggtgaaacagtaacgaaagctgttattacagtacctgcatacttcaacgatgcagaacgtcaagcaacaaaagatgctggtcgtatcgctggtttagaagttgagcgtatcattaacgaaccaacagcagcagcgcttgcttacggtctagaaaaacaagatgaagagcaaaaaatcttagtatatgacttaggtggcggtacatttgacgtatctatccttgagttagcagatggaacattcgaagttatttcaactgctggtgacaaccgtcttggtggagatgactttgaccaagttattattgaccatttagtggctgagttcaaaaaagaaaataacattgatttaagccaagataaaatggcgcttcaacgtttgaaagatgcagctgaaaaagcgaaaaaagatctttctggcgtaacacaaacacaaatttcattaccattcattagtgctggagctgctggtccattacatttagaattaacattaacaagagcgaaattcgaagagctttcagcaggtcttgttgaaagaacgttagagccaactcgccgtgcattaaaagacgctggttttgctccaagtgaattagataaagttatccttgttggtggatctactcgtatcccagctgtacaagaagctattaaacgtgaaactggtaaagaaccatataaaggtgtaaaccctgatgaagttgtagcggaaggtgctgcagttcaagggggtcttccagca

SEQ ID NO: 10705 - DNA, 504 bp, Bacillus anthracis
gtgccaactttattattaggggctgccattccatttggaacgattgcttacacattgttcattttcttacttctattagtaatgctacgcaaatttgcgtggggtcctttaatgggaattatgaaagaacgtgaagagcacgttgctaatgaaatcgacgctgcagaaagaaataatgctgaggcgaagaaattagtggaagaacaacgtgagatgttaaaacaatcgcgtgttgaagcacaagagttaatcgaaagagcgaaaaagcaagctgtagatcaaaaggatgttattgttgctgctgcgaaagaagaagcagaatcaattaaagcatctgctgtacaagaaattcaacgcgaaaaagagcaagcaattgctgctttacaagaacaagttgcttctttatctgttcaaattgcttctaaagtaattgaaaaagaactaaaagaagaagatcaagtgaagttaattcgcgattatattaaagaagtaggagaagcgcga

SEQ ID NO: 10706 - DNA, 498 bp, Bacillus anthracis
atgcatcgcattgacccaagtaaattagaacttgaagaacgtgtagttacgataaatcgtgtcgcgaaagttgttaagggtggtcgtcgtttccgctttgctgcactagttgtagttggcgataaaaacggtcatgttggattcggtactggtaaagcacaagaggtaccagacgcaatccgcaaagctatcgaagacgctaagaaaaacttaatcgctgtaccattagttggtacaacaattccacacacaatcaacggtcattttggcgctggtgaagtattcttaaaacctgctgctgagggtactggtgttattgctggtggacctgttcgtgcggtccttgaattagcaggtgtacaagatattctttcgaaatctcttggttctaacacaccaatcaacatgattcgcgctactgtgaacggattaagcgaacttaagcgcgctgaagatgttgcaaaattacgcggtaaatctgtagaagagctactaggt

SEQ ID NO: 10707 - DNA, 901 bp, Bacillus anthracis
gcgaaattgtcgatattggttggaaaaatcttaacgccaattaagttaactttcatcggtattttagtaatcgttgcttttattcatccgattggagaaatgcaagcaccaggttgaagcttatacatcacatgcattctttaaagggttccaagaaggatacttaacgatggacacgcttgcatcattcgtattcggaatcatcatcattaatgcaattaaagaaaaaggtgcaaaaacgaaaacacaaattatggtcgtttgtgcaaaagcaacaatcattgcagcatctattttagcaattatctatacagcactttcttatatgggtgcttcaagtgttgcaaagcttggacatttagagaacggcggagaagtattagcgaaagtttctaactactattttggatcatatggcggagtattattagggttaatgattacagtagcttgtttaacaactagtgtgggacttgtatcagtatgttcttcattcttccataagttattcccaaatgttccttacaaagcaattgcaatcacgctatgtatatttagtgcaattgttgcaaatgtaggattaacacaattaattgcagtttctgttccagtattaacagcaatttatccactagcaatcgtattgattttcttaacattcttccattcattattcaaaggaagaactgaagtttatcaagtgagcttaactgtaacatttattatcagcttattccatggattaagtgcagctgggagataacggtgaagtaataagcccagtggtccctaaaattccttcgcatgcaagaagtaggattagggctggatcttcccagcgattatcggtggatttatcggatatggcattagcgttttaaaattaaaaaatcaaattcaa

SEQ ID NO: 10708 - DNA, 975 bp, Bacillus anthracis
atgctagttataagcgcgaaagaacaaagagacttagtaaatatgaacgaagtcattgcatacgcggcgcttgctttacaagagttttccgcagaaagaacgatcacaccaatacgtacttcactgccatttgcgaatgagaaaaatactgcattaattatgccttccgtagcggagggacttgaagtacttggcttaaaagtagtaacagtagtcccgcataacaaaaagataggaaagaaaacgataaacgggattgtgatgctatccgactttcaaacgggagaaccgctcgcacttttagaaggatcgtacttaacgatgattcgaacaggcgccttatcgggagtagcaacaaaatatttagctcgtcataacgcaaaaactttatgtattatcgggacaggagaacaagcgaaagggattgccgaagcagtatttgcggttagagatattgaaagagtcatgttatacaaccgaacagaagaaaaagcatatgcattctcgcaatatatacaaaagagattcaatacacctacttatgttcacaaaaacgcaaatgaagcaataagcgaagcagacatcatcgttacaactacgaacgcatccacaccagtcttctcagaaaaactacaaaagggcgtccacataaacgccgtcggctcatttaggccgaacatgcaagaattaccatctcacgccatcgctaatgcaaataaagtagtagtcgaatcaaaagaggcagcactagaagaaacaggtgaccttcaagttccagtgcgagaaggtctatttgaggcaagcgacatccatgccgaacttggacaaattataagcggggaaaaagcaggccgcgaaagtgatgaagagattactgtttttaaatcggttggtttggcagtagtggatattatcgttgcgaagtatttgtatgagaaagcggtggagcgcgggggtgggagtaggattgagttt

SEQ ID NO: 10709 - DNA, 3571 bp, Bacillus anthracis
aatacaacgacaacacaaattaatagtgctattcttactgcacaaaaaagcacaaatgtatttacggtagatatcgggcaagatattgtctactccgttacaattacaaatagcggaaatgttaatgcaacgaatgttatttttaccgatgttattccagacggaacttcctttgaaccaaatagttttacacttaatggaactattatcgaaaatgcaaacatcattacaggcgtcccaattggtgatatcgcgccaaacgaatctgccattgtagaatttcatatggccttcaaaggaaatcccggcgtttaaatcccaatgataatacaagctcagcgtaggttttcagcatattcgtcagtacggatagaacatcatgtttcgaaacaccatttctttcaagtagtgttacaactacgaattgaaagtgctattctaactcctgctaaaaatcggtgataaagcttttgcaacgattggtgatacaattacgtatacaactacgattacgaatattggaaatatccctgccaataacgttattttctcagacccgataccatcgtggacacaatttgttgcaggatccgttattgttgatggcactccattaccatccgcttctatcaccagcgggattggcataaatacgatcattccaaatcaaactgtaacaatcatattccaagttcaaatcgtaagcaatccaccaacattcacacctgaactccaaaacttagcatttgttaacttcctaatataacgtaggcaatgcattacaggctcagcctggcaatgtggaaacgaacgtcttcgttactgctattcattcagcaatactttcagctgtaaaaactgctagtacagcctttgcgaatattggagacacaatcacttatacagttttaatacaaaataggcgccattccaaacgttaggaatgtaaatttctcaaggcttcattccgggaggaacgacctttgttgaaaatagttttgctgtaaatggaaataccattccaggtgcaaatccaaatagcggcgttaatatcgggaccgttagcgcgggtagttccttaaccgttactttcctaagtcgatagttacatctactcctccttccaacccaattacaaacgttgcatctattcaattcgcattcatcgttgatccggccgctcctcctgttacaggcacagtaacttctaatagtgcttctacacaaattaataacgctactgttacaacgcttttagaagcagatcgaacaatcgtatctattggagatataattacgtacactgcaacattaacaaacactggaaacttccctgcaaactcggtattactcattaacggtgttcctgaaggggcattatttgttccaatatagtgtcacgcttagcgggatttcacttccgagatgcaagtccaactctcgggtattccagttggtattatcgcaccaggtaattctgctacaattacgttccaatttcttgcaaactctattccgccgcaaggagcaattataaatcaagcacttacaagttacacatatattgtcgatccaagtcaacctccagttacagcaacatcttcatctaatacagttactacagctgtcgttgatgcatcgctatctgtaattaaaaatacagattccatcgtacaatctactgacggtacaatcacttacactgtcgtcattcaaaacaacgggaatacaactgcaaatacagttactttaacagatttggtcccagaaggaactgcattgattccaaatagcgtgaccattaatagcatctcaattccagggggccgatccaaaggtgggaaatcccattaaacttcattggcgccgtcagaaattgtccccggtcacattccaaagttatcgtccattctattccaaagcgggaatccaatttttaatatagcccggtatggattatacttttattgcggatccaactgctcctattgtcttctcgaacaattacttcgaaatcagctttcacacaaatttcagatgcgaatggtctttcttttaaagccgtcaatgcacaacaagcaacaactggcgacattttaccctacacgataacactagaaaataccggaaatatcccagctacaaatctcatattttcagatacgattcccgaagggactacattcgtagaaaatagttttacacttaaacggaacagctatactggggtgcaaatccaaatgtaggtgttactttgcctaacctagcagcaaacgctactcaccttattgctttccaagttcttattaacgatccattctcgcaacaatcgattacaaatcatttttatttcaaccatatacaattcaccctagttccagggccaacccgcttttttcttgaaaacttttacaagtaaatattgtcattaaaaattttggtgcaagcacaaattaccaatcacaaaaagggtccaatccaaatacctgtagatataggcggaactatactttatatttgtgaagtgaaaaatagcggcaatgttgacgccataaatattatttttacagattcgattccagttgggactacattcgttctcgacagtgtcacaattaacggtgtacttcagcgtgatgcaaatcccgaaaacggaataccaattggaacgattccaccaaacagttccaaaacaatactatttcaagtacaaacaaataatccacctactgaaaccgaaattgtaaatcaatcttcagtaacttaccaatatgtaagtattcctacagctccaccagtgaatcgctctgcaaattctaacattgttacaacatcacttcaaaatgcgaatattatttccgttaaaagcgcagatgtaactttcgtctccatcgggcaatttattacctacacaaatacactacaaaatatcggaacggttccagctaacaatacggtgttcattgacaacattccagaagggacaatattcattgaagatagcttatcaataaataatgtcattcagcctggtacgaatcctgactctggagtaactctcggcacgatacaaccagatgaaacagtcactatttcattccaagtacaacttacaaatatacctgaagacaatacagtcattaacatctcagacacttcatatgaataccaaattgaccctagttctccaattattcagcgtagatcattatcaaatacagtaaacacggaagtccgtacagcaaatgttagtgcaattaaatctgctaacagatccattacacgcatcggtcaaattatcacatataccatcgcagttacaaatgctggtacagtacctattacaaatactctcctaattgacgcaatcgctgctggcaccacattcgttccagatagcattcttgtagatggcataccaagacctaacgaaaatccaagtaccggaatcctccttaatattatccttcccaacaatacaattatcgttacattccaagtaaatggtagaactcgatacccttctcaaaataacatgaataatatcgccgtcatccactatgaatatcag

SEQ ID NO: 10710 - DNA, 1179 bp, Bacillus anthracis
atgaaaaaaaggaaaagactatggaatttatggaaaacgattacattgttagtttgtacagttgtaattttttctttacttgtgacagatatattaattagtcacaatgtagaacggacaacggaggatagccaagcagagaaagcaaaaacaattgcacacattgtggcgaatgattcaattgtaatcgatggtttaattgggaaagcagatacttctgcaattcaaacgtatacaaatagaatattaaaaaacacaggtgttcaatttattgtagttatggacatgaatggaataagaaagtcacatccaaatcctcaaaaaataggtcatcattttattgggggagatgaaggacctgcattgaaaggaaaggaacatgtatcgctggcagaaggaactttaggtatttccatgcgagtgtttgtaccaatattttctgaaacaggtgaacaacttggagcagtggctgttggtatttcagcagataatgtaaaagagagagttaaggaaagtagacatatcatttatattggtgtcggagttggtgtattagtcggaattataggagcaatattgctagctagacatataaagaaaagtttattcggtcttgagccgcacaggatagcaaaaattcttgaagaaagaaatacgatgctacaatctgtaaaggaaggtattattgctgtagataaagaggctagagtaacgttaattaataatgaagcgaaacgtctatttaaaaaaagcggacttgaagaagattttatcggtaaagatgttgagttgtatatgccaaattcacgtataaaagaagtattgcaaacgggagaagtacaattaaacgaagaacaaaatatttacggaattacgattgtgacgaatcgagttcctttatatgtaaaagaagaaatagttggtgcaattgcaacatttcgtgataaaacagagattagaaaactagcagaggaactaactggtattagactatatgcagaagcattacgggcacaatctcatgagtttatgaataagatgcatgtcgtattagggcttacacatatgaaacagtatgaagaattacagaagtatataagcggcatggtatcagagcatcaatatgaaattggtggagttatgaaaagaataaaaagtccagtatttgctgctggaaag

SEQ ID NO: 10711 - DNA, 1881 bp, Bacillus anthracis
atggggaaaattcgcaaactcgatgaccaactctctaacttaattgcggcaggggaagtagtagagcgccctgcctcagtcgtaaaagaacttgtggaaaattctatcgatgcgaatagtacatctattgaaatccacttagaagaagccggtttatcgaaaattcgcatcattgataacggagatggcattgcagaagaagattgtatcgttgcttttgaacgacatgcgacgagcaaaattaaagatgaaaacgatctgtttcgcataagaacactcggtttccgcggtgaggcattgccaagtattgcctcagttagtgaattagaattaatcactagcaccggtgatgctcctggtacacaccttattattaaaggtggagacattataaagcaggaaaaaacagcgagccgaaaaggaacagatattacagtacaaaacttattctttaatacaccagcgcgtcttaaatatatgaaaaccattcatacagagcttgggaatattacagatattgtgtatcgtattgcaatgtcgcatccagaagtatcattaaagctatttcataatgaaaagaaattgcttcatacatcaggaaatggtgatgtaagacaagtacttgcatcgatttatagcattcaagttgcaaagaagcttgttccaattgaagctgaatctttagatttcacaattaaaggttatgtaacattaccagaagtaacgagagcatctcgtaattatatgtcaacaatcgtaaatggccgttacgttcgaaattttgtattaatgaaagctattcagcaaggataccatacattactgccagtcggacgatatccaatcggtttcttatcaattgaaatggatccaatgcttgttgacgttaacgtacatccagcgaaattagaagttcgttttagtaaagaacaagaattactaaagctgattgaagaaacattgcaagcagcattcaaaaaaatacagctcattccagatgcaggtgtaacaacgaagaaaaaagaaaaagatgaaagtgtgcaagaacagtttcagtttgagcatgcgaagccgaaagaaccatctatgccggagatcgttttaccgacgggcatggatgaaaaacaagaagaaccgcaggctgtgaaacagccaacacaactgtggcaaccatccactaaaccgataattgaagagccaattcaagaagagaaatcgtgggacagtaacgaagagggctttgaactagaggaattagaagaagttcgggaaataaaagagattgaaatgaacgggaatgacttaccaccgctttatccaattggacaaatgcatggaacatatattttcgctcaaaatgataaaggcttatatatgattgaccagcatgccgcgcaggaacgtattaattatgaatacttccgtgataaagtaggaagggtagcgcaagaagtacaagaactactcgtaccatatcgtattgatttatctcttactgaatttttacgtgttgaagagcaactagaagaactaaagaaagtcggtctattcttggagcaattcggccatcaatcctttatcgttcgctcgcatccaacgtggttcccgaaagggcaagaaacagaaattatcgatgaaatgatggagcaggtcgttaaactaaaaaaagttgatattaaaaaattacgtgaagaagcagccatcatgatgagctgtaaagcttcaattaaagcaaatcaatatttaacgaacgatcaaatatttgctttactggaagaacttcgtacaacaacaaacccatacacatgcccgcacggaagaccaattcttgtgcatcattctacttatgagttggagaagatgtttaagagggttatgtag

SEQ ID NO: 10712 - DNA, 573 bp, Bacillus anthracis
ttgaatgtactaattgtatacgctcatcctagtccttccagttttaacgcggcgattttaaagcatgtacaaaaaggattacaagaaacaaaccattcggttacggtacttgatttatataaagaacaatttaatcccgtccttgtatttaatgaagagaagaaaaggcgtgatttagtaaatgaagaagaaacagctcggtacagagcattagtagaagaagcggatactcttctcttcatttatccaatatggtggtgggggatgccagctattttaaaaggatttattgatcgcattttcgttgctggttttgcttataaatatgaaggtgccctgccgaaagggttactaaaaggtaagaaggcatggggaattaatacgttagactcaccgttatggtacgtcgcactactatatcgatcagccgattggattataatgaagagaggtgttttacgtttttgcggcattcgcgatataaaacgatctgtttttcaatctgtgaaaacgagtaaacgagagaagcgggaaaagtggttattacaaatagaagaaaaggctcgtacgtta

SEQ ID NO: 10713 - DNA, 387 bp, Bacillus anthracis
atgcaaatcactattacgaacacttcaaaggaacctatttatgaacaaattagtgcccaaataaaaaagcttattttactaggtgatttaaaacaaggagatgctcttccttcaatgcgtcagttagcaaaagatttacgagtaagtattattacaacgaaaagagcatatgaagaactggaaaaagacggttttattaattcaattgtcggaagagggtcctttgtagcagaacaaaacattgaaactatgaaagaagaaaaattaaaaacagttgaagaaaagttatgtgaagcgattcaaaatgctaagcaaatggatgtttctttaaatgagctaaaagaaatgcttacaattttatacgaggaggaaaactcttggaaaacg

SEQ ID NO: 10714 - DNA, 367 bp, Bacillus anthracis
atggcacgtatcgcaggtgtagatattcctcgagacaaacgcgttgttatttctttaacttacgtattcggcattggtcgcacaactgctgaaaaaattcttgctgaagcaggtatttctgaagaaacacgagttcgtgatttaacggaagacgaattaggacgtatccgtgatatcatcgatcgtattaaagttgagggagatccttcgtcgtgaagtatctcttaacatcaaacgtctaatggagatcggttcttaccgtggtcttcgtcaccgtcgtggtttaccagttcgtggtcaaaactctaaaaacaatgctcgtacacgtaaaggtccacgtcgtacagtagcaaataaaaagaaataa

SEQ ID NO: 10715 - DNA, 336 bp, Bacillus anthracis
atgacagttgatggcgtaaacgtattagcggcaaaagtaaatgttgcagatatgaacaacttacgtacgatgatggatgacctaaaaaataaattagaatctgcagttgtcgtattagcatctgtaaatgatgataaagtaaacatcttagctggcgtaacgaaagatttaattagccaaggataccatgctggtaaacttgtgaaagaagtagcttctcgttgtggcggtggcggtggtggccgtcctgatatggcacaagcgggcggtaaaaacccagcgcaagttgaggaagctttagcatttgtacaagagtacgttaaatctgtttcaaaa

SEQ ID NO: 10716 - DNA, 447 bp, Bacillus anthracis
atgttgaaattaattcaaaatgaatttttaaagttgcatgcgaaaaaaggtatgtatattttaattggtgttattgcagtattggagattttgggagttttagcgatgatgaaatggggagacggaactgaatttaaaggatcctatttagattttgcaagttcagagattggtttaattactttgtttgcaacgatatttggaattacgattgcttctcgtatgattacggatgagttccaaaaaggtacaattaagcagttattaatccgtccaagaaaacgaatgacagttttattctctaaatatattacagtgttacttactataatatttatcatatttgctagcacgttaattgcaatgattattggtggaattgtaatggacggtagtaaaacagaattaacgataggaatcgtaatgaaatctactttatatcaagta

SEQ ID NO: 10717 - DNA, 222 bp, Bacillus anthracis
atgggaaacgaatttcgtgtgtgcgatgattgccaggcaacgaatgttaaaacgttgattccaaagttaaaaaaagtagattcatgtgcaacgattgaagttggatgtcagtcttactgtggtcctggccgtaaaaaatcattcgcatttgtaaataatcgtccagttgcggcgccaacagaagacgaattaattgtaaaaattgaagcaaagttaaataag

SEQ ID NO: 10718 - DNA, 549 bp, Bacillus anthracis; identical to SEQ ID NO: 9145

SEQ ID NO: 10719 - DNA, 953 bp, Bacillus anthracis
ttgttcactgtttcaataccgcaatttaataccaaaaaactttttaccctagaagaattaacgcaagaagaaatcatttctttaatcgagttcgctatatatttaaaaaagaataagcaggagcctttattacaaggaaagactattagggcttatcttatgataaacattcaactcgtactcgcgtatcttttgaagcaggaatggtacagcttgggggacatggaatgtttttaaatggaaaggagatgcaaatgggaagaggggagaccgtttcagatactgcaaaagtattgtctcattatattgacgggatcatgatacgcacattctcgcacgcggatgtagaagagcttgcaaaagaatcgagcattcctgttattaatggactaacagatgaccatcatccttgtcaagcattggcagacttaatgacaatatatgaagaaacaaatacattcaaaggaataaaattggcttacgtaggtgacggaaataatgtatgtcattcattgttgttagcgagtgcgaaagtcggaatgcatatgactgttgcaacgcctgtagggtataaaccgaatgaagagattgtaaaaaaagcgttagcgattgccaaggaaacaggagctgaaattgagattttgcataaccgctgaattagcggtgaatgaagcagatttcatttatactgacgttttggatgaacatgggggcaagagggacaaaaaagaaaaattatcttttattccaaccatatcaaattaataaagaacttgttaagcatgcgaaacaaacatattcatttcttacactggttacctgcccatcgtgaagaagaagtaacaggcgagattatagatggaccacagtctatcgtttttgagcaagctggtaatcgattgcatgcgcaaaaagcattattagtaagtttatttaaaaaatgtagaagagct

SEQ ID NO: 10720 - DNA, 1167 bp, Bacillus anthracis
atggaagaagcaccattttatcgtgacacttgggtggaagtggatttagatgccatttataacaacgttacacatattaaagaatttatcccgagtgatgtagaaatttttgccgttgttaaagggaatgcatatgggcacgattatgtaccggtggctaaaatagcattagaagcgggggcgacaaggttagcagttgcgttcttagatgaagctttagtgcttcgaagagctggtattactgcgccaattttggtgttaggtccttctcctcctcgtgatataaatgtagctgctgaaaatgatgtagcattaactgtttttcaaaaggaatgggtagatgaagcaatcaaactttgggatggttcgtctacgatgaaataccatattaatttcgatagtggtatggggagaattggaatacgtgaacgtaaagaattaaaaggatttttaaaaagcttagaaggtgcaccattcttagagttggaaggagtttatacgcattttgcaacagcagatgaggtggagacttcttactttgataagcaatataacacatttttggagcagttaagttggttgaaagaattcggagtggatcctaagtttgttcatacagctaatagtgctgcaacgctacgttttcaagggattacatttaatgcagtacgaattggcattgcgatgtatgggttatctccatctgtagaaatacgcccttttttaccgtttaaattagaaccagcgctatcattgcatacgaaagttgctcatattaaacaggtgattaaaggggatggaattagttataacgtcacttatcgaacgaaaactgaagaatggattgcgaccgttgcaattggttatgcagatggctggcttagaagattacaaggatttgaagtacttgtaaatggtaaaagggtaccgattgtagggcgagtaacgatggatcaattcatgattcaccttccttgtgaagtgcctcttggtacgaaagttacactcattggaaggcaaggagatgaatatattagcgctacagaggttgcggaatattcagggactattaattatgaaattattacgacgatcagttttcgtgtgccgagaatatttatacggaatggaaaagttgtggaagtaattaattatttgaacgatata

SEQ ID NO: 10721 - DNA, 1269 bp, Bacillus anthracis
atgaatttgtcaattgcagcattagaaaacatgaaattaaaagagttatacgagcttgcgaaagaatttaagatttcgtattatagcaaattaacgaaaaaagagttaatcttcgccattttaaaagctcgagcagaaaaagaaggtttcttcttcatggaaggcgtattagaaattattcaatcagaaggatttggattcctacgtcctatcaactactctccaagctcagaagatatttatatctcagcttcgcaaattcgtcgtttcgatttacgtaatggagataaagtttctggtaaagtacgacctccgaaagaaaatgaacgctactttggattattacaagttgaagctgtaaacggagatgatccagagtcagcaaaagagcgtgtgcatttccctgcattaacaccattatacccagatcgccaaatgaaattggaaacggaaccgaaaaagttaccgacacgcatcatggatttaattgcaccagttggatttggacaacgtggtttaattgtcgcgcctccaaaggctggtaaaacaagtctattaaaagaaatcgcgcacagtgttacaacaaatcatccggaagctgaattaattgtacttttaattgatgagcgtccagaggaagtaacagacattgaacgttctgttaaaggagattttgtaagctctacttttgatgaagtaccagaaaatcatattaaagtagcggaacttgtgttagaacgtgcaatgcgtcttgtagagcacaaaaaagatgttatcattttaatggatagtattacccgtttagcgcgagcttacaaccttgttattccgccaagtggtagaacattatcgggtggtatcgacccagctgccttccatagaccgaagcgcttctttggagctgcacgtaatattgaagaaggcggtagcttaactattttagcaacagcgcttgttgatacaggatcccgtatggatgatgtaatttacgaagaatttaaaggaactggaaatatggaacttcacttagatcgttcattagctgagcgtcgtatcttcccggcaattgatattcgccgttctggtacacgtaaagaggatctattaattccgaaagaacatttagacaagctgtggggtattcgtaaaacaatgcgtgatacaccagactttgttgaaagtttcttacgtaaacttcgtcaaacaaagacaaatgaagaatttttacaaaacattgttgcagattcaaaaagatatgtaacaactaag

SEQ ID NO: 10722 - DNA, 1662 bp, Bacillus anthracis
ttagaagcgctagaaaaggaaggagtagaagtgatttttggttatcctggtggtgcagttttacctctttatgatgcgctctatgactgtgaaattccgcatattttaacaaggcatgaacaaggagctattcacgccgcggaagggtatgccagaattactggcaatccaggggttgtcattgcaacgagtggaccaggtgctacgaatgtaattactggtctagcagatgcgatgattgattcattgccacttgttgtatttacagggcaagtagcaacaacgttaattggaagcgatgctttccaagaagcggatattatggggcttacgatgccagtgacaaaacataactatcaagtgcgaaaggcttcagatttacctcgaattattaaagaagcatttcatattgctagaacaggaagaccaggcccagtcgtcattgaccttccgaaagatatggtagtagagcaaggcgaacgatgtagtgatgtgcaaatggatttaccaggatacaaccctaattatgaaccgaatctactgcaaataaacaaattattacaagcaattcaggttgcaaacaagccattaattttagctggagcaggtgtattgcatgcgaaagcttcaaaagaattaacaagttttgctcgtaaatatgaaattcctgttgtgcatacattacttggtcttggtgggtttccaccagatgatgaactatttctagggatgggaggaatgcatggttcttacacagctaatatggcgttatatgaatgcaacttactcattaatataggcgctagattcgatgatcgtcttactggaaatttagcttattttgcgaaagaagcgactgtcgcgcatatcgatattgatccagcagaaatccgaaaaaatgtaccgactgaaattcctattgttggcaagtgctaagccaagcgcttccaagtattgctttcacccagaaaggagggaaaggaaattcatcatgagtggatctctttttttaaagattggaaaagaaaatgtctccattcttcttataaacgaaattctgaaagtattaagcctcaatatgcaattgatatgttatattgaattacgcaagggagaagcgattgtaacaacagatgtggggcaacatcaaatgtgggcagcccaatattatccgctcaaaactccagataaatgggtaacttcaggaggactaggaacgatgggatttggatttccggcagcaattggtgcacaaattgcaaagcctgatgaactagtttttgcacattggccgggaaagctggaattccaatgactctgcaagaattaagtgtgttaaaagaacactctttacctgttaaagtatttattttaaataatgaagctttaggaatggtaagacaatggcaagatgaattttataaccaaagatattcgcactctttactatcgtgtcaaccagatttcgttgctcttgcgaatgcgtatggcataaaaggggttcgcatagatgatccacttcttgcgaagaaacaattgcagcatgcaattgaattacaagaaccagtcgtaattgattgccgtgtacttcaatcagaaaaggtaatgccgatggttgcgccagggaaaggtgttcaccaaatggagggagtggaaaaaagg

SEQ ID NO: 10723 - DNA, 795 bp, Bacillus anthracis
atgaaaaatagtaaagtgattaaactacaggatcgtgtaccaaagttaaaaaatcaacagaagaaaaagaagaaaaatgttaatcatcggttgattttatacatatcaattttatttttattagtgctctttttaatttattttcgatctccgcttagcaatataaaaaagataagtgtgtttggaaatcattatatgacagatgaacaagtgatgaaggaatcaggtgtgacgtatgatacaagttatttccgggtgacagcacataaagcagaagaaaacttaacgaaacgaaaagaaattaaagcagtaaatgtaaagaaacgttttccaaataaaattgacgttcatattgaggaatatttaacgattggttatataaacaaagatgggaaattacaaccgttattagagaatgggaaaacacttgatgtactcccgaacggaaagcttcctgttgcagcgccaatttttgaaccttttaaagaggagaagatgaaggagttaattgctgagcttgaaaaattaacaccaactattttaaggtctatttctgaaattcgttattcaccgacgaatgcgaatgaagaccatcttactttatatatgaatgaagggtatgaagtaagtacaacgattcaaaatttcgcaaagcgtatggaaacctatccacttatcttaaaaacaattgagccgggtaaaaaggtattaattgacttagaagtaggggcatatacaaaagaattaggagcggaagaaaaaaagaatagaatgatagttttcaatacgttatcg

SEQ ID NO: 10724 - DNA, 1041 bp, Bacillus anthracis
gagaagttaaatgaattgctattcgacccagcaattattagtgattcaaataagcttcgtgaatattcaaaggaacagtctgatatacaggaaacggtagaggtgtatcgtgagtataaggatgttcgtgagcaattaaaagatgcgaaagcaatgttagaagataagttagacgcagaaatgcgtgaaatggtaaaagaagaggtttctgagctagaatcacaagaaaaaacattatcagagcgtctgaaaattttacttgtaccaaaagatcctaacgatgataagaacgttatcgttgaggttcgtggagctgccggtggtgacgaggctgctttatttgctggtgatttataccgtatgtatagccgttacgctgaggtacaaggttggaaaacggagattatcgaggctagctatacagagttatgtggatataaagagattatctttatgattaacggtaaaagtgctttcgcgaagttgaaatttgagaatggcgctcaccgtgtacaacgtgttcctgaaacggaatctggtggacgtattcatacatctacagcaactgtagctgtattaccccaagccgaagaaatagaaattgatattcctgagaaagatgttcgcgttgatacattcccctctaatggacctggtggaacagagcgttaatacaaccaatgtccgccggtacgtttaacgccttttcccactggggtagttgtatcccgtccggattgaaaatcccccctttaaaataaaaaaaaagcgatgaaagtattacgcgcacgtgtttatgataagtttagacaagaagcacaagctgagtatgatcaaaaccgtaaacaagctgttggtacgggtgatcgttcagagcgtattcgtacgtataacttcccgcaaaaccgtgttacagaacatcgaatcggtttaacgattccaaagctagatcaaatcttacaagggaagttagatgatttcatcaatgccttagtgatggaagatcaggctcaaaggatggaggcagctgagtaatgcgtg

SEQ ID NO: 10725 - DNA, 1347 bp, Bacillus anthracis
atgagagatataaaaaagtttttacaaaaattgcgtcccgtacaactcattgttttattttatttattagcagtagttgtatcggtaatattacttagtttaccgtttgtgacgaagtctggtgtgaaatggacatttattgatgctctatttacatcggttagtgtggtaagtgttacgggactgtctgttgttacaatttcagatacatttactacggcaggaattattattttagcccttattttgcaattaggcggcttaggaattatggcgcttggtacattcgtttggattataacgggaaaaaagattggtttgcagagaagaagactcattatggcagaccataatcaagggaacttatcaggccttgtagaattgatgcgttctattttaattgtaattatttcgatagaacttattggagcaatattattaggcacaagattcctactttattttccaacttggcaagaagcttattttcacggtttctttgcggctgttagtgcaactacgaacggtggatttgatttaacaggacaatcgctaattccgtataaaaaagattacattgttcaaatgattcatatgttactgattattttaggcgcgattggtttcccagtactaatggaagtgaaacaattccttagtaaaaggggacaacaattatttcgtttttcattatttacaaaattgacgacaacaacattttttgcactcgttgttgttggtacaattatgatttttttactggagagaaatcattttttagtaggaaagtcatggcatgaaactgtattttatacattattccaatctgtgacgacgcgaagcggtggactcgctacaatggatatacttgaattatcacaaccgacgcttttatttatgagtatattaatgtttataggagcatctccaagttcggttgggggcggaatacgtacaacaacatttgctgttagtatattatcgctatacacttttgcaagaggcggtagaacagttagagtcttcaaacgccaaatacacgaagaggatgtactgaaagcatctgtcgttatgacgatggggattttattatgtgccacagcactatttattttatctattacagagaatgtaccgcttatgagcttaatcgttgaagtgtgttctgccttcgggacgacaggactatcgacaggtattacgccagatttaacaactgttggtaaacttgtacttattgtacttatgtttatcggtcgcgttggtattttaacgtttatactagctagtggcggaagagaacagccacctcgctataaatatccgaaagagcggattattattgga

SEQ ID NO: 10726 - DNA, 1407 bp, Bacillus anthracis
atggaaaatttacaaattggagttgttggtgtgggcgttatgggaaaaagcctcgcacttaactttgagagtaaagggtattctgttgccctatatgatatttcaaaggaaaaagttgatgaaaccattgaggaaaaccgtggtaaaaacttagttggtactcatatagttgaagagtttgttaactcactcgaatcacctagaaagattttattaatggttaatgcgggggaaattacagataaagcgattgattctctagtccctcacctcgataaaggtgatattttaattgatggtggtaatacatactttgtcgatacaattcgccgaaacaaacgtcttgccgaagaaggaatcaatttcatcggggcaggtgtgtcaggcggcgaagagggtgcattgaagggaccatctattatgcccggcggacagaaggatgcatacgaaaaagtaaaggatatgcttgaaaacatctctgcaaaagtgaataacgagccttgctgttcttatatcggacctaatggggcaggacactatgtaaagatggttcacaatggtattgagtatggagatatgcaattaatttgtgaagcatatttcttcttgaaacaaacactagatttgactgcagaagagttccatgaaatatttgctgaatggaataaaggtgaactgaacagctatctaattgagattacagccgatattttcaagaagaaagatgaagaaactggtaagccattagtggatgttattcttgatactgcaggacaaaagggtacagggaaatggacaagtcaaagcgcacttgatttaggtatctctctgcctattatcacggaatctgtatttgcacgttgcatttctgctttaaaagaagagcgtgtgaacgcaagcaaagttttatctggccctaaagataaaacagcaattggagttgaaaaagccgaattaattgaagcggtgcgccaagctttatatatgagtaaaatttgttcttatgcacaaggattcacgcaattgaaggcagcttctgaggaatataattggaaccttgattttggcagcatttctatgctttggagaggcggatgtattatccgtgctgcctttttacagaacattaaagaggcttatgagactaacactgacctaccgaaccttttacttgatccatactttaaagaaattgtagagtcatatcaaggtggattacgccaaattatctcaatggcggtacaacagggcattccgatacctgcattttcagcagcaatttcttattatgacagctatcgtactgccaaactacctgcaaacttattgcaagcgcagcgcgattattttggagcgcatacgtataaacgagtagataaagaaggtacattccatacaaaatggata

SEQ ID NO: 10727 - DNA, 3042 bp, Bacillus anthracis
aaaaacgtgctagacggcctaaggttaagaaacattgatgtaacccattccgagaaaatcaaccttggcccttgtaacaaggattgtctgggttcagggaaaatcctcattagccctttggataccaatttatcccgaagggcacgccccaaatacttaggaatcgttatttggcgtaaccacccccatttttaggggcaaatggataagcccggatgtagatacgattggaaggcttatctccagcgatttcaatcgatcaaaaaacgggggtgtgtattccggcttccactggtggaacggttacggaggattaggaataccttcgtttaataattgcggcgattgggttcgcccaattttctcgaattcctggccactgaaaatttccctcccaacccgttggagcaaattgggtggccccgtttacttgaggtccccttgaccgtacgaaattacaagtggttagctcctatcggtttctgggcgtaaagggtgcacatgtaaaagtacttgaagatattaagaagcacagggtatgttccgtggaccggttggatggggaaatgccccatggggcctgaaaaatttgcgttagataaaaataagaagccattccattgaagttgtaattggacggcattggtgtaaaaaaaaggaatcccagaccgccttgctgaatttccttgaaagtgcattaaagcttggcgggggacgagtgttaatcgatgttatgggagaagaggagcttttatttagtgaacatcatgcttgtccgccattgtggtttttacaattggatgaattagaggcacgacgtatgttctcattcaatagtccgttcggtgcatgtccttcttgtgatgggcttgggctcaaagttagaggtagatttagaacttgttattctcgaagctgggatttatcattaaatgagcatgcgattgcgccttgggaaccgacaagttcacaatattacccacagcttttacaatctgtatgtaatcattatggcgtggatatggatgtgcctgtaaaagatataccgaaagatttatttgattaagtggtggaccgaaaccgtgaagagaaaatttattttccctaaggtaatggatttggtccaggtaaaggaaaatgagattttatttgaaggtgttattccaaaatattgaacgtcgttatcgtgagacgagttcggattactttctggagccattgggaaagtttttgggcgaaacaacctgttccaaggggtaaaggcggacgcttaaagcctgaaagtttagctgttttcgttggcggaaaaacgattgctgatgtaacgaagtattctgttcaagaagtacaggaattcttctcaaatgtggagctaacagagaaacaacaaaaaattgcccatttaattttaagagaaattcaagagcgcgttgggttcttagtaaacgttggtttagattatttaacgttaagtcgtgccgcaggaactttatctggtggtgaggcgcaacgtattcgtttagcaacgcaaattggttcgcgtcttactggggtgctttacattcttgatgagccttctatcgggttgccatcaacggcgataacgatcgtcttattcgtacattgcaagaaatgcgtgatttaggtaatacgttaattgttgttgagcatgatgaagatacgatgatggcagctgattatttactggatatcgggcctggccgcaggtattcacgttgaccaaagttgtatcagcgggtacaccagctgaagtgatgcaagatgagaattcactaacaggtaagtatttaagcggtaaagagtttattccagtttccacttgaaagacgtaaaggtgatggacgtaaagtggagattgtcggtgcaaaagagaataacttaaagaacgcgaagatgtcattcccgcttggtacgtttgtagcggtaacgggtgtatctggatcaggtaaaagtccgatgataagtgaggtcttatataaatcgtaggcgcaaaatttatataaagcgaaaagcggagcccagtatctcataaagaaattaaagggtcttgagcatttagataaagttatcgatattgatcaatcgccaatcggtcgtacaccacgttttaatcccagcaccctatacaggtgtgttcgatgatattcgtgatgtgtttgcgcaaacgaatgaagcgaaagtgcgcggatatcaaaaagggcgttttcagctttaacgtaaaaggtgggacgtgtgaaagcgtgccgtggtgatggaattattaaaattgagatgcacttcttaccagacgtatacgttccgtgtgaagtttgtcacggtaaacgttacaaccgtgaaaacgttagaagtgaaatataaagataaaaacatttctgaagtgttagggatgacgattgaagacggagtagagttcttcgctaatatcccaaaaattaaacgtaaacttcaaacgcttgtagacggtttgggcttggttatatgaaaatttaggggcacccagcccacgactttattctgggtggtgaaagcacagcgtgtgaaaatttagctttctgaaattacacccgtcgtttctacagggacgtacacttatacatttttagacgagcccaacgactgggtttacatgcgcatgatatcgccccgtctttctagaagtgctgcaacgtcttgttgagagccggtgagaccggtactgtccatgtgaacataatttagatgtaataaaaccagcggaattatatcgttgacctttggcccaggaaggcgaagacaaaaggtggccaattcgttgctcccggaaacgccggaccaagtagtgaaggaggaccgttggtaatccaggtaagtatttaaaagagtattttaaatcgtgataaagcgagaatgaaagagaaaataaaagaagtagagttatccccattaagtgtatgaatgaaaaccgagtggaagtgccgttcggtttttatggtatagggggagaagatggagtttttagatatgttgcgaaagaaaaatatg

SEQ ID NO: 10728 - DNA, 1486 bp, Bacillus anthracis
aacccaaaagtgaaagcgtttttagatgaagagattaaaatgtttatttaatgtgaaattgtttccttctattagtggaaagacgtttgaaacatataatccagcaacagaagatgttcttgcagttgtttatgaagcacaagaagaggatattgatgtggcagtaaaagcggcgagatctgcatttgaatcaggaccttgggtggaaatgactactgctgaaagagcacatcttatttataaattagcagacttaattgaagagcatggagaagaattagcacagctagaagctttagataatggaaaaccgatatcaagtagcacttgatgatgatattgcagcgactgtagaaaattatcgctattatgcaggatgggctacaaaaattatcgggcaaaccattccgatttcaaaagattacttaaattacacacgccatgaacctgttggcgttgtagggcaaattattccttggaattttccgctcgttatgtcttcttggaaaatgggagctgcgctagcaacaggttgtacgatcgtattaaaaccagcagaacaaactcctttatctttattatatacagcgaagctctttaaagaggctggttttccaaacggtgttgtaaactttgttccagggtttggtcctgaagcaggagctgcaattgtaaaccatcatgatattgataaagtagcctttacgggttcaacagttactggaaaatatattatgcgtcaatctgcagaaacaattaaacatgtaacgttagaactgggtggtaaatcaccaaatatcattttagaagacgctgatttagaagaagcgattaacggtgcatttccaaggtattatgtataatcacggtcaaaattgtagtgctggatctcccggggttcggtccccgaaaacattacgaaaccgtccgtaaagaaacttgtggaaaatgcggaataacggggaaacttggagcaggtatggagaaggacacggaaatgggtccactcgtatctaaaaagcaacaagagcgtgtgctacattacattgaacaaggaaaagctgaaggccgctactgttgctgctggtggtgaacgtgcatttgaaaaaggttattttgtacagccaccagtattcacagatgttacggacgatatgacgatagttaaggaaagaattcttcggttcctgttgtcgttgtacttccatttgattcgacggaagaagtaattgaaagagcaaatcgttcgtcatatggacttgcagcgggcgtatggacacaaaatattaaaacaggacatcaagttgccaataagttaaaggcaggaacagtatggattaatgattataacttagaaaatgcagcggcaccatttggtgggtttaaacaatctggtatcggccgtgagttaggttcatatgcacttgataattacacagaagtgaaaagtgtttgggtaaatataaagtaatagagagatgaaata

SEQ ID NO: 10729 - DNA, 1143 bp, Bacillus anthracis
atgaaattaaaaataggtattacatgttatccttctgtaggtggttctggagttgttggaacagaattaggaaagcaattagcggaacgcgggcatgaaattcattttattacatcgggtttaccattccggttaaataaagtgtatccaaacatttattttcatgaagtgacggtaaatcaatactctgtatttcaatatccaccatacgatttagcgttagcgagtaaaatggcagaggttgcacaaagagaaaacctagacattttacatgtgcattacgcaataccacatgccatttgtgcttatttagcaaaacaaatgattggagagcgtattaaaattgttacaaccttgcatggaacagatattactgtgttaggatccgacccttcgctaaataatttaattcgttttggtattgagcaatctgatgttgtgacggctgtctcgcattcattaattaacgaaacgcatgagcttgtaaaaccaaataaagacattcaaacggtatacaactttatagacgaacgtgtatatttcaaacgtgatatgacccaattaaagaaagaatatggtataagtgagagtgaaaagatactcattcacatttcaaacttccgtaaagtgaaacgtgtgcaagatgttgtgcaggcatttgctaaaattgttacagaagtagatgcgaagttgcttcttgttggagatggaccagaattttgcacgattttacagttagtgaaaaatttacatattgaagatcgcgtcttattcttagggaagcaagataatgttgcagaactacttgcgatgagtgatttaatgttgcttttatcagagaaggagagttttggtcttgttttattagaagcgatggcgtgtggtgtaccttgtatcggaacaagggttggaggtattccagaagtcattcaacatggtgatacaggatatttatgtgaagttggcgatacaacaggagtggcagatcaagccattcagctattaaaggatgaagaacttcaccgtaatatgggagagcgagcaagagaaagtgtttacgagcagtttcgctctgaaaaaatcgtctcacaatatgaaacgatttactatgatgtactaagggatgacaaaaatggaaagatt

SEQ ID NO: 10730 - DNA, 2464 bp, Bacillus anthracis
atgtcagataattatcgttctcgtacagaacgaaatcatgtaaaaaatcaaaagcaagaaacaaataaagaaaaaaaaccaaagaaaaaaggctccttttttaaaaaattccttataggttgtctacttcttggtatcgttggtcttgtagctggcgtttccgctttctttgttatggtgaaggacgctccaaaattagacaaatcaaaacttgtcaatcctttatcaacaaagtttcttgataaagacgggaactttttctatgaatacggtgctgaaaaacgaacccacgttacgtatgatcaaattccaaaagtagttgaaaatgcattccttgcaactgaggactcacgtttctacgatcataatggaattgattttaaacgaactacaaaagcagttatggaaaatgtcactggaggtttcggatctcaaggtggtagtacgattacacaacaagtagtcaaaaactattttctaacgatggacaaaactgcaaagagaaaagtacaagaatggtacttatcttacaaattagagcaacaatactctaaacatgagattttagaaatgtacttaaataagattaatttaggtaaccgttcatatgggattgcgacagcagcgcaaaaatattatggtaaagatttgaaagacttgcaattacatgaagctgctatgctcgctggtttaccccaaggtccaaacatttacgatccaacgaaaaaggaaaatgttgaacgagcaacaaatcgtcgtaatgtcgtattgtcattaatgaatcgacatggttatataacaaaagaagaaatgaataacgcagttaagatcccagtaacagagggtcttcaaccgtcttcagaaataactgagatgaagtatcaagcatttctagatgcggttgtaaaagaagttgaaaaagaatatcctgatgtaaatattggttcagatggtttaacgattcatacaacacttgatcaagatgctcaagattatgctgaaaaaattatggatggcaatcttattaagtatccaaacgatcaattccaaggatcattcgtatttatggatacacaatctggtgaagttcgagcaattggagctgggcgtaaaggaagtaagtctactttcaaaggtcataatatggccaccgatttaaaacgccaagtcggttcaacaatgaaaccaatttttgactacggcccagcaattgaaaatttacaatggtctacataccatcaattaaatgactcagagtatacgtattccaatggtaaaaagatacgaaatgcaacaaatagttacaaaggtgacgtttcactacgtgaagctttgaaaaagtcattaaacatcccagctttaaaaacagcccaagcggttggtcttcctaagtcacaagcgtttgctgaaggtttaggtatgacatttaaagatggcaaaacatttgaatcaacagcaattggtagtaacgatagttcaccattacaattagcgggtgcatatgcagcctttggtaatggtgggaactacaataaaccgcacttcgtaaaagaagttaccttcccagatgggaaaaagaaaagttttaaaccgaaagaacaacgtgcgatgcaagactacacagcttacatggtgactgacgttcttcgtgatgtcgtaaaacctggttctggcggtactggtccaacagcatacgtttcaggtgttgatgttgccggtaaaacaggaacacaaaactttgatgcagacgttataaaagaatatggtattccagctgatgcaaacagagatagctggttcgctggatatacaccgcaatatacaatggcagtatggactgggtacgaaaaaaatggcccagaaaactacattagtgatcgttatactagaattgcacagcaaatgttccaagtaatgatgagcaaattcgctacagataaaactcgtttcgaacgcccttcttctgtacaagaaataaacggagagttatatgtaaaaggtgcgaagaaagatgcaattaaacaaattaaagtagatgcacctagtggtcttaatgtcactttcgatggcgctagcacagttacactaaactggtctggaccaacagaagttgatgcgtatgcagcaagctataaagcaactgacggttcaagtggtagtttatcagtaaaaggtacaacagctactcttggtggtattaaaccaggcgttacttacagcttctctgtagtagcgaaaaaaggtactggaacaagccctgcagttggagcatccttcactgcgcctggcggaactccagacgcgaagaaagccgaggaagaagctaagaagaaggctgaagaagaagctaagaaaaaagctgatgaggaagctcagaaaaaggccaatgaagataaactaaaacaagaagaagctactaaaaaagctgaagaagaagctaagaaacaacaagaacaacaacgta

SEQ ID NO: 10731 - DNA, 1086 bp, Bacillus anthracis
ttgaccaaaaaaataaatgccgatgagaagagccgtattcagtctctatcaatcggaattatcgttccaagtaagttctttgagcttgctgagaaaaacgaacctttccatgttttcgcgccttatactgtatataaagaatacggaaagcatttagatgacattgatatcgatgaaatgtacgatgaattaatgagcaatccaaaagtgaagaagaagccgctagatattagtgcgcgtgatatgcttattaaaattgctatgattcagcttgagtctggttatccgtacttaatgtttaaatcaaatgcaaataaccaacatccattgaaggacattggaactgtgaagatgtccaacttgtgtacagaaatcttccagctacaagaaacttctgaaattaacgattacggtacagatgacattattcgtcgtgatattaactgtaacttaggatcgttaaatatcgtaaatgtaatggaaaataaagaaattcgtgaagcagttcatgcgggaatggaagctttaacagctgtttctgatatgacgatcattccgaatgcaccaactgtgaaaaaagcaaatgatgagcttcattcagttgggcttggcgcaatgaacttacacggatatttagcaaaaaataaaatcgcttatgaaagtgaagaagcgaaagagttcgctcgtacattctttatgatgttaaattactactctattgagaaaagtatggaaatcgctaaagaaaaaggcgaaacatttaaagacttcgataaatctgattatgcgaatgggacatactttgaaaagtatgaaacgacagattacagcccagtaactgaaaaagttcagcaattatttgaaggaattcatattccaacaaaagaagattggacaagtttaaaagagcaagtgcagaagaatggtttatacaactcatatcgtcttgctatcgctccgacacaatcaatcagttacgttcaaaatgcaacttcaagcgtaatgcctatcgtaagtcaaatcgaatcaagaacgtatgcgaatgcgacaacatattatccaatgccgtatttatcaaaagatacg

SEQ ID NO: 10732 - DNA, 819 bp, Bacillus anthracis
atgtcagcatttttaggagagttaatagggactgcgttgttaatcgtacttggtggcggcgtttgtgctggtgtaagtttaaagaagtcgtttgcgaaagattctggttggattgttattacaatgggctggggcttagcggtagcggttgcagcgtacgtggttggatcaattagtggggcacatttgaatccagctttgacgataggattagcatttaagggagcgttcccatggggtgacgtacctggttatatcgcagcacaaatgattggggcaattatcggggcagttatcgtatatttacattacttaccacactggaaagaaacagaagatccaggaacaaagttaggtgtatttgcaacaggtccagcaattccgaacacatttgcaaaccttttaagtgaaatgattgggacattcgttttagtatttggtatattagcaattggtgcaaataaatttgcagatggattaaatccatttatcgtaggtttcttaattgtaagtattggtttatcattaggtggaacgacaggatacgcaatcaacccagcacgtgatttaggtccgcgtatcgcgcacttcttccttccgattgcaggaaaaggcggttcaaactggaagtatgcatggattccagtagtaggtccgattttaggtggatcacttgcaggattattccatcaagttgtatttgaaggaaaacaaaatgcagcacttatttatgtgattattgcaactgtgattgtattagcaatctcttatatgacaagcaaaaaaagtggaagcaatacaaatagtagaaaagtagca

SEQ ID NO: 10733 - DNA, 1626 bp, Bacillus anthracis
cagtttgttaccaggcaacccccccccatttcatttcccaatggtggcgaagaagagtccattgttatcatgccctttgttgaggatgtgcttaccatgtccggtaacgatttaggaccagacattcaacgtgtgaatttcctgaagagcataaagaactagctgaggaatcccgggaaaaacttatgaaagcggtagctgagcttgatgaagaaatgatgatgaagtccttagaaggtgaagaaatcactgtagaagagctaaaagctggtatccgtaaggctacaacttctgtagaattcttcccagtaatctgtggttctgcatggagaaacaaaggtgttcaaattatgttagacgcagttatggtctacctaccatctccattagatgtacctgctattaaaggtatcgttcctgatacagatgaagaagtagaccgtaagtctagcgatgaagacccattggcagctctagcattcaaaatcatgactgacccttatgttggtaagttaacattcttccgtgtgtactctggtgtgttaaactgtggatcatccgtgaaaaactcaactaaaggtaagcgcgagcgtgtaggtcgtatcctacaaatgcacgatatcagccgtgaagagatctcaacagtttacgctggtgatatcgctgctgctgtaggtttaaaagatattactactggtgatactctttgcgacgagaagagccttgttatccttgagtctatggaattcccagagccagttatctctgtagctatcgaaccaaaatcaaaagttgaccaagataaaatgggtacagcattatctaagctttctgaagaagatccaacattccgtgctcacactgaccaagaaactggccaaacaatcatcgatggtatgggtgaacttcaccttgatatcatcgttgaccgtatgcgccgtgaattcaaagttgaagcaaacgttggtgctcctcaggtagcataccgtgagactttccgcgctgctgcgaaagttgaaggtaagttcgctcgtcaatctggtggacgtggacaattcggtcacgtttggattgagtttgaacgctagaagaagacaggtataaggattcgaattcgaaaacaagatcgtcggtggtgttgttccacgtgaatacatcccagctgtaggcgcaggtcttgaagatgcacttaaaaatggtgtacttgctggatatccagtagtagacattaaagctgcattagttgacggatcttaccatgatgtcgattcatctgagatggcgttcaaaatcgctgcatctatggcacttaaagctgcggtttctaaatgtaacccagtaattcttgagccaatgatgaaagttgaagttgtaattcctgaagagtacatgggtgacattatgggtgacgtaacatctcgtcgtggacgtgtagaaggtatggaagctcgcggtaacgctcaagttgttcgcgctatggttccactttctgaaatgttcggttatgcaacgtcattacgttctaacactcaaggacgcggaacattctctatggtgtttgaccactatgaagaagtaccaaagtctgtttctgaagaaattatcaaaaaaaataaaggtgaataa

SEQ ID NO: 10734 - DNA, 984 bp, Bacillus anthracis
atgaaaatgctagtaactggtggaacgggctttctcggacaaaaactcgcctttcgactgaagaatatgggctatgaagtaacggcaacgggaagaaataaaacaatcggtaaggtattagaacaaaatggaatcaagtttgttcattgtcctcttgaagacagggagcgtgtgctacaagtttgtaaagataaagattatatctttcatagcggtgcacattcttccccttggggcaaatatgaagatttttataatgcaaatgtgttaggaacgaaacatattatcgagggaagtcaaaagtacggtataaaacgccttatccacgtatcaacaccaagcatttatttctattatgatgagcgacaaaatgtagtagaaaatgcgaaacttcctgatacgtttgtaaatcactatgcaacaacgaagtacatggctgaacaagctattgatcaagctttcgcgcatggtttaccagttatcacaatacgcccgcgcgctttatttggaccaggagataacgcgattcttccgcgtcttattaaagtatgtgaaaaaggggctttgccgagaattggtacagaaaatgttcttgtggatattacgtatgttgagaatgttgtagatgctttacttctttgtatgcattccccaaaacatacattagggcaaaagtacaatataacaaatgacgaacgtatcaatttatatgaggtcatagaaaatgtaatgaagcgccttgataaggaagtacgatataaaaaaatttcctacaaaactgcttttacactagcggctatattagaaggaatctcaaaaactattttattcggaaaagaacctattcttacaaagtatactgttagtgtcctttcaaaaagccagacgttaagtattgataaagctaaagaagaactaggatatgctccaaaggtcagtatagaagaaggaattacaaaatttgtagactggtggaaaacacaa

SEQ ID NO: 10735 - DNA, 1549 bp, Bacillus anthracis
ttattagctttcgatgctggtacaggaagtattcgagcagttctttttgatttacatggtaatcaaattgcagtaagtcaaaaagaatggattcacaaatctgacccactttatccaggctctatgaactttgatgtaatagaaaattggaaactagtacaagaatgcacgaaagaggttcttcaaaaaagcaatactcttgcctcttccattcttgctattagtgcgacaagtatgcgggaagggtttgttttatatgatcaagatgggcaagaaatatgggcgtgtgcaaatgttgatgggcgcgcatctgctgaggttagtgaactaaaagaaattcggtcacaccttgaaaaagatttatatacaaagtctggtcaaactttttcattaggtgctttaccccgcctactttggattaaaaaacatgaacccgacgtctataatactattcactcttttacaatgttaaacgattggatcttatataaattaagcagagtgctgcaaatcggtccttcaaacggatgtacgtcaggtatttttgacttacaaaatagagtgtgggataacgatgttgctaaggagtgcggtctatctttaccattttcaccaacagtaaatgaagctggtacagtaattggcaacgttacaaaagagtgtgcagcattaactggattatgtgaaggaattcctgtcgtagccgggggcggagatgctcaaatggcatcgctcggaactggagtcgtgaaaccgaatcaaacattaatatgcggaggtagtttttggcaacaagaagcgaatgttactgagccaataccagatccacaagctgcgattcgtataaattgtcacgtcgtacgtaacctatggcaatacgaaacgattgcctttttcccaggcctcgttatgcgctggtttcgagacgctttttgtcaagaggaaaagaaacttgctgacaaactcggtgtagatgcttatgaattactagaagaacaagcgaaagacgtacctgtcggttcacatagcattatccctactttttcaaacgttatgaactacatttcttggcgtcatgccgcaccttcttttttaaatttaagtttagacgctgacaaatgcggaaaaaaaagaactgtttcgtgctattgaagaaaatgccgccttcgttacacttggaaacttaaaattaatagaaaatctaactggtatattcccttctgaagttatttttgctggtggtgccgctaaaggaaaactatggccacaaattctatcagacgtccttggtattcctgtaaaagtacctgttgtgaaagaagcagctgctttaggaactgcgattgctgcaggagttggtgctggcatatattcatctatggaagagactgccgaacagtttgtacagtgggagcaaacattcgaaccagttactgaaaatcacgaactatataaagagttctatgaaacatggaaaactgtgtataacagtcagctcgctttagctgataacgggctcacctcacacatgtggattgcgcctggtgca

SEQ ID NO: 10736 - DNA, 396 bp, Bacillus anthracis
atgcaattagcttttgaaaaagtttattcaaatgaccaaaataaaatattagattggcttaagaaccaaactggtataaaccaaatatgtattactggtggtaaagcgaaacaattacaacaactactttcagcctcatataaaatagtggaactaaatgaatttgaagctactcttgtaggtgtccgttacatattaaaaaaagaaaaatatgatataaacaactttgttttaacaaatatcggtacaggtacttccattcattacatttataatgaccaatatattcgcgctggtggaaccggtgttggcggtggtactattatggggctttccaaattggtaacaaatatagatcattttgaaaatgtgattcccttaacaaaaaggagattt

SEQ ID NO: 10737 - DNA, 1539 bp, Bacillus anthracis
atgatagaccaaaaacaacaatcgaatacatttgaagaacgagttgaaacgattaaacgaggcggcgcaccaaaatatcatgaacaaaataaagcgaaaggtaaactattcgttcgagatcgcttagctcttttatttgataatggtgaatatgtagaagatgcattatttgcaaattgtgaagaaacgggattacctgctgatggtgttataacggcaacgggaaaaatacatggtcgtactgcatgcgtaatggcaaatgattctacggtaaaggctggatcatggggcgcacgtacagttgaaaagattttacgtattcaagaaacggcagaaaaattacgtgttccgttattttatttagttgactctgctggggcgcgtattacggatcaagttgaaatgttcccagggcgccgcggtgcaggaagaatcttctataatcaagtgaaattatcaggtaaagttccgcaagtatgtttattatttggaccttctgcagctggtggcgcatatattccagccttttgtgacgttgttatgatggtagaagggaatgcttctatgtatttaggatctcctcgtatggctgagatggttatcggtgaaaaggtaactttagaagagatgggcggagctcgtatgcattgctctatatcaggatgtggagatgttttatgtaaaacagaagaagatgcgattacacaagcaagacaatacatttcatattttccaaacaactacttagaaaagactccattggttacacctcaagaaccgaaacaattcgataaaacgttagaacaaatcattccagaaaatcaaaatgctcctttcaatatgaaagatcttattaatagagttattgatgaaggttctttctacgaagtgaaaaaattatttgctcaagaactcattacaggtttagcacgtattgatggtaagccagtaggtattattgcaaatcaaccgcgaatgaaaggcggcgtattattccacgattcagctgataaagcagcgaagtttataaatttatgcgatgcatatcatattccgttattattccttgcagatgtacctggatttatgattggtacaaaagtagaacgtgctggtattattcgtcacggtgcaaaaatgatttctgcaatgagtgaagcaactgtaccgaaaatttctatcgttgttcgtaaagcatatggtgctggtttatatgcgatggcaggtccagcctttgaaccagattgctgcctagcattaccgacagcctctattgcggtaatgggtccagaagccgcggtcaatgctgtatatgcaaataagattgcagctttacctgaagaagagcgtgatagcttcattgctgaaaaacgagaagagtataagaaagatattgatatttaccatttagcatcagagatggtcattgatggtattgttcatccaaacaatttaagagaagagttaaaaggacgattcgaaatgtatatgagtaaatatcaagtatttacggatcgtaaacatcctgtttatccagtt

SEQ ID NO: 10738 - DNA, 747 bp, Bacillus anthracis
atgtcttcatggagaaataatataaatggatattgtagttgtaataatcaaaatggtgtacatgttgattcatgctgttttagttgcgatggaacagttcctaagctgggtccaacaggtccgacgggagcaacgggagcaacaggagcaacaggagtaacgggagtaacgggagtaacaggagcgacaggaataacgggagcgacaggaataacaggagcaacaggaataacgggagtaacgggtccaacgggagcgacaggaataacaggagcaacgggtccaacgggagcgacaggaataacgggagcgacaggtccaacgggagtcacaggtacaagtattacggcgacgtatgcatttgcaaataatacgtcagggacagcgatatcggtacttcttggtggaacaaatgtcccgcttccaaataatcaaaatatcggtccggggattactgtatctgggggaaatacagtatttacggttgcaaatgctgggaactattatatttcatatacaattaatataacggcttcgttattagtcagttcgcggattacaattaatggagcgccacttgctgggacgattaattctcctgcggtagcaactacatcatttagtgcaacaattattactactcttgcggctggaagtgctattagtttgcaactatttggcttgttagctgttgcaacattatcaacaactacaccaggagctgtgttaacgataataaggttaagt

SEQ ID NO: 10739 - DNA, 935 bp, Bacillus anthracis
cctttaattggactagcggctaattattgtagtaattacgggctttaatcccgcggttattggaaatcccaaatttatttaatatactgcgtcaagaatcgattaatggcgcttattgcattcggaatgacctttgtaattttaacaggggggtattgacttatcggtaggttctattttagcattatcaagtgcacttgttgctggaatgatggcaagtgcgcatggacccgttccttgcgatggcagttggattattagctggtctttgtatgggaatttgtaacggtatcatcatagcgaagggaaaagtagcttcgtttattgcgacttttagcacaatgactatttttcgcgggttgacgcttgtttatatggacggacgtccgatcactggtcttggtgatcatttaatggtcccaaatttttggcccgccggttaattttcggggttttccagtcccagttgttacaaaggatgtccgttttcgccagtactgtacttcattttaagaaaaagcgacttttgtcgcccgtacatttgcaattggtgaaaatgaagaggcggcaccattattcaggtattagtgttgcgaaaattaaagtaaatgatttccggtctttcgggaatttgggcagcgttgcaaggtattgtcttaacatcacgactagattctgcacagccgactgcaggtacttcttacgatttagatgcaattgcagcagttgtattaggtggaacaagtctttctggggaaagaggatggattgttggtacattcatcggtgtacttattatcggtgtactaaataacggtttaaatttattaggtgtatcttctttcttccaacaagttgtaaaaggacttgtaatcttactagctgtattaattgatcgtcgaaaagaagcgtaatggagggacagtttatgaaga

SEQ ID NO: 10740 - DNA, 877 bp, Bacillus anthracis
ataattaaaggggcatttccagtattaatcacaccgatggatgagtttcaagaaattaattggaacggtgtaaaacaaaacgtaaactactttattgagcaaaaagtggctggcattattataaacggaagcacaggagagtttgttagtttgtcaaaagaagaacgatttaaaatggtagaaacagtattaaaagaagttaatggccgtattccggaataatgttggaactgcagcagaaacgacgaaagaaacgattgaatttacaaaacatgcagaaacgcacggagcggactgcgcattaattattaactcatactattgtaagccaaaagaagaggaaatttattttcactttaaagaaatctcaaatgctgtaaatataccaattatgttatataataacccgtttacatctggtgttgatatgagtacagaactcatgctacgtatcgggaaagactgtggaaatgttacacatatttaagaatctagcggagatattcgaaaagcaagagatttagtaagaacaaggcgaaagtggcttttcaagtcttctgccgatcttgagatttagttatggaatcctattttatttggtgcgacgggatggttttcagtagcaggaaatgtcgtaccgggacttgttacgaaaatgtatgagcattttcaaaatggtgaattagaaaaagcttgggaaataaacgatgcaattttacctctttgtgagttcctggagggatcagggaaatatgtgcaaatcgtgaaacgttctatggaattacaggggcaagctgggggaccttctcgttatccaagacttgggttaactgaagaagaagatcaaaaacttcaagcgattatttcaaaaattgca

SEQ ID NO: 10741 - DNA, 1155 bp, Bacillus anthracis
atgaagttatttcatacagcggattggcatttaggaaagcttgttcatggcgtgtatatgactgaagatcaaaagattgtattagatcagtttgtacaagcagttgaagaagaaaaaccagatgccgtaattattgcaggggatttatatgaccgagcaattccacctacggaagcagtagatttattaaatgatgtgctgcaaaaaatagtaattgatttacaaacaccagttattgcagttgctggtaaccatgatagtccagatcgtattcattttggaagtagtttaatgaagaaacaaggattatttattgtggggcaatttcaatttccctatgaaccaattatattaaatgatgaacatggcgaggttcacttccatctcgttccatatgcggatccgagtatagttagacatgtattgaaaaacgaagacgtacgttctcatgatgatgcgatgcgtatttttatgaatgagctttctgaaacgatggataaagaagctagacatgtatttgttggtcatgcatttgtaacttctgctggagaagcggaagagaatacaagtgatgctgaacgaccgctttcaattggtggtgctgaatacgtaaatagtcattattttgataagtttcattacacagcgcttggacatttacatcaagcgcatttcgtacgtaatgagacaattcgatattcaggttcgccacttgcctattctatttctgaagaaaaacataaaaaaggatattatattgtggaactgaacgagcaaggtgaagcaacaattgaaaaaaggttacttacaccacgtcgtaaaatgcgaacagtagaagcgaaaatagatgaattattacaacatccagtaagtgaagattacgtgtttgtaaaattattagatgaaaatcctgtcttgcagccaatggaaaaaatacgctctgtatatccaaatgcaatgcatgttgaaagatccattcaaagacgggagtttacagagtcaaatgaagcaacggtttcaagacataaaacggatgatttatcactattaaaagctttttataaagaaatgaaaggcttagatttatcagaagagaaagaacgtttatttgtagaagtattacaaacagtgcaagaacgggaaggtgaacgagga

SEQ ID NO: 10742 - DNA, 616 bp, Bacillus anthracis
tgggaagaatttttagcaccttaccatcaagcggtggcagagctgaaagtgaaactaaaaggaatgcgtactcaatttgcaatgttaacagagcattctccaattgagtttgtaacagggagggtaaagtcggttgcaagcattattgataaagcggagaagagaaatgtaccgttagaccgactgagagaagatatgcaagacatcgcaggtcttcgaatgatgtgtcaatttgttgatgagattaagcctgttgtagaatatcttagaaaacgaaatgactttgaaatcgtggaagagcgtgattatgtcacgcaaaagaaagatagtggttatcgttcttatcacgttgttattagttatcctgttcaaacaattcaaggagaacaaaaagtgttggtagaaatccaaatacgtacgttagcaatgaacttttgggcaacaattgagcatttctttaaataataaatatagtgggacgttttcctgaagatattaaaatacgcttgccacgtgcagcataagcagcatttttattggatgaaagaaatgtcttctatttcgtcttgaaatcaaagaagcacagaaagctttttcaagaaaagcaagaaacgaa

SEQ ID NO: 10743 - DNA, 1137 bp, Bacillus anthracis
atgacagcaattcgttatgaatttataaaaacttgtaaacaaacaggtgctcgtttaggacgtgtacatacgccgcacggttcatttgatacaccaacatttatgccagttggtacacttgcaacagttaagacaatgtcaccagaagaattaaaagcaatggattctggcattattttaagtaatacgtatcatttatggttacgtccaggtcacgaaatcattcgtgaagcaggtggtttgcataaatttatgaactgggatcgtgcaatcttaacggactctggtggtttccaagtattcagtttaagtgacttccgtcgcattgaagaggaaggcgttcacttccgtaaccacttaaacggagataaattatttttatcaccagaaaaagcgatggaaattcaaaatgcattaggttcagatattatgatggcatttgatgagtgtccaccattcccagctacttttgaatatatgaagaagtctgtagagcgtacaagtcgctgggcagagcgttgcttaaaagcgcatgaacgtccacaagatcaaggtttattcggtattgtacagggcggagaatttgaagaacttcgccgtcaaagtgcaaaagaccttgtttcaatggacttccctggttacgcggtaggtggtttatctgtaggtgagccgaaagatattatgaaccgtgtacttgagtttacaacgccacttcttccagataataagccacgttacttaatgggagtaggttctcctgattcattaatcgatggtgcaattcgtggtattgatatgtttgactgcgtactgccaactcgtatcgctcgaaatggtacatgtatgacaagtgaaggccgccttgttgttaaaaatgcgaaattcgcaagagacttcggtccgcttgatccaaattgtgattgctacacatgtaaaaattattctcgtgcgtatattcgtcacttaatgaaatgtgatgaaacgttcggaattcgtttaacgtcttatcacaaccttcattttctgttaaacttaatggagcaggtgagacaagctattcgtgaagaccgtcttggcgatttccgcgaagaattctttgaacagtatggctttaataaaccgaatgctaaaaacttc

SEQ ID NO: 10744 - DNA, 935 bp, Bacillus anthracis
tttatgaacattgaagagattagtttatttccagcattttggatgacgatgattacccgtattacggtgtggatacggagatgccattcttgtaacacatgcaggaaaagtatttgcgcttcttatcataccggttggagttggtattgttacgtatgcaaattggtgtagtggcagctatgattattgaagggaatttatttcatgcagtacggagggaagaagatgggataacaaatagcacagttacaaaatcatattatcgtatgtggttgcggtagagttcggcttcaagttgtacatgaattgcaagtaaagaaaataccatttgttgtcgtggataaagagaaagcatattagagaaggaaaaacttttgtatgtacatggagatgcaacggaaggacaaagtgttacatcatgctggattttcaaaggcaggtggtttagttgcaatcgtagcaaacgatgctgaaaatgtatttattacattaccggcaagaggattaacggatgcaattaaatttgtggcaagagcagaaaaaccagaaacccgaagacaagttaaagagggctggggcaaataaggtgattaatccatctagtatgaaccggcattcatattgcaaaaggcattgcgaatccgctaacggttcattatattgatacagtactgtatggggtggaacagtcatttgtaattgaagaaattgcagtaggcaagggctctattttaactaataaatcgttattagagagtgatgttagaaatcaatttgatgtaacaattttagcgattttgagaaatgggaatgttatacataatccaacggggcaggaaaagttgcaagaacatgatatgataatagtatttggttcagtagagaagctgggacaatttgagaaagaactacaaagtacgaggtgataagggatg

SEQ ID NO: 10745 - DNA, 1350 bp, Bacillus anthracis
atgagtacacatgtaacgttcgactattctaaagcgttatccttcatcggtgaacatgaaatcacttatttacgtgatgcagtgaaagtaacacatcacgcaatccacgaaaaaactggagctgggaacgatttccttgggtgggtagaccttccgcttcaatatgacaaagaagaattcgctcgcattcaaaaatgcgcagaaaaaattaaaaatgactctgacattttacttgttgtaggtatcggtggttcttacctaggagcacgtgcagcaattgaaatgttaaaccattctttctacaatacgctatctaaagaacaacgtaaaactccacaagtgctatttgttggacaaaacattagctccacttacatgaaagatttaatggatgtattagaaggtaaagacttctctattaacgttatttccaaatcaggtacaacgacagagcctgcactagcattccgtattttccgtaagttattagaagaaaagtacggaaaagaagaagctcgcaaacgtatttatgcaacgacagataaagcacgtggtgcattaaaaacattagctgataatgaaggttacgaaacattcgttattccagatgatgttggaggacgtttctctgtattgacgccagttggtttattaccaatcgcagtaagtggcttaaatattgaagagatgatgaaaggtgcagctgctggtcgtgatgacttcggaacatcagaactagaagaaaacccagcttaccaatatgcagtagttcgtaacgctttatacaataaaggaaaaacaattgaaatgcttattaactatgagccagcacttcaatacttcgctgagtggtggaaacagttatttggtgaaagtgaaggaaaagatcaaaaaggtattttcccatcttcagcaaacttctcaactgacttacactcattaggtcaatacgttcaagaaggtcgtcgtgatttatttgaaacagttctgaaagtaggtaaatctacacatgaactaacaatcgaatcagaagaaaacgatttagatggattaaactaccttgctggtgaaactgtagacttcgtaaacacgaaagcatacgaaggtacattacttgcacatagcgatggcggagtaccaaacttaatcgtaaatattcctgaattaaatgagtacacattcggttaccttgtatacttcttcgaaaaagcatgtgcgatgagcggctacttattaggtgtaaatccatttgaccaaccaggagtagaagcatacaagaaaaacatgtttgctttacttggtaaaccaggatttgaagaattaaaagcagaattagaagagcgtttaaaa

SEQ ID NO: 10746 - DNA, 216 bp, Bacillus anthracis
atgagtttaggtgtaatcgcagctgcaattgcaattggtttatcagcattaggtgcaggtattggtaacggtcttatcgtatcacgtacaatcgaaggtgttgctcgtcaaccagaattaaaaggcgcacttcaaacaattatgttcatcggggttgctttagttgaggcacttccaatcatcggtgtagttattgcattcatcgtaatgaacaaa

SEQ ID NO: 10747 - DNA, 2622 bp, Bacillus anthracis
atgagcataccgtcaatattaaggaaagagactttaaaaaagaaagataaaaatattgatctacaagaaaataatataaatgatttagttgtatcggctagccgagtgattgcgccactttggcctatctctacatttgcagctcatcacccttggatggggctggaaaagcaatcatttgaacaagttgcaaattggttaaaagaagctcgtaatgtggatatttatcctagtgcttccatgattcattcggcaaaggcgaaaggtgagattgaggaatcatttttacaaattgccttgtctcgttggcttgattcacaatcttttcatatgccgcgagagacagcggagcgtttttgtcaagaagctttaaagttagaaagattaccttctagtctattatcatcgccagaattaaataaattggcagaagaaataaattatgtaaatacagggagtatgaaagactcttctatgcaaccaataagctcgcttatagagaatcaaaatggtgacaacctatcggatattcttaattatcatattattaaatggtgtaaattatatcttgatgacgccggggcaagttgggcgatgccaaatcgagagaaaggtttttatcgtgcgtggcaacaccttattacatttgatccagcgctcagtaaaactgaacgtaaagttttaaaagattggccagaagatgcccttatagctttaacaaaagcattatctgaattaggaatttctgaatctaacatgcaagcttaccttgaagggcacttactttctttgcctggatgggcaggaatgatacgatggcgctcgcaacaatcaattgaggaacaggaacttctcatagaatatttagcagttcgactttctatggagctagccattgtaaaaccgtatttacctttaaaaaatcaaaaggttgagaaaaaagtttcgatcgtcccacttatagcttcttggatctattggggggatatttcaatagagaaatggttacaaatgtctgcaactgaacaaagtgaattattggcattcgcttatcgctttgatgaaaatactcgcaagaaactttggctagaagcttgggaacagacgcatgcagagcaattaagggagaagattgcttctaagcaacgtgcaactcatgataaaaagcgtgtagtagctcaattagcattttgtattgatgtacgttcagaaccgtttcgtcgccaccttgaaaaattaggtccgttcgaaacgtttggaatagctggtttctttgggttaccaattgcgactactgaactaggtagtaatgacagccatccttctttgccagttatattaaaaccgaaacatcaaataaaagagctaacagatgaaaatgaatgtaaatcttatgaacaacgtaagatggtaggcagttcggtacgttatacatttaaaacgatgaaacagaacgtactgacaagtatgttgctacctgaagtaagtggtcctttacttggtttacaaatggtgacaaggagttttgtgccaagaagagtaggtggcttcattcgtaaccttcgtaaaaatatgttgcaaaagcctgatacaactttctcgcttaatcatgttcatgatacaaactgtgagataccgatcggttttacgaaagaagaaaaagtgaactatgtgcgtcaaactttaaaaatggtgggattaacagaaggtttcgctcctttagttgtaatgtgcggccacagtagtcaaagtacgaacaatccttatgctgcagcgcttgagtgtggtgcgtgtggcggagcagcgggaggatttaatgcaagagttttcgctactttatgtaatcttccagaagtgagagaggcgttgtctgctgaaggtattaaaattcccgatgacaccatttttgcagcagctgaacataaaacaacagtggatgaattagagtggatttacgttccagaactttcggaaactgcgcaagaagcatttgattgtattgaggccattatgccaaatgtgagccaacatgcaaatagagagcgtttaatgcaattacctcattttaaaacgaaaataaaaaatccgagtaaagaggcacaccgatttgcagaagattggagtgaaatacgtccggaatggggattagcacgtaatgcatcttttattatcgggcaacgtgaattgactcaggagtgtgacctagaaggtagggctttccttcataattatgattggaaacaggatgaaagtggcgatatattagctaacatcatagccggaccaggaacagtagctcagtggatcaatttacaatattacgcttcaactgtagcccctcattattatggtagtggaaacaaagcaacccaaactgtaacggcaggtcttggtgttatgcaaggaaatgcaagtgacctgttaccaggcttaccttggcaatccgttatgcaatcagatcgtgagacgtatcattcaccacttcgtttattaattgtaattcaagcgcctactaaatatatagaacgtttgctaaataataatttcacatttcgagaaaaagttcaaaatggatgggttagacttgccagtgttgatccagagggacgttggaaaaattgg

SEQ ID NO: 10748 - DNA, 1449 bp, Bacillus anthracis
ttggataaaaaagcgacatttgtaaatgtagaaaaaaaggcgatgtatataaatggtgagtggattacattgcaagaacaaatcgaagtaaataatccagcaacgaaggaaatatttgcgactgtaccaaagggcggggtaacagaggcaaagcaagctgttgacgctgcgcatgaagcttttaaatcatggtctaagttaacagcagcagaccgtgcagcgaaattaaaaaaatggttcacacttatcgatgaaaataaagaagagattgcagcaattatgacgaaagaacaaggaaagccgtttgcagaagcgcttggtgaagtgaattatgcaaatagctttgttgaatggtatgcagaagaaggaaaacgcgtatatggtgaaatgattcctgcttctcatccaaataagcgcattttagttatgaagcaaccagttggcgttatggcagctattacaccgtggaacttcccggcagcgatgattacgagaaaggtagccccagcgcttgcagcaggctgtacagccgttgtgaaaccggcaagtcaaacgccattaactgcgttaaaattggctgaattagctcatgaagcggacattcctaaaggtgtaataaacattgtaacaggtagtgcgaaagcaattgctgatacgtggatggaagatggacgcgttcgaaaagtttcctttacaggatcaacggaaattgggaaagagttaatggctagtgctgcacaaacgatgaaaaaagtttcacttgagttaggtggtcacgcaccgtttattgttatgaatgatgcggacttagataaagcagtagaagcggtgattggttcgaaattccgtaacgcaggacaaacatgtatatgtacaaaccgagtatttgttcaggaagaagtgtatgaagcgtttgtagagaagttcgaaaaggcagtgggacagttgaaagtaggagacggtttcggtgacggaacgactgtaggaccacttattgacgagaatgcagtttcgaaagtacaggagcatatcgaagacgctattcaaaagggtggaacagttttatatggtggtcaaaaggttgcagagctagacggacactttatgcaaccgactgtaattggattggcgaacgatacgatgctttgtatgaatgaagaaacatttggaccggttgcaccagttgcgaaatttaaaacggttgaagaagtaattgagcgtgcaaatcatacgccatatggtttagccgcttacattttcacgaaagatattagtcaagcattccaaattagtgaagcgttagagtacggtattatcggattaaatgatggcctcccatcagttgcacaagcaccgttcggtgggtttaaagaaagcggtattggtcgtgaaggtggtcatttcggtatcgaggaatatttagaaattaaatatatttcattaggacta

SEQ ID NO: 10749 - DNA, 831 bp, Bacillus anthracis
atgagttttttaaataacagtattatttatcatattgcaattattttatatgcttgtagcattagtttatattttatagattatttccaaagtaaccgaaaggcgaaccgatttgctttttggttactttcgattgtatgggttctgcattctatttttatgttgcttagagctacagattcagaaacgaaccctcttttaaccttattatcagggatttatttttatgtttggctattgattacgatgtctttagtcattaatcgatttatgaggattgactttttagtcttttttacaaatgttgtcgcatttggcgtaagcgctttttctatttttacaccgctcggaaagatgtcgccggtacttgcagagcaattagtttcggagcttgtatacgtacatgtcggtatggctattatttcttatgcaacttttactgtatcgttcattttttctattatgtatttattgcaatatcgcctattaaaaaagaaaaaatggaatgcgagattaagaaggttaggaaatttaccgaagctagaatcgatgtcttacggattaaatttattttctgttccatttttcttactagctattttattaggatgcatatggggatatacaaaattggacaatttccattggtatgatacgaaagtaatcgggtcttttgtcgttctatttgtatattgtgcgggcctatatttacgagctgcagacgtgttgcaagggaagaaaatcgtgcagtggaacattggggcatttctcgtaatgctaattaatatttttctattaagcagtttatccaacttccacttttggtattta

SEQ ID NO: 10750 - DNA, 689 bp, Bacillus anthracis
gtggggggagatggaacgcttttatatgcgtttcatcgttattataatcgattggatgaaacagcatttgttggtgtacatacagggcatttaggtttctacgcagattggttaccgacagaagtagaaaaattagtaattgcacattgctaaaacaccattccaagtggtggaatatccacttttagaagtgattattcgctatatgaatgggagtaaagagtcacagtatttagcgatgaatgaagcgactgtggaacagatcacaaagttctctagtaccacgagtaaaaaaacccggacaagcactttttaaccctccccaggggatgggccattgcaattcaacccctttcggggaggacttgcgcataaatgaaggcgcctcggcggaagaaataatccccccttctattgaagcgattcaaattgcagaaatggcatcgattaataaccgtgtgtttcgtacggtaggttcgccactcgtattgccgaaacatcatacatgtgtgttgaagccgactgcaggaatgaacttacaaattacgggtggcacccatttacgatgggttcatcaagatgtgaaatcaattcagtatcgcgtggcaaacgagaaagtacgatttgttcgtttccgtccatttccgttctggaaacgagttcgtgactcgtttgttgcagataaatag

SEQ ID NO: 10751 - DNA, 1131 bp, Bacillus anthracis
atgcgtatcggtattccaacagaaattaaaaacaatgaaaaccgcgtggcaatgacgccagcgggagcagtacatttagtacaaaatggtcatgaagtttttgttcaaaaaggagcaggtttaggatctggctttacggatgaagaatacgtacaagctggtgcgaaacttgttgaaactgctgaagaagcatggaatcaagatatggttatgaaggtaaaagagccagttgcaagtgaatacggctatttccgtgaaggtttaattttattcacatacttacatttagctccagaaccagaattaacgaaagcattaattgataacaaagttgtatcaattgcatatgaaacagtacaattagacaatcgttcattaccattacttgcacctatgagtgaagtagcaggtcgtatgtctgcacaaatcggtgcacaattccttgagaaaaacaaaggcggtaaaggtattttacttgcaggcgttccaggggtaaaacgcggcaaagtaacaattatcggcggtggtcaagctggtacaaacgcagcgaagattgcagtaggtttaggtgcagatgtaacaatcatcgacttaagtgcagaacgtcttcgtcaattagatgacattttcggtaaccaagtaaaaacgttaatgtctaatccatacaatattgcagaagctgtaaaagaatctgaccttgttattggtgcggtattaattccaggtgcaaaagcgccaaaacttgtaacagaagaaatgattcaatcaatggaaccaggttctgtcgttgtagatatcgcgattgaccaaggtggtattttcgaaacaactgaccgtattacaactcacgacaacccaacttacgaaaaacatggcgttgttcattatgcagttgcgaatatgccaggtgcggttccacgtacatcaactcttgcattaacaaacgtaacagtaccatatgcagtgcaaattgcgaacaaaggctataaagatgcttgcctaggcaacactgcattattaaaaggtattaacacattagatggatatgtaacattcgaagcggttgcagaagctcacggtttacaatacgctgatgcaaaagagcttcttgaaaaagctcctgctttatca

SEQ ID NO: 10752 - DNA, 357 bp, Bacillus anthracis
atgaagaaaaaacatcgtataaaaaagaatgatgaattccagacggtttttcaaaaaggaaaatcgaatgcgaatcgtcaatttgttgtctatcaactagataaagaagagcagccaaactttcgtattggcctttctgtcagcaagaagataggaaatgcagtagtgcgtaaccgaattaaacgtatgattcgccagtcgatcacagaattaaaagatgagatagattctggaaaagattttgttataatagcaaggaagccttgtgcagagatgacatatgaagaattaaagaaaagcttaattcatgtctttaaacgctctggtatgaaaagaataaaaagtagcgtaaggaaa

SEQ ID NO: 10753 - DNA, 1305 bp, Bacillus anthracis
cttactatggtagccgaaaagggaactcaaacaaaaacacaacaacaaagggaacaacattttgaactattgaattcaacacaaattgttattagtgaagcgttagaaaaattgggttatccaaacgaagtatatgaattattaaaagagccaattcgtatgatgacagtgaaaataccagttcgtatggatgacgggactgttaaaatatttacaggatatcgtgcacaacataatgatgctgttggtccaacgaaaggtggaattcgcttccatccgaatgtaacagaaaatgaagtgaaagcactttcaatttggatgagtttaaaatgtggtattgttgatttaccatatggcggaggtaaaggtggaattatctgtgacccgcgtgaaatgtcattccgtgagttagaaagattaagccgcggttatgtacgagcaattagccaaatcgtaggaccgacgaaagatattccagctccagatgtattcacaaactctcaaattatggcatggatgatggatgagtatagccgtattgacgaatttaattcaccaggatttattacagggtagcccacttgtattagggtggatctctatggacgtgaaacagcaacagcgaaaggtgttacaatttgtattcgcgaagctgcaaaaaaacgcgacattgatattaaaggtgcacgcgttgttgttcaaggattcggtaatgctggtagcttcttagctaaatttatgcatgatgcaggggccaaaattattggcaatctcaaaatgcttacggcgcgttacatgatccaaacggattagatattgattatttattagaccgtcgtgatagcttcggtacagtaacaaaactatttaataatacaatttcaaacaaagaattgttagaacttgattgcgacattttagttccagctgcaattgagaaccaaattacagaagaaaatgctaatgatattaaagcgaaaatcgttgttgaagctgcaaatggtccaacaacattagaagcaactaaaattttaacagatcgcggaattttacttgttccagacgtattagcaagtgctggtggggtaacagtatcttactttgagtgggtacaaaataaccaaggttactactggactgaagaagaagtagaacaacgtttagaaaaagtaatggtaagatcatttgattctatttatgaaacagcgacaagttcgtaaagtgaacatgcgtttagcggcgtatatggtcggtgttcgtaaaatggctgaagcaagtcgcttcagaggctgggtataatattat

SEQ ID NO: 10754 - DNA, 377 bp, Bacillus anthracis
tacttgcgagaccatacaatccatcctattacagaccaacgtcataatgcagaaggattccaacctgtagatgatgactacgagcagtttattgaaacgcatgtttagagcacgacacaattatctttgctacaccgctatactggtacggaatgagcggacatatgaaaaacttctttgatcgctggtcacaaagcttacgcgatacatcacttcatttcaaagagaaaatgaaaggtaaaaaaatgtatgttgtcatcgttggcggagataacccaaagctaaaagcattaccgcttattgctcagttccaatatatctttgattttattggttcatcgtttgagggttatattattggagatgcgaatgggtta

SEQ ID NO: 10755 - DNA, 540 bp, Bacillus anthracis
atgagcaatgggattgtagcaaaacgttatgctgtcgctctttttaaaattgcaaaagaaaaacacgtattagaaatgtttgaagaggaattacgccttgtacaaaacgtttatgagaagaacggagaactacatagctttttaacacaaccgaacatttcaaaagagcagaagaagacgtttcttgcaaacgtattcggatctgtttctgaatctattttaaatacgttatatattttaattgataacaaacgcattgatatcttatctgacattgcaaatgaatacgtagttcttgcgaatgaagaacgtaacgtagcggacgcaacagtatactctactcgtcttctatcagaagaagagaagcttaacattgcagaagcatttgcaaagagaacaggaaaagatgcaattcgcgtaaaaaatgttgtagatgaagatttactaggcggtattaaagtacgtattggaaatcgcatttacgacggaagtttacaaggaaaattagcacgtattcagcgtgaattaatgaagaataga

SEQ ID NO: 10756 - DNA, 1496 bp, Bacillus anthracis
atgaatttagaaacaattattggtttagaggttcacgttgagttaaaaacaaattcgaaaattttctctgcgagtccaacagaattcggagcggagccaaatacacaaacaagtgtaattgacttaggatacccaggggtacttcctactttaaataaagaagcagttaactttgcaaatgaaagctgcaatggcattaaactgtgaaatcgcaacggaaacgaagttcgaccgtaaaaactatttctacccagatagaggcgaaagcttaccaaatttctcaatttgataagccaattggtgaaaatggctggattgaattcgaagtagacggtaaaaagaaaacgtatcggtattacacgtcttcatttagaaagagatgctggtaaatcaacgcatacagctgatggttcattagtagactacaaccgtcaaggtatgccttttaatcgagatcgtgtctgagccagatatgcgtacgccagaagaagcatatggcatactttagagagtttaaaatcaatcattcaatacactggcgtatctgattgtaagatggaagaaggttcccttgcgttgtgatgcgaacatctctcttcggtcagttggacaagaagaaggtcggtacaaaaggcagaactgaaaaacttaaactcattcactaacgtaccaaaagggtcttgagcattgagcaagtgcgttcagaaaaagaattattatcttgggggtatcatcccacaagaaacacgtccttatgatgaaccaacgacaaaaacaatcttaatgcgtggtaaaaaaaggatcttgacgaattacctttaccttcccaaagccagaatatattgaacctttcactccatgacccccggaaaaaaaaaatttccgccttctattcgcagaacttccagacgcacgtaaaaccccccaaacttgaggaaattggcgtttccccttatgaaggcccccctttttaccttaaccacaagagatgtctgatttctttggaagcaacaattgcagatggagcagatgcgaaattaacatcaaactggttaatgggtgaagtgcttgcgtacttaaacaaacaacaaaaagaattaaaagatgttgcattaacgcctggctggtttatctaaaatggttcaattaattgaaaaaggtacaatttcttctaaaattgcgaagaaagtatttaacgaattaattgaaaaaggtggagacccagaagaaatcgttaaagcgaaaggtcttgttcaaatttctgacgagggtacacttcgtaaagttgtaacagaaattcttgataataatgaacaatctatccgagactttaaaaacgggtaaagaccgtgcgattggcttccttagtttgtccaatttatgaaagctaccaaaaggacaagccaatcccacgcctatttaacaaaattttactggaagagattattaagcgatattagtagtaactgttaaagattaagcagaaaaaacacccg

SEQ ID NO: 10757 - DNA, 699 bp, Bacillus anthracis
gtgaaggtaaaaacatatcaacagaaaagcccgttgaagcaagaatgtgaggattcttatttttgtaatgaggaaaataagatttatggtgtatgtgatggtgcaacaccgctcgtcccgtttcgtgatgaaaagggacataatggagcatatatcgcttcacatttatttgcaagttattttgcttctttacgtgaaaatcatagtttacaagttgctgttgcgaaagcaaacgaagcattgcaaagtaaaatgttagcatataaagtagatacgagaaaaaaagaacatttgtggtgcacatgtattgcggcagttcaaataaatggtgagaaaattgaatacgcacagttaggggactgtatgattgtcgcaatacttcaaaatggaacaatgcaagtattaacgaaagacacggttgaaggaattagtaaacgagcaaaaaagaagagagaagaagatcgtaaaaaagggttatctgtaccagaagaatatgtttttcaagatgtgcgagaacagttaaaatataatcgttatcttgcaactatgcagggtgggtattccgttgcaaatggaatgaaagaagcgatacactatttacaacatggtgaattacatatagatgaagtgagcggaatttttatttgttcagatggatttttcacccagattggccactcgaacaaactgttgcatata

SEQ ID NO: 10758 - DNA, 436 bp, Bacillus anthracis
aacaaacaagtaatcgaagtattaaacaaacaagtagcagactggagcgttttattcacaaaactacacaacttccattggtacgtaaaaggacctcaattcttcacattacacgagaaattcgaagaactttacacagaatcagctactcacatcgatgaaattgcagaacgtattttagcaattggcggcaaaccagtagcaacaatgaaagaatacctagaaatatcttctattcaagaagcagcatacggagaaactgcagaagggatgggtcgagcaatcatgaaagactacgaaatgatgctagtcgaactggaaaaaagcatggaaatcgctcaaaactctgacgacgaaatgacatctgacctactactaggcatctacacagaactagaaaaacccgctttgaatgctacgcgcgctccttgaatca

SEQ ID NO: 10759 - DNA, 1488 bp, Bacillus anthracis
atggagcaattagtagagtggttagtagggcaagtgtggagtattggtttagttgttttcgcgttaggagcaggtgtgtattttacaattgcaactcgttttcttcaaattcgttattttaaagagatgattaaactattatttgaagggaagagctcagaaacgggaatatcatcctttcaagcattttgtttagctttatcaggcagggttggaataggtaatattgcaggggtcgcgacagctatcgcttttggcgggcctggagctgtattttggatgtgggtaatggctcttttaggagcagctagtgcctttgtcgaatcaacattatctcaaatatataaaagtaaagttgaaaatgaatatcgcggtggtacaccgtatttcattgaaaaaggcttaaacatgaaatggtttgcagtcattgtagcggtcgttgtaacactttcatatggtgttttattaccaggtattcaatctagtagtatcgcagttggattcgaaaactctaatgggattagcaaatatataactggtatcttgttagttgtattattagcagcaattatttttggtggcgtaaagagaattgctggcgtttctcaaatgctcgttccatttatggcaattggttatgtaattgttacatgtatcgtattaattgcgaatgtaaaagaaatcccaagtatgttcgctttaattttctcaagtgcttttggtgtgaatgaaatgtttggtggaatcgtcggtgcagcaatcgcgtggggcgtaaagtgcgctgtattttctaacgttgctggcgttggagaagcgacgtatagttcggccgcggctgaagtatctcatccagcaaaacaagggttagttcaagcgttttctgtatacattgatacaattgtcgtatgtacagcgacagctcttatgatcttaataacaggtatgtataatgttatacctgaagggaaaagcgctatcgtaaagaatatagggaatgttgatgcgggtccaatttatacacaacaagcagttgaaactgttatgacagggtttggtccattattcatttcaatcgcaattttcttcttcgcatttacaacattacttgcatactactatatcgctgaaacgacacttacttatttagaccgtgaacttaagcatagttggttaaaaccagttttgaaaattggatttttaattatggtttacatcggtagtgtagaatcagcatcgcttttatggaatcttggagatttaggaatcggtagtatggcatggttaaacttaatcgcgattctactattaagtaaaatcgcattaaaagtgttaaaagattatgaaacgcagaaaaaagaagggaaagatcccgtgtttgatcctaaaaatgtgggaattgaaggtttaacattttgggaagaaagaagtaaagaggttgcaagaaaaaactcaaaagaacaagcggtagtggatgatagtctgaaattg

SEQ ID NO: 10760 - DNA, 261 bp, Bacillus anthracis
atggaaaaaatctttaaagtaactagcgactcaggaattcatgctcgtccagcaactctacttgtaaacactgcaagcaaatttggttctgacattaacttagagtataacggaaagaacgttaacttaaaatcaatcatgggcgttatgtctttaggcattcaacaaaacgcagaaattaaaatcactgcaaatggtgatgatgcagctcaagcactagcagctatcgaagaaactatgaaaaacgaaggattaggagaa

SEQ ID NO: 10761 - DNA, 2143 bp, Bacillus anthracis
atgagtaaaattcgagtgcatgaatatgcgaaaaaacataatatctcaagtaaagatcttatgacaaaactaaaagaaatgaatatcgaggtttcgaatcatatgacaatgttagacgatgaagtagtaaacaaattagataatgagtattccagctgaaaaacctttctgttccagatgagttggaagtagaagaaaaagtgtttggtagtaaaagggccgccattaggaaaaggaaaaagggcaagggaacggaggccaggcgtcaggagacctttgttggaaggcaacaaaacccaggctgtagacacccccagataaaattcttttctcggaaagcttcacagtaggtgcccttgttaagaaaataagcaaaagagccattggaaatttataaaaaagctcttcatgcttggaattatggccaccattaacccagaccttagataaagatacaattgagttaatggctaccgactacggtattgaagtagaagaagaagtaattgttagcgagactgagtttgaaacctttccttggaggggccaagtgggggaagggatcttaaaggagcggtcccaggttgtagttacaattcagtgggacacgttgaaccagggtaaaaccaccctttctgggcctctttccgtaactataaagtactggcggcgaaagcaggtggaatttctcagcatatcggtgcataccagttggaattaaatgccaagaagatttacattcttagacacacctggtcacgcgggcgttacaactatgcgtgctcgtgggggccacagtaacggatattaccatcattgttggtgcaactgatgacggcgtaatgccacaaacagttgaagcgattaaccatgcgaaagcagcaggagtaccaattattgttgctgtgaataaaatggataaaccagcagcaaatcctgatcgcgtaatgcaagaattaacagaatatgaattagttccagaagcatggggcggagaccccaattttcgtaccaatttctgcaatcaaagcgaagggaattgacatcttactagaaatgatctttcttataagtgagtaggaggaatataaagcaaatccaaccccgctatgcaactgggtactgtaatgaaagcacagcttgataaaggtaaaggacttatcgcgacattactgtttcaaaacggtacgcttcgagttggagacccaatcgttgtcacaaactaagtgggatgtgttcgtgcatacactcgtgatattggtcgccgtgtaaaagttgctggtccatcaactcctgttgaaattacaagtttaaaacgaagtaccacaagcggggagatcgtttcatggcattcgctgatgagagtgaaagctcgtcaaatcggtgaatcacgtgcgcaagaagcgttacttgctcaacgtggtgaaaaatttttaaattaagcctttgaagatttatctccaacaaatcccaaggggggcgatgtaaaaaaaaattacctttaattgtgaaagcagacgtacaatgtttctgtagaagcaaatggcagcatcatttggtaaaattggatgtgaagggtgttaaagttaaaattatccatacaggcgtaggtgcgattacagaatctgatatcatttaagcttctgcatctaatgcaattgtaattggatttaacgtacgcccagatgtgaatgcgaagcgtacagctgaattagagaacgttgatattcgtttacaccgtattatttataaagtaatcgaagagatcgaagcagcgatgcaaggtatgttagatccagaattcgaaagaaaaagtatcgggtcaagcagaagtacgtcaaacgtttaaagtaacaaaagtgggaacattcgcaggttgttacgtaacagacggtaaaattacacgtgatagtggcgtgcgtattatccgtgatggcgtagtaattttcgaaggacaacttgatacgtttaaaacgttcaaaagacgacgtaaaagaagttgcacaaaactatgagtgtggtattacaattgagagatataatgatcttaaagaagggggacattattgaagcatacattatggaagaagtgaagcgatgataatcgcttcactctcattcgagtgtatgatttacgatgtgc

SEQ ID NO: 10762 - DNA, 483 bp, Bacillus anthracis
agtttatttaatttacaaggggtgtccattcctttcctcccaatggattgtcccattccgtaaaggtggatgaaattaattcgacatggggaaaaaacgtaggaaatattatctttgttgatttccatggcggaaccgacaagtgaaaaaccaagcgttagggttgatatgtagatggtcgtgctacagcgttagtaggtacacatacgcatgttcctacagcagataatcgcattttaccgagcggaacggcattatatcacagatgttggtatgacaggaccgtacgatggaattttaggtatggcccgagaagcagtattgaagaagtttttaacaaacttaccagtgcgatttgaagtgacaaatggtagaacacaattaagtgcagtgctaattgatgtggatcctaatacaggaaaagctaagaaaattgagcgtatcttaattaatgatgatcagccattttttgagtaatcccta

SEQ ID NO: 10763 - DNA, 948 bp, Bacillus anthracis
atgtcaactgtacaagtaccgaagttaaatacgaaagatcttttaacactagaagaattaacgcaagaagaaatcatttctttaattgagttcgctatatatttaaaaaagaataagcaggagcctttattacaaggaaagatattagggcttatctttgataaacattcaactcgtactcgcgtatcttttgaagcaggaatggtacagcttgggggacatggaatgtttttaaatggaaaggagatgcaaatgggaagaggggagaccgtttcagatactgcaaaagtattgtctcattatattgacgggatcatgatacgcacattctcgcacgcggatgtagaagagcttgcaaaagaatcgagcattcctgttattaatggactaacagatgaccatcatccttgtcaagcattggcagacttaatgacaatatatgaagaaacaaatacattcaaaggaataaaattggcttacgtaggtgacggaaataatgtatgtcattcattgttgttagcgagtgcgaaagtcggaatgcatatgactgttgcaacgcctgtagggtataaaccgaatgaagagattgtaaaaaaagcgttagcgattgccaaggaaacaggagctgaaattgagattttgcataaccctgaattagcggtgaatgaagcagatttcatttatactgacgtttggatgagcatggggcaagagggagaagaagagaaatatactttattccaaccatatcaaattaataaagaacttgttaagcatgcgaaacaaacatatcatttcttacactgtttacctgcccatcgtgaagaggaagtaacaggcgagattatagatggaccacagtctatcgtttttgagcaagctggtaatcgattgcatgcgcaaaaagcattattagtaagtttatttaaaaatgtagaagagctttcc

SEQ ID NO: 10764 - DNA, 1071 bp, Bacillus anthracis
atgagaaaaagaggacgaatgagtaaattcaagatgctgaaagtaacaggagcgataatagcactcttttcttttcttactattatttggtctacagcattttatgtatcatctagtatattggatgcccttgcaatacatttatctccttttgttacttacctcattagtgacatactcagttttatatttatgattcttgtttggatattaattgcagtattaatgagaccgaagcgagaggcgatgatttggactattattgaaccgatacaaaaaattgcaaaaggggacttttcggtaaaaatacgaaatgaagagaaatatgatggggaaattggtgtgctcgtaaaaagtataaacgatatgacagatgaactgaatgcgatggagaagatgcgtcaggaatttgtttcgaatgtttctcatgaaatacagtcaccattaacttctataaaagggtttgctagagcactacaagatactaatcttcctgaggaaaaaagaaagcattatcttaccattattgaaacagaaacgacgagattatctaaactaagtcaaaatttactgaaactcaccctattagagtcggaagaatatacaccagaaagagttacttatcgattagatcaacagttaaagcaaattgtgttaaatagtgaaccgctttgggctgagaaagaaattgaattagaccttgatttagaaaaagtgcatataactgctgaccaagaaagtatgagtcaagtttggattaatttaattcataatagtattaaatttactccaagtagcggtacgatttcaatcaagctaaaagaatatgagacattagtagaagtacgtatacgtgatacgggaagtgggatatccgaagaacagaagcaacatatttttgagcgtttttataaagcagactcttcacgaaatcgtgcttatggaggaagtggtttaggtttagcgattgtgaaaaaagtactcgatcttcatcagggggaaataaaagttgagagtgaggaagggaatgggacggaatgtattgtttgtattccaaattatgaagagaaa

SEQ ID NO: 10765 - DNA, 1271 bp, Bacillus anthracis
atgaaagggtcaccgtttatacgtggaacgatatttttaacgatggcaacgatgatatctaaaatgttagggtttatatatgttataccatttacagctatggtcggtacgagtgggtatgttttatacacgtatgcatatcgtccatatacaattatgctcagcattgcgacaatgggactaccacttgcggtttcaaagatggtatcaaaatatgatcaattaaatgattatcatacggttaagagagtgttgaaaagtggaattgtgtttatgtttataatgggagttatttcgtgttttacgttatatatgctagctccgcatttggctaaacttgtaatcgatggaaatgatcaaactgggaatagtgtaagcgcggttcactactaatattcaaattgtaagttttgcgttaatacttgtaccagtaatgagtttattaaggggcttttttcaagggtttcaatcgatggggccttctgctctaagtgtagttgtagagcaattttttcgggtattaaccatcttgataggaagctttgtcgttttatatgttttaaaagcttcagtctcactagctgttggtatttcaacgtttggtgcttttatgggagcaataggtggattaactgttttaagtgcgtattacataaggaggagaaagcacttaaagaaaaaagaaatggcgagtataccgcaaacaacgaaatcttttttctcactatataaggagctcttcacatattcaataccatttggtggtagttggtttagcaattccgttgtatcagacgattgacacatttacaattaataaattgcttatacaaataggatatatgcaaggagaagcggagaagattaatgcaataattggacttgttcagatggttgtacttatcccagtttccgttgcgactgcttttagtatgtcacttgtacctgagatgacaaaagcctatacagcaggaaatgtgaagttactgtataagcattttacgaggacgaatctattagtagtagggattacggtgccagcggcaattggaatgatggtgttagcaaaaccagtgtatactcttttatttggtgccggaaatgatccggagatgggaagagttattttacagtattacgctccggcttgtatactattttcgctttttacagtaacggctgctatgttgcaaggaattaatcaacaacagaaaacagtgctagggttagtgattggcattattgtgaaaatcgttttaaatattggaagt

SEQ ID NO: 10766 - DNA, 246 bp, Bacillus anthracis
atgaatcttttaccaatcggaacagtagtgaaactagaaggtgtagaccctgtcattatgataattggaagaatgattgtatcagcagataaacgtgattttgattatgtgggtgttccttacccagttggctatctaggtgatgaaaaagtgttatgttttaatcacgataaaattgtagaggaaatgcatagagggtatatgactgagagtgaattggttctacgtgaaaaattagtagaattg

SEQ ID NO: 10767 - DNA, 930 bp, Bacillus anthracis
gtgaacgtgggcattttagggatcggaagatatgtgccggaaaaagtagtcacaaatcacgatttagaaaaaataatggatacatccgatgaatggattcgtacgagaacaggtattgcggaaagacgcattgccgatgatacaatagatacttcatatatggccgtagaggcttctaaaaaagcacttgaagatgcagggattagcggagaggatatcgatcttattttagtagcaacagtaacgccagatcgtgcttttccagcagtagcttgtgttattcaagaagcaattggcgcaaaacatgcagctgcaatggatttaagtgcagcgtgtgctggttttatgtacggaatgattacagcgcagcaatttattcaaacgggaacttataaaaatgtactagtagttggtagtgataagctatctaaaattgtagactggaacgatcgaaatacagcagtactatttggagacggagccggtgcgatcgtaatgggagctgtttcagaaggtaaaggcgttctatctttcgaattaggagcggacggaagtggcggtaagcatctttatcaagacgagtatgttatgatgaatggcagagaagtctttaaatttgctgttcgtcaacttggggattcttgtcttcgcgttttagataaagctggtcttacgaaagaagatgtggatttcttagtaccgcatcaagcgaacattcgtattatggaatctgcaagagagagattaaatttaccacaagaaaaaatgagtatgacaattgagaagttcggtaatacatcagcttcttccattccgattgcaatggtagaggaattgcaaaatggacgtattcaagatggtgatttaattatacttgttggttttggcggcggattaacatggggagcagtcgctcttcgttggggtaaa

SEQ ID NO: 10768 - DNA, 198 bp, Bacillus anthracis; identical to SEQ ID NO: 10281

SEQ ID NO: 10769 - DNA, 960 bp, Bacillus anthracis
atgaagttacaacttatgtactcttttttacgatcggatattaatgtgatagaaaaagaattaaaaaagacagttgcttctgaacagccattagtagaagaggcggcattacaacttattgaagctggtgggaagcgaattcgtcctgtatttgtgttgcttgcggggaaatttggagattataagttagatgcaattaagcatgtagctgttgcgttagaacttattcatatggcttctcttgttcacgatgatgttattgatgctgcgtttttacgacgtggtagtgcaactgtgaatgcgaaatggggagatcgtattgcaatgtatacaggggactatttattcgctaagtctcttgaatgtataacgaatattgaaattccagaggcgcatcaggcgctatcgcataccattttagaagtttgtaaaggtgaaatcgaacaaataaaagataagtataactatgaccaaaatttaagaacatatttaagaagaataaagcgaaaaaccgctttattaattgctgcaagttgccaactaggagcgattgctgctggcgctaatcgtgatacggtaagtcgtctgttttggtatggctatttcgtagggatgtcgtatcaaattattgatgacattttagacttcgtttctacagaagagaaacttggaaaacctgctggtggtgatttattgcaaggaaacattacgcttcctgccctatatgctatggaagatccaatcctttgtaagaaaatcagatctgtacatgaaaatacaacagcggacgaaatgaaagaaattattgaagctgtaaagaatagtgctgctattgataaagcatttgcgtttagtgaacgttatttacataaagcattagaaatgataaaaccactcccacgtggacaagcgaagtatgcattacaaaatgtagcaaagtatattggaaaacgaaaattt

SEQ ID NO: 10770 - DNA, 378 bp, Bacillus anthracis
atgggcggagagatgtccctcaatttagcgtatttatatccggacgcagtgacgcatctcattttagcagactctatccgaattgaatctttccagcaaaaagaaagttatgaagtgccgccactatcgacagacttacaaacggtaacagagattacggattacaataaaaatgaagtgaaaaatagtcgcgatgataaagggcattatgatcagctgacgaaaatgagagagcgccgcattgcgatggaagccgataaaattaaggtgccgactttaatcatatggggacgacacgataagagcgtttcttggaaaaatggtgaactgtatcatgggctatttgcgaatagcacggtccatattattgaaaaaaga

SEQ ID NO: 10771 - DNA, 3218 bp, Bacillus anthracis
atgaacaaaattattaatttttcgttaaaaaataagttcgcggattggctactaaccattatcgttaccgaaacaagggatttattctgggctaaatatgaagctggaaacaattcctgatattacaacacctgttgtaacagtaaccacggtttatcctggtgctacaccagaagaagtagctgataaagtttcaaaaccgatggaagagcaactgcaaaatttaagtggtgtaaatgttgttagttcatcatcttttcaaaatgcatcttctattcaggtagaatatgatttctgataaaaatatgagaaaaggctgaaacggaaataaaagacgctcttgcaaatgtaaaactgccagaaggcgtaaaggatccgaaagtttcacgtgtaaacttcaatgcctttcctgttatttcattaagtgtagcaagtaaaaatgaaatctttagctaccttaaactgaaatgtaagaaaaaaatgttgttcccagaattaaaggacttgatggggtcgcatctgttcaaatttcacgtcaacaagtagatgaagtacaacttgtctttaaaaaagataaagatgaaagaattatgtttaagtgaagatactgtaaaaaatgtaattaaaggatcggacgtatctttaccacttggcctatatacatttaaagacacagaaaaaatccagtgtgggtagatgggaaatattccaccaatgaagccattaaagatcttaaaaatccctgctgttccttcatcagcaagcagtcaaggaagtcaaactgctggagctggtgcacaaatgccgcaaatgaatccagccgctatgaacgggattccgacagttacattaagcgaaattgctgacattaaggaagtcggaaaagcagaatctttttctggaaccaaatgaaaaagaaagcaattgggaattcaaattgtcaaaagctgctgacggcaaccacagttgatgttgtaaatgcagtgaaagataaagtaaaggaacttgagaaaaaattataaagccttagagattatttcacatttcgaccaaggtgcacttattgagaaatcagtagaaacaatgctgagcaaagccatttttggtgctatttttgcgattgttattattatgctgttcctacgaaatatccgaacaacattaatctctgtcgtttccataccactttctttattaattgctgtattagtcataaagcaaatggatattacacttaacattatgacgctcggagcaatgacagtcgctatcgggcgggttgtggatgactctattgttgttattgaaaatatttaccgacgtatgtcattgtcagaagagaaattacgcggaaaaagatttaattcgtgaagctacgaaagaaaatgtttatccccgattatgtcttctaccattgtaacaattgctgtattcttaccacttggactagtaaaaaggcatgattggcgagatgttcttaccattcgccttaactatcgtcttcgctttattagcatcattactagtggcagttacaattgtgccaatgctagctcattctttatttaaaaaagagagcatgagagaaaaagaagtacattcatgaagaaaaaccaagtaaattagcaaatatttataaacgcaatacttgcatgggcttaaattcacaaaaatattacatcaagtattgctgtccttctattagttggtagtcttgcacttgtgccaattatcggtgtaagtttcttaccatctgaagaagaaaaaatgatcattgcaacgtacaacccctaaaccagggcaaacgttaaaagaagttgaaaaaaatgcaaccaaaagctgaaaagccctttccaaaataataagaagcccaaacaatttcaattctcattaggtgggcgaaaaaccatgagtcctgggtcatcaaaccaagcaatggtcttcgtacattatgataacgacacaaaaaactttgaaaaagagaaagaacaagtcgttaaagatttacagaagatgtctggaaaaggcgaatggaaaaaccaagacttcggagcaagtggcggtagtaacgaaatcaaactatacgtttacggagatagctcggaagacattaagcctgtgcgtaaaagatattcaaaatatcatgaagaaaaataaagacttaaaggatatagactctagtattgcaaaaacatatgcagaatacactttagtcgctgatcaggaaaaactaagtaaaatgggtctaacagctgcacaaatcggaatgggactttctaatcaacatgatcgccctgttctgacaacaattaaaaaagacggtaaagatgtcaatgtatatgtagaagctgaaaaacaaacttatgaaacaatcgatgacttaacaaatcgtaaaattacaacgcccacttggtaatgaagtgggctgtgaaagaatgtcatgactgtaaaaaaaggagaaacttcaaatacagtgaaacaccgcgatggccgtgtttatgcggaagtaagtgcaaaactaacatctgatgatgtttcaaaagcatccgccgcggttcaaaaagaagtagataaaatggatcttccttctggcgtagatgtttctatgggcggcgttacaaaagatattgaagaatcattcaaacaacttggcttagcgatgttagctgcgattgccattgtatacttcgttcttgtcgttacatttggcggtgctcttgcaccattcgcaattttattctcgcttaccatttacaatcatcggagctcaaagttgccttactaatctctggtgaaacgttaagtgtctctgcaatgatcggtgcgcttatgttaatcggtatcgttgtaacaaacgcaatcgtgcttatcgaccgcgttattcataaagaaaatgaaggtctatcaacacgtgaagctttattagaagctggtgcaaccacgcctttcgcccgattttaatgactgcaattggcaacaatcggtgcccttatcccgcttgcattaggatttgcagggaccgggtttattttttaaaggacttggtgtaaacgatattggcggattaacaagttccacttttttaactcttctttattgtccaatcggtttatgaagtattaagcaagttcaaaaagaaaaaagcaaaataacaaaaaaataacctcgctaactgcgaggttattttttatttccaaacaacattaggaaatcaccat

SEQ ID NO: 10772 - DNA, 195 bp, Bacillus anthracis; identical to SEQ ID NO: 9171

SEQ ID NO: 10773 - DNA, 840 bp, Bacillus anthracis
atgaaatattcactatgtaccatttcatttcgccatcaattaatttcatttactgatattgttcaatttgcatatgaaaacggttttgaaggcattgaattatgggggactcatgcacaaaatttgtatatgcaggagtatgaaacgacagaacgagaattgaattgtttaaaggataaaaccttggaaattacgatgataagtgattacttagatatatcattatcggcagattttgaaaaaacgatagagaaatgtgaacaacttgcaatactagctaattggtttaaaacgaacaaaattcgtacgtttgctggacaaaaaggtagtgcagatttttcgcaacaagagagacaagagtatgtgaatcgtattcgcatgatttgtgaattatttgctcagcataatatgtatgtacttttagaaacacacccaaatacgttaacggatacgttgccttctactttggaattattaggcgaagtagatcatccgaatttgaaaataaatcttgattttcttcatatatgggagtctggtgcagatccagttgacagcttccagcaactaagaccgtggatacaacattaccattttaagaatatatcttcagcagattatttacatgtgttcgaaccgaataatgtatatgcagcagcgggaaatcgtactggtatggttccattatttgaaggcattgtaaattatgatgagattattcaggaagtgagagatactgatcatttcgcttcactcgaatggtttggacataatgcgaaagatatattaaaagcagaaatgaaagtactaacaaatagaaatttagaagtagtaacttct

SEQ ID NO: 10774 - DNA, 1482 bp, Bacillus anthracis
atgttaacgacaaatattgagttgaaaccaaaagtgaaagcgtttttagatgaagagattaaaatgtttattaatggtgaatttgttccttctattagtggaaagacgtttgaaacatataatccagcaacagaagatgttcttgcagttgtttatgaagcacaagaagaggatattgatgtggcagtaaaagcggcgagatctgcatttgaatcaggaccttgggtggaaatgactactgctgaaagagcacatcttatttataaattagcagacttaattgaagagcatggagaagaattagcacagctagaagctttagataatggaaaaccatatcaagtagcacttgatgatgatattgcagcgactgtagaaaattatcgctattatgcaggatgggctacaaaaattatcgggcaaaccattccgatttcaaaagattacttaaattacacacgccatgaacctgttggcgttgtagggcaaattattccttggaattttccgctcgttatgtcttcttggaaaatgggagctgcgctagcaacaggttgtacgatcgtattaaaaccagcagaacaaactcctttatctttattatatacagcgaagctctttaaagaggctggttttccaaacggtgttgtaaactttgttccagggtttggtcctgaagcaggagctgcaattgtaaaccatcatgatattgataaagtagcctttacgggttcaacagttactggaaaatatattatgcgtcaatctgcagaaacaattaaacatgtaacgttagaactgggtggtaaatcaccaaatatcattttagaagacgctgatttagaagaagcgattaacggtgcattccaaggtattatgtataatcacggtcaaaattgtagtgctggatctcgcgtgttcgttcaccgaaaacattacgaaacagtcgtaaatgaacttgtgaaaatggcgaataacgtgaaacttggagcaggtatggagaaggacacggaaatgggtccactcgtatctaaaaagcaacaagagcgtgtgctacattacattgaacaaggaaaagctgaaggcgctactgttgctgctggtggtgaacgtgcatttgaaaaaggttattttgtacagccaacagtattcacagatgttacggacgatatgacgatagttaaggaagaaatcttcggtcctgttgtcgttgtacttccatttgattcgacggaagaagtaattgaaagagcaaatcgttcgtcatatggacttgcagcgggcgtatggacacaaaatattaaaacaggacatcaagttgccaataagttaaaggcaggaacagtatggattaatgattataacttagaaaatgcagcggcaccatttggtgggtttaaacaatctggtatcggccgtgagttaggttcatatgcacttgataattacacagaagtgaaaagtgtttgggtaaatataaag

SEQ ID NO: 10775 - DNA, 123 bp, Bacillus anthracis
atggagatcggttcttaccgtggtcttcgtcaccgtcgtggtttaccagttcgtggtcaaaactctaaaaacaatgctcgtacacgtaaaggtccacgtcgtacagtagcaaataaaaagaaa

SEQ ID NO: 10776 - DNA, 1389 bp, Bacillus anthracis
aagtttttacaaaaattgcgtcccggacaactcattgttttattttatttattagcagcagttgtatcggtaatattacttattttaccgtttgtgacgaagactggtgtggaatggacattttatgatgctctatttacatccggtaaagtgggaaaaggtacgggactgtctgttgttacaatttccgatacatttactacggccgggaatattatttttagccccttattttgcacattagggcggttatgaattattgcgccttgggacattccctttggattataacggggaaaaagattggtttgcagagaaagaagactcattatggcagaccataatcaagggaactttatcgggccttggagaatttgatgcgctctattttaattgtaattatttcgatagaacttatttggagcaatattattaggcacaagattcctactttattttccaacttggcaagaagcttattttcacggtttctttgcgggtgttagtgcaactacgaacggtgggatttgatttaacaagacaatcgctaattccgtataaaaaagaatacattggtcaaatgaatcatatggtactggataattttaggcgcgattggtttcccagtactaatggaagtgaaacaattccttagtaaaaggggacaacaattatttcgtttttcattatttacaaaattgacgacaacaacattttttgcactcgttgttgttggtacaattatgatttttttactggagagaaatcattttttagtaggaaagtcatggcatgaaactgtattttatacattattccaatctgtgacgacgcgaagcgggtggactcgctacaatggatatacttgaattatcacaaccgacgcttttatttatgagtatattaatgtttataggagcatctccaagttcggttgggggcggaatacgtacaacaacatttgctgttagtatattatcgctatctcacttttgcaagaggcggtagaacagttagagtcttcaaacgccaaatacactaaaaggatgtactgacaagcatctgttcgttatgacgatgggggattttattatgtaccacagcactatttattttatctattggagagaaatgtaccgcttataagctttatcccttaagagggttctgcccttcgggaccacaggactatttaccaagttttccctccgatttaacaactggtgggaaaacctggcccttattgtacttatgtttatcggtcgcgttggtattttaacgtttatactagctagtggcggaagagaacagccacctcgctataaatatccgaaagagcggattattattggatagtatgaaaccattctacctatgttaggtagaatg

SEQ ID NO: 10777 - DNA, 771 bp, Bacillus anthracis
atgcaaaaagtgacgattcaagaagcggaacatttactgcaagaaattataagtgaagaggacgatcgctttcaaatattaataaaagatgaacgaaaaggggtacaaaaactcatttcgaagtggtataaacaaaaagagttagcacaaaaggaaaaagaaaaatttctagaaatgtctaagtatgaaaatgcgttacgtgaaaaaggccttacatatatcgcaggtatagatgaagtagggcgtggaccgctagctggacctgttgtgacggcagctgttatccttccagaagatttttatattccagggttaaatgattcgaaaaagctgagtgaggcgaagcgagagcgtttttatggtgaaattaaagcaaaagcaatcgcgattggagttgggattgtatcaccgcaagttattgatgagataaatatttatcaagcgacgaaacaagcgatgttagatgctattgcgaatttatcttgtacaccagaatatttattaattgatgcgatgaaacttcctgcaccaattccgcaaacatccatcattaaaggtgatgcgaaaagtatttccatttcagctgcatccattattgcgaaagtaacgagagatcgtatgatgaaagagcttggagaaaagtatccagcatatggatttgaacaacatatgggatatggtacgaaacaacatttagaagcgattgaagcacatggagtattagaagaacatcggaaatcgtttgcgccaattaaagatatgattaaaaaa

SEQ ID NO: 10778 - DNA, 1350 bp, Bacillus anthracis
atgataaaaaaagtattaatagccaatcgtggggaaattgctgtacgaattattcgtgcttgtaaagaaatggatattgaaacagtcgcaatttattcagaagcagataaagagtcacttcacgtacaaattgctgatgaggcgtattgtgtaggaccaacgatctcgaaagaaagctatttaaatttgacgaacattattagtgttgcgaagttaacaggctgcgatgctattcatccaggatatggatttttagctgagaatgcagattttgcagagttatgccgtgaatgtaacttaatttttatcggtccaagtccagaagctatttcaaagatgggcacaaaagacgttgctcgtgatacaatgaaagaagcaggggttccgattgtaccaggttcacaaggaattattaaaaataccgaagaagcgattgaacttgctaatcaaattggatatccagttattattaaagcgactgcaggtggcggcggaaaaggtattcgtgttgcgcgccatgaagaagagcttgtaaaaggaattcaaattacacagcaagaagctagtaccgcttttgggaaccctggtgtatacttagaaaagtacgttgaagatttccgccatgttgagattcaaataatggcagatacacacggaaatgccattcatttaggagagcgtgattgtacaattcaacgccgcttgcaaaaactactagaagaaagtccatcaccagcacttgatgaaaatgtgcgtaaacagatgggtgaggcggcagttaaagcggcggtagcggttgattatacaggtgctggtacggttgagtttatttatgaatataaaacgaaaagcttttatttcatggagatgaatacgagaattcaagttgagcatccagttactgaaatggtaacaggggtggacttaattaaagaacaaattcttgttgcttctggagaaaagttatcgttacagcaagaagaagtacaatttaatggttgggcaattgaatgccgaattaatgcggaaaaccctgccaaaaaatttatgccatctccaggtaaagtagaaatgtacttgccaccaggcggatttggtattcgcgtcgattcagctgtatatccgggatattcaatcccacctttctatgattcgatggttgctaaattaattgttcacggaaaaacacgtgaagaggcaattgcaaaaatgaagcgtgcactcagtgagtttgtcgttgaaggcgtacatacaacaatcccgttccatttgcaattgttagatcatcctgattttgtaaaaggtgagtttaatacgaaatttttggaagagcatgaacttgtgacgcag

SEQ ID NO: 10779 - DNA, 1044 bp, Bacillus anthracis
gtgggagaaggtttggaaattaaggtcaaacctgaacaactcgaacaaattgccaaaaacatatcagagatgcaaacacacagccagaacatacaacaaaatctcaatcaatctatgtttagtattcaaatgcaatggcaaggagcaacgagtcagcatttttatggggaatatatgagatcaatgagactcatggaatcttacatacgtaacttacaagttacagaaaaagaattacggcgtatcgctcaaaagtttcgtcaagctgatgaagaatatcaaaagaaacaaaatgaaaaattgaaagaagcccataaaaaagaaaagaaaaatgaaaaatcatggtgggaaaagggaatagaaggagcagctgaattcatcggagtaaatgatgcaattcgtgcagttaccggtaaagaccctattacaggaaaagaattatcaacaaaagaaagactcatcgccgcaggttggacactcctaaactttgttcctgttggaaaagtggcaagtcttgctggaaaaggaataaagtatgtcgcttctagctttgggaagacgattgtaaaagcaggaaaaaaactaggcgaaggcgtaacaatggtagctggaaaagctggcaaagcagctgttgatggcataaaaacagccagccacaaagtaaaagagggtgtaaactttgtagcctccacagcaaaaggatttgccgacaaaatcggaagcctatggaacaaaggtgccacaaccgtaaaaacaaccttcttgcaagggaatgaaaagatccagcacgcagtaaaaacattaatggagtacaaatggatcccaggcgagggaaaaggcttcgccatggctggagtaggaaatgtctcaggaggaggacagtattctctgaaagaggcttatcagtatgtggagagtaaggttgttaagggtacgggtaaagtatatccaactagacaaatagattcagtaacagaagcgcatataattgatagagtgaaggaactaagaggaaatttatcgagtaaatataaaaaatctggg

SEQ ID NO: 10780 - DNA, 1509 bp, Bacillus anthracis
atgaagttattagaacaaattgaaaagtgggctattgaaacgcctgatcaaactgcttttgtttggcgagatgcgaaaattacgtacaaacaattaaaggaagattctgatgcgttagcacattggatttcttctgagtatccagatgatcgttcaccaattatggtgtatggccatatgcaacctgaaatgattattaactttttaggatgtgtaaaagctggacatgcttatattcctgtagatttatctatcccagctgatcgtgtacaacgtatcgctgaaaattctggtgcgaaattacttttatcagcagcagtaactgtaactgatttaccagttcgcattgtaagtgaagacaacttaaaagatattttctttactcataaagggaacactccaaatcctgaacatgcggtaaaaggtgatgagaacttctacattatttacacatcaggaagcacaggtaatccgaaaggggttcagattacttataactgccttgtaagctttacacaatgggctgtagaagacttcaacttacaaacagggcaagtattcttaaaccaagcacctttctcattcgatttatctgtcatggatatttacccatcattagtaacaggtggtacactttgggcaatcgataaagatatgattgcacgtccaaaagacttgtttgcttctttagagcaatcggatatacaagtatggacttcaacaccatctttcgcagagatgtgtttaatggaagcatctttctctgagagtatgctaccaaacatgaaaacattcttattctgcggtgaagtattaccaaatgaagtagctagaaaattaattgagcgtttcccgaaagcaacaattatgaatacgtatggtccaacagaagctactgtcgctgtaacaggtattcacgttacagaagaagtgcttgatcaatacaaatcacttccagttggctactgtaaatcagattgtcgccttcttattatgaaagaagatggcacgattgcacctgatggtgaaaaaggtgaaatcgtaattgtcggtccaagcgtaagcgttggatatttaggaagccctgaattaacagaaaaagcatttactatgattgacggtgagcgcgcctataaaacaggcgatgctggctatgttgaaaatggtcttctattctataatggtcgtcttgatttccaaattaagctgcatggttatcgaatggaattagaagaaattgagcatcatcttcgtgcgtgttcttacgtagaaggagcagttatcgttccaattaaaaaaggtgagaaatacgattatttattagcggttgttgttcctggagaacattcatttgaaaaagaattcaaattaacatctgcaatcaaaaaagaactcaatgagcgattaccaaactacatgattccacgtaaattcatgtatcaatcttctattccaatgacaccaaatggaaaggtagatcgcaaaaaattattgagtgaggttacagca

SEQ ID NO: 10781 - DNA, 147 bp, Bacillus anthracis
atgcgtgtaaatattacactagcttgtacggagtgcggtgatcgtaattatatttctaaaaaaaataaacgaaacaatccagagcgcatcgaactaaaaaaatattgtccacgattaaagcgagtaacgttacatcgtgaaacgaag

SEQ ID NO: 10782 - DNA, 1287 bp, Bacillus anthracis
atggtagaaaaacgaattccgattcaagttgctgaggcagtagagagagtaatggaatatgcgaaaattggtgaagtagaagaggtttctattacggaaagttacgggagaattcttggggaggatgttgtctctgatcatgacgttcctcattttgatcgttctccttacgatggtttcgcaattcgagcagaagatacgaaagaagcaaatcaagagaatgcaattgagtttgaagtaataggggaaatcggggctggatctgtttttacagaagaagtaggatcttttcaggcggttcgtattatgacaggagcagctattccagcagattgtaatgcagtcgtaatgctagaattgacggaaggttttgagaagaacggaaaaacatatatgaagttaaagcgtccttttcatagtggcgacaatgtgtcatttaaaggagaagatataaaacaaaatcaagttctcgttaagaaaggtgctgtaatcaatccaggtgttgcggccttattagcgacgtttggatacagtaatgtgaaggttgtaaaacagccagttgttggtattgtgacgacaggaagtgaattgttagaagtacatgagtcattacagccggggaaaattagaaatagtaactcttatatgattgccgcccaaattatgaaagctgggggtaaagtccgttattatggtcaacttgccgacgagttagatgcatgttttacagccgttcaatcggcgatagaagaggtggatattttaattacgacaggcggtgtgtcggtaggagattatgactacttaccggctatttatgaaaggttacaggcgaatgtactctttaataaaatagcgatgagaccgggcagtgtaacgacagtagctgaagtggatggaaagttacttttcggtttatcagggaatccgtcagcttgttatgtaggatttgagttatttgtgcatccggttataaaaacttatttgtatgcgaaggaaccacacgtatatagagcagatgctattttacaaaaagattttccaaaaccaaatccgtttactcgttttgtaagagcaaaggtgacaatcgtggacggggcattacacgcgatgccggtcggtttagataaatcgagtgcggtatcttcacttgcagatgcgaatgcttttattgtgttgcctggaggaacgagaggctttgagacagggatgaaagtgtctgtattattgttagagcacgctgagggatgtgattggccgtgggcaaagccccttcaatcttacaaa

SEQ ID NO: 10783 - DNA, 1497 bp, Bacillus anthracis
atggataacatgaaccacgaagaattaaacgaccaattgcttgttcgtcgtgaaaagctacataacttacgtgagcaaggaatcgatcctttcggtaaacgatttgaacgtacaaatgcaacaaatgacttattaagcctatatggagagttctctaaagaagaattagaagagaaagaaatctctgtttctatcgctggtcgtattatgacaaagcgtggtaaaggaaaagctggatttgcacatattcaagatttacatggacaagttcaaatttatgttcgtaaagatgctgttggagatgaagaatacgaattatttaaaacagcagatttaggtgacttagtaggtattgaaggtaaagtttttaaaacgaacgttggagaactttcagtgaaagcaacaggctttacactattaacgaaatctcttcgtccattaccggataaatatcatgggttaaaagatgttgaacaacgctaccgtcaacgttacttagacttaattacaagtatggaaagtcgtgaaacattcgtcactcgcagtaagatcattcgcgaaatgagaagatacttagatgacaacggttatcttgaagtggaaacacctatgatgcatgcaattgcaggtggagcttctgctcgtcctttcatcacgcatcataatgcgttagatatggaattatatatgcgtatcgcaattgaacttcatttaaaacgccttattgtgggtggattagaaaaagtttatgaaatcggccgtgtattccgtaatgagggtgtatcaactcgtcataatcctgaatttacgatgattgaattatatgaagcgtatgctgattataaagatattatgaaactaacagaaaatatggttgctcatatcgcgaagcaagtactaggtacaacaacaatccaatatggtgattatgaaattaatctagaaccagaatggacacgccttcatatggtagatgcaattaaagaacattctggagcagatttctggaatccgatgagtgtagaagaagcgcgtgaacttgcaaaagaacataatgtagaaattaaggatacaatggaagttggtcatattattaatgaattcttcgagcaaaaagtagaagataaattaatccaaccaacatttatttacggtcatccggtagaaatttcgccacttgcgaaaaagaatgatgaagatccacgattcacagatcgtttcgaattgtttatcgttgcacgtgaacatgcaaatgcgttcactgagctaaatgatccaatcgatcagaaagaacgttttgaagcgcaattaaaagaacgcgaacaaggtaatgacgaagctcacatgatggatgatgattatatcgaagctcttgagtatggtatgcctcctacaggtggactaggaattggtattgatcgccttgttatgttattaacgaatgcaccatctattcgtgatgtattattattccctgctatgcgtcataaacaagac

SEQ ID NO: 10784 - DNA, 888 bp, Bacillus anthracis
atggtaattcaatggttcccgggacatatggcaaaggctagacgccaagtaacagaaaaattaaagttaattgatgttgtaattgagcttgtagatgctcgattacctttatcttctcgaaatccgatgatcgatgagattattacacataaaccgaggcttgttgttttaaataaagccgatatggcagatgatcgtttaacaaaacaatggatcgcatattttaaagaaaaaggccatatggcaatttcaattaacgcacaagctggacaaggtatgaaggaaattgcagcggcttgtaaagtgttagtgaaagagaaatttgataaaatggttgcgaaaggtattagaccgagagtgattcgtgcattaattgtaggtataccgaatgttggtaaatctacgttgattaataagttagcgaagaaaaatattgctaaaacaggagatcgtcctggtgtgacaacagctcagcaatggattaaagttgggaaggaaatggaattacttgatacaccaggtatactatggcctaaatttgaagacgaattagttggattgcgtctagctacgactggtgcaattaaagattctattttaaatctacaagatgtagctgtttatgcactacgttttatggagaaacattacccagagcgattaaaagagcgttataatttgaatgacattccagaagatatcgtagagttatttgatgcgattggaaaaaatagaggctgtttaatgggcggcggaatgattgattatgataaaacatctgaacttgtacttcgtgagcttcgtggtggcaaacttggaaaaatgacatttgaaacaccagaagagtttgcagagcagacagaagatgcagaaaaagtagaagaagta

SEQ ID NO: 10785 - DNA, 1845 bp, Bacillus anthracis
atgtgcgggattacaggatgggtggattataaacgctcattagaaggagaacgggacgtcgttacgaagatggctgagacgttagcgaagcgtggtccagatgataataaagtttggattaaaggcaatgtcgcatttgggcataaacggttaatcgttgttgatcctgaaggtggtaaacagccgatgacttgtttaaaggatgaagcaaattatgcaatttgctataacggcgaactgtataacacggaagacattcgaaaggaactattaagaagaggatatacgttcaaaggtcactctgatacggaagtattgttagcttcttatatcgaatggaaagaagaatgtgtcgatcatttaaacggtatatatgcgtttgctgtatgggatgaacagaaagaacaagtgtttattgcgcgcgatcgattaggggtaaaaccactattttataaatatgacagtgggcgattactatttggctcagagttaaaagcgatattggcgcatccagatgtgaaggcggaagtgacgttagaaggattatctgaaatatttggccttggaccatctagaacgcctggtcacggtatttatactggcataaaagaattacgtccaggtcatgcgatgacattttcgaagaacggtttatgtatatggagatattggaatgtagaaagtaaaaagcatgaagattcttttgaagaaacagtagaaaaaacacgctttttattacaagatgcgattacaaggcagctcgtttctgatgtaccattatgcacttttttatcaggcggtgtagattcaagcgctataacagcaattgctgcgaaagaatacgaaaaatcgggaaaaggtcaattacacacgtattcggttgattacgaagataatgacaaatactttaaagcaaatgcgtttcagccaaattcagatgcaccatttattcatttgatgactgagacgtttcaaacgatccatcatcgttgcgtcatttcaaatgaacaattagcgcagtatttaacagaagcagtactcgttcgtgatttgcctggtatggcagatattgattcgtcattattatggttttgtcgtgaaattaaacaagattttgtcgttggtttatctggggaatgtgcagatgaaatatttggtggttatccatggttttatagagaagatgatttacaatcgagtgcatttccgtggatgcgttctacagaagcgcgtgaacaattgctaaagaaagaatggagaaataaattaaatttacaacaatatgtacagcagcgctatgaagaatccattcaagaagttcctattttagatggggaaagtccgctagaagcaaaaagacgccaattattttatttaaatatggtatggtttatgacaacattattagacagaaaagaccgcatgagtatgggggcaagcttagaagtgcgcgttccatttgcagatcaccgacttgtcgaatatgcgtggaatattccttgggaaatgaaaatgtataaaaaccgcgaaaaaggtctattgcgtaaagcgttagaagggttacttccaaatgacatcttatatagaaagaagagcccgtatccaaaaacacataatccgcactatacgaaagcagtaacagtatggatacaagatttattaacggataaaggctcaattttacacgagctatttgataaagaacagctgagtggattaattgagtcaggcggcagtgcattccaaacgccatggtatggtcaattaatgactgggccacagcttttagctcatttagcacaaattcatgtttggtttaaagaatatggagtaaatattaaagaa

SEQ ID NO: 10786 - DNA, 553 bp, Bacillus anthracis
ttgaatcgccttaaagagaagttccaaaaggaaattactcctgctctagtgagcaagtttaactataaatctgtaatgcaggtaccaaaaatcgaaaagatcgtaatcaacactggtgttggtgacgcggtatctaactcaaaaacgttagacaacgcagtagaagaattaacacaaatcacaggtcaaaaacctgttgtaactcgtgctaaaaaatcaatcgctggtttccgtcttcgtgaaggtatgccaatcggtgcgaaagtaactttacgcggcgagcaaatgtatgagttcttcgacaaattagtatcagtttctttaccacgtgtacgtgatttccgtggtgtttctaagaaatcattcgatggtcgtgggaaactacccattatgtgttaaagaggcaacttattttccctgagaatgattttgataaagtaaacaaaagtcccgcggatggaactcctaatcgctactaccgcgaaaactgatgtagaagattcctgaactggttaaacaattccggatgcccttcccaaaataaagggaagcc

SEQ ID NO: 10787 - DNA, 1314 bp, Bacillus anthracis
atgagtatggaaaatgttaaaacgatagttttaattaacttagttgtaattagtctatttcttacttttaacttatggacgtatgtgccagattccacgtctatgcaaaacgcaaaatttgtacaggggaatgaaggaactactcaaactaaaatcgctgatgttgtccgccctacttctatcatcgtgcataaagataaaaatcattacgggagcaaaagagagggagatatagaatcaatctataaacctttggaagcaggggaattacatgagttcaaagagatatcgattgctaaggctgacttccttccttatgtgcatggtgaagggaaaattgaacttattttccctaccaatatcccatttgatgcagttaaatctatgtttagtatgaaagaaaaaagtatagataagcctaaacactttaatcgaattattcttgacccttctagaagtagggatcaagaaattaaaattaattttgtttccgatggtgataactctagaatatatgaagcaaaattaagtggtgtgtatttaaaagatattgtaaatgcacaaaatcaatttatagtatcagcgaaaccttattttgactatcaaattaatgatatgaaaaagctatttttaccagatggaacgacagaattaagtaatataacatatatttcatctaatttagcggttgatacatttaagaatgctctttttagtgacccacgttatttaagcccgattaccgagcaatcgaaagaaatatttacagatggtattaggtctatggagattgaaaacaatcagcatatgctaaagtataaaaattcttccgttttaagtgagaaaaagccagataatttaatgcttttacaaaaaagttttgattttgtaaatggtcacagtggaagcttggattcatatcgtttggactatatgaataaaggacagacagtcttccgcttacaggaagatggatatcccgtatttaatacagatgggttagctgaattgagacaagtatggggatcagaagaagtaatggaatatgaaagatcgttgctgtctttgaatacgaaaggtatcgaacagaaggttactctcccatcaggtcacgttgtaatagcatccttagaaaataatgcggctgtagataaaagattcattaaggacattgggattggatacaaattatcactagatgggcaagtagcgcgactacagccgatttggtatgtaaagtttgttgaagatgaagctggcaaacaaaaaatatatgagtggagtgagggaggactaaatggattgggatcggat

SEQ ID NO: 10788 - DNA, 956 bp, Bacillus anthracis
gaattcgctagtgattttgaagtagatgaagtaattgacatgaaaggaaagtgggttttaccagggcttgtaaatacacatacacacgttgtaatgagtctcttaagaggtattggtgatgatatgttattacaaccatggcttgagacgagaatttggccactctgaaagtcaatttacgccagaacttgcggttgctagtacggaactaggattacttgaaatggtgaaaagtggtacaacatcattctctgatatgtttaatccaattggagtagatcaagatgcaattatggaaacggtatcaaggagcgggatgcgagctgctgtttcaagaactttatttagctttggaacgcaagaggatgaaagaagccaattaatgatacctgggacaatttgggaagcgttactatacgaaaagtggtatgttaactacgatgggttgccccccattagtttcatatacatgcagtacagaactgttagaagagtgtgcaggtattgcagtggagaatcaaacggatggttcatattcacctttcggaaacagagcgtgaagtacgtgatattgaagcacagtacggaaaacgtccagtagaatatgtagcaagctgcggattgtttaaacgtccaacagttattgcacacggtgtagtattaaatgacaatgagcgtgcatttttagcagaacatgacgttcgagtagctcataatccgaatagtaatttaaaactaggttctggtatagcgaacgtaaaagcgatgctagaagcgggaatgaaagtaggaattgcaacagatagtgtggcatctaacaacaatttagatatgtttgaagaaatgcgtatcgcaacattattacaaaaaggtatttcatcaagatgcaacagcgttaccggttgaaacagctcttacacttgcaactaaaggagcggctgaagtaatcggcatga

SEQ ID NO: 10789 - DNA, 1197 bp, Bacillus anthracis
aattttcaattaagtttacaaacttctaatctaattatcggttttatggtgtgggttattttatcatcattaatgccctatattaaagtggatatcccattaactgcgggacaaatttctatggtaacagcagtacccgttattttagggtctgttcttcgtattccaattggttattggacaaatcgtttcggagcaagaaaattattctttattaagtttattctattattatttcccggtttttatattaggggtgcccaattctatgatggatttaattattggtggattatttgtaggaatcggtggtgctgtattctctgtaggagtaacttctttaccaaaataactttccaaaagagagtcacgggttttgttaatgggatttacggtgtgcggtaacgctgggaacaagaattacttccttttttagcgccccgttatacgccaactttaagttggcgtggaggaacaacagcacagggggattttaatttttacttgcacgcggttggcacttatgaactttttaataggtgatcggaaaggagaaaaaagtgaataccccactaatgggaacaaaaaaaaggtggaatataaaaatgaaaaactttgggttttaggcatcctttacctttttaactgtcggatcatttgttgcatttaccgtatacttaccaaacttttttagtatctcatttcggatttaaagaaagtagatgccggtatgcggacagccggattcatcgtactcgccaccattatgcgtcccaattggtggggtgggctcggggatacattttaccccatttaaaatattaatcttcgtatttatcggtttaacactttcaggtattattttatcatttatggccaagcatgaacgtatatacattcggtttgctattagtcgcatttttgtgcagggtatcggtaatggtacaattttcaaactcgttccgatgtatttctcagaacaagctggtattgtaaatggactcgtttcagctttaggcggacttggaggattcttcccgccactaattttaacatttctgtttccaactaacaggtcattatgcaattggatttatggcgttatcagaagtcgcacttgcttgtttaatcattacagtatggatgtatagtcaagaaaagctgttagtgatgttaaagaatcattaataaggaaaa

SEQ ID NO: 10790 - DNA, 465 bp, Bacillus anthracis
atgccaaaaggttcaggtaaggttattgcacaaaataaaaaagcatttcatgattatttcatcgaagaaacatacgaagcagggcttgtccttcaaggaacggaaattaagtcgattcgcgctggacgcgtgaacttgaaagatgcgtttgcacgtgtacataatggtgaagtatgggttcataatatgcatattagtacgtacgaacaagggaatcgtttcaaccacgatccgcttcgcacgagaaagttacttcttcataaaaaagaaattgagaagttagcgggtgcttcaaaagaaacaggatatgcactagttccagttagaatctatttgaaaaatggatttgcgaaaatggcacttggtttagcaaaaggtaagaaacaatacgataaacgtcacgatttaaaagagaaagaagctaaacgtgaaattgcacgcgcgttccgtgatcgccaaaagatg

SEQ ID NO: 10791 - DNA, 836 bp, Bacillus anthracis
gagatgtttttcataattcgtgttccgagaacagtggcattaatgctgactggagctgcaatggcgatggcagggctcgtcatgcaactcattacacaaaatcgttttgtcgaacctactacaacgggaactattgaatggtcaagcttaggcctgctttttgtgtatttactatttcctgccccgactttagttcaaagaatgactggtgcaatcattttttcttttataggaactatgattttctttctatttttaagaagagttaagcttcgttcgtctttaattgtcccgattattggattgatgcttggagcagttatttctgcagtatctacttttttgggactcctttttcaaatgacgcaaagtattgaaacttggtttgtaggttcatttgctaacattcaggtaggaagatacgaatatttatggctgatcgttatcgttactttacttatttttatgtatgcgaatagattgactttagctggactaggagaagatgtcgcaacaagtcttgggagttaatactcatcgaattgttctttttgggactgttcttatctctgttgcagttggaattgttgcagctgttattggaaacttacctttcttagggttaattgttccaaatattgtttccatgtttagaggtgatgatcttagaagtaatttaccttgggtgtgtgtcatcggaatggggacaataactgcctgtgacatcatttctcgaacaattataaagccttttggattatctgtttctttaatacttgcatcagtgggagcagttgtgtttattactacttttagttgagaaaaagaaaaccaag

SEQ ID NO: 10792 - DNA, 247 bp, Bacillus anthracis
atgaaagcaggaattcacccagattacaagaaagttgtattcatggacacaaacacaggcttcaaattcttaagcggatctactaaaggatctaacgaaactgttgagtgggaagatggtaccccttactccattattaaaagtgaggatcagttttatttctcacccattctacactggacgtcagaagtttgctactgcagacggacgcgtgacccgtttcaataagaaatacggtcttaagtaa

SEQ ID NO: 10793 - DNA, 765 bp, Bacillus anthracis
ttgaaaaagaaattaggtttactagccatggttgttgcattaatggcgattactgctggctgtagtgaagtaaatcagccaattacaccaaagagcactggaatttggaatgaatacttcgtatacccgctttctcagttaattacgtattttgccaacttatttggtagtaattacggtttagcaatcgttgttacgactcttattattcgttttgcattattaccattaatgattaaacaaacgaagagtacgaaagcaatgcaagcgttacaaccagaaatggtgaagttaaaagagaaatatagctctaaagatcaagcaacacagcaaaaactacaacaagaaatgatgcagttatatcaaaaaaatggtgtaaatccattagcaggatgtttaccaatctttgttcagatgcctattttattcgcgttttaccatgcgattatgagaacatcagaaattagtaagcatacattcttatggttcgacttaggacaggcagatccgtactatatcttaccggttgttgcggcaattacgacatttattcagcaaaaacttgcaatggcaggaactgctggtcaaaatccgcaaatggcaatgatgctttggttaatgccaatcatgattttaatctttgcaattaacttcccagctgccttatcactttactgggttgttggtaatatctttggtatcgctcaaatgtacttgatcaaagggccggaaattaaggctagtaaggcaggaggatcaagcaag

SEQ ID NO: 10794 - DNA, 597 bp, Bacillus anthracis
gcagggacatgcgcgctatttacaagattaggtgcaggtactgatataccaatcggtagtccgattgctggaagaaacgatgatgcactctctgacatagttggtttatttgtaaatacattagtgttacgtacaaatacatctggagatccaagctttgaagaattattgaatagagtgaagcggtcaaatcttgcagcttatgaaaatcaagatgttccattcgaacgactcgttgaagtgttaaacccagtgcgtactcgaaatagtcatccgctatttcaagttatgttagctttccaaaatacgccagaagcaacctttgatgccccagatatagaagcgaaccttgaaattcaaagcgttggctctgcgaagtttgatctaacatttgaaattagtgaaagtaatggagttgatgggaatccaaatggcttacaggggttattagagtttagcacagatttatataaacgtgaaacggcccaaaaattagttgaacgatacattctgttattagatgatgcagtgaaacatccggatcaatcaattggtagattagaaatactaactctagcagagaaaaatacagtgtta

SEQ ID NO: 10795 - DNA, 1770 bp, Bacillus anthracis
atgactcttaacattcaagggatcgctgcatcaagtgggattgctattgcaaaggctttcagacttgaaaatcctgaatttaacatcgaacagaaatcaattacaaacgaagctgcagaaattgcacgcttagaagctgcgcttgagaaagcaaaaactgaattagaagctattaaggaccacgcttttgctgagctaggtgctgacaaagctgcgatctttgaagcacatttattagtgttaaatgatccagaactagtaaacccagtaaaagataaagtaaatagcgaaaaagtaaatgctgaatttgcaatggatgaagttgcatcaatgtttatctctatgtttgaaaacatggataacgaatatatgaaagaacgtgctgcggacattcgtgacgtaacaaaacgtgttcttgcgcatttactaggcattaacttctcaaatcctggtacaaattctgaagaagtaatcattattgctgaagatttaacaccatctgatacagctcagttaaaccgtaagtatgcaaaaggttttactaccgatatcggcggacgtacatctcactctgcaattatggctcgctctatggaaattccagctgttgttggtacaaaagttgttattggagaaaatccaaaacggcgatatcgtaatcatcgatggtttagatggggaagtaattgttaatccatcagaagaaactcttcgctcgtttgaagaaaagaaagcgaaatttgaagagcaaaaagctgaatgggcaaaattaaaagaccaagctactgtaacaagtgatggacatcacgttgagcttgttgcaaatatcggaacactaaatgatgtacaaggtattatcgataatggcggagaaggcgttggtttataccgtacagaattcttatacatgggccgtgacaatcttccaacagaagaagagcagttcgaagcgtataaagcagttcttgaaggtgttaaaagaggttcaacctgttgttgttcgtacacttgacatcggtggagataaagagcttccatacttacatttatcaaaagaaatgaaacccttcttaagctaacgcgcgaattgcttatgtccttgatgagcaaagatgtgttccgtacacaacttcgtgcattacttcgtgctagcgtatacggtaacttaaaaaattatgttcccaaatgattgcaacttcctgaagagtttccgtccaaccaaaaagcgatcttattagaaggaaaaagcgaaactttgtagaagtggtaccaactgtttctgattctatggaagttggtatgatggttgaaaatccccgcttcagcagtattagcagatcaatttcgcaaaaagaagtgatttcttctctatccggaacaatggacttaattccataccccatggcttgccgacccattgacacaacaagtatcctaacttataccaaccatataacctatctattttacgtcttgtaaaaatgggtatcgatgctgctcataaagaaaggcaatgggctggtatgtgttgtgagatgccgggcgaatcacttgctatccccttattattaagattaagtttagatgagttcagtatgagtggcacatctattctttcctgaagaacccaactaagccagttgtccaaagccgaaaatggaaacattagcagaaaaagcattaatgatgtcaactgctgaagaagttgttgaactagttaaaagcatataattaataaaaaaacctgagtcgatttgaaatcggtctcag

SEQ ID NO: 10796 - DNA, 933 bp, Bacillus anthracis
atggaaaatataaaaaatgtacctctcgtttccatccttattcctacctataatcggccacattattttaaaattgctctagaaagtgcattagcacaaacgtattcaaatattgaaattattgtaggagacgatagcacaaataatgaaacagaaaaattaatctacagagattatttacataagcataaacatataacgtacattcgaaacccctctactttaggacaatttcataacgcccttatgcttttagaacagtcaaatggagagtacataaatttcttaatggacgatgatatattttataataataaaattgaaaaaatgatgttttatttccaaaaagacttagatcaaaatctcgcacttattacatcttatcgtacttggatcaatgatgatggagatataattgaacaacacccctccatgaaaaaattatatgatgaagatactctactaaatgggaaagattttggaaaccgtatgcttatactagggcaaaatattattggtgaacctacgactgtactctttcgaaaacgcctattaacagaacctttcggtactttaaatggtagaaattataattgtagtgtggatatggcttcttggatcagtttactttccaaaggtgatgcgatctatatcacggaacctttaagttctttccgccttcatacgggacagcaagtacatcacaaataccttgaaggttgcgaagatttttcacatctcgttttacattcaaaaaaatatggttttctacaagacattgactattacaaaacgagtctgttaaaagcttgcgaatggtataaaaatgctacaacattttatcagctatatccagaactcattccaacgaccgatacacatactcgcctttctcattgtttgaatatagttacaaaagaactccatgcaata

SEQ ID NO: 10797 - DNA, 408 bp, Bacillus anthracis
atggtgatgacagatccaattgcagacatgcttactcgcatccgtaatgcgaacatggtacgtcatgagaaattagaggttcctgcttctaaaatcaaaaaagagatcgctgaacttttaaaacgtgaaggtttcattcgtgatgtagaatacatcgaggataacaaacaaggtatccttcgtattttcctgaaatatggtgcaaacaatgaacgtgtaatcactggattaaaacgtatcagtaaacctggcttacgcgtttacgctaaagctgacgaagtaccacgtgtacttaacggattaggtatcgctcttgtttctacatctaagggagtaatgacagacaaagacgctcgtcaattacaaactggtggagaagtagtagcatactgtttggtaatatatatt

SEQ ID NO: 10798 - DNA, 219 bp, Bacillus anthracis
atgggtacggtagagaataatgtaaaaaaagagaagctccaaccaataactttaggagaaggaaaaataataaaacaatatccgcagtctggcgaagtaatgagtgaaggagatcgaatatttttattaggaaaaaacgctacaatgcccaatttacaaggttggtccatgcgtgatgtgatgtatttttctaaactattaaaattagatttaaggaaa

SEQ ID NO: 10799 - DNA, 366 bp, Bacillus anthracis
ttggccagaaactcaactaaaaatttgtcgaaatacgaaggaaaaaacagaaagaacatcttttcccttctttattgcgatttttatactgggaagaatataataaaaaacagtaaaaaggagggaattgcaattgaaaaaattgaggtttacacacaacctgattgttcgccatgtgtcattgtgaaagaatttttaaaagcatataacgttgtatatgaagaatttgacgtaaaaaaagacgccgctgcacgcaatcgtcttttatatgactatgactcttattcaactccaacagttgtaattaatggtgaagtcgtttgcttggtttctcaaattgaaaaatttccaccaacttccttatta

SEQ ID NO: 10800 - DNA, 1371 bp, Bacillus anthracis
atggctgtagaaaatattacaatgcctcagctcggggagagcgttacagagggtacaattagtaaatggctcgttaatgttggcgatcacgtaaacaaatatgatccgcttgcagaagtaatgactgataaagtaaatgctgaagtaccatcttctttcactggtattgtgaaagagttgatcgctggtgaaggtgatacgttagctgtaggtgaagtagtttgtgtgattcaagtagaaggcgcagatgaagtagcagcaacagctgttgaggaaaaaacaaaagaagaaccaaaagcagaagtaaatacgcctgaaaaagcaccgaaagcaaaacaaccaactgatggaaaacctcgtttttcaccagctgtgttaaaactttgcaggtgaacataacgttgatttagatctagtagaaggtacggggagcaaacggccgtatcactcgtaaagatattttaaagctagtggaattcaggaaatattcccgcaagcaggtgcggtgaagaaagaagaagccggtagcggcagtagtagaagcgcgtccagaagcaccaaaagcagcgccagtagcacaaaaagtagaagctgcgaaaccagtttctgtaccaacaatgcctggcgatatcgaaattccagtaacaggtgtgccgtaaagcaatcgcagcgaacatgttacgtagtaaacacgaagcgccacaccccttggatgatgatttaaagaaaaggagacaaaccttgtgtcataccgtaattccattaaaaggggttttccaaaaaagcggagggttttaacttaacgttcttttgctttcttccgtaaaagcagtagccccagccgttaaaaaaggacccctcaaattaattccatggtgggggcgggggaaaaaatcggtccaaaaaaaaaaatttaacctttcatatgccgttgggaaggaggacgaactatttggtccccgtattaaacccccgggacgagaaagcaaattaaggggtcgcgtcgggaaattacagaacttgcaggaaaagtacgtacgaaatcgttaaaagcggacgaaatgcaaggcggaacatttacaattaataacacaggatcattcggttctgttcaatctatgggtattattaattacccacaagcggctattttacaagttgaatcaattgtaaaacgtccagtaattatggaaaatggtatgttcggtgctcgcgacatggttaacttatgtttatcactcgatcaccgtgtactagatgggttaatttgtggtaaaagtcttaggacgtgtaaaagaaattttagaaaatacgtcagaaaataatacatctgtatattaaataaaaagctcgcttatgcgagctttttat

SEQ ID NO: 10801 - DNA, 876 bp, Bacillus anthracis
atgaaggatatcgcaacgccaaatcgtacgaaagacattgttgaaaagtatggattttcattcaaaaaaagtttaggacaaaattttttaattgatacgaatgtattaaatcgtatcgttgatcacgctgaaattggttcagaaagtggtgcaattgaaattggaccaggtatcggtgcattaacagaacaattagcgaagcgtgccaaaaaagtagtggcttttgaaattgatcaaaggctattaccaattttagatgagacgttagctccatatggaaacgttacagttatcaataaagatgtactaaaggcagatgtacatgaggtgtttagtgagcaatttgaagaaggacaagatgtaatggtagtagctaacttaccatactatattacaacgccaattttatttaaattgctggaagagaaattaccggttcgtggattcgttgttatgatgcaaaaagaagttggggatcgtttagcggctaagcctggaacgaaagagtacggttctttatccattgctattcagtattatacagaggtagaaacagttatgactgtaccgcgtacagtgtttgtgccacaaccaaatgttgattctgcaattattcgcctcctaaagcgtccgaaaccagtagtagaagtaacagatgagacattcttctttgaagtagtacgagcaagttttgcacaacgccgtaaaactttaatgaataatttatcaaataatttaaatggtttcccgaaagataaagagctgttggatcgaattttaacagaagtaggaattgatccaaaacgaagaggcgaaacgctatctatcgaagagtttgcgacattaagtaatgcattagttcttcataagttatca

SEQ ID NO: 10802 - DNA, 1401 bp, Bacillus anthracis
gtgaagtcattattacgaaaaaaagcgcttagtactgaatcaccacggcaactacaaagaacattaaccgcacttgatttaacgtttttaggaattggcgccgtaattgggacagggatatttgtattaacaggtattgttgcagcgaaacattctggtcctggtattatgctatcatttcttattgctgcatttacttgtgcttgtgtagccttttgttatgccgaatttgcttcttctattcctgtctcaggcagtgtgtatacttacgcatacatgacagtcggagaagtcgtcgccttcatcgttggatggtgtttaatgctcgaatatttacttgcagtcgcagcagtagctgtcggttggtctggttatttacaatctttactacaaggatttaacatccatctgcccgccataatcgcctcggcccctggcgtaggaaaaggtggtctcattgatttaccagctgtttgtattttactcatcattaccgttcttttaagttttggtatacgtgaaagcgcacgcattaataatattatggttcttattaaattggccgttattatcgcctttatcgtagcaggcgcaaaatatgtaaaacctgaaaattggacaccgttcattccattcggatacgacggtattattactggagctgccactgtattcttcgccttcttaggctttgatgcaatcgcaactgctgcggaagaaacgaaaaaaccacagcgcgatttaccaatcggcattatcggttcccttcttatttgtactgttttatatatgatcgtatctttcgttttaacaggtatggttccttatacacaattagatgtttctgatccagttgcgtttgccttacatttcgttggtgaagatacaattgcaggactactcgctgttggagcgatgactggaatgacaaccgttctcttagtcgttatgtatggacaagttcgcgtttcatatgcgatgagccgcgacggtttacttccaaaagcgttagcacgtgtaaataaaagagtgaaaatccctttattaaatacgtggattactggtgttgttgccgctttattagcaggacttttagacctgcacgtattagcgaatttagtaaacatcggtacattaacagcctttacattcgtttgctgcgcagtacttattttacgaaaaacacaccctgacttaaaacgcggattccgcacacctttcgtacctgtactaccagttgtcgcgattctttgctgcttatatttaatgatcaatttgtctaaaacaacatggattagctttgccatttggcttatagtcggattatgcttctatttcttctattctagaaagcatagccatttagctaccgaaaaaacgaatgatgaacagaaaaaagca

SEQ ID NO: 10803 - DNA, 1107 bp, Bacillus anthracis
atgaaaattacagctattcacctttacgcaattcgtttaccgcttcgcgatccgtttgttattagttatggttcttattctgatatgccttctattatcgtcaaaatggaaacagacgaaggtattatcggttacggtgaaggcgttgctgatgatcacgtcacaggtgaatcatgggaaagtactttccatattttaaagcatacgctagcacctgcactaatcggacaaaatccaatgaatatagaaaaaatacacgatatgatggacaatacaatttacggtgttccaacagcgaaagctgcgattgatattgcttgttttgatataatgggtaaaaaattaaatcaacctgtatatcaattaattggtggacgataccatgaagaatttcctatcactcacgtattaagtatcgcagatccagaagaaatggccgaagaagctgcctctatgattcagaaaggttaccaatctttcaaaatgaaagtcggtacaaatgtaaaagaagatgtaaaacgaattgaagcagtacgtgagcgtgtaggaaatgacatcgcaattcgtgttgatgtaaaccaaggttggaaaaatagcgccaacacattaatggcacttcgttcattaggacatttaaacatcgactggattgaacagcctgtcatcgcagacgatattgacgcaatggctcacattcgttcgaaaacagaccttccgcttatgattgatgaaggattaaagggctctcgtgaaatgcgccaaattattaatttagacgcggctgataaagtaaacataaaactaatgaaatgcggcggcatatacccagctgtaaaacttgctcatcaagctgaaatggcaggcattgaatgccaagttggatccatggtcgaatcatccgttgcctcttccgcgggattccatgtcgctttttcgaaaaaaattattacgagcgttgaacttacaggtccattaaaattcacgaaggacatcggaaacttacattacgacgtaccatttattcgcttaaacgaaaagccaggactcggcattgaaataaatgaagatacactacgagaactcaccgtctttcaagacattgtacgc

SEQ ID NO: 10804 - DNA, 1296 bp, Bacillus anthracis
aaacgcgttattgtgaagaaacctgaactgttaatccctgcgggtaacttagaaaaattaaaagtagctatccattacgggggcagatgctgtatatttaggtggacaagaatttggttctttgtttcgaatccgggtaattttccccttggaagaaaatggcagaagggtgtgaatttcgcaaagaaaatagggagcgaaaattatatgtaccaccaaatttcttggcgcataatgaaaatagggcggggctagagggaatatttaaaagggattgaaaaagctgcgtaacggggaattatcgttgctgatccgctaattattgagacttgtaaacgtgtagcaccttctgttgaggtgcatttaagtacacaacaatcactatccaactggaaagcagcacagtattggaaagaagaaggtttacatcgtcttgtattagctcgtgaagcaagctatgaagaaatgaaagaaattaaagaaaaagtgggatattgagatgaaagcattcgtccatggtgcaatgtgtatcgcatattcaggaagatgtacgttaagtaaccatatgacagcggcgtattcctacccgtggtggtgtttgtcaatctcgccgctggacttatgatttagtcaaaacagtatcacaacataaagatgcaaaagagcttcctctattccaagaagaagatgctcactccgcgatgagtccaaaagacttaaattttaattttatcaattccgaaaatgattgaaattggaattgatagcttaaaagttgaaggacgtatgaaatcaatccattacgtagcgactgtagcgacagtataccgtaaagtaattgatgcatattgtgcggatcctgataacttttgagtttaagcaagaatgcttagatgagcttgataaatgtgcaaatcgtgatacagctcctgcattctttgaaggggttccaggacatcaagagcaaatggtttggaaatcatattacgaaaacaacgtatgatttcgctggtttagtgttagattataatgaagaaacgggcatcgtaacgattgagcaacgtaatcatttcaaatccaggacatgaggtgggagttctttggaccagaaatagaaaactttacgcagacggtggaggaaaattggggatgaggatggaaacggattagatgcggcgagacatccgttgcagatcgtgaaattcaaggtggatcagggtatgtgtagtgaataatatgatgcgcaaaagcatacttcaataagaaagagtgatagtcgaatgggggacgaataag

SEQ ID NO: 10805 - DNA, 624 bp, Bacillus anthracis
atgccagcggaagtgtttgggccagattatgcttttttgaaagatgagtttttactgacgtttgatgaaattgagcgtgtagcaaaactatttgttagcatcggtgtacgaaaaattagacttactggtggcgagccactacttcgtaaagatttagcaaaacttattgcacgtctcgtgaaaattgacgggctattagatatagggttaacgaccaatgcaattcatttaacaaagcaagcgaaagtattaaaagaagctggattacatagagtaaatgttagcttggatgcaatagatgatgatgtatttaaggctattaatggccggaatattaatacgaaacctgttataaaggggattatggctgcaaaagaagccggacttgatgtaaaggtaaacatggttgtgaaaaaagggatgaacgatcatcaagtacttccgatggctgcgtattttaaagagcaaggaatcccacttaggttcattgagtttatggatgttggtagtacaaatggatggaactttgatcaagttgttacgaagcgagagttaattgagatgattcatcgcgtgtatccgcttgagccagctgaagcgcattattttggtgaagttgcgaag

SEQ ID NO: 10806 - DNA, 213 bp, Bacillus anthracis
ttgtatgcctgtgtagcgtttattggaaataaagcaggcctttatcaagttaatgtagaagctgcgacgatagaacaaaaaattgtacagcagcaaaaagaaaatcaagagttacaggctgaagtagagaagttaagtcgttatgaacgaatcgctgaagttgcaaaaaaacacgggctagaaattaatgcaaataatgtgaaaggcctcaaa

SEQ ID NO: 10807 - DNA, 1025 bp, Bacillus anthracis
atggcatttgaaggattagccggcccgattttcaacagggggatgcaaaaaatccggggccaaaggaaaaagttttttgaagcggatgtgaaaggaatgtatgagaaggggttggttctagctcttttaagaagcggcccgtacctttaaagtaagtaaaagattttgttaagcgttgtgtcctaaacgtgttgtcggacaagatgtaatgaaaagtttgacacctggacaacaagtaattaaagttgtacaggaagaacttacagaacttatgggcggagagcaaagcaaaattgctattgctaataagccaccgactgttattatgatggttggtctgcaaggtgcaggtaaaacaacgacgacaggtaaactggcgaatttgcttcgtaaaaagcataatcgtaaaccgatgcttgttgcagcggatatttaccgtcctgcagcgattaaacagcttgaaacattagggaagcaattggacatgcctgtattgctatttaggagatcaagtaagtcctgttgaaattgcgaaacaagcgattgcaaaagcgaaagaagatcatcatgattatgttttaattgatacagcaggtcacctgcatattgatgaagaactaatggatgaattagcgaaagtgaaagaagttgcgaaaccggatgaaattttccttgttgtcgatgcgatgacaggacaagacgcggtaaatgttgcacaaagtttccatgaacagttaggtttaacaggggttgtattaacgaaattagatggtgatacgcgcggtggtgctgcattatctattaaagctgttacaaatacgccaattaaatttgctggtatgggtgaaaaactagatgcacttgaagcgttccatccagaacgtatggcatcccgtattttagggatgggagacgtcttaacattaattgaaaaagcgcaagctacagttgatgaagagaaagcaaaagaacttgagcaaaaaatgcgtacgctttcgttaacgcttgacgatttcctgacccct

SEQ ID NO: 10808 - DNA, 336 bp, Bacillus anthracis
cttataaaaagttttggatatgctatagttggtatattcttttgtcttcgtcatgaacgaaatatgaaaattcattatttagccgcagtcattgttttatgctgcggcttttatttccatattacgaaagtagagtggatgatattacttattgtaataggaattgtaatgagtttagagatggtaaatacggctgtgggaaaaaacagtagatttagcgactactgatatacatccatttgcgaaagttgccaaaggatgttgcaccggggacgcggtttattgtttgcgatataagccggtataattggtgctattatcttcctaaccgaatgg

SEQ ID NO: 10809 - DNA, 2067 bp, Bacillus anthracis
atgaaggaacaatatagtaatcaaaatacctttttaagtatgatagatatggatttaataagaagaggattattacatgctattcaagatttagtatttattgtgaaagttattgatgatgaaacatttaaatatatttatgtaaataaattaggtatggattatgcgaagctaagtgaagaatgttatggaaaaacttttgcagaagtattaccggaagatacggcggaaatattgcaagtgcaatatgcaaaagtagcgagcgaagcgaaagcacataccttttgtgatgtagttagtttaccaaagggtgagctacattatgaatcttcactgaatcctgtatttgacgaagaaggagtatgtcagtttattatttgtattacaagggatatcacagctcaaatagaggagaagatggagatagaggaaaaacaaatgctgtttaagtcattactagaatataataatgactccatcatatctatagattctataggaagaattacatatgcaaatccagcaacgtatgaaatatttggataccgatttgaagaattaaataataagtttatttttgaatttattaataaagaatatgaaaaagattttcaaattatatttaaagaagccatgcaaggaagagcaaagcaaattgtttcaaagaaatatgttcataaagaagggtacgagctctatatttccttgagaactatcccgattattgtaaatggtgaaattgttggagtatatattgttacaagggatgttacaaagcaagtattaaatgaaatgagaacggaatatttagcttattatgatcagctaacaggattaatgaatagaatttcatgtacaaataagttaaatgattttttaaatgagaaggtagcttttgcgtttatctttatagatttagatgaatttcaccttattaatgatacgtttggtcataaagaaggagataaagtgttacaaaaagttacagaatgtttaagcagttttcaaatacccgatatgcacttatttagagaacacgatgatcaatttgttatgttaatagaaaatataacgaaagaacgtgtagaagtatttgcaaaaagcatacaaaaaaagattagtgaacattttgtaatcgaagaagaggacgtgtatttaagtgcgtcaattggaattgtaatggccccaacagatggagaagatgaaaaaatattatttcaaagagttgatgctgctttggaaaaagcaaaagaaaaaggaaaagggcattatcatttttatggcaatggattagattgtgagcgtgaaaaaagatttataatagaaaaccaattacatcgtgctatagaaaaaaatgaattcttcttatattatcagccgcaaatgaatattgaaacgaaaaaaatagctagtatggaggccttaataaggtgggagaataaagaattaggatttgtctctcccaatcaatttattccgctagcagaaagaacaggatttattattaagcttgatgaatgggtaataaatgaagtgtgtcggcaaatacgtgaatggttaaataaaggatatgaagttgtcccgattgcagttaatatttcagccaggcattttcgctctattacattaatagagatgattacacgagctttacataagtataatgtatcagctcatttattagcaatagaggttacagaaggagcacttatacataaagatatatcgaaaagagtattgctacaattaaaagaacaaaatttaaagattcatttagatgattttgggacagggtattcatctttaagttatttaaaaacgtatccaattgatactttgaagattgatcgttcttttatggaaggtatacatgtagatgaacgagatacgaatattacggctgcaattattcatttagctcatacgttagaattagatgtaattgcagaaggggtagaaaaggcggaacaaatacaatttttgaaggaaaagaatgtgaagtttgtacaaggttattattatagccgccctttatcaaaatatgatgtggaaaatgtgtattataaa

SEQ ID NO: 10810 - DNA, 1062 bp, Borrelia burgdorferi
ttgattttgaaaagaaaggttatgcttacgggagataggcctactggcgctcttcatttggggcactatgtggggtctgtagtaaatcggttaaaatttcaagaagagtatgaaacatattttattatagccgatttacatactttgactacaaagcctgacttgaagagcatcaatacaataccttctaatgttagagaaatggttttagattatcttgcttgtggaattaatcctgataaggttagtatatatctgcaatcagccatacccgagctttttgagcttcatttaatattttcaatgattgttactgttgcgcgcttgcaaaggattccaagtataaaagacatgagcattgcagctggacttaaagagattccttatggccttttggggtatcctgttcttatgagtgcagatattttaatgacaaaagcaaatttagttcccgttgggcgtgataatgaatctcatattgaatttgcaagagagcttgcacgaaggtttaaccatttgtacaaaaataattttttcccaatacccgaatctgttttcacagattctcgtcctttggtgggtatttatggcaaaaataaaatgagcaagagccttgataatgcaatttttttaaacgacgatgaaaatttattagaaaaaaaaattatgtctatgtatacagatccaaataggataagggcagatattcctggcaatgttgaaggtaatcccatttttatttatcacagtttttttaatagtaatcatgaagaagttgaggatcttaaaagtaggtataagaagggtaaagtaggtgatgttgaggttaagaaaaaattgtttttagctttgaatagttttttaaagccaataagagataaaagaagtttttatgaagccaaaaaaaaagattacattgatgaaattatttttgatggtacaagcaaggcgaggtttattgcaaataaagtagtaaaagatgttaaggatttaatagggctttcaaaaacttggaatggaataaaatatagcgctgagaaaaaattaaaaaatgaagaatga

SEQ ID NO: 10811 - DNA, 375 bp, Borrelia burgdorferi
atgaagtcaataggatgtgatataataaaagtagaaagatttaaaaattttttagaaaataagaaaaaaatggagaggttctttacacataaagaaattgaaaattttaaattaaaagggggtagcattatagaaagtttagctggaaaatttgcagctaaagaatctttaattaaagcattaagtccactgttgcaatataaaataaattatacccttaaagatattgaggtaataaaatctttaaaaggaaatgcggagttttgtttgcataatgaagttgaaaaatttgcaataaaaatgaatttaaagctatacctaacaatatcccatgaaaaggagtacgctattgcatttgtaatagtagaaaattaa

SEQ ID NO: 10812 - DNA, 648 bp, Borrelia burgdorferi
atggtcttaatgaaaaccaaagagtttcattttaatttatcccattctttaatagagcaatatccaagtgaaaaaagaggatcttcaaggttaatcgtgctagatcctcaattgcaaaaaatttaccataaaaattctgtaaacaatattttaaaatatataaatagtaatatttttaataactcaaaagctagaaaatcaagaatatatgcagaatcagagatgagcagtaatgttgaatttttaattttggatagaattgacactaatttattcactgcgttagtttctaagtcaaaaaagcaaattattggcaatttttacaaattccccgaaggattaatggatgaaattttgtcaaaaaatagtagtgaggttgttttaaaatttaacaataatgttggtgaagattattttgaaaaacattgttttgtgcctttgccctcttacattaaaagagattatgataagatagatgaagatcgatatcaaactatttattctaaatatgttggatctacagcttctgcaactgcagggttacattttagcagagatttgttttctgcctttgaaaataacaatattgaatatgattttatcactcttcatgtgggggcttgggacttttcttcctgtaagatctaa

SEQ ID NO: 10813 - DNA, 1473 bp, Borrelia burgdorferi
atgaaagaggttgacgagaattcaaatgttgagctttttgaagttaaattaaagccaatcctaggaatagagcctaaggtttacgtatttcttacaacaataatattgcttttaagtttaatatcaactttaataatcatacctaaatttaaaaatccaggagcatatttaaaaataaattccaatattgaaaacacttacatatatttaaacgaaaaatatatcggtagaaccccacttaacaaatatataaatgccaccgaaggagttcttagagcaaagagaatgggatttaaaacttacgaacaaaggataaaaattcacaacaaattttttggaaactacagtttgcaaataaatttagaactggttgatcctgaaaagatcattaaacaaagacaaaaagagctctctataatggtgaaaataaaaaatattaatgaaaatacaaaactaattcctgttttttcattaatatctagcgaacttaaagaacatcccaaatacattaaaaaatttctaaaagattctataccttacttaaattcaaccgaaatgtttaaagattttctaaattcatataaagctatatattcaatagaccaagacaacagcaatcaagaagaaatatggaactctttaaaaacaaattttgatttagaaaatagagccatcttttggtttttagaaaatttagataaagatttaaaaatactaacaaaaaatgcgccttgggttaaaacattagccaaaactctagacaatgaaaatattcaattaatttctaaaaatgaaaaaatcaatataaaattacctggatttaaaaaaataaattcaaataaaatcgaaaaaattcaaaattatgaattaaattcattagattcaaaaaacatttcactaaaatctacctataacgtaaaagaatttcttattcaagaacaaaatgttacaaaatacgagtatcaagattttttaaaagaaaatccaaaatgggcattaaataataaagaaaatttaattaaagaacaacttgtagatgaaaattatcttaaaaattttaatcaaataggcttaaatgaagccatcactggaatatcttatttctcagcaatagaatacgccaactggtactctaaaaaacttcccacagggttcaaagcaagactgcctatatcacaagaatgggaattgtaccaaaaagaaccaaacaaaaacccattaaatattaatgaaatatcaaaaaaagttggattttggaatttaatgcaaaattcatcttttaatgaaatcgcaatatttaaaaatgaaaaaaatttttatagcgaaaattcaaatttttactcattgataacagaaattagaacatattcccagcaaaataataatttactcaatgcatcaaccaaagcctcttttttgaaaaactggagttctccaaacattggctttaggttgattgtatcaaaggaataa

SEQ ID NO: 10814 - DNA, 453 bp, Borrelia burgdorferi
ttgaacacaaacaatttgcttcttgaaaacaaaaaagcaaaatttaattactttattgaagagaaaataagttgtggaatagtgctaaaaggaactgaggtaaaatcaataaaggcaaaaaaattatcatttaacaatagctttgcaagcataaaaaaagaagaattgtggcttgaaaacttgcacgtatcaaaatataaagaaggtaatatcttcaatcatgatgaattaaggcccagaaaacttttaatcaaaaaaagagaattgcaaagactaaaaaaatttaaagaaaaagagggatatactttaattcctattagtttttatttaaaaaaatcaataattaaagtagaagttggaatatgtaaaggaaaaaagttgtatgataaaagagaaatattaaagcaaaaaagcataaaaaaagatcttagtagagaaataaaatacaagtaa

SEQ ID NO: 10815 - DNA, 753 bp, Borrelia burgdorferi
atgataatagtttttatgaaaatattgagaagtattataacttattttaatgttttattgttttttttgattttaattttttttttatttcctttttacctggtttgtaaaatttttttaattgaacgttatgttgttaggcttagtttcattatgatgcgagcttgcattaaaattagcttatggcttgctggaattaaaattattgttacgggttctgaaaatattcctaaaaaaagcaatgtaataataatgggaaatcatattgcggctatggatcctttaatttttatttatacttttgcctgcccatttgtaatattggcaaaacattcgttgcttaggattccttttgtgaatattgttttgattgttatgggtgttatttttgttaatagaaggagcataagatctgctgctgctgctgaggttaaggcaataaaggttatgagagaaggtagatctattggaattttccccgaaggaactagaaatagagggggggatactagagtttttaaaaaaggttcaattaagatggcattaaaaacaggaacatcaattcttcctgttactctttataatactaataacttttttattaaaaatattatttttaattctggactgtctgtttatattcatgtccatcctttgatagatgttttaaaattaagtgagtatgaaaaagagaatctcactagtattattagagatcaaatagttaaaaagcttgaaactattaaaatttaa

SEQ ID NO: 10816 - DNA, 2460 bp, Borrelia burgdorferi
ttgggagttagtttggttttaaaaaaaatagtgcttttagggtttaaatcttttctaaatagacaagagtttgaaataggtgaaaatttaagttttattgtggggcctaatggatgtgggaagagcaatcttattgatgctgtacgtttttgtatgggagaagataatttaaaatttttaagggttgaagatatttctgatttaatttctgtttcaaaatcaggaaaatcaaattttgccgaaataactcttttttttagcaacattaactctgaaaaatcgactttaaaggaatttaatgaagatttttatattcgcaggcgtctttataaggatggttcaagtgaatattattttaataataaaattttgaattttcaagattataatagacttttgaacagttttaagtttaaaaaatcgccttatatgtttataactcaaggtagggttgaggacatttctttggaaagaaatgtaaatctcaaatctttgattgaacaagcaagcggaatagatattttaaaaatggaagaagaagaggccttgaaaaattttaagcaatctagtcaaaatttatcatctttgttgtctctgcaagaaaatttaaggcaaaagtacgataacataaaaaatgttttccttttgagaaaaaaacatcaagatttaagtcaaaaattagaagctttagaaaaaacaataacgttaaaaaagcttttcaatattaattttgatcttaatgtcttgaagagcgaattaaatttagacggtttgagtaaatttttgtcttctggttttaaagaaaagttagaattttattcatttagagaaaaaaatgttattaataatattcaagaattagaaaaagatcttgagcttatgaagtctaaaattcttgggctagagattaaaattcaaaaattagagcaagaaaagacgttaaagatgaatttggaagataagtttgtcaagagcaaatctgagtctgaagagaaaaagaattctataaataataatttatatcaattaaatagtttgcttaaagaaaagaaaaatgattttttttctttaagtgacgagattaataggtatactaaaagtttttttgaacttgttgatctaattttgtctgtattaaggagtgccaaatcagaagagtttgttttattaaaagagcatatattagactctcttaaactttttgaagaatcattgagtataaaatatattaaagagattagggtaaatttaatcaagtatataagcaaagatgagaatcttttggctttattgagggataaaattgaacctatttttgatcaaaatgttaatttgaaaaaatttttgcttgaaaaaaatgctttaaaatcaaatcttgctaaagagataacaaatatcgagagattaatcgaagaaaagactcttcaattaaatgatgtattgggtgagcttgagtatatagagctttctaagtttaaaaatttggatgaaattaaacttatagatggtaatttagaatttttatttgaatctaagaatagccttgatgaagagcttaaagacttatatttaaagcttgaaaatttaaatttagaaaaaagcgatattcagcttaatttaagcaatcttattggtgcttcaaaattcagtagtgagtcttttaaggagaaagattttaattccttagtttttttgaatgattttaaaaaaactaattattatgaatatataaaaaaacagacagaatacgaatttcttttaaattctaatgtaagcattaagagcgaaatagaaaatttcaatgtttctaatgaaatgtctgataaatttgaattggaagaagatcttgcaaccagagagttgttgcgcaaagagatagatgcaatcaagctgggtgattatgtatttttcaatattgataaagagtttgatgaaactaaggagcgttttgaaaaagtaagtttacaagtagaagatttaaagctttcaaaatattcattacaaaagcttcaaaaaaaaataaaaaatgagatttataaaaaatttagagaatcatttgatgagattaataaaaatttttctttcttttttaaaaaaatttttaaaggaaccgctagtcttttttataatgaaaataccgataatgttgagattagaataaatttttcaaacaagtttgtcaaaaacaataacatgctttcagggggcgagagtactttggttagtatggcttttttatttgcactttattattattctcctgcttgtttttgcatgcttgatgaaatagatgcagctcttgattttgaaaatagcaaaaaactttctttacttttaagagaattgggtaaaaagttccaactcttagtaataacccataatgcatatgtttctgagggtggtgaaaatttgataggtattacacttgataatggtgaaagcagggtgtttaatatataa

SEQ ID NO: 10817 - DNA, 546 bp, Borrelia burgdorferi
atgatttgcggaatagatgaagtcggaaggggttgtatttttggacctattctaagtgctgctgtggttttcaaaaaaaagcccagctttataaaagaattggatgattctaaaaaactaaaaaaagaaaaaagagagtacctatcctcattaatacttgaaaactcatattatgcatttgctgaaatttcaaatataacaatagaaaaaataaatattcacaacgcatcccttcttgcaatgcaaactgcatacgaaaacctaaaattaaattgcagcttagtacttgtagatggcaaatttgtacccaaaataacagcaaaaaatgttaaagcaataattaaaggagattcaataatagatgaaataaaagctgcttcaattattgctaaagttaaaagagacaaactaatggataaatatgataaaatttacccattgtatttactcaaaaaaaataaaggataccccacaaaagaacataaaaacgcaataaagaaatatggggtcttaagccttcatagaaaaaattttaaactaatttaa

SEQ ID NO: 10818 - DNA, 675 bp, Borrelia burgdorferi
atgtttaatgaatttttatggtttggcgtgctatttaccacttattcatttttgattattgtatccattttttttaaaaaaaacggattatttgcatgggttgcagtagcaattattatagcaaacattcaagttttaaaacaaattacaatatttggaattaatgctacattgggcaacattatttatacatcatcatacattgcaacagacatgctctcagaattttatggagaaaaaacttcaaaaaaagccgtttatattggatttatcagctttattatctttgcagtattaacaaatgcgcaaattcactttatgtcaaataggactcaagaaaattttaaaagtttaggaaacattttctcttcaatgccagctttactactagcctctcttgttgcatacctaatatcccaattaaacgatgtttatctatatcagcttattaaaaaaaaatttcctaggtttttatttttcagaaccaatggatcaacattaataagtggcttaatagatacaacaatttttgtaggcatagcaacatatttcaaagtatttccaaaacaagctttcctaaatatagtaattttcacatacgtaattaaagctgtagcaggtgtcttgggaacgcctttcatatattttgcaaaatatataaaacttgaaaaatga

SEQ ID NO: 10819 - DNA, 1182 bp, Borrelia burgdorferi
atgtcaataaaaacagtaaaagactttagtagctttgcgggcaagcgagctttagtaagatgtgattttaatgttcccctaaaagaggggagcattagcgatgatactagaattagggcagcattgtctacaatagagtatctaaaagaaagaggagctaggattgtgcttgtaagtcatttgggtagaccagatggaaagaaaaatcctaaatattctcttaagccggttgccaataggttgtcagagcttttaggccaagatgtcaagatgctttctgattgtattggaagtgaggttgtaaatagtaccttgcaaatgaaggatggggatgttgtattgcttgaaaatgtaaggttttatgcagaagaagagaaaaacgataaaaattttgcaaaaaaactttctgaaaatggagatgtttttgtaaatgatgcttttggcgcagctcatagagctcatgcttcaactgtgggagttgctgattatttgccgtctgttggtggatttttaatggaaaaagaagataaatttcttggtggaatattaaaaaatcccgaaaggccatttgtttcaattattggtggttctaaggtttcttcaaagattgcggtactagaatcacttttgtcaaagtctaatgtagttgtgattggcggtggaatggcttatacttttttgcattccgaaggatattctataggcaaatctcttttagaggacgaatatattggtatagcatcttcttttttaaagaaagcaaaagagctgggcgttaaagtaattttaccacttgatcatattgtagctgatgattttaacaaaaattcaattcctgagtatattgactcctttaatattcctgaaaacaagattggcatggatattggagctaatactttaaaagaaattgaaaatgttgtgaaaactgccaaaactataatttggaatggtcctcttggtgtatttgaatttgattcattttcaaaagggactgctaaggttgccgaaatggtagcatcttgctcaggtttaaccgttgttggtggtggagattctgttgcagctgttaataaatttaatttatctgataagattactcatgtttcaacgggcggtggtgcatcgcttgaatatcttgaagggagaattttgccgggtattaaggttttggagaattaa

SEQ ID NO: 10820 - DNA, 1008 bp, Borrelia burgdorferi
atgaaattggctattaatggctttgggcgtattggtagaaatgtttttaagattgcttttgaaagaggaattgatattgtcgcaataaatgatttaacagatcctaaaactcttgcacatcttttaaagtatgattcgacttttggagtatataataaaaaagttgagtcaagagatggtgccattgttgtggatggaagagaaataaaaattattgctgagagagacccaaaaaatcttccttgggcaaagcttggaattgatgttgtaattgagtcaacaggtgttttttcatcagcaactagtgataaagggggatatcttgatcatgtgaatcatgctggggctaagaaagttattttaacagttcctgctaaagacgagattaaaacaatagttcttggtgtaaatgatcacgatattaattctgatttaaaggctgtgtcaaatgcttcatgtacaaccaattgcttggctcctcttgcaaaagtacttcatgaatcatttggaattgaacaaggacttatgacaacagttcatgcttatactaatgatcaaagaattttggatcttcctcattctgatcttagacgggcaagagctgctgcactttctattattccaacttcaaccggtgctgcaaaagcagttggacttgttttgcccgaacttaagggtaagttgaatggtacttcaatgagggtgcctgtgccaacaggttcaatagttgaccttacagttcaacttaagaaaaaggatgttacaaaagaagagattaattctgtgctcaggaaggcatcagaaacgcctgagcttaaaggtattttggggtacacggaagatccaattgtatcttcagatataaaggggaattctcattcttctattgttgatggtcttgagacaatggttcttgaaaatggatttgcaaagatattgtcatggtatgacaatgagtttggatattctacaagagtggttgatcttgctcaaaaattggtaaaataa

SEQ ID NO: 10821 - DNA, 780 bp, Borrelia burgdorferi
atgttgggattttttaattttaaaaacaaaaagaagaaaaaaggaagcccagaaaatgatcttgaagataagtcgaatattgaaacttctttgataaaaaacttcaatgcgcttaaagagactgttgtaaaagagattatgattcctaggataggagttatatttgttgattatgctaagagcaaggacgagcttttaaaagttgtaacatctagcagtcattcaagatttcctgtgtatcatggtaccattgacaatattgttgggataattcatacaagagacatactattacatatgtgtaaaaaagatttctacgaaatagacttaaaagatattatgcgaaaggtcatgtttgtccccgaaagcaaaaaaacagactctcttttaaaagaatttcaagaaaatcatgttcatattgcaattgtggttgatgagtatggtggggtttcggggcttgtaactcttgaagatattcttgaagagatagtaggtgacattcaagatgaatttgacaatgagcttgatgaaatagttcgtcttgatgatggatcttatctttgtgatgcaagaattttaatagaggatttaaatgagaaacttaatttaaatttgccaaatggagactttgatactcttggcggtttcgtttatgatctttttgggaggattcctttgaaaaatgaaaaggtggaatataacaatttggttttttcgattaaaaatatgcatcaaagaaatattaaggtgataaagatttccgagaaggaaggtttatga

SEQ ID NO: 10822 - DNA, 882 bp, Borrelia burgdorferi
atgaaaaatattaaagcggttgcctctgatcttgatggcactcttttactatcaaaaagctatattggagcctttacagaacttgtaattaaaaaattaacaaaagaaaaaaagaaattcataatagcaacaggaagaagtaaaaatgaaatcattcaaattataaaaaaaacagatcaactgcaagtttcatttttcattacattaaacggagcaaaagtttacaatcaagaatggaaattaataaaaagtcataatttatctgctgaagtggtaaagaagattttaaatttaagagacgagaaatttagtcacatacctcattttttacataaagcagatcaaaacgacgaccaattaaatattgacatcaagactaaaattgcaattgatcaatgtaaaaaattgcaaaaagaatccaatgtcttcagacatgaaataatcagcccaatcaataaaattcaagaaattaaagactttaacgagcttaaaaattttgaaaatgttgcaaaaataatactagctggcggagaagaaagcctaatagaatatgaagcaatgattttagagaaatataaaggagaaataaatgcatacctttctaccccaaattcactagaaattgtagatcataaagtctccaaaggtaatgcattaaaagaagttcttaaaactataaatattaatttaagcgaaaccatagcttttggagatggctttaatgatactgatatgctagaaaatgttaaaaagggattactaatgggaaatgcaaattatagattaaaagcaatgcttccttacttagaagtaataggaacaaatgatgaagaagctgttgcaaactacattaatgagaatgtcttagaagaacctatttag

SEQ ID NO: 10823 - DNA, 1473 bp, Borrelia burgdorferi
atggtgcgttttttaggttttttatatttaattacaacaataccacttatcaaatcctgtgatgcagctcaatttggagactacaaacctttatactttgaaaatgaaaatgatctaaaaactgccaatgaatatataaattcactaggatacaaaacaatctcagaatacacaacaaaaattgacattttagactttcccgaaaataaagaaatcacaataaatgagataaacaaacttaacaatcttgacctgagaaaaagcatatttttaaaaaagctctccaatcttttcaacatagagcacaaaaaacttctttatgttgaaaacaggtttaaaagtataaattttaaaaacctaaaaaaagaactcaatattaatgccgacatacattctcttgactacaaaacaaaaattaattttatttcaagcataatatttctaatcataataattttattaatttttttagacccaacaaactctatatttactttaatttttctattaatttcatctcttgcttttatgataagcaaagaaataatgtatttttatccatttacagttctctcttatttgttatttttaataatcagtaattttaacaaaaattacaataaaatatatttaaaagaaataaattttttaacactaatgacaaaaataaaacacttactatttttatttacattcacagctctatatttcattacaatcacaaccttttttactacaaatattgatcccacttttattgcatttgtcgcaataccaaccctttgcattttcttaattttcagctggataaaaacagaaagcaattttaaagacactttcttattcccaatcgagattaaagagaaaaaaatagaaggaaaaaaagctttaaaatcaaaaatagcaatacatctactactatttacactctcattaattcctttcgcttattcaagctatatgctaaattcttatgaaaacattaactacctttacagtaaaaaattaaattactttgattatttaaatcctaataacatttatataatgctgggatacaacaaagacatgcccaatattatagggtacctatcccacattctttatcaaaacgaactaaaatacaatattaccgctaagtatggaaaaattcctaaagatataaaagaaaattactttgaaatcaaaaacgacaaaatagaaattcatcctaaaactgtttacgaagtagacaaatcatttattgatgaaattcttaaaaaagatcttgcaagtctgtttttaaaaaataaaaatccaatcctaatatataaagaaaacaagaataatatcaacacagataaaaaaaattacaaaatacttttctttttctctttgcccttctttgtattactattcctatttaaagcaataagatttacaattcttttaaacataaatgaaaaaacctataaaaaatatattcaaggataa

SEQ ID NO: 10824 - DNA, 1047 bp, Borrelia burgdorferi
atgccgaagacatttggaggaagctttgacaaaaatgaaattcaagctaaaatcgaaaaatatgaaaaagaaataaaccagaaaaatttttggaatgatcctaaaagagctcaaaaagtaattaaggctcaaagtattttaaaaaataaaattgatccgtgggaagagctaataaataaaataaaagacttaagcgatttgtgcgaaattgccgaaaatgaaaaagatactaacggcttggaaattgaatttaatacgcttgaaaaacaatacaaagatttactcacaatttcttactttaaagaagagcttgacgcaaacaatgcttttttaactattcattctggggctgggggcactgaagcatgtgactgggtcgcaatgctttacagaatgtattcaagatacgctgagagaaaaaaatacaaaacagaacttattgatttactcgaagcagaaggtggaataaaatctgttacaatagaaatcaaaggtgagtatgcttatgggctattgaaaagtgaagttggaatacatcgtcttataagaatttctccttttgatgctgctaaaaaaaggcatacctcttttgcatcagtatttgttgaccctgttattgatgacaaaatagaaataacaatcaaaccagaagacataagaattgatacatacagagcatcgggagccggaggacaacacgtcaataaaacatcctctgctgtaagaataactcacattgaaacaggaatagtaactcagtctcaaagcgacagaagccagcacaaaaacaaagacttggcaatgaaagttttaaaatcaagactttatgaatactataagagcaaagaagatgaaaaaaacaaatccaagcaagacacaaaaaaagaaatttcttggggcaaccaaataagatcttacgtatttcaaccttacaatttggtaaaagatcacagaacaaaatttgaaaattcaaacaccacttcggttatggacggaaacatagacaatttcatagaagagtatctaaaatggaaaagcttaaactaa

SEQ ID NO: 10825 - DNA, 846 bp, Borrelia burgdorferi
ttgggcattttagaaaaaataaaaaatttatttaaaagcaaacaacaagaaaatgttattgaaaatttagaagacattttattagaatcagacattaataatgaaattgtaatagaaataataaataaattaacaaaagaaaaaaatgaaaacgaaaaaactattattggaaaactaaaagaacttttaagcagctatattaatacaaaaaaatttactctagaaaataacaaattaaatattttgttaatagttggtataaatggaattggaaaaacatcaagcatagcaaaacttgcaaataaattaaaaaatgaaggcaaaaatatattaatatcggctgctgatacattcagagcagctgcaattgaacaaatgaaaatttatggagaacaaatcggtgttagaataatatctcaaaaccaaggaagcgatccatcagctgtgatattcgacagcatatcaagcgctaagcttaaaaattacgatgcattaattattgacacagccggaagattgcaaaataaagaaaatttaataaaagagcttcaaaaaataaacaatgtaatattaaagcaaataaaaaacaccgacatcaattaccaaaaaatacttgtaatagattctactattggaaaaaatgcaaatagtcaagcagaaatttttaataaagcaatagaaatagacggaataataatcacaaaacttgattcatcctcaaaggcaggtacaatactaaatatttcaaaaattcttgaaaaacctatatactttactacctttggagaaaaactagaagatattaaagaatttgatataaatgaatattttaataaattactatga

SEQ ID NO: 10826 - DNA, 522 bp, Borrelia burgdorferi
atgggtataagaaattttttgcttaaaagattaatactagaagaaaaaaatagtctagccctcacaattgtaataatattaagcattgccttaggcgaaataataattatcctaacaatatcaatcatgaatggttttcaaaacgatttttttcttagcattacaaatgtagaaagcggaaacttaaaaatagaaaatgaattaactcaagaagaaatcaaaaaaattaaaaagattgaaggaataaaacatataaataaaatatacgaaacacaaggcattggaattcaaaattattattatccaactattttaaatatcattgcagttgatattaaagatctcaaaaaagaccaaaattttatttcatttacaggacttgaaaaagatgagctggatcttaaagacaatgaaatcattattggaaatgtactctctcacaatttcaacttattcgaaaatgatcccctagaattaataataaccgatgaaataaaaaacacttatatcgctagaaaatga

SEQ ID NO: 10827 - DNA, 2343 bp, Borrelia burgdorferi
atgcaagatgaacaagataaatatttaaaaaatattgacttttatgaaattttatctttagtatctaaatacgtttctaatccggatactgttaatttactaagtaatcaaaaaatattaaaaacaaaagaaagtttagagaaaatattctcctttgtaagtctgattagaatgctttttgaaagttgcaaaggatatccaaattcttttataaatagtttaaaatatcccatttcattattattaaaagaaaattcaagagtttctattgaaaatttgagagatattatagtgtttttagatgaggttttaagaataaatttatttttgcataaaaatagtgatatcaagcatcttaatgttcagattttatctgatttattatttttaaacccagagctaaaaaatttgcttaatgaattgaaagaacatatagatgttgatgctcttgaattgaaaagtggtgttgtaaaagaatatgattcgattgaatttgaaattaaaaatttaaatagacgagttgaaaatcagataaaaaaaataattagtttgaacgcagaatatttgacttctaattttgtttgttataaatcgaataaatatacccttgctcttaagtctaattttaaaggcaaaattaagggtaatattatttctatttcgtcatcaggtgaaacattttatattgagccaaacgatattgtaaatgctaacaacaggttaaattatttgagcttagaaaaagaaagaataattttaaaaattttacgaaatctttctgctaaagttcatagcaacattgttcttttagataacctttataataattttttgtattatgattctttaaaagctcgagcgatttatggaatcaaaactaaaggggtatttcccgagatttcaaatgtattaaatatttttgatgcacaccatcctttgttaaaggattcaaaggcaataacttttactcctgctgagaatcgtgttgtaattattactggtcctaatgctggtggaaaaacggtaactttaaagacaattggactacttagtgcaatgtttcaatttgggatccctattgttgttggtgagtctagcacttttaaaatttttgataacatttttattgacattggtgatgagcagtcaatttctaattctctttcaactttttcaagccatatgagcaatatttcttatattttaaaacatactacaaaagatagccttgtaatatttgatgaattttgctcaggaacagacattgatcaaggtcaggcgcttgctatttcaattcttgaatatttgatcaatattaattcttatgttttaatatcaactcattataatgctcttaaatattttgcatatacccatgaaggtgttgttaatgcttctatgcggatggatttagagacaatgcagcccaattataatttaattttttccattcctggtgaaagttatgcgtttaatgttgctagcaaggctttgattgacaggagcatagtaattcgtgctaatgaaatttattcatctcaaaaaacagaaattaatgaaattttagaaaaattaatagaaaaagaaaaagatttgcttttaattaaagaaagtatggataagaaattaatccaaatagaattgcaagaaaaagagctagaaaatttttatcaagatcttttattaagggaaaaaaatattgagacaaagcttttaaatgagcagaatgaatttttaaaaaattcaagaaaagttttagaaaatttggttagagaaataaaagagggcaatattaatgttgcaaagaataaagcttttatatcagatttggaaaaaaatgtagacctcaagacaaataaagtgaattctcttaacaataagagaaatgtagttgcagattttaaaataggagacaaggttagaatagttaattctaatgcaaaaggaaaaatagtcgggatctcaaaaaagaagatcaccgttaatgtaggtgcttttaatgttagtgtttctagctcagagatatctttggaaaactttaaagaaaaaaaagagaatggaaaaaattttaacttttcaattgattataataaggaaaatttattaagctttaccattgatattaggggtatgaggtctgttgatgctctagactttttgaataagaaaatagataatattatattaaatggtattaataaatttgagatcattcatggaaaaggggagggccatcttatgagagaagttcacaatttattaaaagaattgaagtttattagaaaatattattttgctcaccctagtgatggagggtctggaaaaaccatagttgagatttaa

SEQ ID NO: 10828 - DNA, 786 bp, Borrelia burgdorferi
atgaaaaatttcaaagaagtaataattatttttgattcaggaataggagggctttcttattttaaatatattaaaagtagaatagggggatgccaatatgtttatgttgccgataataaaaatttcccttatggagaaaaaagtcctgaatatcttctagaagcagttttgtttttgattgagaagcttaaaaaaatctataatattggtgcattagttttggcttgtaatacaatttctgttagtgtatacaataaattaaattttgtttttccagtagtctatactttgccagatgtaagttcagtttcagatcttgttttaaaaagagttcttttgattgcaacaaatactactcttgaaagcaaatttgttaaggatcaagtaaatatacataatgatttgattgtaaaagctgctggagagcttgttaattttgttgaatatggagagaattacaaaaaatatgctcttagatgtttagaagctttaaaatttgaagttgtaaatactggtagagaaattgtttttcttggatgcacgcattatttgcatcttaaggtaatgatagaagattttttaaaaattcctgtttatgagaatcgtgaattagtggtaaaaaatcttattagatcaatgaatttttctgaacacaaaggtaattattataagaatgattttgattttgtagatgatgagttttatttgaccgaaaataaaaatttgactttttatcaaaatttttgcaaaaaatataatcttcgctttaagggaatgatagtttga

SEQ ID NO: 10829 - DNA, 1401 bp, Borrelia burgdorferi
atgataaataaaatgtttgcaagcattaaagatattttaaaaaacccaattttaaacagcaatgttacaataaacggctggattagaaccaaaagaagtaatggcaaaattggatttatagaaattaatgatggttcaacgcttaaaggaattcaagctgtaataaacgaagaagaaaatcaatttagtgaaaaagatctaaaaaaattaacaacaggaacaagtatatcgttaacgggcctattagtagaaagtcctgcaaaagggcaaaattatgaaataaaaacacatagttttaatgtaatcggggaaacagacccagaaacttacccattgcaaaagaaaagacattcttttgaatttttaagagaaataccccatttaagaatacgaaccaacacatttggagctattgctagggtaagaaacaaaatttcatacaaaattcatgaatatttccaaaaaaatggttttttttatattaatacaccaataattacatcaaatgatggggaaggtgctggagaaatgtttagggtttccacactaaaatttaataaactaaacaatgcacttagcaatattgattttaaagacgatttttttggaaaagaagcttttctctctgtcactggtcaattgcatggggaagcatatgcaatggctttatctaaaatatatacattcggaccaacatttagagcagaaaattctaacaccacacgccacgcttcagaattttggatgatagaaccagaaatggctttttataagcttaacgacaatattgccctagcagaagatctcttgaaatatcttttaagttcaattttaaacgaatgctcacaagatatggattttttagaaaattacattgaaaaaggtttaattaaaaaactagaaaatgtaataaattcaaattttgaggttattacctatactaaagcaattgaaattcttgaaaactcaaaaaaaaattttgaaataaaaccttactggggaatagatttgcaaacagatcacgaaagatacctaacagaagagacttttaaaaaaccggtagtggtcattgattatccaaaaaatttcaaagcattttacatgaaagcaaataaagacaataaaactgttaaaggaatggacatacttgttccaaaaattggagagattatagggggaagcgaaagagaagatgaccttcaaaaattagaaaatagaataaaagaattaaacttaaacattgaacatctaaactggtatcttgatctaagaagatttggctcggctcctcattctggctttggacttggacttgaaagattggtgcaatactcaacaggaatatctaatataagagattcaataccattcccaaggactcctaaaaatctttatttttaa

SEQ ID NO: 10830 - DNA, 1452 bp, Borrelia burgdorferi
ttgagtaattatgtggaggttataaaagtggaaaaaaagtttttttctggatttcttcttagttttttggctttgagtattggattttttattgggatgcattatttagcttctaatagaagcaacattgtttttgcagaagaaaaggacaataccgtacgagccttacaagattcttttagagaggtttccaagaaaattttaccatcatctgtggaagttcatgcaacaggggtaatcaagcagagttttcctattccatttttcttttttgatatgccagaatttgattctgagagaaaaagcaattgggcggggtctggagtaataattggtagagattctcaaaaaaaatcattattttatgtggttacgaatagtcatgtggtagataaggcaactgaacttgaagttgtatcttatgataaaaaaaagcacaaggctaagttaattggcaaagatgaaaaaaaggatattgcccttattagctttgaaagtgatgacgcaactattaaagtagctgatcttggagatagtgataagcttgaaataggtgattgggttatggcagtgggcagcccttttcaatttagttttacagttacagcaggtattgtaagtggattgcaacgttctgcaaatcctaatttgcaatcaaggaatctgtttattcaaaccgatgctgcaatcaacaggggtaattcaggtggtcctcttgtaaatataaagggcgaggttattggaattaatgcttggatagcttcaaattctggcggaaatattgggttgggttttgcaattcctgttaacaatattaaaagcactgtagattttttccttaaaggtaaaaaaattgaatcggcttggcttggaatttctttttatccgctaaagacaagagattctgaggtgctaaaaagcttaggggttgaaagtaatgatgtttcagctgcaattattgcttctctttatccgggttcacccgctgttaaatcagggcttagggcaggggatattattatgaaggttaatggggtttccatgagcgtttttcaagatgttacatcatatattagtgatttttatgctggtgagaaagtaaatgtagaaatcttaagaggcaatgtcaaaaaaaatattgagattgttcttgctgttagacctaaggataaagagctttcttcttcaaagatgcttccaggctttgttgtgtatccattggttgaggatattaaagctcagcttaatttaagaaattggattaaaggtgttgttgttgattatattgataaaaatttagcatcaaatattaaaatgaaatcaggagatgtaattctttctgtaaattcaaaaagtgtttctaatttaagagaattttatgatgctcttgaggttggaaaaaatacttataaaattttgagaggaaacgattcttttaaaattacattttag

SEQ ID NO: 10831 - DNA, 438 bp, Borrelia burgdorferi
atggatttaatgcatgaagttagagttttagcttttcaaaagatttatagcattgatattaatcaaagcgcaatggacgatatttttgatatttttaatattgaagataaagatttagacatagaaaatgagtctattaagtcgttttactcttctttggtaattggtacttttgataatttagagcatattgatagcctcattagggatatttctttgaattggtctttagaacgcatggataaggttgatcttgcaatacttaggatgggcgtctattctttgaagttccaaaattttgaaaattcaaaacgtgctataattgatgaggcaattttgattgccaagaaatatggcagtaaaaactcttataagtttataaatggtatacttgatgctttgcttaaaaatatggagagtggtattgaaaaaaaataa

SEQ ID NO: 10832 - DNA, 1197 bp, Borrelia burgdorferi
gtgataaaaaaggtagctattattgatggacttagaacacccaatttcaagtttggaggttcttttaagggtttaaatattattgatgaatcttcaaaagttgttaaagctttgcttgaaagaaataagttatacaaagtggatgaggttattattggtaatgtaatatctgcgggacttggtcaaaatattgcaagacaaattgctttaaagtctgacttaggcgatactgtgcctgcatttagcgttaataaagtttgtggttctgggcttaaggccttggagcttgcatttaattctattgcccttggagacaatgatattgttttagctggaggagttgaagatttaaccaattctccttatttattacctagaaagattagatttgacggtcttaaatttggtaattttggaattgaagattcaatccaaaaagacgccttaatagattctctgaattttatttctatggggcttacggctgaaaatctttcagaaaaatatagaataacaagagaaatgcaagatgaatttgcatataattctcatgtaaaggcattaaaggcaagagagcttggatattttgaggatgaaatttatcccctgactgtttttgataagaagaccaactctagcgtaactatctcaagtgatgaggaaataagagataatttaactttaaataagctagcatctcttaatcctgtttttaaagaatcaggcacagtaactgccggaaattcttcaagtttaaatgatggtgcttgttttttaattttagcaagtgaggaaagagtaaaaagcttggggttaagtccattagcttatattggaggatttaaaagcgtggggcttgatccactttatatgggttttggagcttatatggctattgaaggcattattagtaaattaagtttaaatcctagcgaaatagatttgattgaggtaaatgaggcatttgcagctcaagcattaagcattgaaaaggccttgtttaaaaaatacaatataactagcgatattattaatgtaaatggtggtgctattgctttggggcatccatttgccgttagcggttcaagaattttattaacactttctcgctctatgaaaatgaagaataaaacaaaagggatagcatctgtttgtattggtggcggacaaggaatttctagttttttgtatagatga

SEQ ID NO: 10833 - DNA, 1368 bp, Borrelia burgdorferi
gtggctttagcagctttttcgaattctgcacttctttttaatgatggtgcagaaaaagcggtaatttctagtatattttataattcagataagatagagcaaattgcttttcatgtaagagctgatgatttttacaatgaaactcataagttgattttcaaagcaatggtttcgctttatgaaaaaagggaaaatattgatcctattactgtttttgaagaagtatctaagcatgtttcaaaaacgcaacttttgattaaaaaagatttaatcaatttgcctgattatttagattcactttcagtttatttgccaacagatagaactataaatgtttatgcgaaaattgtaaaagaacagagtgttcgcagaagcattttaaatgtttctaaagagcttaatgactatataaatgattctacaaaatctattaatgagattgttgaagaatctcaacaaaagattctttcaattgagttagattattctagtaagaacctctatcatgctaaagttattgcagaacgtgttcataatgagatatatgagcgcagcatgaagaaaaaagaagcaaactttggcattccaagtggctttagaaaggtcgactctcttattgggggatttagaaatagtgattttattatagttggtgctcgtcctagcatcggtaaaacggcatttgctttaaatattgcttcttatatagcattaagaaaagaagaaaagaaaaaagtaggatttttttcccttgaaatgacagcagatgctttaataaaaagaataatatcttctcagtcttgtattgatagctttaaagttcaaaatagcattttatctggacaagagataaaatcattaaatgatattataaatgaaattagtgattctgagctttatattgaagatactcccaatattagtttgctaactttggcaactcaagctagaaaacttaagcgattttatggtatagatataatatttgttgattatatcagtctgatttcttttgaaacaaaaaatcttccaaggcatgaacaagttgcttcgattagtaaatctctcaaagagcttgctagagagcttgagattcctattgtcgcattatctcagcttacaagagatacggaagggcgtgagcctaatcttgctagtctaagggaatcaggagcattggagcaagatgctgacattgtaattttacttcatagggataaggattttaaatttgagtcttctgctgagatagaaccaatagaaaccaaggttattgtagcaaaacatagaaatggccctacaggtagggcagatatattatttttgccacacattactaagtttgttaacaaagaccaccagtattag

SEQ ID NO: 10834 - DNA, 522 bp, Borrelia burgdorferi
atgaaagtgattttaaaggaagattttattaatcttggaaaagaaggagatactgtagaggtaagagatggatttgcaagaaactatttactacccaagggttttgcagttttttcaaataaacataatattgagatttttaatcaaaaaagaagatcaatattgaagaagcaagaagcaaaaaaacaaatggccaacgatctgaaatccaagcttgatcttgttaaattagaattttttatgaaatctaatgattctggcaaattgtttcatagtattaatagtttaaatattgctgatgaacttttaaaacttggttttgatatagagagaaaaaaaatagatatacatcatggaactttaaagacttttggaacttatgatgtgacaattaagctttatgaaggtattagctctattattaaagtagagataaaaaaagaaaaaaagcaagaggataaaaagtctttaagtaaaaagttgaataaagcagatgagcaaggtgaaagagcagaggtgtag

SEQ ID NO: 10835 - DNA, 291 bp, Borrelia burgdorferi
atgtataaagatagggatacaaatcaaagagattcaagatttgaaaatcagcaggatggctttaaaaaaaattcaaatttcagattttttaagagaaagtcatgtaaattttgtgattctggtaaacatcctgattataaggattttgattttcttaaaaagtttattaccgagcaaggtaaaattttacccaaaagaattactggaacttctgctaagcatcaaagacgcttggcattagaaattaaacgggcaagatatatggctttgttgccttttgtaaaaaaataa

SEQ ID NO: 10836 - DNA, 450 bp, Borrelia burgdorferi
atggctgatattaattcattagtattgtctggtaggcttacaagagattctgagctttcttatacagaaagtggcatggctgttcttagattttctatagctaataatagaagaatgaagaagaatgatgaatggattgattatccacaatattttgattgtgttattttttcaaaaagagccgaaagtctcaacgattatttgaaaaagggcaaacaagttgtggtaagtggatctcttaaatatgaaagctggcaagataggaatacgggtgataagaggagtaaggtaaatatatttgtagataatttgcaaatgtttagttcaggttctaatactattcaaatgcaagattcagatgttaatagtttgacaaatcataaaaaagaagatgtagttaaggatattgatattgttgatgataaatttagcgaagatatacctttttaa

SEQ ID NO: 10837 - DNA, 702 bp, Borrelia burgdorferi
gtgcttagagaaaataaacttaaaaattactcgttaagcgatgttaatacaagcaaaataccaaaaaatgagctttttagttcaatctcgcatctttttggaattattttgtctatcattggaacaacaattcttgttacaatatctactcttaagaaaaaagatttacatgtagttgtattcttgatttacggattttcaatgaccctattatatgtaatgagcactctttaccacatattcccaaaaggaagtaaaataaaaaaaatatttagaaaatttgatcatatttcaatatttattctaatagcaggaacatatactcctgcatgtgcaatccttgtgccaaacaaatcaggactaataatcttatgcatagtgtggagcctggctataattggaataatttttaaaataatatttacaaacagccccggatggtttaatggatccatatttataatcatggggtggattatcatttttaaaattaagcccatttataaggccctcagcggaaaaggatttttttggctagtttttggcggaatcgtatatacaataggaggaatagtatacatattaagtaaaaaattcaatccaacaattaacatgaaaatgcatgatgtatttcatatattaataataatcgcatcagcatctcacttttggcttatgctaaaatacatttctaatttttaa

SEQ ID NO: 10838 - DNA, 693 bp, Borrelia burgdorferi
atgaataaaggttctcttccaagtcatgttggaattattatggatggcaatagaaggtgggctttaggtaaaagattgtcttctttagaaggttataaagaaggtcttaaaagagcaaaagaaatagttaagtattctttaagggtaggtattaaatgtttatccttttatgtattttctactgagaattggagaagggatgattgtgagatagaaaatttaatgtttttaattgctaattatttgagagccgaatttgatttttacgaaaaaaatggaataaaaataatagtttcaggagatgttgagtctttaagtggggaagtaaaaagttctataaaagactctattagcttttctaaaaatttcaacaaccttattttaaatttagcaatcaattatgggggtcgtaatgaaatacttagagctgttaaaaaatttgtttcaagtgattttgatttagagtctttgaatgagaatattttttccagttttttagacaatccagaactacccgatcttgatcttttaatacgtacaggcggaaatattagaataagtaattttttcttatggaggattgcttattctgaattaattttttcaaatgttttgtggcctgaatattatgacactagatatagtaaggatttggaatgtttccaatttagaagaagaaattttgggagatga

SEQ ID NO: 10839 - DNA, 555 bp, Borrelia burgdorferi
atggaagattataaggcttttctagatgaaaagatgaacaaggttcttttatcacttgataatgaatataaaacgttaagaacaggtagaattagtagtaatatttttgatagaatttgtattcaataccatgaccgaagaacacctataactcaagtgtcaagtattagaattcctgaagcaaggcttgttgttattcagccttgggataaaagcatcttaaataagatagagcaagccatacttaattctgatctttctatgaatccttcaaatgatggttcagttattagaattaaggttccaaatttaactagtgaaaggcgacaagagattgtaaagcatgctaaaaaaatagcagaagaacataaaatttcaactagaaatatacgacaggatttaaacaataaagttaaaaagcaagaaaaagaatcggaaattacagaggactgtttaaaaagaattttagatgatattcagaaatccacagatatgtatattaaaaagatagattcaattttagaatctaaaattcaagaaataatggaagcttaa

SEQ ID NO: 10840 - DNA, 840 bp, Borrelia burgdorferi
atgagcattattagtcctcaggatgtaaaaaagcttcgagaagaaaccaatgctggttttggagattgtaaaaaagctttgtctgttgctggtggagactttgaattagctaaaaaaaaacttagagaaatgggaatcgcatctgctgagaaaagacttgacagagatgcaaaagaaggtagagtattctcatattcaaacaatatttatgctgggcttttgcttgtttcttgtgagacggactttgttgctttgaatcacaattttgttaattttggtaattccttgatcaaggaattggtagaaagtggaatagattctttaactacttctcaagagttagagcttaaaaatttagcagctacaataaaagaaaatattcaggttaaaaaaatttttattactaaaattcaatctaatgagtttgtaaaaatttatttgcatggtgaacaatccaagataggtgttttggttaaattaaaagtaaatgatttttctaaaacggaagataaaatttttaaaaattttgctatggatttagctttgcacgtggctgcgtttgctcctgtttatttgagaaatgatgatgtttgtccaaattatattaaagagcaagaagaaatatttaccaaacaattagaatctagtggtaagccggaaagcataatcaagggtatagttgcgggaaaaatcaaaaaacatcttgctgagatttctcttcttgagcaaagttttgtaaagaatgataaaatcactgtaaaggaaatgcttgaagaaatttcaaaagcaatttcaagcaaggtagaaatggttgagtttaaatatttaagaatagggtag

SEQ ID NO: 10841 - DNA, 783 bp, Borrelia burgdorferi
ttggcaattattactatgaagagcctgttagaggccggagttcattttggccatcaagtaaaaaggcttgatcctagaatgaaaagatttattttttctgagagaaatgaaatacatattttagatcttcaaaaaactttgcagggtattaaagattcttatgaacttgttcaaagggtaataaaagatggcaaaaaggtgctttttgttggaaccaaaaagcaagctagtgagataatagaacaagaagcaagaagaagtgatatgccatatgtaaacaatagatggcttgggggcatgctttctaattttaatacgattagaaaatctgttcaaaaattaaaaaagctagaaaagatggaagttgatggaacttttgacatgataagcaaaaaagagatttcacaacttaatcgtgaaaaatcaaaattagctaaaaatttaacaggcatcaaggacatggaaacacttcctggtgctatttttatcattgatcctaagcgagagcagatagctattaatgaggctagaaaattaaaaattcccattatttctgtggttgatactaattgtaatccagatgttattgattgtccaattcctggcaatgatgatgcgattcgctctgttgctttgtttactaaaataatatctgatgctattttagaaagtgataaagaggttggtattcaaataattgaaaatttgaatgaagaagatttgatgaaagaaattgaaattaaaaacgataaaagtgattctattgaagaaaggggagagtaa

SEQ ID NO: 10842 - DNA, 1662 bp, Borrelia burgdorferi
gtgagaatggaaaatcaaaaagatttacaagaaaattatttgaaagtacttgaaagagtagaacttggaagtcgtgtttctgggacagttgttaacattatgaaggattatgttctagtagatattggttataaatcggaaggctttattaagattgaagaatttgaaaacgttccccaagttggtgatagacttgaagcaatcgttgtaagaataggtggagaattaggtcttattttaagtgttgaaaagcttaattctttaaattttcaagataaagtatatgaatatattcaaaataaaaaaataattaaaggcaaggtgctggttgagcttccaaatggttataagattcaaattaatgaaaatgtttctggctttatgcctttttatttaagctctaaatctaaggatgagaaattaaaaagagggtctgttgttgaattttatattcttgaagcaagcgaagcagacggtttgagacttattcttgatagacgcaccctagaaaaagaaagagatcttgctaagagaatagagctagttagttcttataatgaagaagatgtagttgatggtgtggttgagcgtattacagaatatggtgcgattgtaaaaattaaaaattttgttacaggaattttgcataaaagaaatattgcctttaatcaagttgaaaatgttgaagattttgttagagttggtgataagttaaagttgaaaattattaagataaatccacaaacaggcaaaatggaattgtctcttaaggccttaaaagcaaatccttgggattctgtagatgttaaatataaaattgatagcattgtaaaagggaaagttgtaaaaattttaccctttggggctgttattgaacttgacagcgaattgtcgggatttttacatataagtaatttttcttggataagagtagtaaaaagtcctcaagaattaataaaacttggccagattgtagaagttaagattttagagatagataaagaaaatcaaaaaatatccctaggcattaaacagatcaatgagaatccttgggagagattaactgagaaatatcctattggaagggttgttcaaggagttgttactaatattacaaaaacaggtgcttttgtaaatattgaagaaggtatagatgcttatgttagtaagtttgatatttcttggcttgaagagattgatcctgaagaatatttcaagataggcgatttagtgaatgggaaagtgcttgaggttgacaagagaaagagaaatgttagattaggaattaagcagctagaagagagcccctgggaagatttttctaaaagctataaaaaaggcgatactattgaggttgagattgtagagaaaaaatcaaaaggctttcaagtaagagtttataataaaataatgggatttattagtaaaattcaattgggggatacaaaagaatctagtttagaaactttcgaaaaattaaacgttggagataagcttaaagtggtaataacaagtattgattctaaagacaaatcagtgctgctctcttatagggagtatgaaaatcaaagatcaagagaagaaatttcttcttatttatttaagggcaatgatgaggaatcttacaagccatttgagaatttgctaaagagggatgaataa

SEQ ID NO: 10843 - DNA, 666 bp, Borrelia burgdorferi
atgataatagcaattgatggaccttcagcatcaggaaaaagttcaattgcaagagagcttggcgtaaggctgaactataaatttatcagctctgggcatctttacaggataataactttaattgctcaaagatctcttatgaatagttgcgattttattagtgaggatagtcttttaaatttgattcttgagaatgatataagttttaataattttgcctttttgcttaatggagagaatgttgaaaatcaaattttaaacgataagattgattttcaagtttctttttattcttcttatgttggaataagaaacattgtgaataaaaaattaagagaggttgttaaatttagcgatgataattatataatagaaggtagagatattactactgtagtttttccagaatctgaatttaaaatatatctcgatgcttctgttaaagttcgagctttgaggcgatataagcaaagaaatgggaatgagaccttagaagaattagagcgtactcttaaaagaagagatgatgttgacaagaaaaaacaatatggtaagttaaaattatcaaaaggggttttttaccttgatacaagctacaaaggattagacgatgtgtgtaatattataatagaaaagtttaatttgaaaaaagtaagagagaggtga

SEQ ID NO: 10844 - DNA, 750 bp, Borrelia burgdorferi
atgattgcacttaaagcccctagagttcacgtttttttagctgaaaagggagtggggtcaagaagattttgcgaggaactgataagaaagaaacttgtaagagttaataacactattgctaagcttggggataaagtaactttaggagacagaataatttataaaaaacagatttttgtttttaaagattttcaaattaataatagaatttatctagctcttaacaagcctagaaattatttatgttctaattttgatgttgatggaagaaagttagcaatatctttggttcagcccttatttaaagagcgtgtgttttcaattggtaggcttgattttaaaagctctggacttttattattcaccaatgatggtaaatttgcaaacgatattattcatccaaggcaaaaagttgaaagagaatatattattgaatcaaaaaaagatattgatgaaaatttgcttatttcttttaaatcgggtataaaggtaaaaaaagaattttttaaattaaaatcttatgaaattttaaataaaaattctgctagattgattttagatgaagggaaaaatagagaaataagaaaagtgtttttgagcaagaatatttttttaaaaaaaattcatagaattagaattggcaatattaatttagatagtttaaaggagggtcaagtaaaaattgttcctttgtctaagataaatagtttaaaatccaggctggagaaattaaatgataatagcaattga

SEQ ID NO: 10845 - DNA, 1098 bp, Borrelia burgdorferi
atgtcaaagttaaaggaaaaaagagaaaaagctgttgttggcatagaaagggcaagtaaagaggaagctattgagcttgcaagagttcaaatagaaaaagcttttggaaagggaagtcttattaagatgggggaatctcctgttggacaaggtataaaaagtatgtcaagtggatctattgtattagatgaggctctcggcattggcggatatcctagggggcgcataatagaaatttttggccccgagtcgtctggcaagactactttaactcttcaagcgattgctgaggtgcaaaaagaaggtgggatagctgcttttattgatgctgagcatgctcttgatcctgtttatgcaaaagctttaggtgttaatgttgcagaactttggcttagtcagcctgataccggagagcaagctcttgagattgctgagcatttaatcagaagtggtggtgttgatttgattgtagttgattctgtagcggctttaacccctaaattagagatagatggagaaatgggagattctcagattggtcttcaagcaaggctaatgagcaaagctcttagaaagattaccggtatactttctaaatccaatacttgcattatgtttattaatcaaataaggatgaggattggtgttatgtttggcaatcctgagaccactaccggtgggaatgctttaaaattttattcatctcttagacttgaggttcgaaagatcgaacaagtaactagatcgggctcaagcgatgatgttattggcaataagattagagttaagattgtaaagaacaaggttgctccaccttttcgtaaagtagaattgataatttattttgggaaaggtatttcaagagaagctggcattttagatgctgctattaagcataatttaatacaaaaaacaggctcatggtattcattgggagataataagttgggacaggggagagagagtgttattgagtatcttagcaaagaagtagaacttgcaaataatttggataagaggcttagaaaaataatttttaataattttgatcaagagaatgataattttattgaatttaaagaagatgaatctgagtaa

SEQ ID NO: 10846 - DNA, 1374 bp, Borrelia burgdorferi
gtgatggatattaaaactttaaaaggctttaaagattatttaccgaaggattctttgattcgaattcatattgttaggcaaatatttagtgttcttaattcttataattttgacctaatagatactccagttcttgaatattcagatttgcttttaaaaaagagtggggatgagactgaaaagcaaatttataggtttaaggataatggaggcagagatgtttccatgcgatttgatttaactgttccttttgccagatttgttgctacaaatatttctgctttaaagcttccttttagacgttctcaatttggaaaagttttcagaggagaaaattctcaaaagggtagatacagagaatttatgcagtttgattttgatatagttggagaggacacttttaggggcgatgccgagattctttctgttgtatattatggacttgaagagatttttttgaattttatagaaggcattaataaaaaatttattatccattattctcatattggtatattgaattctttttttgaaaaattaggacttaaagaaaaatctatttttattttaagaaatattgacaaaatagataaaataggaattgataaggttaaagaagctttgcttcttgagattgaaaaagaagcggtagattcaatcttaagtttagtgagtttgcaaggtacttttaaagacaaaatacaagctttaaaaagtattttaggcgataatgagtctatcaagagagtagaagatgtttttcagcatcttagtttattaaaaattcaagattcttttaacttgaatcttaaaatatcgcgtggacttgattattatacggggattgtttttgaatctgaggtgtttggcagtaatatgggtagtgtttgcagtgggggaagatatgataatttggtttcttcgttctcaaactctattcaaaaaatttcaggggttggaggatcttttggtgttgacagaataaaggatataattgatcttgaaaagtttagttatattaaaatatttgtcactaaggctagatctaaagttttaattgtaaatttagatagtgctttgcaaaattattattatgaacttgctactagatttagaaatcatgattattccaaggttaaaaatatttcttgtgaagtctattttaaaaataaaaatggtaaaaatattaaagaacaaatagaatatgctttaagcaaagaaataagatttttagtttttgttggtcaagaagaatacaaagaaaataaaatgaaagtaagagatttgacaaaaaaagaagagttgctgctttcttttgaagaatcaataaatcttatcaaatgtaatgaaaagttgttgtgcacccctttttaa

SEQ ID NO: 10847 - DNA, 1890 bp, Borrelia burgdorferi
atgaccaaaagaatgcttaataacacttatcgaataaaaacaatattaacaatattcttggctataactttgttaactatttacaaatatttcacactaatggccttcaataacagcccagacaacacaatatctttaaagtcaaatgatattgccaaaagaggaacaatttatgatagaaatggcaaaccaatagcattctcttcaaaatcctactcaattggtacaaatcctcaaaaaatagaaaatattgtaagcacatctgaaactcttggtgcaatacttcaaattaattcaagaattttaaaggaaaagctttcctctaacaaagggtttttatatataaaaagaaaaataaaaagagaagaatcagatttaataaaaagaattcaagctgaaggcaggctttcaaacatcactttatatcctgattacacaagaatttatcccttcaggaataccacaagcaatattactggttttgtaggaacagataatcttggccttgagggcattgaattttccctaaatagcatattaggaaaagataaaaccaagcaacaatttttaaatgaggagccagaaacaaacaacatccacttaacaatagacatggatatacaacaaggtgttagcaaaatagctaaaaaatactttaaagaaaataatcctgaaagtttaattaccttggtaatgaactcccaaaatggagaaatattatccatggttcaatttcctcaatatgatgcaaacttttattctaaatatcctgaagaaatccgaaaaaacctttcttcatctctaacctatgagcccggaagcattaataaaatttttacagttgcaataatattagaaagtggaaaattaaatttagaagaaaaatttttagacaatggaatatatcaaaaacaatttccatcaggagaaaaaattacaatcaaaacattaaatcccccctataaacatatcgactctacagagattttaatttattcatcaaatgttggaatagcttacattactgaaaaagttagcaatgaatacttttataaaaaacttttagattttggctttggggaaaaagttggagttccatttcccggagaaacaaaaggactgctaaatcattattcaaaatggtcaggacgaagtaaagctacaattggatttggacaagaaataggagtgtcagcggttcaaatattacaagctgcaagcatactaagcaataatggaataatgctaaaacctagaataataaaaaaaataagcaacgataaaggagaaaatattaaagaatttgataaagaagaaataagaaaagtaatatccaaaaattcagcacaaaaagttttaaaaatgatgagagaagttgtaaataaaggtggaattccaaatcttaaaattaaaaatcttgacatttctgcaaaaagtggaacatctcaagctattgatagaaaaacgggaaaatactcagaagaagactatacatcttctatattggcaatataccccacagaacaaccaaaatatattatttacattgtatacagatacccaaaaaaaataatatacggaacaagaatagcagccccaatggcaaaagaaataatagaatttattgagcaccaacaaaatacaatagcatataaaaaaattaaaatgccatcaaaaatcaagatccctaaagctgaaactaattacaaaaacaaaacatacttaccaaattttatcaacctttctaaaagagaagcaatagacatactaaaatactataaaaatactatgaaaataaaaataaatggcgatggatttgtttacaagcaaagtatatcccccaatacaaaattagaagatataacagagcttgaactgtatttaaaataa

SEQ ID NO: 10848 - DNA, 3111 bp, Borrelia burgdorferi
atgttggtaaagagaatagttggcaaaccaataacaatgttgattttattttcattgttattgatgataagtttgtataccttttcaagattaaaagtagatcttttgccgggaattgacattccccaaataagtattcacactgtttatcctggcgcttctcctagagaagttgaagagagtgtttctagagtccttgagagtggcttgagttcggtaaagaatttaaaaaatatatatagtgtatcttccaaagaaagcagcaccgtttcacttgaattttatcatggaaccgatttagatttggttttaaatgaaattcgagatgctcttgaattggtaaaatcttcattgcccagcaaatcacagaccccaagaatttttagatacaatcttaaaaacatccctgtaatggaaattgttattaattctgtaaggccagtttctgagcttaaaagatatgccgatgaaatcattaaacctgggcttgaaaggcttgatggagttgcaattgttactgttaatggtggaagtaaaaagcgtgttttaattgaagtttctcaaaacaggctggagtcttatgggctttctttgtcaagaatatcttcaattatagcatcccaaaatttggaactttcagctggcaatatattggagaacaarttggaatatttggttgaagtttctggaaaatttaaatcaattgaagagataggtaatgtggtcatagcttataagatacccgacatttcttctggcataaatttatctcctattgagataaaactcaaagatattgctaatattaaaaccgattttgaagatttgtctgaatatgttgaatataatgggttgccttcaatttctttgtcggttcaaaaacgtagtgattctaattctattgcagtttctaatgttgttatgaatgaaatagaaaaattgaaattatctatgcctaaagatatgaaattggagattgcttctgatagtactgattttattaaagcatccatttcaacggttgtaaattcagcctattttggggccatgcttgcaatatttgttatttttttctttttaagaagctttagggccacaataattattggaatttctattccaatagcaattgttttgaccttttgtttaatgtattttgtaaatatttctcttaatattatgagtcttgcgggtcttgcacttgggattggaatggttgttgactgttcaattgttgtaatagacaatatatacaaatataggcaaaaaggagcaaagcttatttcgtcttctattctcggagctcaggagatgatgttgcctattacatcttcaacttttacttctatttgtgtttttggtccatttcttattttcaaatcagaacttggggtatatggagattttttcaaagactttacatttacgattgttatttccttgggtgtttctcttttagttgcaatttttttggttcctgttttatcaagccactatgtcggtttatacacaagtttccaaaagaatattaagaatgcttttattaggaaaatcgatgccttttttgctagtatttattattttttagagtttttgtatatcaatttattaaatatagttttaaatcacaaattgatttttgggttgattgttttttttagttttattggcagcttgcttttaggattattgttagatgtgacaacttttactagagggaaagagaactcaattactattaatttaaattttccccacaaaactaatttggaatatgcaaaattttattctaatagatttttagaaattgtaaaaagtgaggctaaaggatataaaagtattattgctactttgcgtgctgatagaataactttcaacgtattgtttcctctcaaagaagaatcaagagataatttaacccaaagcgtagattacgattctattaaatataaaattatgaatcgtattggtaatctttatcctgaatttaatattgagccttccattagtggcaatgctttaggtggtggagattctattaaaattaaaatttcggccaatgattttgaatatataaaagattatggaaaaattttagtttccatgttaaaaaaggaaattcccgaacttgtaaatccaaggcttagcataagtgattttcagcttcaaattggcgttgagatagacagagcgctagtttataattatggtattgacatgaataccattttaaatgagttgaaggccaatattaatggtgttgttgctgggcaatatgtggagaagggacttaattatgatattgttcttaagcttgatagaatggatgttaaaaatttaaaagatttagaaaaaatatttattacaaattcatctggagttaaaattcctttttcatcaatagccacctttgaaaaaaccaataaagccgaatctatttacagagaaaatcaagctttaaccatttatcttaatgcgggtatttctccagatgataatttaacccaagtaaccgcaaaagttgtagattttattaataataaggtgccccataaagaaggcataactcttaaggttgaaggagaatataatgaattttcaaatatcatgaatcagtttaaaataatcattatgatggctattattgttgtgtttggtattatggcttctcaatttgaatcttttttaaaaccctttattattatttttacaattcctttaacggcaataggggttgtgcttatacattttcttgcaggagaaaagctttctatttttgctgcaattggtatgcttatgcttgttggtgttgtggtaaatacaggaattgttcttgtagactatactggtttattgatcaagaggggatttggcctaagagaagcaattattgaatcttgtcgttcaaggcttaggccaattttaatgtcttctttgacctcaataatagggcttattccaatggcattttctagcggaagtggaaatgaacttctaaaaccaattgcatttacttttattggcggaatgacagctagcacatttcttactttgttttttattcccatgctttttgaaatttttccaacatgtttcaagtttcaaatctag

SEQ ID NO: 10849 - DNA, 957 bp, Borrelia burgdorferi
ttgatgaatttgatttttaatattaatttatatttaaaaaaatattttttagttttattcttagttttagttgcttgtgttggtgataacaagctagatgacaaaaatattgataaggagaaagaaagttcctatagattcccagtaattgctatgaaagttaaaaagggaatcttgagcgattatttgtctttaaatggagatgtagatacaaaagttaaggcagatatttttccagacgctgtgggcaaaataacttctttgagaataaaacttggagcttatgttcaaaagggacaaatagttgcaactcttgatccttcaagacctggttctgtatatttgaaaagtcctgtaagagcgccaatctcaggatatattttaaatattacaaaaaaaattggtgaaacagttaatccccagtccaacatagcagtagtgggaaggatagatacaaagcaaattttaacctatgtgtctgagaaatacatttcaaatattaaagttggaaatgatgctattattgaggttggagcttattctaatgaaaagtttaaagctaaagtttcagaaatatctcccattttagattctaaaagtcgaactatcgaagtatatcttacgcctattggtagtaatttagataaactgattattggtatgttttctaaaatcaaacttattactaagcgatttaaagatgtaattaagatttcaagagaggctgttgttgagagagagggcaaaaaatttgtatttaaggttgatttagagagtaagagtgttcaaatgttacccattacagtgctttttgaaatagataacattgtagctctttcgggcgaggttgaagagaatgatttaattgtagtagaaggcatgtctgctctttctaatggatctctaataaatttggtagataccaaagagggtctttcagccgaaagcaatatttaa

SEQ ID NO: 10850 - DNA, 1206 bp, Borrelia burgdorferi
atgccaaatttttgcttatttaactcaaaatccgttttaactggaaatgataaaatagataactcagcggttctaattaaagataataaaatttttgatattgtaacgtctgacagacttaaaaaaatggatctcgaagaataccaaatgattgacacaaaaggcaattatataactcccggactttacgacaatcatattcatggatttcacggtcatgggacagaccagtgttcaacagaatcgatacttaaaatgtcagaacatttagcacaatacggtgtagtaggatttttaccaaccctttacccaagaccaatagatgaaatgattaaaacaataaaagcttgcatagcagcaattggtaaagaaaagggagctaaaattttgggacttcaccttgaaggaccatttttctctcctgaaaaaaaaggagctcatccagtttcttatcttcatgaacctagtattgaagttatgcaaaaactaatagatgcagctggtggagtatttacaggatcaaacggcaaaagaaaaacacatataagcacaatgactgttgctcctgagcttaagggtatgagagagcttgcaatattttgccttgaaaacaacataaaccttcaagcgggacacacaaatgcaacatatgaaaacatgatagaaggatttcaagttggaatacttcatacaacccattttttcaacgcaatgtcaaaacttgaccacagaaatccaaatgcaataggagcggtgttaatacacggcgatgtttcttgcgaaattattgcagatggccaccatatacacccaaaattaattttaatgcttagaaagcttaaagatataagtaaaatagtccttgtaactgacggacttactccgaattgtcaaacttgtggaaaactaattgcaaacggagacgaagtttatattgcagaagatggattattccatagcgtgaaaagcaacacaatagctggatcaacactcacaatgatacaaggtcttaaaaatttaatagaatttggtttcagcttaagcgatgctgttcaagcaagctcttacaatccaacaagaattctcaatattgataaaaagggcttaatatgtcatggatatgatgcaaacctcaatgtcctagataaagattttaatctaaagttaacaatgatagaatctaaaataatttttaacaatctctaa

SEQ ID NO: 10851 - DNA, 807 bp, Borrelia burgdorferi
atgagattaataatcagacccacatacgaagacatatcaaaatgggcggctaatcatgtagcacaaaaaattaatgaattttccccaacaaaagaaaatccatttatccttggacttccaacaggaagctctccgattggcatgtacaaaaacttaattgaattaaataaaaataaaaaaatttcatttcaaaatgtcataacttttaatatggatgaatacataggaattgaagaaaatcatcctgaaagttaccattcatttatgtggaacaattttttttcccacattgacattaaaaaagaaaacataaatatactaaacggaaatgcttcaaatctcaaaaaagaatgcgaagaatatgaaaaaaaaatcaaatctttcgggggaataatgctttttgtagggggaataggccccgatggtcacattgcttttaatgagccgggctcctccttaacatcaagaacaagaattaaaactttaacccaggatacaattattgctaattcaagattttttgaaggcgatgtaaacaaagttcccaaaaatgcactaactgttggaattggaacgatcatggattcacaagaagttttaataatagtaaatggacataacaaagcaagagcattaaagcatgccattgaaaaaggcgttaaccacatgtggacaattagtgcactccaactacataaaaatgcaatcatagtatctgacaaaaatgcaacttacgaattaaaagttggaacagtagaatactttaatgatatagaaagaaaaaactttaataatgacttaaaataa

SEQ ID NO: 10852 - DNA, 2700 bp, Borrelia burgdorferi
atgttaaaagcagtacttgagacaactattggctcaaaaagtaaaagagatttaaaagattatcttccgactttaagaaatattaataagcttgagcgttgggcattattgttggcagatgaagatttttcaaaggagacagaaaagcttaaagatgaattaaaatcgggtaattctttagagaatattttagagcgagcttttactctgtctagagaagctgctagaaggcgtcttaaagaaaggccttatgatgtgcaaatcattgcggggcttgctcttcacaaaggcaaaataatagaaatgaaaacgggagaaggaaaaactctctcctcagttcaagcggcgtatttaaatagtttaacaggagatggggttattattgttactgttaatgactatcttgcagaacgtgattccaattggatgaagccggtttttgatcttttgggtgttagcgtgggggttgttctatctaatatggattatgagctaagaaaggctcaatatgctaaagatattacttatgttacaaataatgaacttggatttgattatctaagagataatatgcgttatgacttgaatgaaaaatccttgagaaagtttaattattgtattattgatgaaattgattctattttgatcgatgaggcaagaactccattgattatttcagggcctactgaaggcaacaccaatgcttatcttgaagttaattctcttgtatcttttttaaaagaatgttccaaggatcccaaaacaggtgattatcctttagaaatagacgaccttgatggtgattatactgttgatgaaaaagccaaaagaatttcttttactgccaaagggcttaataatcttgaacagcttttagtttctaaaggcattattagtgggtctatgtataccgattcaaattttaattatgttcattatatgactcaagccttaaaagcacatttgctttttttaaaaaatagagagtatattgttggtgattctggggttgagattgtagatgaatttactgggagagttttaacagggcgaagatattcagatggacttcaccaagctattgaggctaaagaaggagttagagttgctaatgaaaataagactatggcaactattacttttcaaaatttatttagaatgtttgataaaatttctggcatgacaggtacagctgatacagaagctaaggaatttcataaaatatataatcttgatgtagttgtagttccaacaaatagattgttagcgcgaatagatgaggatgatactatttattatacggaagaatttaaatttaatgcgattacagatgaggtttacaaaacttacaaaaaaggccaaccggttttagtgggaaccgtttctattgaaaaatctgagattttatcagctatgtttaaaaacagagggattaagcatgaagttcttaatgcaaaaaatcattctcgagaagcatttattattgctgaagctggagcaaaacatgcggttacaatagcaacaaatatggctggtcgtggtacggatattaagcttgggggaaatattgagcacagagttagaaaaaaaatcggaactaatgtaagccttgaagaatttcaagaggctgttaaaaatgagagagaaaattacctgaaagactataatgaggttaaaagtcttggtgggctttatgttattggtagtgagcgtcacgaatcaaggcgaatagacaatcagcttcgtgggcgtagtggaagacaaggtgaccctgggcgctcaagattttatgtgtcccttgaggacgatttaatgcgcctttttgctggggacaacctaagatcattaatgggtaagcttggaatggcaacaggagagcctattacacattctcttttaactaaatctttgattaatgctcaaaaacgagtagaagacagaaattttgaaattagaaagcatttgttagagtatgacgatgttattacaaaacaaagagattttatttatgctcagagaaactccattcttgaagatacagctattaaggatcgtattcttgttgctttagaagaatatcttagttttttgcttgaagggacaaaaagtagcacggtttcaaatgtttttttaaatgaagtaaattcaatttttgcttatatgcttgagagtcttggttctattgaaaatattagttctcttgatttaaaggctaagctaatgcaaatagcaaaagcaaatttagatgaaaaggaaaatttgattggtagagatctttttaatggatttttaagatatgaatatttgaaaaatattgattttaaatttcaggaacatcttgcaaatttagactctttaagagaggctgtttatttaaggtcttatgccaataaaaatccaatcacagaatacaaagaagagggattttcaatatttagcgagcttattaaagatattaaagtttctaccataaggcgtgttcttcaattaaaattggatagcaattcttccgattttaagtcaacaaagaagtctaggaatgttaaaccaattcataaagaactttctggaattgttattaatgagaataaaagcgcttctaatgttcaagtggttagaagttctcctaaaataggcagaaatgagccttgttattgtggaagtgggaagaaatataaaaattgtcatggcaaaagttaa

SEQ ID NO: 10853 - DNA, 1119 bp, Borrelia burgdorferi
atgtataataataaaacaatgggtagtaacaaaacaataataataaatttaaataatttagaacataacttaaatttaattaaaaataaaattggcgaaaaagaaatagtggccaccttaaaaggtgacgcatatggtcacggacttataaacatctttaaatttttaaaatcaaaaaacataaattattttggactttctaatattgaagatgctaaaacacttaaaaaaattgataaaaatataaaaatattaatgtacattaaggtggataaaaaagaaattaaaaatttgattaaatttgagttagtaccatttgtttctgattttgaatatctatttttaatagaaaaagaatgcgcattgcaaaaaaataaaataaaagtccacttaaaaattgatatcggaatgaatagatatggaataaaaatagatgatgcccttgaaatagctacatatattcaaaattcaaaatttctagaactagaagggatctgctcacatctcccatcaatagaaaactttaaaaccacacaaaagcaaatagagcaattcttattttttttagaaacactaaaacaaaaaaatattcatcccaaatttgtccatatttctaattcagggcacattattaactacaaactaaatccacaatttaatatggtaagaccaggtcttattctttacggttactgtcaatcgctaaaaaacaaaaaacctgctttaaattttaagcctgtattaagtttattttcaaaagtaatatttatcaaaaatgtcaaaaagggtgaaaaaatttcatattcgggtatatttcaagccaaagaagatatgaaaataggaattattccaatcggatattttgatggaatacctcaaaatataagtaatgatttttattttttaataaacaataaaaaatgtaaaataagaggaaaagtttgcatgaatctgacaatagtagaaattcccaaagacctaaaagttaaaacaggttcaaaagtagaaattgtatcagaaaaattaagtatagatgaaatgagtaaattttctaaaagaagtcattatgaattactatgtaatataggaaaatacgaaaagagaaaatacttagattaa

SEQ ID NO: 10854 - DNA, 378 bp, Borrelia burgdorferi
atgcaaaaagctgtttctgagcatgagtttattgaagagatcaaaaaatttctttcagctgaaaaaagagagatattagattctattaagtctgtagaaaatagcaaaaaagaaataattaataatgacatgtatccaaaggatgttgtcgatattgcttttgataatatggatggaaataatcttgaagcgttaggttttgttgaaaagagaaagttgaatttaataaatcaagctctttatagaatttctcaaaattcttatggtaagtgtttggcttgtgaaagagagattgctagggagagacttttagctattccttatgcttttttgtgtattagttgtcagacaaaaaaagaaaaaaagaacaaaagatga

SEQ ID NO: 10855 - DNA, 273 bp, Borrelia burgdorferi
atgtttaatcatgtaaaatttatcctattagagaaaattatggaggttgtcttgaatattaaagaagaagctattgaaactgaaggaattgtaaaagaatcccttccaaataccatgtttagagtagagcttaaaaacaagcacattgtacttgcccatctatctggcaagatgcgaaaacatttcataaaaatagttcctggtgataaagtaaaagttgagctatctccttatgatcttacaaaaggtagaatagtgtacagggaaaaataa

SEQ ID NO: 10856 - DNA, 627 bp, Borrelia burgdorferi
atgataagtgatattgaatttgctttgtcagaacataattttcagtttgcttacaaagatcttcagaagataaatttatatataaagagaattttacttttaaatactagatttaatttaatttcaaatagtaatagcaattttaattctattcttaatctacacgttatagattctcttttgggattgtctactgttaaagagattaatccttctgaagttcttgacgttggaagtggtgctggatttccgggcattattttggctatttttgactcttctagaaaatattatcttttagagagaagtaaaaaaaagtctacttttttaaaaatgataaaattagaacttgatttagaaaatgtaaaaattttagaatatgagattgaaaaagaaaaaaagaagtatgaatttattacaattcgagcttttagaaatatgaatgaatatgcattaattttaaaaaatcttttaaagggtgggggattgattatggcatataagggtaaatttgatagaattaaccttgaagtcaatcaaattaaaaatttatttagtaaaatagaagtaaagtctttaaattcaaaattaagagtagatagaaatttggttttgctttacagataa

SEQ ID NO: 10857 - DNA, 1884 bp, Borrelia burgdorferi
ttgtttggggaaataaatatggattttgacgcaattgttattggaggggggcatgcggggattgaagctgctcttgctctttcaaggttgaattttaaaactttaatgattactcaaaatttagatacaataggcaagctttcttgtaatcctgctattggtgggcttgctaagggtaatatggttagagaaattgatgctcttggtggtgaaatgggtcgtattattgactttagcatgattcagtttagagttttaaacaaaagtcgtggcccagcagttcaagctccacgtgctcaagctgataaattaatgtaccaaaccaaggctaaagaaactttagaacgtcaagacaatcttgatctttttcaggatacagttgtggattttcttcttaattcaatgagaaatgaaattgaaggtgttgttacagagagaggcaataagtttagatcaagcgttgtggtacttacaacagggacgtttcttcgaggtaaaatatttattggcgagtatagagctgatatgggtaggcttgctgaattttctgcttatgggcttgataaaactttacttggtcttggatttgaaatgggtaggcttaaaacgggcactccagcaagaattcataaaaaaagtgtggatttttcaaagacggaggttcaatttggagattcagatattattcctttctctttttcaaatggcaagttagataaatctcaactttcatgttatgtaacctatactaataaaaaaactcacgaaataattagcgagaatatgcacctatcacctctttattctggtgagattgtgggtaatggtccaagatattgtccttctattgaggataaaatagtaaaatttaaagataaagataggcatcaaatttttattgagcctgaaggttttaatactgaagaaatgtatcttaatggtcttagctcttctttgcctgaaaatattcagcaaaaattgattaacagcattgaaggccttgagcatgctgttattacaaggcccggttatgctgttgagtatgattatataaatccaattgaactttacccaaatcttgagagcaaaagagtcaaagggctttttatagcggggcagactaatggctcttcagggtatgaagaagcagcagctcaagggttaatggctggaattaatgctgctctaagacttcaaaataaaaagccaatgattttaacaagaactagctcttatattggagttcttattgacgatcttgttaccaaaggcactaaagaaccttacagaatgtttacctctagagctgagcacagacttaatttaaggcatgatactagtgacaagcgtttgattaagattggatatgatcttgggcttgttgatgagaagaggtattcaagatatctttttaaagagagcagggttgaagagataaaggagcttttaaagcaaaggcgccttagtttaaaagatgttgttgatgaacaattaaaaaaacatgttagtaaagatttttaccatattttaaaagatccttctattagtttagataatcttataaagattgatccaagtttaagtgattcaaaagtaattttagagcaagttgaattagatgttaaatatgaaggctatattaatagacaaaaggatttaattaaaaggcttgataatctagagcttgtcaagctaccatttgattttaattatgaaattattgaaggcctttcaagagaagctagagaaaaattttctaagattcaaccagctacccttgctcaagcaagtcgaattcctggaataagaagtacagatattactgttttgttaatatatttttcaaatcctaaaaataaggtagttataaatttttctttatga

SEQ ID NO: 10858 - DNA, 1395 bp, Borrelia burgdorferi
atgagtaagttttttgagagagatgatgatattgtagctcttgcaacaccttttttaagtagtgctttatgtgtgattcgtagcagtggtgcttcttctatatctaaattttctaaaatcttttcaaatcattcagctctcaattcagcatctgggaatacgattcattacggttatatattagatagtgagaatggttgcaaggtagatgaagttgttgtttgtttatatcgagcaccaaaaagctttacagggcaagatgctattgaagttatggcgcatggttctgtgattggaattaaaaagattatagatttgtttttaaaaagtgggtttaggatggctgaacctggtgaatttactttacgtgcatttcttgctaaaaaaattgatcttacaaaggcagaggcaattcatgagattatttttgccaaaaccaataaaacttattctcttgcagttaataaactttctggagctttgtttgttaaaatagatgcaataaaaaaaagtattttaaattttctatcagctgttagtgtttatcttgattatgaggttgatgatcatgagattagtattccttttgacttaattttaagtagcaaggctgaacttaaaaaattaattaattcttataaggtttatgaaaaaattgataatggtgttgctttggttttagcaggttctgttaatgctggaaagtcgtcgttatttaatttatttctcaaaaaagatagatcaattgtttcttcatatccaggcactacaagagattatattgaggcaagttttgagcttgatggtattttatttaatctttttgatacagcaggactaagagatgctgacaattttgttgagagattgggaattgagaaaagtaactctttaataaaggaagcatctttagtgatttatgtgatcgatgttagttcaaatttaacaaaagatgatttcttatttattgattcaaataaatctaatagtaaaatattgtttgttttaaataagatagatttaaagataaataagtccactgaagaatttgttcgctcaaaggttttaaattcttcaaatttaataatgattagtactaaaaatttagaaggaatagatattctttatgacaaaataagggctttaatctcttatgagagagtcgagattggacttgatgatataataatatcatcaaatcgtcagatgcaacttttggagaaagcttatgctttgattttagatttacttagtaaaattgatcgccaagtaagttatgatatgttagcatttgatgcttatgagattatcaactgtttaggggaaataacaggagaagttagtagtgaagatgttcttgacaatatgtttaagaatttttgtttggggaaataa

SEQ ID NO: 10859 - DNA, 246 bp, Borrelia burgdorferi
atgctagtattgtcaagaaaagcaaatgaaagcattaaaataaattctgatattgaggttttaatattagaaataaaaaaggatgctgttaaaatagcaattaaagcccctgaaaacattaaaatatttagatctgaaatttatgaatttattatagaagaaaacaaaaaatcactactaaaagacaaacacaatataagcaaaattaaaagcctttttaatcattatttcaagaatgaaaattaa

SEQ ID NO: 10860 - DNA, 348 bp, Borrelia burgdorferi
atggctagggctaaaaacggcacagttcacgttgcaaggcgtaagcgaattttaaaaaaaacaaaaggattttggggtacaaaaaagagcaattataaaaaagctaaggataccttgayaaaaggtatgatgtatgccacaagagatagaaaagttagaaaaagagattttaggcgcttgtggatttcaagaatttcggctgctttaagtgatactggggttacttattcaagatttattgagggtttattgaagtctaatataaaaattaatagaaaaattttgtctaatttagcaattgaggatgttgaagcttttaaaaaaattgttttagaaataagaagatga

SEQ ID NO: 10861 - DNA, 201 bp, Borrelia burgdorferi
atggcaaataaaatgaaaacacgcaaaagtgcaaaaaaaaggtattcttttactgtaaacggtaaagttaagtataaaaaacaaaatttaaggcatattttgacaaaaaaatcttctaagcgcaagagaaatttaaggaaatcgggcaatctttcttgttttgaagttaaaagaattaaaactttattaccttatggttaa

SEQ ID NO: 10862 - DNA, 561 bp, Borrelia burgdorferi
atgataaatagaaatgccaatagagatagggataggtccagatcaaatgacaaggaattaaaaattaattacagaattaaggctcgcgaggtaagagttatttttgaaaatggaacacaagaggttttatcgattgaagatgctattaaaaaagcaaaagaagctggacttgatttggttgaggtttctcctaatgtatctcctccggtttgcaagattattgattatggaaaatataaattccatcaagaaaagcgtcaaaaagagcaaaagaaaaatcaaaaagtaattaagcttaaggaagtcagaatgcagcccaagatagatgctcatgaccttgattttaaatcaaaaaacattttaggttttttaaaagatggcaataaggttaaagttacaataagatttagaggtcgtgaacttgctcacacatatttaggatatggtatcttaaatagcattcttgaaaaagtaggggatgtgaattatgttttggaatctgcggctaaaatggaaggcaaaacaatgtttttaattgtagcgcctaagtttaaaaaataa

SEQ ID NO: 10863 - DNA, 810 bp, Borrelia burgdorferi
atgatggattctttacttgaaactgaaaaatctattttttttgataaattaatagatactcatgttcatttttatgaattaaagaaaagatctttggatgtcaattacattattaatgaatgttttaaaaacggcttttcttattttcttgatgttggattgcatcctagtgattttaatgacagaaaagatcttttaagcccttattccaatgtgtttttaacagcaggtattcatcctttaaatttaagtgatcattttaaagatgatattaaacagcttgagaaaattttgattagtgaaaatgttgttgccgttggggagatgggtcttgattattttaaagcagataacaagaaatttcaaattaaagctcttgaagagcaattgtatttggctgataaatataaaaggccagttattttgcatataagagatgcctatgatgatgtctataatattgtaaggtctttaaattttttaaataggggtatattgcattgttattcaggaacttatgagcatgctaaaaaatttattgatttgggatttaaagtttctttttcgggcaatataacttttaaaaatgcacaacctttaagaattcttgttggcaaattaaatataaatgatcttttaatagaaacggatagcccttttttagctccagtgccattgagaggcaaaattaattcacctttgtttttaggatatgtatgccttgagattgcaaggattaaaaattgctctgttaatgatgttgcttttgcagtatataatagctttaaagatcttttattgctgcattaa

SEQ ID NO: 10864 - DNA, 1140 bp, Borrelia burgdorferi
atgttaaatgaaaaaattttggatgctttaggagatctctcgagcatttctgatgatcaacttcttgatgtcactgagaaatcaaaaagagggtatcagttgatcaaagaagaaagactttctgaagcagaaagtttattttctgatatccttgaaaaggataatgagaataattatgctcttgttgggcttggagacattgaaaggaagaagaataattacgataaagcaatagtttattatcaaaaatgtcttgtaaagcatccgagcaataattatgctctttttggacttggagattgttacagaaatttagataattataaaaaagccacagacatatgggaagaatatttaaaatatgatcctgagaatataacggttttaacaagagtcgcggcatcttacaggaagctaaaaaattttcaaaaatctaagcaaacttatcttaaggtaatggaattaatacctgataatgattatgctcttgtaggtattggccatttgtattatgactttaaagaatataaagaggctttaaagtattggcttaaaatgtatgaattaaatcaatctaaagttgatgttagagtattaacttcaattggtaattgttatcgtaagctaagggaatttaccagaggaatttatttttttaaaaaagctttagaaatttcacctagcaatttttatgctgtttttggacttgctgattgttatagaggcaataaggagtacaaagaggctttaaaatattggcttgatattatcgaaaaagatccaaaaaataatttggttcttacaagagtaggcgatgcttatcgctatttaaatgattatgaaaattctcaaatttattataaaaaggcccttgatgttgattttgatatgtttgccatacttggacttgctcttattcaaaaggaacaaggtaaatatgaagaagcattaatagctattaaaagtttaattaaaaacaatcctaaaaattcagcattgtatgttaatgctgctgaatgttatgaagcattagggcagattggaaatgctgttgatattttatcaagctttttacagcttggtatgaaaaatattgttgttattgactaccttgcggttcttaggaaaaaaatggaatga

SEQ ID NO: 10865 - DNA, 1074 bp, Borrelia burgdorferi
atgcttttagaaaaattaaattcagcaacaagcaagattaagttgatagaagaaaaattacaagatataaatctaattaaagatcaaaaaaaatattcaaaaataataaaagaatatacatatttagaaaaaataaatactaaaaaaattgaatacgaaaaaatattaagccaaatcaatgataccaaaaccatcttggaaaaagaagatcaacaagaaatgaaagagctaataaaacaagaactaattgatctggacaaaaaaaaagaagatcttgaacatcaaataaaaatactacttttgcctcaagatgaaaatgatagcaaaaatataataattgaaattagggctggaacaggtggagaagaagctgctctttttgcaaacaatctttatagtatgtatataaaatattcagagaaaaaaaaatggaaaacagaaattataaacttcaatgaaacagaacttgggggatttaaagaaataatatttgaaattaaaggaaaagatgtatttaaaaaattaaaatacgaaagcggtgttcacagggtacaaagaatccctataacagagtctaacggaaggcttcaaacttcagctgctactgtagcagtgctacctaatattgaagaaactgaaattgacatcaatgaaaaagatttaagaattgatgtttacagatcatctggagctggtgggcaacacgtcaatacaactgattctgcagtcagaataacgcacctaccaacaggaattgttgtacagtgccaaaacgaaagaagccagcataaaaacaaagatcaagcaatgaaaatattaagagcaaggctttatgaatttgaagattcaaaaaaacaagagcaaagatcaagcaatagaaaacaacaggtcggctcaggagatagatctgaaagaattagaacctataattttcctcaaaatagaataacagatcatagagcaaacatcactctttataaattagaagaatttatgcaaggagaacttgacccacttcttgatcctttgatgatagcacttcaagaacaagaattaaaaagcaatagcatatag

SEQ ID NO: 10866 - DNA, 2004 bp, Borrelia burgdorferi
atgatacaagcatacgaaattgcacatttaatcaagataaatgatcttgaaaaagctagaaatatttttaaaaaaactgttgaaaatacttacaaagatgaatttgaacgaaaaagcatattcaaagctctagaaatagcagaacagctccactatggccaatatagagaaagtggagagccttacattattcacccaataatggtttcattatttcttgccaaatttcaactagattttaaagcaactattgctggactactgcatgacgtacttgaagatacaaatgttgaaaaagaagaaatagtaaaagaatttgacgaggaaattttaagcctaatcgacggtgtaactaaaattcatgatttacacaataaaacaagaagcataaaagaggctaatactatctcaaaaatgttttttgcaatgacacatgatattagaataataataataaaactggcagataaacttcataatatgacaactctctcttatttgcccaaaaacagacaagacaggattgcaaaagattgcctttcaacttacgttccaatagcagaacgccttgggatctcatctcttaaaacatatcttgaggatctttcatttaagcatctttatcctaaagattataaagaaataaaaaattttttatctgaaacaaaaatagaaagagaaaaaaaattatacaaaggaaaattatcaatagaaaaagaacttcaaaaaagcggaattgaagcagaaattacagtaagatcaaaacacttttattcaatatttagaaaaatgcaaacaagaacaaacaaacttactcaaatttttgatactctaggaataagaataatttgcaaaaaacaaaaagaatgttatgagatattagaaattgttcaccgggtgtggaaaccaatcccgggaagacttaaagactatattgcaagcccaaaagaaaataaatatcaatcactacacactactgtaagaatacctgaggataaccagcttattgaaatacaaattcgaacagaagaaatggatagaattgccaattatggggttgcagcccactggatatataaagaacaaattgaacttaaagctgatgatctttcatttataaaccgaataaaaaaatggcaacaagaatcggccaacaaaagtcaatattcaatgaatgacatacacaaagagttgttgaatacattcatatatgtttacaccccagaaggagaagtagtagaacttccttttggatcaaattcaattgattttgcatacataattcacacagatattggagatcaagctctttatgcaaaaataaacggaaaaataagctcaatcacaaaaccgcttaaaaacgaacaaattgttgaaatattcacatcaaaagactcaaaaccggatgtaatatggctaaacagcgtaagaacaaaaaaggcccgatcaaaaattagatcatggcttaacaagaatgacaacacaatttttgtagacaacaatattattgcttatcttgttggagcaaacaaagagcaaagaaagcttttcagcttattcaaatcttataccaaaaccaaaataaaaagaattgcaatagaccctgaatgtagtccaacaacaggtgaagatattattggaataatacataaagacgaaataatagtgcacaatgaaaattgtcaaaagcttaaatcctataaaaaaccccaattgattgaagttgagtgggaagcaacaccaactagaaaagtgcatcacattattttacttttaaaagagcttaaaggaatatttagctatcttgaaaacattttcacactcaatgacgtaagacttattagcgaaaaaatagaagactgcggaaatggtcatggaataacaaatataatagtctcatcaaatgctaaaaatataacaaaaattatttctgctttaaaagaaaacccaaatatcttacaaataatgcaaatagaagaagacattaaaaattatgacaattaa

SEQ ID NO: 10867 - DNA, 1071 bp, Borrelia burgdorferi
atgttgatatttggtggcgtttcttttgagcatgaaatttcttgcaaatctgcttatagtatttatttagcccttttggatctaaataaatacaatatttatcctgtttatattgataagtgtacaggtgtttggtatttattagattctgtttctgatcctcccaagcccattaatacagatgttttacctattgttagtttattgccaggttttggaattttttcaaacaataaaaatcttgaaattgatgttgtttttcccgttgttcacggaagaaccggtgaagatggcgctattcaaggggttttaaaggttatggacattccttgtgttggtgctggtattatagggagcgccatttctagtaataagtatttttgcaaacttttgcttaaaagttttgatatccctttggttccttttattggatttagacagcatgattattttttagacaaagaagaaataaaaagaaatgtaaaggaggttttaggctatcctgttattgttaagcccgcagtattagggtcttcaattggaataaatgtagcttacagcgaaaatcagattgaatcttttattaaagaagctttaaagtatgaccttactattgtaatagagaagtttattgaggctagagaaatcgaatgttctattattgggaatgaaaagatgaaaatattttctcctggggaagttgttgtgcaagattttatattttatgattatgatgctaaatattctgttattcctggaaattctattatttttaatattcctgcacatcttgagacaaatcagttattaagcattaaagaatatgcttttcttacttataagaatctagaactcagaggtatggcaagagttgatttttttgttgaaaaaaaatcaggaactatttatcttaatgaaataaacactattccaggatttaccgatatatctatgtttgctaaaatgtgcagcaatgatggtcttcagtttaaagacctggtggataatttaattgattatgcttttcaaagttacattaataggaaaaaaaggattgattttgaaaattaa

SEQ ID NO: 10868 - DNA, 1527 bp, Borrelia burgdorferi
atgaataaaaaacttaatgaagttttattaaagttagatcaagatttaataaaatgtgtaaaaggttctcttgatttagaaatatcaggagttacttatagttctaaattggttttgcccaggtttgtgttttttgctcttccaggaattcattttgatgggcatgattttattgaaattgcaattcaaaagggtagtaatgttgttgtgtgttcacgagatgtggatttttacagtcctaatgttacttatattaaggtagatgactttaacataagaaaatttatgtctaatttttcaaatattttttatgatgagccttcaaaaaaattaaaagttattggagtcactggcactgacgggaaaagttctgtttgttattatatatatcttctttttaaaaaaaagggtgttaaagtaggttttatatcgacagtattttttgatgatgggagtggaagcttgattaaaaatccttacagacaatcaactcccgagtctacggaaatacattcatttttaagcaccatggttaaaaatgaagctcaatatgcaattcttgaatctacttctcatgggcttgaccttgaaacagcaaggcttattgatgttaattattttgcagttgtttttaccaatattggacatgagcatcttgaatttcatggcacaattcaaaattatttgaatgtcaagctgggtctttttcggtctgttagtgatgatgctggttttggggttattaatcttgatgacctttattcttctgattttaagaatgctgttaagaaatcttttacttatagcttaaaaagcagtaaagcggatttttttgttagttttattgatgagaaaaccgattctactagatttgaattttatcacaagggggttaaatatcttgctaatgttagcctactggggagttttaatgttgagaatgtaatggctgctcttattttagtttctcaaattttaaatatcgatattcaagatattgttgataaacttaactgcattaaaagtcttgatgggcgtatggatagtattaatttggggcaaaatttttctgtaataattgattatgctcatactcctggtgctttttccaagctttttcctatttttaaaagatttgctaccaatagattgatttctgtttttggctctgcaggagaaagagatgttgaaaaaagatttttgcaagggcaaatcgcagatatttattctgatttaataatactttgcgatgaagatccaagaggcgagaatagtatgtgtataattaaagacattgcaaaaggaattgtaaataaagttgaaaataaggatttattttttattgctgatagaaagcaggctattgaaaaagcaataagtcttgcaaaagcaggagatttggttgttgctttgggcaaaggtcatgaaagttcaataatttataaaaatagagaagttttttggaatgaacaagaggtagttaaaaatgctattttaagtttagaaaaatcagaaaaggagaagtga

SEQ ID NO: 10869 - DNA, 936 bp, Borrelia burgdorferi
atgtttgacataaaacaaatttttaataaaacttatgaatatttaataattattattaccctgatactaatatcaataatagttattgcaaacatattcatagtagggccatcagaagaggcaattgtacttcgccttggcaagcttaacagaactcttgattcaggaatacacgtcaagattccattaattgaagaaaaatttatcgtacctgtaaaaatagtccaagaaattaaatttggatttctaatatctccaagcgatattagagaaaatgataatgcaaacgacgaaagcaggattattactggggatttaaatatcataaacattgaatggttagtgcaatacaaaataagagatccttattcattcaaatttaaagtagaagatcctgaaacaacaattaaagatattgcaaagtcatcaatgaatagattgattggggataatactatttttgaaataataaatgataacagagtgggaataacagaaggcgtaaaatcttctatgaatgaaataatagataattataatttaggcattgatgtagtgcaagtacaaattagaaatgccctacccccaaaaggaaaagtttatgaagcttttgaagatgtaaacattgcaattcaagacaaaaataaatacataaacgaagggagaaaagaatttaatcaaatagttcccaaaatcaaaggtgaagcattaaaggttattgaagaagctagaggatataaagaaagcagaataaacaatgcattagcagacacagaaattttcaatgccatattagacgcttacttaaaaaatcccgatatcacaaaagaaagactttacaatgaaaccatgaaagaaatacttgaaaacaaagataacattgaattaattgacaaaaacttcaaaaattttctaccatttaaagaggtaaaataa

SEQ ID NO: 10870 - DNA, 837 bp, Borrelia burgdorferi
atgaaaggcattattctggcagctgggtatggaacaagatttttaccaataacaaaaacaattccaaaagaaatgctaccaattttaaacaagccagccatagattatattattcaagaatttatcgattcaggaataaaagatattttattaataagctcaagaagaaaaaaagttcttgaagattattttgacagagaaattgaacttgaaaatatttttttaaaagaaaataaaaaagatgaattagaaaagattagaagcaaaaaaatcaacataagcttcataagacaaaaagaaatgctaggcacaggaaatgccctactttatgcaaaaccctggataaatagagagcctgtagttgtagcttaccctgacgatctttgcattggaaatccaccattaagcttgcaattgatcaaactttatgaaaaaactggaaagaacataatatctatcattgaaaatccagaaaatataaatagatacggagtaatagatctctacaaagacgaaatccatgtaaaaaacattattgaaaaaccaaagattggaagtgagcctagcaataaagcatctattggaagatttttgtacaattatgagttttttgaacatttagaagaaggattcaaactacataaaaaaggtgaatactatcacatttatgctttaaaaaagctaatggatcaaaaaaaagtattatataaaaacattgaagggaaaagaattgacataggaactcttgagggttatctagaggcaataataaattctgccaaaaaagataaaaaattaatgggaattatcaaaaaaggaataaatgaaaacgattaa

SEQ ID NO: 10871 - DNA, 1833 bp, Borrelia burgdorferi
atgaacaaaataagattcttagataaatacttggttcaaaaaatagcagcaggagaatcaatagacaggccatgttcaatattaagggaactactagacaattcaatagattctggagctactaaaattgaggtttttcttgaagaagggggaattcaaaaaatcttaataatagataatggaagcggaataagtaaagaagatttaaaaatctgctatctaccacacactacttcaaaaatatcatcggaagaagatttaagaaaaatagaaactctaggctttaggggagaggctctctctagtattgcaatttgctccaacatttcaataacaagctcaacaactagcaatgaaagctatcaaatagaagtagaaaatggaattgaaaaatgctttaaaaaacaacccgccataaacggaacaatagtagatgtcacaaaaatatttcacaacttcccagcaaggaaaagattcttaaagcaagaacccattgaaacaaaaatgtgtctaaaagttttagaagaaaaaataataacccaccccgaaatcaatttcgaaattaatttaaatcaaaagctaagaaaaatttactttaaagaatcgttaattgacagggttcaaaatgtatatggaaatgtaatagaaaataataaatttagggtcttaaaaaaagaacatgacaatataaaaatagaaatatttttagcaccagataacttttctaaaaaaagtaaaagacatattaaaacatttgtcaacagaagacctatcgatcaaaaagatctcttagaagcaataactaatggacacagcagaatactttctcctggcaacttcccaatatgttatttatttttagaaataaaccctgaatatattgactttaatgtacaccctcaaaaaaaagaagtaagattttacaatcttccatttttatttaaactaatatctgacaatattaataatttttttgataaaaatataaataactaccaagacataataataaaaagacaattaacagaagatgatcatttaatagaaatgacaaaccaaccagaaaactttaataaaatcaacacatatgatataccacaaaacaataatttagaaacagaagatgtaaacgagccaaacaaaaacacaacacaaagcaatattgaccttagaaggtataattcaattatacaaaatagaccaacactcagggaaaacattggaaacattttctctgacaattttttagaatttgaagaacctccaaataaaaatgaaaaagaagaaataaaatttaactatattggacaaatattctctgaatttttaatcgttgaaaaaataaatgaaatttacttcatagaccaacacgcagttcacgaaaaaataatatatgaaaaacttagaaattcaaaaaaaaatgttcaaaaacttctagtaccaattgaattcacagtagttgataaaaacatagaagaaattatagatagtgagattgaagaatacaaacaaatggacattataatctctaaaataggccctaaaaaatatcaacttgaatctattcctaatatttgtagtcaatatgaaaatactcttattaacttttttcaatcaagaagaagtaggacaataaattctcttgaatctgacttatacgcaactattgcctgtagaaaggctgtcaaaagaaatgacatgctaagcgctgaatttagtaaatttttaataaatgaattttttaaactagaaatcaaacattgtcctcatggacgaaaaatttattacaaaatatctaaatttgaacttgaaaaaaaagttgacagagcataa

SEQ ID NO: 10872 - DNA, 909 bp, Borrelia burgdorferi
atgcatctgagcttaaagacaaaaagaaaaataattgaaattattttcaaatcttttattcttatatctgcaataatcagctccctatcaatattgtttttgggtttgtttatattaaaaactggaataatgccatttcttaataacaaaattaaaattttaaactttttattcagcacaaattgggatcctactagcaatttacaaaaatcttatggtattttggcattcattattaattcctttttaactacacttttttctattttaattgctttaccaattggattgggatttgcgatatatttacttgaaaaagcaaaaggattttatagacaatttttacaaacagtaatagagcttttagcaggaatccctagtgtagtttacggattttttggaagcacatttattgcagctttagtaaaaaacatttttcaaagagaagacaatttgggatacaatttaataagctcatcactcatattaagcataatgataatccccacaataattagcgtttgttattcatcgctcaaagccgttccaaaatcatataaatttgcatctcttgcattagcagcaacagactggcaaacaatatataatataataataccatcggctagtcgaggtattttagcaggaacaatattggcaataggaagagctattggagaaaccgtggcagtattaatggtcggaggaggctctcctctttttataaaaaacatattttctcctattagaacactaactgtaaacattgctatggacatgggatacgcctcgggtgttcacagagaagctctcttttctacagctctagtattattgctattttcaataattacaaatttactcaaaaattttatactatcttccaataaagggttaaagaaaaagtga

SEQ ID NO: 10873 - DNA, 783 bp, Borrelia burgdorferi
gtgataaaagaaaaagatacaccaaaaaatgaagttataatagaaacggaaaatctgaatctattttatacagactttaaagctttaaataaaataaacatgaaaatactgaaaaatagtattaccgccttaataggcccatctggctgtggtaaatcaacattcttaagaactctcaacagaatgaacgatcttgttgaaggcattaaaatagaaggcaatgtaatatatgagggaaaaaacatttattcaaataatttcgatatcctggagcttagaagaaaaataggaatggtattccaaacccctaacccatttttaatgtctatctatgataatataagctatggtccaaaaatacatggaacaaaagataaaaaaaaactagacgaaatagtagagcaatcactaaaaaaatctgcactctggaatgaggtcaaagacaaacttcatacaaacgccttaagtctctcaggaggccagcagcaaaggctctgtattgcaagaactctcgcaatagagccaaatgtaatactgatggacgaacctacctctgctctcgatccaatatcaacaggcaaaattgaagagttaataataaacttaaaagaaagttacacaataatcattgtaactcacaacatgcaacaagccggaagaatatctgatagaaccgcatttttccttaatggatgcattgaagaagaaagttcaactgatgaattattcttcaatcctaaaaatactaaaactgaagaatatatcagcggaaaatttggataa

SEQ ID NO: 10874 - DNA, 1785 bp, Borrelia burgdorferi
atgacacttaataagttgcgtaaaaaatatattgatttttttaaatcaaaaaaacattttgaaataatggggaaatcattagttcctgaaaatgatcctacagttctttttaatacagctggcatgcagccccttatcccgtatcttcttggagaagtgcatccatcaggagatatgcttgttaatgttcaaaagtgcctaagaacaggcgacattgatgaggttggagatttaagccatttaactttttttgaaatgcttggaaattggtctcttggagcttatttcaaagagtattctgtaaagtgtagttttgaatttttgacatcttctgattatttaaatattccaaaagacagtctttatgtgagcgtatttgaaggcgatcaagagattccgcgcgatacagagactgctaaagtttgggaaagcttgggtatttccaaagatagaatacattatctttctaaggatcataatttttgggggcctgttggatctaaagggccttgtgggccagatactgaaatatatgtggatactggaaagtctaagtgttctcttgactgtaatattacgtgttcttgtggtaagtattttgaaatttggaataatgtttttatgcaatacaataaagatgaaaatggtaattacatagaattgggtcgaaaatgcgttgatacgggaatgggacttgagaggacaattgcttttttgcagggcaaatcttcagtttatgatacagatgcattcatgcctataataaagagaatagaatatatttctggtaaaatttatggacaaaaagaagatgatgatagatgtattagaataatttctgatcatgttaaagctgcttgctttattcttgctgatagttctgttgtttttccctccaatttggggcaaggatatgttttaagaagactaataaggcgatctatcagatatgcaaagaaacttgggataaaatcccattttttagctgatcttgttgattctgtagaagctatttatagatctttttataatgagctaacagaaaaaaaagattttatcaaaaaggaattaagcaaagaagaagaaaagttttttaaaactttatctcaaggagagcaagaatttattaaaataacaagaaatttgccttccaagactattcctggtgatattgcttttaaactatacgatacttatggttttccatacgaagtaacagaagagcttgctattgaatatggctttaatgttgataagttgggttttaatgagcattttaaaaagcatcaaaaaacttcaaagaaagggggtgacaaagtttttaaaggagggcttgccgattatacttatgagaccactaaactacatacagcgacccatttactgcataaggcacttcaattagtactaggcgatcatgttagacaaaaaggaagcaatattactgctgagcgattaaggtttgattttgttcattctgaaaagatgacggatgatgagataaaaaaagttgaagagattgttaatttacagataaaaaattctttgtctgtaaaaaaaattataatggaattaagtgaagctcgagaaaaaggtgctatggctctttttggagaaaaatatgacgatttggtgagcgtttatgagatagatggattttcgcttgaagtttgtggaggccctcatgtagagaataccaatgaacttggtacttttaaaatacaaaaagaacaatcctcatcttcaggtataagaagaataaaagctattttgattgatgagtaa

SEQ ID NO: 10875 - DNA, 1008 bp, Borrelia burgdorferi
atgttaatgaatcgaaaaatatcaatagccccaatggtaaacattacagacgagcatttcagatatttaataagacttttatcaaaaaaagttacattatataccccaatgatttctgcaaagtcaataattatgggtgatgtaaaaaaaattgtaaagcaaaaccccttagaatctccaattgcaattcaaatagcaacaaactccaaaaatgatgcccttaaagctattcaaattcttgaaaaacactttaattttgacgaatacaatcttaatgttggatgcccatctctaaaaatccaaaatgcaaattgtggagcttgtctaatgggcaatgctaatcaagtaggtgaaattttaaaaacgatgaaagaaaacacaaataagcctatttcaattaaacatagattgggtataaggcctttatctagtgattacaaaaatgaaagttattctgaggtaaaaaactttgtcaaaataatctcagattttggtatcaaaaattttattgtacatgcaaggattgcaatattaaaaggattttctcctaaaaataataggaatattccaaaattaagacatgaatttgtatataagctgaaaaaagagaataaaaatttgtttatcgagataaatgggggaatcaataactcagagcaaattaaaaaacacctatcttttgttgattctgtcatgattgggagaagtgcgtttgaaaatccatactttattgcaaacgcctcaagagaatttttaaacgaaactgatgaaattcttacaagaaaagatatattgatgcaaatggtagaatacattaaagaatacgaaaattatttgtcgatcaatatattattcaagcatcttatgggaatagtattctccaaagaaggagctaaaaaatttagacaaaatttaacagcaccatttccaaaaaacttaaaaaagcatgaaatattgctaaaagctatagaaacattgccagaaaaaatactaaattctaattcttaa

SEQ ID NO: 10876 - DNA, 1278 bp, Borrelia burgdorferi
atgcttgatctgaaatttattagagataaccttgatcttgttaagagaagtattaaagcaagaggccttgttttagatattgataagttaatttatcttgatgataagagaaaaaaactaattaccaaaattggtgagcttaatgcaaaaagaaatgaaaattcttctaaaatgcaagaaaatcttgataaagttttaaaaatctctttaatagaaaccggaaagattttgaaaaaacagcttattgatctagaagaagagcttgaaagagtatctgttgattttgaccttgaaaataagaaagtgcccaatattttgtcacctgatgtgcctattggcagtagtgaagaagataattttgaaataaaaagggttggagttgttccacagtttgattttaagccaaaagatcatttagagcttggcagagatttagatcttctagattttgacagagcacgtgagattagcgggagtaaattttattatcttaaaaatgaagcagtttttttagaaattgctcttattaatttctctttaaataaattaagagataaaggttttgatgtttttattactcctgatgttgcaagagagtttatagttgatggaataggttttaatcctcgtggcaacgaaagcaatatttataagattgaagatacagataaatatcttgtgggcacttctgaaattacgcttggcggttattattataataaaataatagatctcactttgccaataagaatggcagggttttcacattgttttcgaaaagaagctggagcatatggtcagctttcaaaaggtctttatagagttcatcagtttagcaaggtggagatgttttgtttttgcaaagcagaagaatctggagttattcatgatgaatttttaagtattcaagagcaaatttttactgagcttgaaattccttatagggttttaaatatttgttcttttgatcttggttctccagcttataaaaaatatgatattgaagcttggatgcctggaagagacggaaaaggtggttatggggaggttacttcaacttcaaattgtacagattatcagtcaagaaggcttaagattagatacaaagatcaagatggacaaaataaatttgcacacatggtaaatggaacagcaatagctacaacaagggttattatttctatacttgaaaactttcaggatcaaaagggaggagttagaattcctaaaagtttggttaagtatacaggctttgattatattccttttaagaattag

SEQ ID NO: 10877 - DNA, 246 bp, Borrelia burgdorferi
atgagaaaagatatacatcctaaaaataatttagtggtatttaaagacggatcaaatggagcaatgtttttaaccaagtctactttgaattcaaaggaaactattaaatatattgatggaaaggaatatccattggttactgttgagattacaagcaaatcccatcctttttataccggtcagcaaaagtttgttgatgcagcaggaagaattgataaatttaataaaaggtataaaaagtcctaa

SEQ ID NO: 10878 - DNA, 1548 bp, Borrelia burgdorferi
atggataaaaaaaatggtggatttgatttagaaagtgaaataaggcggttggatgtttctaaagagtttaagattgaagataatttgaaaaaaaaagtggttaaagttgttgctaaaaaggattctgcatctagcgtgacaaaatctgcagatttaagtggcgtaaaggattcaaacggggtaatattttctgattttgattatgatattccttcttcaggtttagaaaataatattaaaactttagagcaaagtaatatcatcaaattttttaatggtaaagattatgtagagattgaaaaactttatgataagccaattacagaggttagaaaaattgttgaaggtcttgggaccaatcatactattgctgtaacaatgaaaaaaaccgaattaatatttttattggtgaaaatattaagtgagaataatattgatgttttatttacaggtgtgcttgatgtgcttagtgatggttatgggtttttgagaactgcatcaaattcttatctttctggaggcaatgatgtttacgtttctccctctcagattagactttttaatttaaggacaggtgatattttatatggccaaattagatcgcctagagatggtgagagattttttgcaatggttaaaattaaatctattaatgatcaagatcctacgtttgctcaaaacagaataccttttgataatttaactcctctttatcccaatgtgaaattgaatcttgaatatgaaaattgcaatatttctacaaggcttattaatcttttttcacctataggtaaggggcaaagggctttaatagtttctcctccaaaagcgggaaagactaccctgcttcaaaaaatagctaatgcaataactactaattattcagatgttattttaatgatactacttattgatgagaggccagaagaagttacagatatgattcgtagcgttaaaggcgaagtaattgcatctaattttgatgagcaggctagtaggcatgttcaggtagcagagatggttattgaaaaggctaaaaggcttgttgaaaacaaaaaagatgttgttattttgcttgattctattacaaggcttgcaagggcatataatcaaactatgccaacttctggtaaaattttatcgggtggggtagattctaatgctcttcataagccaaagaggttttttgggtctgctagaaatatagaagaagggggaagtttaactattatagctactgctttggttgatactggtagtaaaatggatgaagttatttttgaagaatttaaaagtaccggtaatatggaattaattcttgatagaagtttggcagacagaagactttttcctgctattaatattaaaaagtcaggtaccagaaaagaagaattgcttcttagtgaagaggagcgttctaagattttgcttattagaagaatacttggaggtgttgatgattatgagggagttgaagttctgatagaaaagatgaaaaaaagcaaaaacaatgaaattttcttgaagacaatgagcaatggtaattga

SEQ ID NO: 10879 - DNA, 327 bp, Borrelia burgdorferi
atgtctttttcaagaagaccaaaggttactaagtcagacattgttgatcaaatatctttgaatattaaaaataataatctgaaattagaaaaaaaatacataagacttgtaatagatgctttttttgaagagcttaaaagtaatctttgttcgaataatgttattgagtttagatcttttggtacatttgaagttagaaaaagaaagggacgcttaaatgctcgcaatcctcaaacaggggagtatgttaaggtcctagatcatcacgttgcgtattttcgtccaggcaaagatttgaaagagagagtgtggggtatcaaaggttaa

SEQ ID NO: 10880 - DNA, 324 bp, Borrelia burgdorferi
ttgactatatttgaattagttgatatattaaagctattgtttaataatattattaaggagtataacttgagaaaaaatgcatctgcattgaagcgctctcgtcaaaatttaaaaagaaagattagaaatgtaagtgtaaaaagtgaattaaaaacaatagaaaaacgctgtatcaacatgataaaagcgggtaagaaagacgaagctattgaattttttaaatttgttgcaaaaaaactagacactgctgctagaaagcgaataattcataaaaataaggctgctagaaaaaaatctcgtttaaatgttttgctgttaaagtaa

SEQ ID NO: 10881 - DNA, 1107 bp, Borrelia burgdorferi
atgagacttaatgcggggattgtgggacttcccaatgtgggtaaatctactttattttcatctttgacatcatctaatgttgagatcgcgaattatcctttttgtaccattgagccaaatataggaatagtagagattcccgatgaaaggcttttaaaaatctcagagtgcattattccacgcaaaattattcctgctgttatggaatttgtggatattgcaggtcttgtcaaaggagcatcaacaggcgaagggcttggcaataaatttttggctaatattcgcgaagtttctcttattgttcatgttgtaagatgttttgaagaaaaagaggttattcatattaatgacgatattaatcctgagaaagatataactacaattaatgttgagctttgtctatctgatcttgaaactgttcaaaaaagccttcaaaaacaagaaaaaaatgccaaaagcactgataagaaaattagtgaatcttctaaggcaattgttttaatgttaaaaagacttgaagaccatttaagcaatatgaatcctgctgttgagtttaaatttgatgattttgaatacaactttattagatcattaaatcttttgacttttaaaaaagttttgtatgtttgcaatgttgatgaaaattcacttagcggcaataaatatacagatattgtaaaaaatattgccttgaaagaaggaaatgattttttaatcttatgtgccaaaattgaagctgaacttgcccaaataaaggatatatcttataaaaatgaaatgttaaaattatttggaataaatgatagcggtcttggcaatttaattaaaaaagcctattatactttgggccttagaacctattttacagcaggtttgcaagaagttagagcttggacattcaagcagggcatgagagcacccaaagctgctggaataattcatagtgattttgagagaggttttattaaagcagaagtttattcttgtgaggatttatttaaatttcaaagtgttcaaaaattaaaagagaaaggacttgttagaattgaaggcaaagaatatattgtaagagatggagatgtaatcttttttaaatttaatgtgtag

SEQ ID NO: 10882 - DNA, 1566 bp, Borrelia burgdorferi
atgaaaactagatgcttttgcttagccgcattttcaggaattcttacaacacttgcaattccaaatgaaattaaagaaaccggatattcaatccttggatttgttgcttatgtaccactttttatagccttaaacaaactagaagataaaaaagcattaatgggactgacggtattttactttataatagccaacagcctgcaaaatttttggcttgggttttttcatgcatttggatggattacattcattggagtgataatagggtacattccatattcactaactttaggctatttcctttattactctttaaaaagctttaaaaataaaacgatgagcataacaatgctttttacattttatgattactcaagatcaattggatttttagcatatccttgggggcttgcagctttcaccgtaaataacttcaacaatttaattcaaatagcagacatttttggtgtattttttgtatcatttgcagtctactttttaaactcgggaattgcagactttctaatccacaaaaacaaaacaaatttgctaaacatagcatttccaacattgctaataacagcatcttttacttacggaatgatcaaaaaaattgagctaaaaaacttattagcaaaagaaatagacagtctaaacattgcagctattcagcttaacactgatccatggttgccaggaaatgacaaaaaaggaataagagactctattgaaattacagagcaagccttaaaagaaaatccaaaaatagaatttgtaatctggagcgaaggggtgctaacttacccttttagcaaagaagatcagcactttaaaagctctgatttgcacaatgagcttaaaaattttataaaagaacacaaaatcccatttgccattggggctccctcaaatttggacaaagccatagggattcaacaaaattctatttatatggtagaaccaaacctcaacattacaaacatatattccaaaatattcttagtcccttttgcagaaaaaattccattttacgaatataaatttgtaagaaacttttttttaaaaaactttagaattttaggacagattgaaggaaataaaatcgaaatattaaaattgaaaaagtttaaatttgctcctttaatatgctatgatgatgcatttccagagctttcaaggttttacaaaacccaaggcgctaatatattagtaaatttttcaaacgattcttggtcaaaaacaaattcagcagaatggcaacactttgttgtggctaaatttagaagcattgaaaatggaatcaaaactattagagctacaaactcaggaattactgcaaccatcaacgaatatggagaaaccattaaaaaattggaaacttttaaaaaaggatacctattatcaaccgtaaaactgtccccaacgtttacaaccatttatgaaaaaattggagactcgtttatacatatattagtgatgatgtttttaatcacaacactaagatttcaatttatggaagacaaaaaccaattattatcatcctctgtagtaaaaattaaagtttga

SEQ ID NO: 10883 - DNA, 765 bp, Borrelia burgdorferi
atgaattatacaaaattccaagaatttatatcggaatttttgggaacatttatcctattggctctaggaactggatctgttgcaatgacagtattattttcctcaagtcccgaaataccaggagaaataataaaaggaggatatacaaatatagtatttggatggggattgggtgtaacgtttggtatttacacagcagcaagaatgagcggagcacacctaaacccagctgttagcataggattagcaagtgttggaaagtttcccgtttcaaaacttttacattacattgtagcacaaatattaggagcttttacaggtgcattaatgacacttgtcgtattttatcctaaatggatagaaatggatcctggcttagaaaatactcaaggaataatggcaactttccctgctgttcctggatttttgcctggatttattgatcaaatttttggaacttttttgctaatgtttttaatttctgttgttggagattttacaaaaaaacacagcgacaatccatttattccttttattgtaggagcagtggttttatcaatagggataagtttcggaggaatgaacggttatgctattaatcctgcaagggatctgggaccaagaattttactcttatttgctggatttaaaaatcacggatttaacaatctaagtatagttattgtaccaataattggcccaataattggagcaattttgggagctacaatttacgaatttacactaaaaaataacaaagactaa

SEQ ID NO: 10884 - DNA, 1506 bp, Borrelia burgdorferi
atgaaatacattttatctattgatcaaggtactactagctcgagagcaatggtatttgataaaaatgcaaacataaaggggtttgctcaaaaagaatttactcaaatttatccacaaccaagttgggtggaacatgatcctacagaaatatggggctcacaacttggagttataacagaagctatggcaaatgcaagaattttgcccaatgaaattgacgctattggaataactaatcaaagagaaactacggttatatgggaaaaaaatacaggaaagcccatctacaatgcaatagtatggcaagacagaagaactgcaaaaatttgtgaccaattaaaaaaagaaggaaaagataaaattattttggaaaaaacaggcttggtgctagattcttattttagtggaacaaaaataatgtggatattggataatgtagaaggtgccagacaaagagccgaaaatggcgaattatgctttggaacaatagatacatggatattgtggaacctgactcaaaaaaaagaacatgcaaccgattactctaatgcttcaagaacattattattaaacattaaaacattagagtgggatgatgaacttttaagcatattaaatgttccaagggcaattttgcctgaacttaaagaaagttctacaatatacggcaaaacagacaaagcactatttggagcagaaattcctattgcaggaattgctggggatcaatttgcagcaacatttggacaagcctgccttaaaaagggtatggccaaaaacacttatggaactggctgcttcttaacggttaatataggaaaagaaccaatcattagccacgacaagcttttaacttcaattgcatggggaagaaaaaaatctgtaacctacgttcttgaaggaagtgtttttattggaggagctgtaatccagtggttaagagacggtcttgaatttttcagaaaaagctcagatgcagaagcgttggcaagctctgtctcagataatggtggagtttattttgtgccagcatttgttgggcttggtgcacctcactgggattcttatgcaagaggaacaatcatcggaataacaagaggctcaacaaaagctcacattacaagagctgctcttgagagcatcgcatttcaaagcttcgatatactaaataccatgaaaaaatccattcccaactttgaaattcaagaattaagagtagacgggggagcaagtcaaaacaatctattaatgcaatttcaagctgatcttttagaatgtaaagttgtaagaccaaaaataacagaaacaaccgctcttggcgctgcttatcttgcaggacttgcaacgggttattggcaaagcgccgaagaaatcgtaagcctttggcaagtagacaagatatttgaaccttcaatgccaaaaaatcaaaaagaaaagcttcttgagaattggaacaaagcggttggaaaagcaaaatcctggatacagaattctcatagttcataa

SEQ ID NO: 10885 - DNA, 606 bp, Borrelia burgdorferi
atgaaaacactattttttgcaacaacaaatgaaaataaaataaatgaagtaaaaaatatattagatatacctaatttaaacttaatagtccctcaaaattttaacataaaagaaacaggaaaaacatttaaagaaaactctttacttaaagcaaaagcactgtttgaaattttaaataacaatcaaaatgttttcggagaagattctgggctgtgcattgaggcactaaacttggaacctggaatttactctaaaagatatgacacttataagctatgtaaaaaattaagcactaatgaaaaaaatcaactaattttggacttaatgaaaaatgaaaaaaacagaaaagcatattttatatgcaacataagctatatatcaaaaaatgggcaaatattaaattttgaaggaattattaagggaaaaattgccttaagtttaaatgacaagaaaaactatggatttgggtatgattcaatatttttaactaaaaataataaaaagcttagtgatctaacacttgaagaaaaaaacaaaatatcccacagaggaatagcatttttaaaatttaaaaaatttttactaaaatctttattcaatagttaa

SEQ ID NO: 10886 - DNA, 2523 bp, Borrelia burgdorferi
atgtctaaatacgaattcataaaaattgaaaaaaaatggcaagaattttgggataataacaaaacatacaaagtagaagaagatccaagtattcccaaggaaaaaagattgtatatacttgacatgttcccctatccttctgccaacgggcttcatgttggtcatccagaaggatacacagcaacagacatatttggaagatacaagcttttgaatggatttcatgtacttcacccaataggatttgatagctttggacttcctgctgaaaattacgcaatacaaacaggaactcaccctcaaaaaagtacagaagaaaatattaataagtttaaaaaacaaataaaagctttggggtttgcctatgattgggatcgagaaattagaacacatgaggagaattactataaatggacacagtggattttcctgcaattatataaaaaagggctagcttatgtaaaagaaatgcctgtatggtactgccccgagcttggaacggtactagcaaatgaagagattattcaaacttcagatggaccaaaatctgagagaggatcttacagcgtcgaaaaaaaatatttaagacagtgggttttaaaaattacaaagtatgctgaaagattgctagacgaccttgaagaattagaatggcctgaatctgtaaaagaaatgcagcgaaattggattggcaaatcaacaggagttgaaattgaatttgaaattgaaggccacagcgataaaattaaagtctttacaacaaggccagacacaatctttggcatcacatatttagtgatcgcaccagaaaataaactaatagaaaaaataacaaagaacaactttaaacaaaatgttttaaaatatgtaaagcacgaagaactcaaaagcgatcttaataggacttctcttgaaaaagataaatcgggagttttcacaggatcttacgcatttcatccaataacaaatgaaaaaattccaatttgggttggaagctacgtactaggaacttacggaaccggagctgtaatgggtgttccagcacatgatgaaagagactttcaatttgccaaaaagtatcaattaaaaattttacccgtgatatcaaaatcggggaaaaatgaaatattagaaaaagcatttgttgatgatggaatttcaataaattctcccaatgaatttaataatcttaaaaattctgaagtaaaagacaaagtaataaaatggcttactaaaaacaaaaaagggaaagaaaaagttgcctacaagcttagagattggattttttcaagacaaagatactggggagagcctatacccattttgtttgataaacttggaaatgcaatacctttagaggaaaatgatcttcccttaaagcttccagaaattgcaaactataaaccttctggaacaggtgaatctcctttgtcaagaattaaagattgggtaaacgtaaaagatatgggctttacaagagaaacaaacacaatgcctcaatgggcaggctcttgttggtattatttaagatacttagaccccaaaaactcaaaagagtttgcaaacaaaaaaaaaattgaatattggatgccggttgatctatacataggcggagctgaacatacagtattacacctgctttactcaaggttttggcacaaggttctttatgatctaggatacgtaaataccaaagaaccttttaaaaagctaataaatcaaggcataataacatcattttcttatcaaaaagaaaacggggttttaatacccaatgaccaagttatagaaaaagacaataaattttttgataaaaaagataacaaagaagtaacccaagtaattgccaaaatgtcaaaatctttaaaaaatgtaataaacccagacgacattattaaggaatttggagcagactcaatgagaatttatgaaatgtttatggggccactaacagattctaagccttggaacactaaaggaattattggtgtttttcgatttttaaacaaaatttggaacttaagagaaaaagaactatcaaaagagaatcccccaagggaaataatatctgaactacataaagtaataaaaaaagtcacagaagacacagaaaaactaaattttaacacagcaatctccgccatgatgatatttataaatgaacttctaaagtatgaaaaaaattatttaaacatatttaaaccgtttatcattattttatctccctatgcaccccatttagcagaagagttgtgggaatatattggagagcttcctagtttattcaaaaattcaaaatggccaaaattcgatgaaagccttattattaaaggcaaaaaagaaattgtcttgcaaataaatggaaaaataaaagacaaaattttactaaacaaagagacaggcgaaaaagaactaaaagaaatagcaatggaaaatagcaaaataaaatcaaacttattaaataaaaaaatagtaaaaataattgtaattaaaaacaagcttgtcaacatagtgataaagtaa

SEQ ID NO: 10887 - DNA, 2127 bp, Borrelia burgdorferi
atgaaaatttggaaacaaaaagaaactaatatacaggcccaagaattaactcgcattgctaagcaatataatatcaatgcctttgaggcaactttacttataaatcgagaaatcaaagaagaagattttatgtttttccttgaagacagcgtaaatttattacacaacccatttttattaaaaaatatagataaatttataaacagaattaataaagcaatcaaaaataatgaaaacatattaatctttggagataaagatgctgatggaatcacagcaacaataataatgtacgaaactcttaaagattttggacttaatgtgagttataaaataccttcaaatggagagttttatggactttcaaacgaattaatcaacacagctttagaaaaaaaaatctctttaataataactgttgataatggtatttctagcattgaagaaataaattatgcaaattcaaaaggaatagaaataataataacagaccatcatcttccaggcgaaaattttaaaactgaaaacatagttataaatcctcacctaaaagatgacaaatatccattcaaagaaatagcaggatgttgtgtaagctttaaagcttgccttgctcttagtatgtcctttacagacctttattctaaaaaccttgtatttttatttttagaaaaaacaaaaaatgaaattattcttcacgcaatagaaataaacaactacattctaaaacaatatctaagattaaataataaaaatgatcccctaattaactcaaacaaactagaaaaatttgtacaaaacaaatgtataataatctttaacaaagaagatcaaaatgaattattaaataaacactttgcaaaaagcataaacataaacacaattgatattagtgaaaattttataaaaaaatacccaaactttagaaaaaaaacattaacagacttaatccaagcaaccaaatatttcaaatacaaagaagttgagattaaagacaagctttactacatattttacaacgtaatttttgaaactaacaaaaatttgctccaaaaatgcctaaaaagacttagttttgttgcaataggaacaatagcagacaatatgcccattattaatgaaaacagaataatcctaaaagtaggacttaaagaaatcgcactaagagagagaatgtctattaattatctattaaaagatggaaacatattaacaaaaccaaatataacttcaacagatattgcatataaaattgcaccaatactaaactcaacgggaaggcttgaaaaagcagatattgcaataaattttttactaactaatgacattaatcaaatagaaaacaaatttaaagaaataaaagaaatcaacgaactgagaaaatacaaagaagaaaaagcttggaattcgcataataaaaatactatttttaaaaatgataaattcatagtttgctatgataacaatactccaaaaggaataagttctagaattgcaactagactttcttcttactatcaaaaagttgctatttttttaacaaagcaagataacattattaaaggatcaattagatcaaacaataaaatcaattcaaaaacactaatatcaataataccttcccatttagtaataaattcggggggccataaagctgcagctggatttacgctgcatgaaaatttactcgaagactttattaaagaattagaatatgcaactacaaaagttgaatatgaaactactaatgaaaacgaatcaataccaatagatgctattcttccaaaaaatttaacaaaagattctcttttcaaaacaatagaaatatttgaaccttatggctatgaatttagagagccaatattattaatgaaaaatgcttaccttcaagaactcaaaataattgacaaaaatcatagctcaaaacatataaatatgcgaattaaatcacaaaacgattattataaagctattttttttaacggaacaaaaaaaatagaagaattggatataaaagaagatcaatatttagacatcatttttacagttaatgaagatttttattatcctagagaaaaaattttgaaaatcatagacataaaaaagaatgctcaaatcaatgtatag

SEQ ID NO: 10888 - DNA, 210 bp, Borrelia burgdorferi
ttggtaacagtcactgtggacaaaaatgaaaatcttgaaaaagcattgaaacgttttaaaagaatgattgaaaaagaagcaattattcgcgaatggaaaagaagagaatactatgaaaaaccatccacaatacgtgtaaaaaaggaaaaagcttttaaaagaaaacaggcaaaaaaagtaagaaaattaaaacaaaaaactaatagatag

SEQ ID NO: 10889 - DNA, 2364 bp, Borrelia burgdorferi
atgaaagatttttatcagtattttcaatttttgttttttttcatgctttcggttatttctttttctctttttgtagcattaacccctttgagcaatgtatttgtattttttgttttcaatttactagggcaaatacttcttaatgttttttcatttttgtcattttatttaatagtatatccaattgttaattggtacgcctataaaaaacatatttttactaaacgatttatatttaattggaattataccgtaatattgttttttactttaatatttttaataaaaattaattctaatgttgaaaaatcttattttattaagatatttcttattaattttggtatagtattggggaatttttttatttttactcttttaattttagaatttgttgtgtggatttacttaaattatgtcttttttaaggatgttaattttattttagatacttttaaatttttagagtttaagattaaaattttgtttgaaaatatattaagttattttcccttttcaaattcattggatgtaaaaaaagatattaaagtttatggagattctgtagatgatcttaaagattctcaagtttttgatgaaaaaaagaatattattaatgatgaagaatatcaggctttatggtcatttagcgcctttttaagaaacaataaaaagccttccaatattaatttagacaaaactatttttgaaggctcagatctcaaagaagcaagctctttaaataaggatattttaaatgagaatgctttaaatttagatgaaaatgtagatgaaattgatgagtcttgtgagtataaatatttagacaatcttgaggataataagttagttattagtggaaaggttaaagcctgtgagataagaactaagggcataattagtcaggtcgctatttctcatgtttataacgaaaatgtagctttgaataaaaaaaatgattcttacgttattgatatttcagtttttgaccagaaagagattaaaaatgatgtagaggatattgaatatgataaagaaattcaaaagcaatcaatgattctccaggagacattaaaagagtttaatattaatgctaaattaattgatattattaaaggccctgttgttacaatgtatgctgttcgtccagataagggaattaagctttctaagattacttctatttctgataatattgccttaaggcttgcggctattagggttaggattattgctccaattcctggcagagaagctgtaggaattgaaattcccaataaaaggcgtgagtttattttaatttcagagataatagacagcaaggaatttagaggtgattttagaattccttttgctcttggaaaggagattagtggcgaaaatattgtttttgaccttgttaattctccacatttattaatagctggtgcaactggggcgggtaaatctgtttgtgtgaattctttaattgcttcaattattttttcaaaatctccagatgaagtgaaattaattatgatagatcccaaaatagttgagcttaaactttttaatgatattcctcatttattaactccagttattacagatgtaaagagagccttagaggctcttagatggtgtcttgatgaaatggaaagaaggtatgtgcttcttgataatttattggtaagagatatttcttcttataataaaaaaataaaagatgagaatttgaatttaatgattttgccatatcttgtaataattattgatgaatttgcagatcttattctttctgcaagaaaagatttggaaaatttaatttctagacttgctgcaatggctagagctgtggggattcatttggttcttgcgacccaaagaccttctgttgatgttattacgggcgtaataaaagccaattttccttcaaggatttctttcatggtggccagctctatggattcgagaataattcttggatcttctggtgctgaaaaacttttaggaaagggggatatgctttatattagctctttaaatccttttcctckaagaattcagggtggatttttaaaggaaagagaagtttacaggcttgttgaagaggttaaaaaatttggttctccaaattatattgatgatgaaatatttattgatagtgtaaaagagccagatttggttgctcttggaccttctgatgagccaatgtttgatgaagctcttgagattgttaaaaccacaagaaaagcctcagcatcttatctgcaaagaagactgaagataggttacaacagagcagctagaattattgaaattatggaagatatgggatatgtaggacctgttaatggatcaaagccaagagaggtgttaatttaa

SEQ ID NO: 10890 - DNA, 1254 bp, Borrelia burgdorferi
atgattataccaaaaaaaaagcaaagggtagaaaaacgtaaaaaaaattttttattcaatagcaaaaagagtgttaattttgaattaaaagattttgcaaatatttctaatattggtaaaagaagaaaaaaagtttttaagattaagaacttctttaaaaaaaaaatcaatttttttaaaaaagtttctttatttttctataagcttaaaatacaaaatattaatcattatgaatataaatattattacaagagcttgagagataaagtttttgatatctttagtgtaagattcgattataaacttgtttttaagcttaatgcaataatctttatttttatattaacattttatattaacattttttcttattatggctcgtatgtttttttaaataggctttctttgcccaaagattattttattgatacatttttatattatagtgatcaagatatagctcaaattagtagttatttacctgaatccaatgtttctgcaaatgttcctggatttaaaaaaaattttgtattaaaggtatttgatcataaaattaagcctggagaaacgctttcgcatgttgcagctagatatcaaataaccagtgaaactttaatttcttttaatgaaattaaagatgtaagaaatattaagccaaattcagttattaaagttcccaatatgaaaggaattgtttatattgttaaaaaaaatgactctatctcatctatagctagtgcttataatgttcccaaggttgatattttagattctaataatcttgataatgaagttttatttttagggcaaaagttgtttattcctgggggaagattgcccaaagattttttaaaagaggtattaggggagacttttatttatcctgtgcagggtgttattacttcggggtatggctatcgaccagatccgtttacaggagttattagttttcacaatggaatagatattgcaaatttagctaatacgcctattaaagcctcaagagaaggtgttgttgtaactgcaggatttaatgcgggagggtatggaaaatatattgtcatttctcacagcaacggattccaaactttatatgcacatttgaattcttttgccgttaaggttggaaaaaaagtttcaaggggagcggtaataggttatatgggaagcactggctatagtacgggcaatcatttgcattttaccatttttaaaaatggtaaaactgaaaatcctatgaaatatttaagataa

SEQ ID NO: 10891 - DNA, 507 bp, Borrelia burgdorferi
atgagaatatttaaagctcacaaatatgaactagcgtcgattttagccgcttgcttatttttaataaccttaataaagttattcttatcattttacatagtaaaaggcgaatcaatgaccccagcaatatttgaaaaaaattggattgtaaatcacaagtttgcatatggacttaggattaaaaagcaccaaaaataccttttattatggaaaaccccccaaaaaaatgaaatggtgcttattaaagatcccataacaaacaaaattgccattaaaaaaatttttgcaattccaggagaaaaatttaaacaaatagaaaaaaatacaatatgcatacatgatttaaactttaaaatagatgaaaatattttaaaaaaaaatactaaaaaaattcctgaagaccactatttagttataggagaaaacaaacagatctcattagactcaagagattacggatttataaaaattgataatatattgggaaaaataatttattacttttaa

SEQ ID NO: 10892 - DNA, 1119 bp, Borrelia burgdorferi
atgataaaagatgaatttttgattaaaagttggtatattccccttgattttttttccgcagatgatgagggaagaaccgaattacctactgaccagaaaaagcaaaaagcaagagaagaaggccgggtattaaagtctactgaaattaatactgccgttagtcttttgttgttatttgcattgttttttttcatgctttcttattttgctttagatttaatagctgtttttaaagagcaggccatcaagcttcctgaagttatgcgtatgagtgtttatactatgggttttgcatatattagatctatcatggggtatgtcgttttgttttttttcgcatctttagctgttaatttttttgttaatattattcaagtaggcttttttattacttttaaatctttggagccaaggtgggataaaattagttttaatttttccagatgggcaaaaaattcttttttttcagcaggggcttttttcaatttgtttaaaagtttgttaaaagttgttataatatgcttgatatattattttattatagaaaacaatataggcaaaatttctaagctttcggagtatacacttcaatctggaatttctattgtgttagtgattgcctataagatatgttttttttcagtaatgtttttggcaattgtaggggtgtttgattatttgtttcaaagatctcagtacattgagagtttgaaaatgacaaaagaagaggtaaagcaggaaagaaaggaaatggaaggtgatcctttacttcgatctagaataaaagagagaatgagggttattttaagtaccaatttaagagtagctattcctcaagcagatgtagtaattacaaatccagaacattttgcagttgctattaaatgggatagcgaaacaatgttagctccaaaggtgcttgcaaaaggtcaagatgaaatagctctcacaattaaaaaaattgcaagagaaaataatgttcctttaatggaaaataagctccttgcaagagctctttatgctaatgttaaggttaatgaagagattccaagagaatattgggagattgtttcaaaaattcttgtgagagtatattctattactaaaaagtttaattag

SEQ ID NO: 10893 - DNA, 444 bp, Borrelia burgdorferi
atgaataaaataaacggtgttgaaaatgtttttaatttaaatattagcaataaagttaaaaaaaaaacagattttaatgttgacaatatatctaataaggttaatcttggcaaggatgattttttaaagttactcattactcaacttaggtatcaagaccctacaaatccaatgaaggataaagaatttattgcgcaaatggcgcaattttcggctcttgagcaaatggctaatatgagtagatcgtttgaaaaactttcatcttctttagaaataagaaaagatttggatttattaggtaaagtaattaaatttcagcatggtgatggggagattgttgagggtcgcgtcacaaacattaagacaggcgcaatacctcaagttatggttaatggtaattattatgtatataaaaatatattatcggtaggtttggaggaataa

SEQ ID NO: 10894 - DNA, 1185 bp, Borrelia burgdorferi
gtgtatatgagtaatttattaaatttaagtaaagcttatggaaataaattaaatctcttgaatacaattaaggggttaaatttaaatgtttctaaaatggaatctaaaggaaatgcgagctcttttttaaatgttatgtcttctgaatctaaaaaattagctaaagcaaaatttatgatatttgattttttaaatttttttaaagacaatggacttattgctaaaaatttaaaaaaatcacctttaaataaatcctttttttttaaaaaacttgaaaatgaagattttgtttccgatttgaaatccttgattgctagaatgaatgtatttttagattttgaaggtttaaatagcattaaagaagatttatcatccaattttgattttctaggtaaagaaaaattttttgaaaaaatcgaaaaactttgtttggcttttaatgatttaagttcttttttgggttttgattttttaactgctttgattgatgattattataatcagataagcttgaatgataaaaaggaagaaaagaatgttattaacattgatgtaaaaaactttaaaaagaataatagtgatcataatgattttgttttttcaaagtttagcttaaatgcaattgatggtcaaaattttgttgataggtataaagttaaagaaatatcaaacgattctttaaaaggctttgttgaagaatttgctaattataatataaaaagctctaaagatgttggaggctttgattttgtcagcagtttaaagccggagtggaatcttaagattaataagaatattgtggataaagctaaagttgtgttaaaatcgaataatacaggagagattaagttggttttaaagcccaaagagcttggtagtatacgaattaatttaaaccttgattcaaataataatttattgggaaagatcgtagtggataatcaaaatgttaaaatgctttttgaccaaaatatgcattcattaaataaaatgcttggtgagagtggttttaatgccagcttaaatctttttcttgcaggtgagaatttaaattcttttactggaaattttaaagatgactctaaggaccaaaattttcattttggttataataaattttttaaaattgaagaagaagttgaattttcttacgatgtagataaaaatgttaatttaattgtttag

SEQ ID NO: 10895 - DNA, 1035 bp, Borrelia burgdorferi
atggaagaaaaaaaagaaaaggagattctggatgtttctgctttaacaggcaagcaaaaggccgctattttgttggtttcaataggttctgaaatctcttctaaagtgtttaagtatctttctcaagaagagatagagtctttgacatttgagatagcaaagcttgagacaattacttctgagcttaaagataatgttcttttagagtttaaagaattaatgatggctcaagaatttattcaaaagggtggaattgattatgcaagagagcttcttgaaaaatctcttgggactcaaaaagcagttgatattattaataatttgggttctgctttacagtctagaccctttgaatttgtaagaagagcagatcctgcgaatattttaaactttattcagcaagaacatccccaaacaattgctttaattctttcatatcttgatcctcaaaaggcttcttttattctctctagtttgcccacagaagtacaaaccaatgttgcaagaagaattgcgttaatggatagaacttctcctgaggttgtaagagaggttgagagggttcttgagaaaaaactagcttctctttcttcagaagattatacatcagcaggaggagttgacaatgttgttgagataattaatatggctgatagaaaaacggagaagtttattattgaatctcttgaagaagaagatccagagcttgcagaagagattaagaagaaaatgtttgtgtttgaggatatagttttacttgatgacagatctatacaaagggttttaagagaaatagatggtcaagagttggcaaaagctttaaaatctgtagatattcctgtccaagaaaaaattttcaaaaacatgtcaaaaagagcggcttcaatgcttaaggaagacatggaatttttgggacctactaggcgaaaagatgttgaggaatctcagcaaaaaattgtttctcttattagaaaattagaagaacagggagaaatagttatttcaaggggtggtgaagaagatgtgcttgtctga

SEQ ID NO: 10896 - DNA, 549 bp, Borrelia burgdorferi
atgagctttaaaggaaccacagttattgcaataaaaaaaaatggtaagactgtggtggcagcagatggacaagtaacttttggacatactgttttaaagagtaatgctattaaaatacgaaaattgcttaatgggaaaattttggcaggatttgcaggttcaacatctgatgcaattactctttttgaaaaatttgaagaaaaaatcaaagcaaaaggtgatggcttgattgacattaaaagggcggctgttgaccttgcaaaagattggcgttctgacaaaatactgcataagcttgaggctatgatgcttgttgctgattctaacaatattcttttgatttctggtactggtgatgttgttgagcctgaagaggatgttatttcgattggcagtggtggtaattatgcatattcagcagctcttgcttacatggagaacaaaaaattaagcgcttttgaggttgcacttagatctttaaaaatagcagcaagagtgtgtatatatactaattctaatattgtgcttgaggagattgaaaatgaataa

SEQ ID NO: 10897 - DNA, 1215 bp, Borrelia burgdorferi
atggaggaagcgttaatgaaagattataatatgattgatagccatacaagaagatttgattctactacaaatcctacaattcttaaggtgattggtgcgggcggaggaggtagtaatgctgttaatcgtatgattgaatatggagtaagagatgttgaatttattgtggctaataccgatcttcaggctctccaaacttctattgctcccataaaaattgcccttggagcaaaagttacagcagggcttggtgctgggggaaagcctgagattggacaagctgcagcagaggaagacatagatgttatacgaaatcatctttctggtgccgatatggtgtttattactgctggtatggggggcgggacaggaaccggagcagctccagttattgcgcaagttgcaaaagagcttggtattttaacagttggagttgtaacaaagccttttaagtttgaaggtcctaagaagttgagacttgctgagcagggaataaataacttaagaaagtctgtagatacattgatcattattccaaatcaaaagcttttaactgttgttgacaaaagaaccaccattaaagatgcttttaagcgtgcagatgatgttcttagaatgggcgttcaaggtattgcagggcttattattgagcatggagaggttaatattgattttgccgatgttaaaagcattatgcaaggccaaggagatgctttaatgggaataggatatggcaagggcgaaaacagagctgttgatgccgcaacttctgctattagtaatccattacttgaggaagttcgtattgaagggtctaaggggcttcttgttaatgttactggcggagatgatttttcattgcttgaacttgaagagattatggggataatcacggttagtgttgatgatgaggctactgtaatatatggtcatgctattaattcgaatcttgaagatgaaatttacgttacagttgttgctacaggttttgcatctaaaaagcaaaaagaaatatctagcacaccagaaaataatactttaagttccaaagagtttgatactttaatgtctggcaatcaaaatgctccttctggatcttatgagcaacaagattcttcttttgcggcaaagtccaaaaatgttaattattttgatgatgacattgatgttccaacatttcttagaaatttaaataaaaaaagtagcgatgattag

SEQ ID NO: 10898 - DNA, 1242 bp, Borrelia burgdorferi
gtgtctaggaatttgatagtaggtttagatgttggaacttcaaaaatttgtactgttgttgccgaggtgaatttaaatgatcaattagaaatagttggaataggcactagtatatcaagaggagttaggaagggagttttaataaatattgaggcggctcttgattcaatatctaattctattgaggctgcagagctcatctcaggatgtgacattacatcactttcagtttctatgtctggaagtagtgttgaggggactaattcacgcggtgttgttgcaataaattcaaaaacaagagagattaacgaagaagatgttgaaagggtaatcgaagcggcaaaggcaattgttattccaatggatagagaaattcttcatgttattcctcaagaatttattgtagatggaataccccatataaaaaatccaatagatatgatgggtattcgtcttgaaggagaggtgcacattattacgggctctagttcttctagtcagaatttagtcagatgcgtaaatcgagctggctttgccgttgatgaggttgttcttggaagtctagcttcatcttatgcaactctttctaaagaagagcgtgagatgggggttttatttattgatatgggcaaagggacaacagatattattctttatattgatggttctccttattatacgggtgtaattcccattggtgttaatagagtgactcttgatattgcgcaagtttggaaggttcctgaggatgttgctgaaaatattaaaataacagctggcattgctcatccgtctattcttgagagtcaaatggaaactgtaattattccaaatcttggaactcgaccccctcaagaaaaaagtagaaaagagttgtctgtaataattaattcaagactgagagaaatttttgaaatgatgaaagcggaaatacttaagcgcggactttataataaaattaatggtggaatagttttaacaggcggaggagctttattcccaggcatttctaatttaatagaagaggtatttaattatcctgcaagaataggtttgccaatgagtattaatggaattggagaagagcatatagaccccaagttttcttcagctcttggtcttgttctttataagcacgagcaacaaaaattcaataaattaaagaaggtaagcagtaaagttaaaagaaaaaataaaatatcttcaaagttgaaaggttggtttttgaaagaatggttttga

SEQ ID NO: 10899 - DNA, 744 bp, Borrelia burgdorferi
atgatttttgagagaaaatttttaattaagtatatatatttcttgacgtctttaattttttttgaaataataattattatttttgcatctccttattttttgattaggtatattagtatcaataatgatatttctctttctaaagaggatataatcaagatttcaggaatcaagcccaatacgtattatcataatgctaatgttagaatatatgaggagaatcttaaaaaagatttaagggtaaagaatgttaaagttgatcttaagtttcccaataaaattaatattaaaatagaaaaaagaataccgattgctgttgctttagaaaacgtaaatggtaatattacttattattgtattgcatcagatggtgtaattttggaaaaaagtaagcatttaatttatgatttgcccgtaattagcggattagttttgaatgacaacaatgtaggagattttctagaggatagaatgcttaatattgtaagaggccttgattatcttaaaataaatcaaaaatatttgtataatttaatatcagaggtcaattttttaaaattgaatttctatgattataatgtaattttgtatattaaaagtatatataataaaatattgataacagttgatatgaatttaatggatgtgatgcataaagtgtttcttgcggttaatttgcttaaaggaaaacccggcgttatagatttaagaagtggtgatatcattttgttaggagaaagttag

SEQ ID NO: 10900 - DNA, 1095 bp, Borrelia burgdorferi
atggttgtagagataaattcacttaggacatgttatttgcttgttttgctgctattggtagcctatggccttgtagttttttatacttcttccttttttctaagcttagaattgacaggtaatccaaattttttatttttcacaagacttaattatctttttttaagttttatggtttttcttgtttttgaaaggatttctttaaattttttaaaaaaatcaatatttcctgtattgattataactctttttttaattatggcaacttttttatctccaagtatttctggagcaaagagatggatattctttcaaggtgttagcattcaaccttctgagatttttaaaatatcttttactatttatctttcagcttatttgagcaagtttgacccaagaaaaaacaatggtatttcatactggataaagccaatgttgatttttgcaattttttgggtgttaataattttgcaaaacgattattcaacagctatttattttgccattcttttttttattgttttgtttgtttctaatatggcatttagctatgtttttgctattgtggttacttttttaccagtttctgctatattcttgatgcttgaaccttatagggtttctagaatttttgcctttctcaatccttacgatgatccttctggcaaaggttaccagataatagcatctcttaatgctttaaaaagtggaggaattttaggtaaagggctgggaatgggagaggtaaaacttggaaaattaccagaggccaattcggattttattttttcagttcttggagaagaattaggatttttaggggttttgtttgctataagcttgttttttttgtttttttactttggttattttatagctattcattctaatagtaggtttaaattttttattgcatttatttcaagtcttgcaatttttcttcaaagcatgatgaatattttaattgcaatcggtcttttgcctcctacagggataaatttaccatttttttcatctgggggatcttctattattgttaccatggcattgtctggccttatttcaaatgtttcaaaaaatttaagtaataattga

SEQ ID NO: 10901 - DNA, 1056 bp, Borrelia burgdorferi
atgttttaccttttaggtttgcgtttgctcaaatatattacctttagaatggcttatgctacaatttttgcatttttactttctttgattgtgggcccttatattattttaaagttaaaaaaattaagagctgatcagattttaagagaagatggccctaaaagacatttaagtgaaaaagcaggaattcctaccatggggggcattcttatttttttttgtgtttttatctctttagtattttggagcaacattttaaatgtttattttttgattatggtttttgttatgctgggatttgcttttttgggctttatagatgattttttaaaaattaaaaagaaaacctcagatggacttaaagctcgatttaagatttatggacaaataatattttcctttttttctgttggcattttatattattttggtggtgagcatgttagtgtaatctattttccttttattaagtcttttcaaatagatttggggttattttacattccttttggcatgtttattttaatttctgcttctaattctttcaatctaacagatgggcttgatggacttgcaattggattgagtatagttataacaggggctttaataataatagcttaccttacaagtagggctgattttgcagcttatttacatattccaaatattaaaggttctgaagagcttgtaatatttcttggggccttgcttgggggtagttttggatttttgtggtttaatgcctatcctgctaaaattatgatgggagatacaggtagtctggctttgggggccattcttggaatggcagctttgattttaaaaagtgaaatacttttttcaattcttgcgggtgtttttattattgaaactatgtctgtaattattcaagttttggtttacaaaaaaactaaaaaaagagtatttaaaatggctccacttcatcatcattttgaagaacttgggtggtctgaaatgcaagttgttattagattttggataatagggttaatatttgctataattgctttaagcacgataaaaatcagataa

SEQ ID NO: 10902 - DNA, 1395 bp, Borrelia burgdorferi
gtgcgtataaagattaaggatattttaatctcttctaaagatgtgaaatttgtggggaatataaaaaatattgaaagagtagtgtctttttattcgttagatagtcgcgaaataaaggatgacaatatcaatgatagtctttattttgcgtataagggaaataaagtagatggattttcttttgttaaatatttaattgatctgggtgttaaatgttttgcatgctcaagagagcatgaatctgagtgtattaaatatttaaatgacaatgaagggttggtttttttgcttacaagcaatgtaataaaacttcttcaagctttggcatcgtttttaattgaaaaaacaagctttaaaagaattgctattacgggtagcaatggcaaaactacaactaaagagatgctttacagtatactttcaaagaaatacaaaacttacaaaacttggggtaatttaaattctgatattggacttcctcttagtattttaagggtagagggtaatgaagaatatgctgtttttgaagttggagttagttatgttggagaaatggatcttttatctcaaattttaaaaccagaaattgttattattacgaatataagttatgcgcatatgcaagccttcaaggagttgcaagctattgcttttgaaaaaagcaaaataattggcaaaaacattgaaatctttgttgtaaatgaaatgaatgattattgtgtttatcttgaaaaaagagcaaaaatcgcaaatccaaatgttaaaatcgtttattttgattttgaaaatcttagtattaagtcattttcttttttggatgggaaattttcttttgattttgtttacaaagggtttgaatactctattttattgctgggtcggcataatatttttaatgcaatagggtgtattaatttggctttatttttaggaatgagagaaaaagaaataaaagagggccttattgaaactgcttttcaaaagggtagagcagaaattttgacaaaaaatggatatttgattttaaacgactcttataatggcaatatgggttcttttatggccttaaaaaatatgattttagatcttaatatccaaaacaaaaagtttatagttcttgggtcttttaaagagcttggggaattggcatacaaaactcacaaagatttaattcaagaggctatttcaatgaattttgataaaatttttctaattggcgaagaatttttagatgttagggattctgagaatttagttgaaaagtgtttatattactttagcgagtttgataaatttattgatttttttttaaaaagcttggaaccttcagtttttattgtcattaagggctcaaggtttaacaggcttgagagaattttaaatatatttagatga

SEQ ID NO: 10903 - DNA, 891 bp, Borrelia burgdorferi
atgaataataatgcttttcattttccagtacttcttgatgcaatttgtaagcttatagaagatttgcccgtaaaaagtgacttaatatacattgattctactcttggagaaggtgttcatgcaaaggctattcttgagaaatatgactttttaagtttggttggaattgaaagagatcctcaaattttagaaagagcaaggcagtttctttctatttttgaagagagaattacatattttaatgattggtttgataattttttcgtcaattatcctttaaatgtcaaagccaattttattttagttgatcttggtatttctatgtttcattacaagggtagtaaaaaaggattttcttttcttgaagatgagcctttagatatgaggctttgttcttcttcttgcaaaattagtgcggctgagattgtaaacacttatagtaaatatgaccttgaagctttaatttatgatttaagtaatgaacattattctagaagaatttctaaggctattgtagaatatagaaaaattaaaaaaatagaaaccacaaaagagttgcaatccataataagcaaagtttatcctttttcaaaagttaaaataaatccagctacaaaaacttttcaagcgttaagaatttatgtaaatgatgagcttgctcggcttaaaaggagcttgcctttttgggtagaaaatttagctaaagatggaattttagctattattacgtttcattcaatagaggaccgtattgtaaaagatttttttagaagcttgagctgtgatttgtatgctaagatctcaaaaaagcccattatgccaagttttgatgagattaaaaaaaacaaaccttcaaggagtgcaaaacttagagttgtaaaaaaattatga

SEQ ID NO: 10904 - DNA, 882 bp, Borrelia burgdorferi
ttgataaatgcgaatttgacgacattccctataaagatcaatatgaagaataaagttcttctttgcattaatactttaaagtcgggagctagtattttaggcaatgatgttaaagtttatttagaaaccaagtattttgttgaagtagtgttaatagatgttggcagacctttattttcttttccaaaagaaaattttctttttttgataactttaggaggagatggcacagttcttttggctgttaatttgcttcttgaaaatgaaaacattgatattccaattatttcaattaatatgggcaatgtgggatttttagcagatattaagattgaagattttaaaaaagtcatagatagattttttaacaattctttggttattaataaaaaatttttgcttcatgtaacagtttctcaacacggtaaagatttaatttctaaatatgctttaaacgatattattattcgctcaagcgttcttaataaaatgatttatgtagatcttatggttaattctgagagttttttatcatacaaaagtgatgggataattgtgtctactccaacaggctcaacaggatattctttctcagcagggggtcctattttagaagcagatcttgagggattttracttacgcctatttctccacattctgtttataatcgttcttttgtgttctctaaattaagtaaactttccatttctttttcaaaggaatattttatagcagcagcatcaatttttttagatggaattaattttggttctttcggagttgacgttgtttttgaatttaaaatttcttctcaaagcttgaattttgtttcattttgtacggatacttttgttaagagattaaaaaacaaattattgtaa

SEQ ID NO: 10905 - DNA, 1044 bp, Borrelia burgdorferi
atgcaaaataaactatttttaaaaaatattgaaaaaaatattaataaaatcttttcaacaactaattttctaaatttattcaaagataacgatttaaaatttacttttaaaataaaaaaggaaacccttgattatattaaagcaccagcaattgaaattgttaataggggcggaaaacgaataagaccaatgataatgattcttttagcatatgcattgggtttaaaagaaaaaaataccaaactaatatataaattaagcttgctgcttgaacttcctcattctggaagcttgattattgatgacattgaagacaattcactaaaaagacgcggtgcatcagcaatacatttaatctatggaatagataacagtataaatgctggcaatttaatttattttttacctgcaaaattaatagaaaaatcaaatttaaaagaaaatcaaaaattattaatttatgaaaatttctttacaactctttcaaatctccacctaggacaaggaattgatattaaatttcacaatgagtcatacatcccaagtattaaagaatacatctctttagtagaattaaaaacagcttcactttttggaatggccagctttctagctgcaatactcacaaataatgaagacaaagctaaaaaaatttacagtacatttttaaagcttggtgtttatttccaaataatagacgatattaaaaacattaaaaataaaattaatggtaaagaattcggagatgatttactcgaagggaaaaaaagtttgccaataatttattttttacaagaaaaaaagtttgaaccaaaaattatttcaaaattcaatcaaataaaaaataccaaaactaccaaagcaagaaaagaaatatttaaactaacagaaatgataaactcatcaaaatcaataaaaaattcaactattgttgccttaaaatacttaaacgagtttaaaaacgaactcaatttatacccactaacaaatagatataaaaatctactaatagatactattgagcaaataaaagaaggaatataa

SEQ ID NO: 10906 - DNA, 1134 bp, Borrelia burgdorferi
atgaatataaagaataaattaatatcgctgctaattgtagtagcaatctcttttatcgcatgcaaaacgcctccagaatcaagagagagtaaaaatgctaaaattgcacaaccagataataaaaattttcaattaagagatataaaagacattaaaaatgaactaataagagaacggggacatcttttttattccaaagagtttaatgaagctgaaagattagaagaagcaatgaaacaaagtttttccaaaaaaaaagcaatagaaggaaatgaaattgctctaaaagtacttgaaagatacaaaacaataataagagaaacgagggaaaaaaaagaaaaaacaaattaccttaaagaaaatattgaaaagtatctaaacgatgcagaagcaaatgaagcatacatatggatcccgctggaaatcgacgaagtaaataatttatattttgaagcaacaagaaaatataaaaattacgatcttgataatgcccttgacatgtatagcaaggcctttaacagagcacaacaagcagcaaaaaatgccaaagaagctaaagctttaaaagaaactgatgagagaatgtacaaacaattaaaagcacttgaagcggcttccaacttaccaatttatagcaataataagcttataaagccatctccatggaatggtagagcattcattaaagaaagaaacagtcacttaaaccttttaaatactaataaagacacttatcttcttggagaagcagaaatttcaattccaatagtactcgcatacgaagaaaaagtggaaatagcaaaaaactccaaacctcaagaacaattcaaaacgctagaacttattgaaagatctagaacattgtgggaaaaaggggttgaggctaaaaatgtaaaaaactttagacttgccaatgaattatttttagaatctgcaagataccttgaagcttatcaaagcaatgcaagcagcgagctttacgtaataaaaataggcaataccctatggggcatttccaaaaaattatacaacgatccttacttatggccaaaaatttggtttgccaacagacaaaaaatacaaaatccggatctaattcattctaactggaagataataattcctgccaaataa

SEQ ID NO: 10907 - DNA, 2796 bp, Borrelia burgdorferi
atgcctgatgtagataagataatacagtttaaaagagaaatattagataatctttctaatgaaagattatctaaagaatcttttggcttaagtatggatgttaagcttcccgagcctggagagagtattgttccttggataggcgaagatcttgctttagatgaaactgatgatgaacttgatttaaattttatgcttgatgctcttgagaatgaggataaattatcctattctgacatttttaatgacaatttgcctttaagtggttctaacttaagggttgatgtggattcagagctttcaactttaaataatgattttgacgtttcttctagcgattcttttgaaaataatattgacaaagttcttgatgataattctattgatttagaaattgcttctaagcttgattttgacaatttaatcaattccccagaattaagttctgaggagttgattaacaatcaaggcaataataatttttttgaagccaataatgattcttctgttttaggggatagtaattttttacagtctaatgaatttaatattgatgatgcggtaaatggcaaaaaccaaacagatgaacaatcagagatgtttgttggagacagtttaaatttaagtgccgatgaggatgattttgaaaacgttatagatgattttaaatttttagagtatgatcaaaatgcaaattttaaacgttttgaatttaaggttaattatccattatttttaaagcatttaaattcctatcctagaaatttaagaattgcaattgctgaggctttaactaaggaaaatgtttcaaggtttaagcttgaagcgctaattgatcttgttgaaaaaaataaaaaaaggttgaaatttattgctaaatttgtaggagatattgttgggcgatctattaaattgcctgtaatttatttcaaggcggaagaatttagcaagcttcagcaaaaattgagctacagggtttcaagggctttgctacctttgataaaaatagcctctttttttgttgttttagttttagtttctttgtaccttatagtagatgtaatatttttttatgttgcctctgagagcaagtataaagagggcatagaatctatatatgcaaataaaagagatcttgccaaatctatctttagagatgcttactatattaggcctgatgataaatggtttattaattatgctaaggcgtttgaagacgttagagattttgatagtgctgaagagaagtatgaggaattgtttactattgagcctttttctaaaaattctacaaacagaagacgaaaaaagtttaataaggaaggatatatttcgtatgcttccatgaaaattggtcttggagagcactctgaggctaattcaatacttgatgaggttatatcttatgatctttacgattatgatgctttagtattaaagggagataattattttaaatgggctaagacaaattccaactactataaagatagtattaatagctatacggttgtgctttctaaatatggacaaaaaaaggaaattttatttaagcttttcaatgcttatattgaagctaatttagataccgagtctgataatgtcaataattttattaagtcaaatgaaattctagatattgatgaagttgtttacacaaaatatgctaaaaagcttgtagataagtatatttcttttgtgacttataatcaaagagcaaataatcttgctataaatttaaattatcttaatggacaaacaaatttattgaataaggaattttctgattttaaaagaaatgatggcagaactatttttaagcttgacaataatgttaatatgaattcagagattgaatacattctcagaaaaatattaaataaaaatcccaattacgacaaggcactttttgaaagtggaagatattcgtattacataggagattttaagaaggccgaagtttatttgcttaaagcattaaatagttttaggcataaaaattcaattgaagatgctggggacaagatattggcttataaaattttagcagacatttatgaaaaaactcgagattctcttagggctagtaatattattggtttagccttgagtgattattctttttataaaaaacacaatcttataaaaggatctaaggagatttcttcaatttatgaaaagcaaggcgatattcttagatctttaaatgactttaagtctgcgatatcttcttacaaattggcaataaatgagggcgttgattatccagatgtttactataaagttggactacttagttatagagaaaataattatgatgatgcattgaaatatttatttaaagtagagagcatggcggggttttcaagtagtaacgaagttttaaatactattgccctaactctttataaaataggcgattttttagcttctaggagctattatttaagggttatgcaaaatttagaactagagaaggctaatgttttgaattttaaccccaaagaaaatgattatcataaaactcttttattaaaagaaattgagacttataataatcttggggttgtagaagtgatggcttctttttcatctataagagatactaaactttttaattctggagttagcaatttaagcgaatcagccaagatttttgatatattaaatagggatgaagatatggtaaaaagtgttaaaaaagatcttgctagtttaaatctcaggaatatttttaagaatagtttttctaaatctaatgttttattttatgaaaatttatccgaaaaactttaa

SEQ ID NO: 10908 - DNA, 873 bp, Borrelia burgdorferi
atggaaaaagaaaatatattggaaataaaaaatttaacaattgaatttagattaaaacatacaacaattcatcccgtaagcaatgttaacctatctgtaaaaagaggagaaattagagctattgttggagaatctggaagcggaaaatccgtaacaagtatggctattttaaaattattaccagaacttacaacagtatataaaagtggagaaatactatttgaaaatcaagatctgctaaaacttagcgaaaaagaacttttaaaaatcagagggaataaaatatcaatgatatttcaagacccaatgacttcattaaacccatttttaagaatatcaactcaacttgaagaaacaataatcttacaccaaggattagggaaaaaagaagccaaagaaaaagcaatagaaatgttaaaaactgttggtgttgtaaacgcagaagaaagaataaaacatttcccacatcaattttcaggaggaatgagacaaagagttatgattgccatggctcttagctgtcatccatccttattaatagcagatgaaccaacaacagcccttgatgttacaatccaagagcaaatattattattaatcaaaaacctatctaaaaaattcaatacttctaccatatttataactcatgatcttgcggttgttgctgaaatttgtgatacagtatctgtaatgtatcaaggaaaaattgtagaagaaggaacagtagaggaaatatttaacaatcctaagcatccttacaccattgggcttttaaaatcaattcttacgctagaacacgatccaaataaaaagctttattcaacaaaagaaaaccctatgaagatcacaaaaaccagcaccgaggagttttaa

SEQ ID NO: 10909 - DNA, 972 bp, Borrelia burgdorferi
atgagtagtaaaaaagaaataattcttaaagtagaaaacttaatgcaaacattcacaacaggagaagattttttattttggaaaaacaaacaaaaagtaaatgcggtaaacaatgttagctttgaagttgaaaaaaataaaactttaggactcgtaggagaatctggttgcggcaaatctactactcttcgctcaataatgcaactttacacgccaacttctggaaatatttactttaacggaaaaaacataactaaactttcaaaaaaagagctcttaaaaacaaaaaaagatatgcaaatggtattccaagatccccatacttcgcttgacccaagaatgacaataaaagaaataatagcagaaccactagaaatatacaatgaaaacaaaattcttccaaaaacaaaacaagaaatagaacaaagggtaaacgaactaacagatattgtcggactacataaaagtatgttaaccagatatcctcatgaattttcaggaggacaaagacaaagaataggaattgctagagcactagctttaaatcctaagcttttgcttttagacgaagccgtttctgcacttgatgtatcaatcagagctcaaattttaaatcttctaaaagctctgcaaaaagaattcaatttgtcttatttatttatttctcacgatcttgccgtagtaaaatatatgagtgataaaattgctgtaatgtaccttggagttatcctggaacttgcacctagagaaacgctattttcaaatccaattcatccatatactaaaatgctaatagcatcaattcctgaaatcaaccctgaaaaaagaaaaaataaaaatataaaactagacgagcaaactctagcaaacattagaaaaattcatttatcaacccaagtacatccaaagctcgaagaagtagaaaaagatcactttgtatctaaatacctttttgatgagatgaacagataa

SEQ ID NO: 10910 - DNA, 1302 bp, Borrelia burgdorferi
atgggttttcacatttatgaaatcaaagccagacaaatcattgattctagagggaatccaacagttgaagctgatgtcattttagaagatggaacttacggaagagctgccgtaccatcaggtgcatcaacaggaattaacgaggctgttgagcttagagatggtgataagtctgtatatatgggaaaaggggttttaaaggcaattgaaaatataaaaaacataattgccccagaacttgaaggtatgagtgccttaaatcaggttgcaatcgacagaaaaatgcttgaacttgatggcacccctacaaaagaaaagcttggtgctaatgcaattttagcagtttcaatggctacagctaaagctgctgcaaagtaccttggacttaggccttatcaatatcttggagcgtacaaagccaacattttgcctacacctatgtgtaatattattaatggcggtgcacactctgacaactctgttgactttcaggagttcatgataatgccaataggagcaaaaacattcagtgaagcaataagaatggcagcagaggtttttcatacgctaaagggcattctaagtggcaaagggtatgcaacttctgttggagatgaagggggatttgctccaaatttgaaatcaaatgaagaagcttgtgaagtgattatagaggcaataaagaaggcaggatatgaacctggaaaagacattgcaatagctcttgatcccgcaacatctgagctttatgatccaaaaacaaaaaaatacgtacttaaatggtcaacaaaagaaaaacttacttccgaacaaatggttgaatattgggcaaagtgggtagaaaaatatccaatcatttcaattgaagatggaatggctgaagaagattgggatggatggaaaaaacttacagacaaaattggaaacaaaatacaacttgttggagatgatttatttgtaacaaatacctcgtttcttaaaaaaggaattgaaatgggagttgccaattcaatccttattaaggtcaatcaaattggaacactaacagaaacatttgaggctgtagaaatggctaaaaaagcgggttacacagcaatagtctctcacagatcgggagaaacagaagatacaacaatagctgatcttgtagtagctcttggaacaggacaaatcaaaactggttcactctcaagaacagatagaatagcaaaatacaatcaactcataagaatagaggaagaattggaaacaactgctgaataccacggtaagagcgtcttttattctattaaacaaaaataa

SEQ ID NO: 10911 - DNA, 411 bp, Borrelia burgdorferi
atgaaaaaatcaaattttagcaatgttaatttatcaatgggaactggtaggaggaaatcttctgttgctagagtttacattagagagggtagtggcaatatcaaagtaaataatagagactttgactcttacatacaacttgaaaatttaagaacaatggctttatcgcctttggttttgacaaatacacttgggaaatatgatctttatattaatgtttatgggggagggatttcaggtcaatcaggggcaataaggcacggcatttcaagagctctttttaaacttgatgaatctaataagatgattttgagatctaatgggtttttaacaagagattcaaggaaggttgaacgtaaaaaatttgggcagaaaaaagcacgaaaaagttttcaattttccaaaagataa

SEQ ID NO: 10912 - DNA, 441 bp, Borrelia burgdorferi
atgaataaaataaccaataatgatacgatttggatcaagccaaagactgttgagaaaaaatggtatgtaattgatgcagcagatagaattttaggtaaagttgctgtggatgttgttaaaattttaagaggcaaacataaagcttattatactccccatcaagatttaggtgacaatgttatcattattaatgcttctaaagttaagctgacggggaaaaaatatcaacaaaaactttattataggcattcaagatatcctggaggtctttattctgacacttttagaacattgtcagagagaaagccttgtgctcctcttgaaattgctattaagggtatgttgccaaaaggccctttggggcgtaatctttttagaaatttaaaagtcttttctggttcagagcatactcttaaagctcaaaatcctataaagctgtaa

SEQ ID NO: 10913 - DNA, 810 bp, Borrelia burgdorferi
atgtatgatttgcctttaatagataatttaccagtgattaaaagggcaagatttttttatctttacgatattcatggtaagaggtatttggatttatatttaaatggtggaagaaattttttaggttatagggttcaaggtttaaatcgcctttttaaacaaactatgtcaaggggtttgatatccccttatccttctgtttttaaaaatcagtttatcaatttggtatttactttttttaaagaggctgggtctgtttatatttttaagctagaaaaagatgcaaaagaatttttattatctttaactggtaaaaataaattttttatgccctgggaaaaagaagaaggaatatatgagtttagagtaggatttagtaatattaaatatcctatgatttttaatattcctttgcctgattttatgtctgttagcattgttgttatggataatctttctagaaaaatagaatttaaagataattttgatgctgtaactttatctttagctagacatacattaagcaagcttttattttataagaaaaatatcgatattgattttaattcttttgccacacctttatttagaatagctgataggtatatgcttcctctttatgatgcttgttatcatgctgaaatttttaatgaatttctcaaatttgggtatttaattagtccaaattttagtattccatctattgttcccctgaagttctctaaaggagatctagataattttaaaaaactttgttttgctcttaaaaataagtttattgatgggcttgacagtgatccttacaaataa

SEQ ID NO: 10914 - DNA, 1458 bp, Borrelia burgdorferi
atggaatataaattagttattggattagaaattcatgttcaactgggtttaaaaacaaaggctttttgtggatgtaaaaatgagtttggaggagttcccaactctcgtgtttgtccaatttgtcttggattgccaggttcattaccaagtgtgaatgtagagcttattaatagtgcaattttagcggggcatgccacaaattcaaagattagaaatgttgttaaatttgatagaaagcattattattatccagatttgccaaaaggatatcaaatctcgcaaaatgataagccaatttgtgaggggggaagcttattgattgaaaccccttctggacccaaaaagattaacattattagaattcatatggaagaagattctggcaagagtctacatttactggacagtgaaaatcaaagttatgttgattttaatcgctcgggtgctcctttgcttgagattgtttctgctccagatattaacagtggagatgaagcagttgctttcctaagctctttaagagaaatttttaggtatcttgatttgtccgaatgtaatatggagaatggttcttttagatgcgatgtaaatgttaatttaattgttaaagagaatggtgttgaacataaaactcctatagctgaaataaagaatttaaattcttttaaatctattaaagcggccattgaatatgaagaattaaggcagcaacaggagtggattcaatttaagaaaactcttaatagttgtggtaagcacactagaggatttgatgataggagcggagtaacggttattcaaagaaataaagagacagtatctgattatcgctattttcaagaacccgacctgcctttaatagagattgatgattcttatattgataatattaaaaatttaaagttgattgaacttccatttcatgcaagaattaggcttaagggccaatatgggctaagtgattttgatgttattactttaacagcagataagcatctgcttaaatattttgaagaggctgttattaattcaagcgatcccaaaaaagtagccaattggatattgtctgaagttttaagcgttcttaatgataaaggaattagtgttcttgaatttaatttgcttccaagctatattacagagcttgttgaatttattgttgctggcaaaataagtggcaaaatggcaaaaagggtattttcagagatgatgactagaggagtttctgcctctgttgttataagtgaaaatcaattagagcaagtaagtgataagtttgttattaagcagattgtgcttgaagttttagatgaaaatcctaaatcaattgaactttacaaaaagggcaaagaccatgctatcaaatttatgatggggcaaataatgaaaaaatcttcaggaaagattaatcctatacttgcaaatgaaattcttttagaaagtttatcaaatgtatga

SEQ ID NO: 10915 - DNA, 1491 bp, Borrelia burgdorferi
atggatatttttcatctcctaaaatattggagtaaggataaggtgttggacttaagtaatttaactttaaccaaaattcaagaattagttttaactagaaaatgtaaaatttatgatattttgcttgcttataaaaataattatgagctaaataaagatatcaatggatatattgaattttttgatgattctttagagattgcaaaaaggtatgacgattgtttaaaaaattgtgaattagaagatttgcctttaattggtatgcttattgcagtcaaagataatatttcaattcaagataaatctttaacttgtgcttctgagattttaaaaggttatatttctccttatgatgcgactgttattaaaaggcttaagaataaaggagcaattttaattggtagaaccaatatggatgaatttgccatgggttctacttgtgaattttcttattacggtgcaactttaaatcctttaaatagagaatatgttataggtggtagttctggaggctctgcagctgtagttgcagcttttcaagcacctttttcgcttggtagtgatactggaggttctgttaggctgcccgcatctttttcaggaattttgggttttaaaccttcttatggaggtctttctcgctatgggcttgcatcttatgcttcgtcttttgatcaaataggatttttttctcattctattgaagatattgctttaattttaaagcatacttgtggatctgataaaatggattctactagtgtagacatttttgatgatttttatcctttaaaaattgagtcgttgcaaggtaaaaatttagctgtaatcaaagagcttagcgaagatctaatggacaaaaatgttgcaaatagttttgcaaagtttaaattagaccttttgtcaaagggtattaatataaaagaagtttcaatagaagagattaattttattttatcaatttattatataatttctcctgttgaagcatcctccaatcttgctcgttatactggactttgttacggcaagagaatctctgaaggtttgagtcttaatgatttttattttaaacataggagcaatttcttgtcagaagaagttaaaaggcgtattgttcttggaaattatttgttatcagaaaggtatgattctaaatattatgcaaaagcttgtgaaattcttcaaaatttgattattcctaaatttaacaagctttttgaaagctgtgattttattattaccccaacaagctttgttaaaccttttagacttggtttggattttgatgatcctgttaaaatgtattattcagatatttgtactgttattgcaaatcttattggagcccctgctatttcgcttccatattctaaggatgaggaaggattgtcaattgggatgcaaattattgggcgtagcaaaaaggattttgaacttttaagtttttcaaaaaatgtgattagggaattaggattgaatggaatataa

SEQ ID NO: 10916 - DNA, 1197 bp, Borrelia burgdorferi
atgaaagaaaatgattttattaaatttgggagttatttgagaaaagttagagatagtaaaaatttgactcttgaaatggtagctgaggatattaaaatttctattaagtatcttaaggctcttgaagaatctaatattgaaattttcccaaacgaagttttggctgttggatttttaagaacttatagcgaatatttagacattgattctagattgatatcaacactttttaaggattataaaagtagacttaataatagttatattgggattaaatctgaagataaaatttcaaatttaggatttttaagcgacaataaagtttcagaaaaaaaaatatttttttttagtttagaatctttaagtatttttaaagtctttttaggcattgttggtgttcttttattatttgtgtttctctattttagagaagtggaaggctattttaaaaaatttttcaatcttagtcaggatgaaaagataatttcaaatattcatgaagtgtcttttgataaaaagaatttttggaacgtttctcttaaagagggagattttttatctttaacgtatagtgatgatattgcaaaatatagagcatcgtttattggcgatgatttagttattgttgatgagtctaaaaaaagtaagaatattttaaatttaggagagtttaaagagataaatcttgatgataatattagagtcaaaattatttatgagaattattattatgataagttgaaaatagctcatgtaagtttagagtcttttgctttaaatgttaaatatgtatctgaaactaatattgacaatagatttaatattttaaattggcagtttgatgttaagggaactgaaaaattgccgagcagcaattatcttaccctatattcttctcaaaaactttcaaatgttgatttgaaaatcgattttttaaatgatacattttttagatatgccgatgaaaacaatctttatgggaagtctctttttgcatccaaaggtattcctattaatttagcttttgaaaaatctttgatactatttttttcaagactttctgatgttaatatcattcttaatgacagagacattactccttttttaaaagagcagggaaaagaaatttttgctgttcaatttttttgggtaaagaccccctcagggtttgatcttaaggtttctgaagtttattag

SEQ ID NO: 10917 - DNA, 1428 bp, Borrelia burgdorferi
ttgataaaaatgtctttgaattacactgaaataaatactttgattaaagaaattcctttcacaaactctttaataacaaaaataatacaaccggattacaaaagtttggttttagagatttacaataaaattgacaataaaaaatttaaaatactaatctgcttaaatccaaacactacaagattccatataacaaaaaaaaatttcaaaaagaatgctttaaaattaagattttctgacttcttaaaatcaaaaattcaaaatggaaaaattataaaagctttccaaatgaaaaatgaaagaatcatttctcttgagattttgcaaaaagatatgattatcttatttattaaattgtggccatcctcgcccaatataatagctacaaattcaaactttaaaatactagatgcatattacagaaggccaaaaataaaagaaacaacaggtgaaatctttttaaaagctaaagaaatacatgaaagcaataaaatgtctgataaaaaaattatggaactaaaggaagaatataataataccagctatacatcttattctgaatttcttgaaaattactacgaatcgcttaatgatcaaattaaaaaaaccaatataaaagaattgcttattgaaaaatataaaaaagagttaattgttttagaaaaaagaatagactctttaaaacaacaaattaaactgcttgaaaacattgaaaacgaaaaggaaaaaggcgaattgattttattaaatattaacaaaatacaaaaagggattaaagaaataaacctcttaaattataaagaagaaaaaattaaaatatccttaaaccaatcattatcaccaaaagaaaatgccttgcaatattttaaagcatataaaaagggcaaaaattctttcaaaaccatacaaaatcaattaaaagataatctagataaatttaatttaattcaatcaaaaataacaatgttaaaagtcgaaaatttaattccggaagaagaatataatcaagaaaaaactgctattaaagaaaaagaaaaaacgccaaaaataggcttgcattttacctattgtggatttgaaattcttattggaagaaacgcaaaagaaaacgataaacttttaagacattgcgttaaaggaaatgactattggcttcatacaagagattatcctggagcttatgtttttattaaaaatcaaaaaaataaaactcctagccttgatgtccttttaggtgctggtaatttatgcgtattttacacaaaattagcaaaaaaatcgggaaaagccgatctttactacactcaagttaaaaatttaagaagagttaaaaataaaaagctgggccttgtaattccaaaagcagaaaaaaatttacatattaagctagatgaaaatctaataaaaaaaataaaaaatcaaacctaa

SEQ ID NO: 10918 - DNA, 1434 bp, Borrelia burgdorferi
atgatttcaaagttaacaaaaattgtagcaacaatatctgatcttagatgcgaaccagaacatataaaagatttacacgatgcaggggtaaatgttataagactaaatactgctcatcaatcacacgaagatacaataaaagtaatagacaatgttagaaaaatttcaaataaaatagctttaatgattgatacaaaaggaccagaagttagaacagcaaatattgaaaatcctattattgtaaaaactggagacaaggtaatcatttcaacctcgcctattaatgagcctaataactttcaaaccaattatgatggatttgttaaagaagtaccccaaggatctaaagtgctaattgatgacggtgaacttgaaatgactgttgttgccaaattgcctgacagattaatttgtgaaattaaaaatgacggccaaattaaaaataaaaaatcaatcaatacccccggaatttctcttaagctacaatcagtaaccgaaaaagacaaaggatttattgagcttgcagcaaaatataatgttgattttattgcccattcgtttgtaagacattccaaagacgttcaagatgttcaagaaattttaactgcctctggaaatcctgatgtaaaaattatatccaaaatcgaaaatcaagagggaattgacaacattgaagaaattgcaaaagcttcttacggaataatggttgcaaggggagacatgggagttgaaattcctgcagaagatgtacccattgctcaacttaaaataacacaaacctgtataaagtatggaatacccgtgattacagcaactcaaatgcttcatacaatgattgaaaatccaagacctactagagcagaagtgtctgacatcgctaacgctattttaaacggcacagacgcaattatgttatccggagaaaccgcctacgggaaatatccaattgaagctgtaaaaatgatgacaagcattgctaaaaaagttgaaaaacacagaaaaatgaccttatataaggatgaacttttttacgataaaagtatcacaagaaactatattatcaaatgtgcaattgatgccacaaaacttatggacataaaagcaattattgtagattctctaaaaggcaaaaccgcaagaataatggcaacctacagagcaagtgttccattattcattacaacaaatagcgaaagactagcaagagaattagcattatcttacggggtttattctaatcttgtagacaataatttcaaaagaactaccgaatttgtagtaacttctcttaaaatgttaaaagaacaaggtgttgttaatgacaaagatactgtaataattatttctggaaatccaaatagaaatattgaaaaaggaacagaatttatggaaataaacacagtagaagatgcaatcaaaggacgaaatatataa

SEQ ID NO: 10919 - DNA, 279 bp, Borrelia burgdorferi
atggctaggaagtgtgagataacaggaaaaaaaactatgtttggaaacaatgttccaaggaaagggcttgccaagaaaaaaggtggagctggacaacatattggagtaaaaaccaaaagaacctttaaggttaatttaataaataaaaaattttttattccaaatcttggaagaagtgttagtattaaggtttctgctaatgcgctaagaagtatttcaaagatagggcttgatgcttttttaaagaaaaactgcaaaaaaatagaaaactttttataa

SEQ ID NO: 10920 - DNA, 732 bp, Borrelia burgdorferi
gtgaagcaaattgttttggatgagaattgtttagcaggtaattttattattgttaaagatgcaaaaatatatcaccatcttgttaatgtaagacgacttaaaaagggtgataagctgaacattcttttaaaagataaagaattaagggcctcagaaatagtaaagattggtagtaattttattaagtttactaccaataaaatagataaaattgaaaaaaataattttgagataagtatttttatttctagtttaaagggcagaaaaatagatttggtgttaagacaggttgttgagattggagtttcagaaatcaatattattaatgcggatcgttctgtgtcgaaaatagatataaacaatgcatctgccaaaattttaagattttcaaaaataatagatgaggccttaaagcaaagtggtaataaaattgttcctaaaattaatttttataataattttttttatttaccttattctttttgtactaccagatattatgttgctcatccaagtggaatgattttaagcaagaatgaaagttttgacaattttggcaaaattggaattataataggtcctgaaggatgcttttcggagtccgaaattgtctttttcaaggagaaaggctttaattttgtaaggtttaacactccaattttacgagcagatacggctattatttattcgcttgcttattttaaggcattgttagaggattataatggctaa

SEQ ID NO: 10921 - DNA, 2013 bp, Borrelia burgdorferi
atgaacaaagtcaataattatcaaaatataaattcagttataatctctaaaaaagaagttggacttagagatctcataaagcttaaatctatttttaacttaattcaaatcgtaaaatctgaaaaagctttatacagcgaatatgtaaaacaaaataatattaaattcgctattatttataattatgaaaaaccaatagatttttcaataaacattgcaaacgaattaaaaaatgcaaacaaaatccattctatcataattagcaaagaaaaatttgatgaggaatatttaaaacttgatcacatagaaataataaaagatataagcgaattagaatataagcaaagcttaatacatcaaaaaaaattattttgcgacaataaaaacacaactctggatttctttttaaatttatcagaactcataaaagaaatagtaatcatcacaaacactaaaaatgaaattatttatatcaatgaaaaaggtagtaaaaatcttaatcttccaatgaaaacctctggaaatataatcaaagtaaccgacatagatatcagagattgggaaaagctagaaaaaataaatttaagttatcacacaaattctattcctgaatttaaaaatatattaataactgattgtcttttaactttaaaaaataataaaaaactacatgtggatatatttattagcacaattgctcaaaacaatatcgataaattaataacaattaaagaaatatcaaactctaataaaatagaaaactataaatatctagaaattattgattcgcaagacgagattcaaaatgccaaagaaattgaaaaattactagtaaaccatatggatatttacaaaaaaaaaagcatatatttacttaatttagacgtatccctaacagcagaatatgaatacaaagaagatcaagaaaaacttaatgcaaaaatacttaaaataatgtattcaaaaataatgtcattatactctgaatatatttttaagttaaaacacaacaatttaatagtaatcataagcacaagtggcggagaaaagcgaataatctcaattgccaaaaaaatcaaaaaaacaattgctctggcatttaaaaaagaagatattattatattcaagttcaacattggaataatagaggtaaatttaaaagaaaacttagaattcaaaatccccaaattaatgatggctacaaaaatatcatcggaatacaaagaatctaatcccactatatacaaagaagaactaccagaagcggtgattttaaaaaatcaaaacaaaatttttcaatatatactcaaagcaataaaaaatgatttttttactctttattatcaaaaaataaatcctcttaaaaagaacttaaagcccaaaatagaaatcttgacaagactttttgaccacatgggcaaaccaattccaaacaatcaaatttttaacttaatagacaaatataatttaactgttgaggttgatacattggtggttaaaaaggctttaagagaatacaaaagctttgtatcaaaaaatggaattcacattttctcaattaacatatctccttattcactaaaatcccaaaactttcgaatctttttaagagatactttattgaaaagccaaatcccacttcaaaatatatgcttggaaataacagaaactggaattcttgaaaactttgagataataaacaaatattttcaagaattaaaaagttttggaatcaagctagcacttgatgactttggaagcggacatacatcactctcatatattaaaacactaccaatagacttacttaaaatagacggatctttcataaaagcaataaactctagtgaaatagattttgtaataataaaatctattaaaaaaatagcagatacaaaaaatataaaaattattgccgaatttgtgtataatgaggaaatattaaaaaaaataattgaactagaaatagactatgggcaaggatttttatggcacaaaccagaaccaatataa

SEQ ID NO: 10922 - DNA, 1092 bp, Borrelia burgdorferi
atgagtttttataaggttatagggggagtatttatgaaaatatcagtaataggggcaggtgcttggggaacagctatttcaaagtctttggcagataaatttgattttaatatttttttatgggtctttgaagaagatgttaagaatgatattaataatgataatgttaatactaaatatttaaagggaattaaattgccaaaaaatttagttgcaagttcagatttatttgaagttgtaacaatgtctgattatattttcattgcaacaccttctctttttaccgttgatattttaaaaaaattggatcaatttttacattttctggagataaaaccaaagctagcaatacttacaaaagggtttattacttttgatggtaaaactcagacagttattgaagctgctgagagaattatgaaaggatataaagacgaaattacttatattgttggtccaagtcatgctgaggaagttgggcttggtgtgataacagggcttgttgcggctagtaataacagagaaaatgcatatttgtttattaatttatttagtaaaaccccaatttctttattttatagcaacgatgtttttggggtgcaaatagcagcagctttaaaaaatgtgtttgctattgcatttggaattttggatgcctataaattgaattatcctaatttaataggtaataatacagaatcatttttattttcaatatccttaaataatataaaagatattgcaatggagcttgggggaagaaatattgaaacgtttttatttttgtctggttctggcgatttagatgttacttgtagaagcatgtttggaagaaatagacgatttggcaatgaaattgttagcaaaaacattttagaaagctttttaagtatagatgacttgataagtaatattgaaaaaattggatatttaccagagggagttttggctgctaaatcaatttttttcttttttaaacaattaaatcgtgatctcaatcctaatagtttgttaagcgttatatataaaattttgaataaagagttggagcccaaatctgttattgagtatatgagagatgttagacaataa

SEQ ID NO: 10923 - DNA, 1218 bp, Borrelia burgdorferi
atgaatcttgctttaagtcttttacataaacgcggatttttaaagcaatgtacatctttaaaagttttaagtgatttaatggatagggaaaaaatagttttttatgcaggagttgatgcaacatctagttctcttcatattggccatttgattccctttttagcaatgatgcatcttaggcaacacgggcacatgccaattgttttgattggagattctacagcaaaaataggcgatccttctggaaaaagtgagatgagaaagattttatcttcagaagagattggcaataatgctttgttgataaaaaatcaacttcaaagaataactaagtttacttcagaatgttttattcataattcaaattggttagataatctcaattatattgaatttttaagagatgttggcatgcatttttctgttaatcgtatgttaagctttgaaacttataaaagaaggatggatttcggactttcatttattgagtttaattatcaacttttgcagtcttatgattattatatgcttaataaaattaaaaattgccgacttcaaattggtggtgatgatcaatgggggaatattatttcaggggttgacctaattagaaaaaaaaatggatcagaaacttttgggcttacttttccattaattacaagaagtgatggaaaaaagatgggtaaatcagaaaaaggcgctgtttatcttgattctaatctttttagtatttatgatttttatcagtattttagaaatacttcagattctgatgtgaaaacttttttatatctttttacttttttagaagaagatgagattgaattaatttcaaattttaaggggaattctttaaataaggccaaagagattttggcttttgagataactaaaattgttcacggagaggcagaagccttgaaagttcaagaggcatcttttgccgcatttaggggaagtggagataggagcaatattccattttttaaatttagcttttctagcctaaaagaagagatattattggttgatttaatgttagattcaaaaattgtgcccagcaaatcagaaggcagaagattgattgattctggaggtgtttatattaatggtaaaagggtagaaagtcagagtcaccttcttaccaaaaaggattttaataacaatgaagttgaattaagagtaggtaaaaaaaaatttttacgaattgttatatag

SEQ ID NO: 10924 - DNA, 1338 bp, Borrelia burgdorferi
atggttagaatggaagatattatttctcttgcaaaaagaaaaggatttgtatttcagtcttcagaggtttacgggggcctttcaggagcttgggattatggtcctttgggggttgagcttaaaaagaatataaagaaagagtggtggaagagcatggtgtacttgcatgaaaatattgtaggtttagatagtgctatttttatgcgccctgaaatttggagagcatctggtcatgttgatggtttttcggattctatggttgattgcaaagattgtaaaagtagatttagagctgattttattgatttgtcaaaaaattgtccgaattgcaaagttggaaataattttacctccccaagaagttttaatttaatgtttaagacccacattggagtagtggaggatagttctagtgaagtttatttaaggcctgagacagcacaaggaatttttgttaattttagaaatgttttggattcttcaaggcttaagattccttttgggattgctcaggtaggtaaagcgtttagaaatgagatagttactaaaaattttatatttagaacttgtgagtttgagcaaatggaaatgcagttttttgttcatcccaagcaaatagacgagtggttttgttattggcagcaaaatagaatgaatttttttatagaaactcttaaaattagtcccgatagattaagatttaaggcgcatgattcaacgcagcttgctcattatgcaaaagctgcatttgatattgagtatgaatttccgtttggatttcaggaagtagaaggaattcacaatagaggtaattatgatttaactcagcacgctaaattttctaataagcccaaagtatttgagtatcatgatttgttgacaaaagagaaatatgtgccttatgttattgagacttctgctggtcttacaaggtctgttttaatgactctttgtgatgcttattctgaggaagagctctcagatggagacaagcgtattgttttacgcttacatcccaagttggctccttacaagattgctatatttcctcttgttaaaaaagttgagcttactgagattgctagaaggatttatatggagctttgcgatgattttcatatattttacgatgatagtggaacaataggtaaaaggtatagacgtcaagacgaaataggaactccttattgcgtaacaatagattacaatacgattgaggatgagacagttactgttagagaaagaaatagcatgactcagaagagaatttttattaatgatttatattcatacattaaaacagagattttaaattacaaagaggattttaataaatga

SEQ ID NO: 10925 - DNA, 1473 bp, Borrelia burgdorferi
ttgagtacaagagttcgttatgcgccttctccaacgggtttacaacatattggcgggattagaacagctttgtttaattatttttttgcaaagtcttgcggaggtaaatttttgcttagaattgaggatacagatcagagcaggtattctccagaagctgaaaatgatctttattcaagtcttaaatggcttggcatttcttttgatgaaggccctgttgtagggggtgattatgcgccttatgttcagtctcaaagaagtgcaatatataagcaatatgctaaatatttgattgaatctgggcatgcttattattgttattgcagtcccgaaaggcttgaaagaattaagaaaattcaaaatattaataagatgccacctggatatgataggcattgcaggaatttaagtaatgaagaggttgagaatgcactaattaaaaaaatcaagcctgttgttagatttaaaattcctttagaaggagataccagctttgatgatattttacttggaaggattacatgggcgaataaagacattagtcctgatcctgtaattcttaagtcagatggattgccgacttatcatcttgccaatgttgttgatgattatttaatgaaaattacccatgtattaagggctcaagaatgggtttcttcaggtccattgcacgtacttctttataaggcttttaaatggaaaccccctatttattgtcaccttccaatggttatgggaaatgatggtcaaaaattaagcaaaagacatggctcaacagctttaagacagtttattgaagatgggtatcttccagaggctattattaattatgttactttgcttggctggtcttacgacgataagagagaatttttttcaaaaaatgatcttgagcaatttttttcaattgagaagatcaataaatctcctgctatttttgattatcataaattggattttttcaatagctactatattagagaaaaaaaagatgaagatttatttaatcttttactcccttttttccaaaaaaaagggtatgtttctaagcctagtactttggaagaaaatcaaaaattaaagttattaattcctcttataaagagtagaattaaaaaattaagtgatgctttaaatatgactaaatttttttatgaggacattaaatcttggaatttagatgagtttttaagtagaaaaaaaacagctaaagaagtttgttctattttagaattaataaagcctattttagaagggtttgaaaaaagatcatcagaagaaaatgataaaattttttatgattttgctgagagtaatggttttaaattgggagaaattcttcttcctattagaattgcagcgcttggtagcaaagtctctccgccgctttttgattctttaaaattgataggcaagtctaaagtttttgaaagaataaaattagcacaggaatttttaagaataaatgaatag

SEQ ID NO: 10926 - DNA, 714 bp, Borrelia burgdorferi
atgattttgataatatcagctatgcaagaagaatcagaagaaataaataaaatacttgacaacaaagaagaaattgtattaaacgactacttagaaaataaaaagatttataaaggaaaaattctaggaaaagatgtaatatctttaactacaggaattggaaaagttaacgcagcaacttggagtagtcaaattatctctaagtataaaatcactcacataataaactctggaagttctggggggataaaagaaaactctaaccttaaaatattagacattatagtatcctcagaaacagcatactatgactttgacttaactaagtttggacacaaaataggacaagtccctaatttgccacaaaagtttaaagcagatgaagagctacttaaaaaagtggccaatattgttgacaacaagcttttaaacattgatatccatattggcttaatactaacaggagatcaatttgttgacaatgaaaaaaatcttgaaacaattaaaaaaaatttcaaagatgctttagctgtagatatggaaggagctgcaatagctcaagtagcacacatatttaaaataccattcataataattcgttcaatttctgatctaccaaacaataaagacaaccatatagactttaataaatttttaaaaacatcatcaataaattcaagcaaaatgacaaaggaacttattaggctaatatga

SEQ ID NO: 10927 - DNA, 1179 bp, Borrelia burgdorferi
atgaataaaataatagcagcgaaccaaactttaacttctgaggctgtatctgaaggacatccagacaaaattgcagatcaaatctctgatgccatccttgatgaaatactaaaagaagataaaaatgcaaaagtagcttgcgaggtcataattgcacaaaatttagtagtaatagcaggagaaataaatagtcctgtaaaaaaaaacatagatataaaagaggttgctaagaatatcatcaaagatataggctatacaaatattgattatgggcttgattacaaaacaataacggtaatagacgctattggcaatcaatcacgtgacattataaacgcaattgaaaaaaagggatccaatgcccttggagcaggggatcagggaataatatttggatatgcctgcgatgaaacaaaaaattttttacctgctccttatgaactagccaattcaattctaaaaaaagctagcaatcttagaaaatcaggagcaataaaatggttaaggcctgactcaaaatctcaagttaccatagaatacgataaaaacagaaaccctgtaaaaataaaaaatattatagtctctcatcaacaccatccaaacatctcccaaaaactaatacaacaaacaataattgaagaaatcatcaagcccactgttcaagacaagtcaatgcttgatgaaaatactgcttattgcattaatccttctggaaattttgtaattggaggccctaccggagacactgggcttacaggaagaaaaattattgcagatagctatggaggatttgcaagacacggagggggagcatacagcggaaaagatgccacaaaagtagatagatcagctgcctacatggcaagatatattgcaaaaaatatggtggcagccggaatttctaaagaatttgaactacagctcgcatatgcaattggaattgaaaacccaatatctattcaaataactgggggaataaatgatcctaaatatgcaaacaaaatattaaattttattgttaataacttcgatttaactcccaacggtataattgaaaaattaaaactaaaacaacccatatatcttaaaacttgcacttatggtcattttggaaaaaatgaatttgaatgggaaaaattagattttgtaaaaaaaatacaaacagcgctaaaaaaatga

SEQ ID NO: 10928 - DNA, 1365 bp, Borrelia burgdorferi
atgatagatattgatgagttgagaatttttcttaaagagaagagctattctaaaattaaagaaaaatttttaaagcamgattccttmgatattgctgaggctcttaaaagacttaatggaactgaattgattttactctacagatttttgccaaaaaaaatagcagttgaaactttttctaattttgaccaatctacaaaaaataaattagcaaattcttttaccaataaagaaataagtgaaatgattgatgagctgaatcttgatgatgttattgaccttttggaagaggttcctgcaaatgttgttcagagatttttggcaagttctacagaagagaatagagaaattattaataaatttttgtcttacagtgatgattctgcaggttcgatcgtaacaattgagtatgttgagcttaaagaagatttcacagttggcaaagctcttgattatattagaagggtagctaaaaccaaagaagatatttacacttattatattacagatgatgaaaagcatttaaaaggagttataaaaattgaagatttaatattggctaaagatgatgttattctctcgtcaataatgagaagtagtgggttttatattgtgggggttaatgatgagaaagaagatgttgcacttctttttcaaaaacatgatattaccagtgttcctgttgttgataatgaggggagaatgataggggttattattattgatgacattttagaggttattcaatctgtaaatactgaagattttcaaatgattgcagctgttaagcctttagatacatcttatcttgatacttctattttagttatgacaaaaaatagaataatttggcttttagttcttatggtgtcttctacttttacagctacaattatttcaaattatcaaaatttaatgttgtctttagtggttttagctaattttattccccttttaatggatacttcaggcaatgccggctctcaggcatctgcgctaataattcgtgagcttgctcttggtactgtcaaggtaaaagatttttttaaagtgtttttaaaggaaatatgtgttagcattctagtgggagcaattcttgctagtgttaattttttaagaattgtcttttttgtagctccacaccattctgataagctgaaaatagcttttgtagtttcatcttgcttgatggtaagtttgacagtagcaaagatattgggaggtcttttacccattgttgctaaacttttaaagttggatccagcacttatggcaggccctttaatcactacaattgcagatgctattactttaatagcttattttaatatagcaaaatgggttttagttagctatgctgtttaa

SEQ ID NO: 10929 - DNA, 474 bp, Borrelia burgdorferi
atgtcaagaaaaaataaaaaaatcaaaaagaaagtttttgttgataccagatataattctagaattgttgcaaagtttgcaaatagaatgatgtatgatggaaaaaaatcaataagcgagagtatactttatagttcaattgatttgcttgccgataagcttgaagaaagcgacaagatggctgttttttataaagctttagataatattaagccattggtagaagtaagaagtagacgagtgggtggtgctacatatcaagttcctgttgaagttagagaagagagaagagaagccttggctatgaagtggattatttttgctgctagaaagtctagcggtaggtctatgaaagaaaagttgtcaaacgaacttttaaatgcatataattctactggagctgctttcaagaagaaagaagatactcatagaatggctgaagcaaataaagcttttactcattatagatggtaa

SEQ ID NO: 10930 - DNA, 375 bp, Borrelia burgdorferi
atgcctacaattaatcagttaattagaaagcctagaaaaagtcaaacggagaagaccgcatctcctgcgcttcaaaattgtcctcaaagaagaggaatttgtacgcgtgtaatgaccgtaactcccaaaaagcctaattcagctttaagaaaagtagcgcgtgttagactttcaaatggatttgaagtaacagcatatattccaggaattggacacaatttacaagaacactctgtggttctaattagaggtggtcgagttaaagatttgcctggagtaaggtaccatattgttagaggagctaaggatacccttggcgttaataataggaaaaagggtagatctaagtatggaacaaaaaagcctaaagcttaa

SEQ ID NO: 10931 - DNA, 4134 bp, Borrelia burgdorferi
atgaaagagataaaagattttgaaagaataaaaattaaaatagcgtctcccgatcaaattagaaattggtcttatggagaggttaaaaagtccgaaactattaattatagaactttaagacccgaaaaagatgggcttttttgtgaaaggatttttggtactacaaaggaatgggaatgttattgtggtaaatttaaatcggtcagatataaaggtattatttgtgatcgttgtaatgtagaggttacccattttaaggttagacgtgaaagaatggggcatattgagctagcagccccagttgctcatatttggtattacaaatatataccctctaggattgggcttttgcttgatattacagcatctagtttgaattctattctttattatgaaaaatatgtagtaattgaaccgggcgatactgatcttaaaaaaatgcagcttttaaatgaagatgagtacatagaagctagagagcgatatggtatgtcttttaatgcttcaatgggggctgaggctattaaaactcttcttgaaaatcttgatcttgatgagctttcgtctaagcttagaattcaaatgatagataaagatgataaaactgataagaaactcttaagacgtcttgaaattattgagaattttaaaatttctggcaataagccagagtggatgattatggaagttcttcctgttattcccccagagattaggccaatggttcagcttgatggggggcgctttgcaacatctgatcttaatgatctttatagaagagtcataaatagaaataatcgtttaagaaagttgcttcttcttaatgcgccagagattattgtgagaaacgaaaaaagaatgcttcaagaatcagtagactctctttttgacaattctcataaaagaaaggttgtcaaaggttcatctagtaggcctctcaagtcgctttccgatgcattaaaaggtaagcagggaaggtttaggcaaaatcttcttggtaaaagagtagattattctggtcgttctgttattgttgttggacctgagcttaagctacatcaatgtggattgcctgcaaaaatggcccttgagctttttaagccttttgtgataagaagactgattgagagtgaagctgtttttaatatcaaaagagcaaagaatttaatagagcaagaagtagatgaggtgtggcaaattttagatcttgttatcaaagagcatcctattcttttaaatagggcacccactcttcatagacttggaattcaagcttttgaacctgtgttagttgagggtaaggcaataaaattacatcctcttgtttgtcatgcatacaatgccgattttgatggtgatcaaatggcggtacatgtgcctcttactccggcagcacaagctgaaagttgggctttaatgctttcaacaaataatcttttaaatcctgccaatgggcatcctattgtttttccatcccaagatattgttttgggcctatattatttaactatggaaaaaaagaatgttgttggagaaggtaaaaagtttttaaactttaacaatgttattcttgccataaataataggagtctggattacaatgcttctatttatgtaaaaattcatggtgagtacaaaaaaactacggccggtagggttatatttaatgaggctttgcccaagggaattgaatttgtaaataaaacccttagtgatttggagctacaaattttaatatcaaaagtttatgtagttcatggttcttctatcgtaattgaaatgcttgacatcatcaaggaacttggttttaggtatgccactaagtttggatgcacaattagtatgagcgatattattgttcctgatgaaaaaagaacttatgtagaaagggccaataaagagattgctaagattcaaaatgattatgctaaaggtgttattactggcgaagagcgttataacaatgtagtttctgtttggttaaagaccaatgaagaacttactaataagatgatggaaattttaaagaaagatagagatggatttaatgttatatatatgatggcagattctggtgctaggggtagtaggaatcaaataagacagcttgctggtatgagaggattgatggcaaaaacttctggggatattattgagcttccaattatttctaactttaaagaaggtctttctgtgatagagttttttatatctacaaatggagcaagaaaaggtctagcagatactgctcttaagaccgctgatgctggatatttaactcgaagattagtagacattgctcaagatgttgttgttagaatagaggattgtggaactataaatggaataaaagttgagactgtaaaaaatggtgaagaaatattagaatctttgaaagaaaaagctgttgggagttattctattgaaagaataaaaaatccaattactggcgagattgttttagatgcaaatgaagaaatctcagaagctaaaatagaattattagagaaaattggtattgaaaaacttgttattagatctgttttaacgtgtgaagctgagcatggcgtttgtcaaaaatgttatggtagagacttttctaagaacaaacctgttaatattggggaggctgtgggaataattgctgctcagtccataggtcaaccgggtactcaattaaccatgagaacttttcatattggtggagttgctcaggctggcagtgaggatgataaaatatctttaaagaatgccttcatacttaatggcatagaaggttttaatgttagagttgataatggaattcttttcacaagaaaaggaactttaaaaataatcaatgttttttatgaggaaaaaattaagaacataaaagagattaaagttttagattctcaaagagtaataaaaggaattcctttgtttattgataaaaagggctcagagattctctcttcttacattggttatgttaaattaagagacgataattttttcatagtgtcagaagagcaagaagtttccttgaaagcgggtacaaagcttgaaatagaggttggtgattatgttgaatcaggcaaagttattggtacatttgatccatttgcagagcctattattgcagaggttaagggtaaaattaaatttaaggatattattttaggaactactcttaaagaggaaataaatactgaaacaggcaatgttgaaaaaagaattacagataatgtttttgaatctcttgatcctagaatttttattattgatagtagtggtatggaggttgcatcttatgtattaccaggtgatgcttatcttcaagttgaagatggccagagtattaacataggagatattattgcgaaactttctaaaggttctgaaaaaactcaagatattacagggggattgcctcgtgttaatgatctttttgagacaagaattcctaagaatttaactgaaatggctaaagtaagcggaattgtacaatttaaatcaattcaaaaaggtaaaaggcttattaatattttagatgagtatggggttgaacataagcattatattccagctggaaaacatcttttggttagagatggagatgttgtaaaagcaggagatatgctttgtgatggtagaattaatcctcatgatgtgcttgaaattttaggtgggattagtttacaagaatttctgttggcagaaattcaggatgtttatcgaaaacagggtgttagcattaatgacaaacatattggtgtgataatcaagcaaatgatgaaaaaagttaagattgttgcagttggtgatactaattttgtttatgggcaaaaggtagataagcacactttttatgagcaaaatagaaaagtaatcgaacaaggtggtgagccagcaatagcaagtccaattcttataggagtaactaaaacgtctcttaatatagattcttttatttccgcagcttctttccaggaaacaacaaaagtattaacagatgcttctattgctggaaaaatagatgatcttaggggattaaaagaaaatgttgtaattggacatttaattcctactggaactggtatgggtctttataaaaaaattaaagttagtgaaaatatcgattctgaagtttaa

SEQ ID NO: 10932 - DNA, 3468 bp, Borrelia burgdorferi
atgataaaaagagttcatctgggacaaggaagagctgatgagattttagacctacctaacctgatagaaatacaattaaattcttatgaaaaatttttacaacttgataaattaaaaagtaaaaaacctttacttaatgagggccttgagtctgtttttagaaatatatttcccattaaaagtggaaatggtgatgttgctcttgagtatgaaagatactatatagaaaacgatgcccttaattttacagaaaaagaatgtaaaagaaagggtcaaagttatgaggctgttttaaaagtaagattgaatttgcaatttttgactactggggaaataaggcaaaaagacgtatacatgggaactattcctttaatgacagaaagaggcacttttattattaatggggctgagagggttgttgtttctcagattcacagatccccaggagttgttttttataaagaaaaagatttgtattctgctagaataattccttatcgtggttcttggttagaatttgagattgattcaaaaaaagattatctttatgtaaaaatagatagaaaaaaaagaatacttataactctttttttaagagctttagggtttgatacgagagaaaaaataatagaaactttttacaatattaaaaaaattaaagttgaagacggtacaaaaagagatcttccagggcaatatttagctaagagtattaacataagagagaatatgtattatcgtgcaggagataaaattactctgcaagatgttgaagattttttacaaaatggagtaaatgaaatagagcttgttgattttgatggttataatgatatttctggaaagcgctttgtaagttcgaatgttattctaaattgtcttgaaaaagaggatgctttctttgctttaaaggatggctctaaagagcttccaaaagaatcagttatgctagctgtttatggttctctttttcccggtgagccaatatcaattgataatgctgaaaacgatttaaaaaccatattcttttctgaaagaagatatgatcttggacgtgtggggcggtataaactttctaaaaaatttggatttgatgatttaactacatcggttttaactatggatgatattgttaacaccatatctcatcttttaagaatatatgaaggccatgatattcttgatgatattgaccatttaggaaatagaagggttcgttctgttggtgagcttcttactaatatatataaaggcgcgatgtcaagagttgaaaaaattgctaaagatagaatgtctaacaaggaagtttttaatctaaagcctcaagaattaataagcgttaagcctattgtatctgctgttaaagaattttttgcaaccagtcagctttcacagtttatggatcaggtcaatcctttggctgagcttactcacaaaaggcgtcttaatgctcttggaccaggaggactttcaagagatagggcaggatttgaagtaagagatgtgcattatactcattatggtagaatgtgtcctattgaaacccctgaagggccaaatattggacttattgtttctttggctacttattctagagttaatgattatggttttttagaaactccttataggaaagttgttaatggagtggtgacggaccaattagaatatttatctgctattgacgaagagaaaaagtgtattgctcaggctaatgctgcttttaattctaatggaaagtatcttgaagatttagtttctgttagaatttctggtgattatactacaacaagtcccacaaatatagactatatggacgtttctcctaggcagctaatttcagtatcttcggcgttaattccttttcttgagcacaatgatgcaaatcgagctcttatgggttctaatatgcaaagacaagcagtacctttgcttttccctaagcctcctattgttggtacgggtatggaaagcgttgttgcaaaggattcaggagtagttgttaaggctaaaagaagtggggaagttattcttgcaacaagtagtaagatagttgttaaaccttttgaggcagagaatgctaaagatttagatgaatatcatattgttaagtatgaaaggacaaatcaagacacttgttttaatcaatccgttttagttaaagagggtcaaaaagttgaaaggggcgagataatagctgacggtcctgctactagatatggagaacttgctcttggtaataatttattgctaggagttattccttggaatggatttaattatgaggatgctatattaatttctgatagaattgtaaaggaagatctttatacatctattcatatcaaagaatttagcatagaggtaagagaaactaaacttggtcctgagaaagttacaggagatatacctaatgttagtgaaaagatattaaataaattggatgaaaatgggattatacggataggaacttatgtaaagcccggtgatattctggttggtaaagttactccaaagtcagaaggagacattactcctgaatttagactgttaacttccatttttggagaaaaagcaaaagatgttaaaaataattcattaaaagttcctcatggtactgaaggtacagttattgatgttcaaaggattaccaaagaggatgttggtaatctttctcctggagttgaggagatacttaaagtttatgttgccaaaaaaaggaagcttaaagagggcgataaaatggctggacgacatggtaataagggtgttgttgcaaagattcttcctgttgaagatatgccttatcttgcagacggaacccctcttgatatatgcttaaatcctttgggagttccatctagaatgaatatcggacagttaatggaatctcaattaggccttgctggtaaatatcttggtgaatcttataatgttcctgtttttgaatctgctacaaatgaacaaattcaggaaaaattaaaaactgctggatttaatccaacttctaaagaaattttatatgatggttatacaggagagccgttcgaaaatgaagtaatggttggggtgatttacatgcttaaactacaccatcttgttgatgataaaatgcacgcaagatcaacaggcccatattctcttgtttctcagcaacctcttggaggaaaggctcaatttggtgggcaaagacttggagaaatggaggtttgggctcttgaagcttatggtgcggcgcacacccttcaagaacttttaacagttaaatctgatgatatgtcaggcagagttaaaatatatgaaaatatagtaaaaggcgttcctactaatgtatcagggattcctgagtcttttaatgtgctaatgcaagagcttagagggcttggacttgatttgtcaatttatgatgatgctgggaatcaggttcctttgacagaaaaagaagaagaattgattaataaaagctag

SEQ ID NO: 10933 - DNA, 375 bp, Borrelia burgdorferi
atggcactaaataaagaagatattttaacctggcttgaaggtgcaaaaactatggaagttgttgaccttgtaacagctattgaggaaaagtttggagtaactgccgctgttgctgctggtgtagggggagctgtttcagtaggttcggctgattctgaagaacaaaccgaatttgatgtaattcttatgtcttttggtgatagcaagataaatgttataaaagaagttagagctattacaggacttggtcttggagaagctaaggcgttagttgaagccgctcctaaagctattaaagaaggtctttctaagtcagatgctgaagaattaaaaaagaaacttgaggcagttggcgcaaaagttgaagttaaataa

SEQ ID NO: 10934 - DNA, 507 bp, Borrelia burgdorferi
ttgtttggaggtaacattatgagcgcaaagataaatgctaaaaagttggaaatgtttgatttattaaaacagtttatagatagcaaacaaaatctttttttcttagattatagaggtttaaatgtagctcagttaacagaacttcgcaataaaatagaaggcgaacatggatcattaaaagttgttaaaaacaatataatgaagatggttttaaaagaaaagaatattaatgttgttgattcttgtttggttggccctacagttgttgttactgcattagaagaagctaatgtaatagcaaaaattttttatgattttgtaaaaagtagtactttaaaagtaaagggcggttttgtattaggagagttttatgatgaggctaaggttcaagcttacagcaagcttcctaccaaaaaagagtctatttctttatttgctagcgtgttaaaagcgccagtttctaagcttgcaagaacattgaaagctttggctgatgttaaaaattaa

SEQ ID NO: 10935 - DNA, 681 bp, Borrelia burgdorferi
atgtcaaaaaagggtaaaaaatatattgaagctttttctaaagtggataagaataaattttataacattgaagatgcaattttgctgttgaaagaaattaaatttgccaaatttgatgaaactatagatatatctattaaccttaatttaaaaaaaaatcatactgttagagacactatagttttgccaaatcagtttatgaagccaaaaagaatacttgtttttgcaaaaggtgatcgagcagatgaagctagagcttttggtgcaacttatgttggcgatgatgatcttataaataagattaaaagcggttgggatgaatttgatgttgttgttgcaactcctgatatgatgaaagatgttggaagacttggtcctattttagggaaaaggggtttaatgcccaatccaaagactcaaacagtcacaaataatcttaaagatgcaatcaacagtcttaaaaagggtcgaacagaatttagggcaaataaaaatggtgtaataagcttttcttttggtaaatcttctatggacaatgaaaagataaaagaaaattatgaggaatttgtcaaggaagttgttaaaaaaagaccgagtgacttaaagggagcttttatagatagtatttatatttcatctactatggggccttctataaaagttaattttgtttggaggtaa

SEQ ID NO: 10936 - DNA, 432 bp, Borrelia burgdorferi
atggcaaaaaaaaaagcaatttcttggattaaattgcaggttccagctgctcaagcggctccaggagctaaaatagggcaagcgcttggacctcatggagttagtggtcctcagtttgtaaaggaatttaatgagagaaccgcaaagatggatcccggcattgtggttcctgttattattactgtttatagtgataaaagtttttcttttattgtaaagactcccccagcttcgattttaattaaaaaagctattgggatagaatcaggatctaagaaatctaatacagataaagttggaaccatatcaaaagaaaagttgatggagatagcaagaattaaaatgtctgatttaaatgcaaagtcagaatcagcagcgtttaaaattattgcaggaagtgcacgttcaatgggtgttgaggtggagaaataa

SEQ ID NO: 10937 - DNA, 555 bp, Borrelia burgdorferi
atgtctagagcttggtatgtagttcaaacttattctcaatatgagaaaaagatagagcaggacataaggcttttaataaatgaaggtgtttttggcggtgtggtattagatgttaaggctcctattgaaaaagtagaagagataagaaatggcaagaaaagaataagggagagaaaaatttggccaggctatattcttattgagctagatcttccagaagtaggctggaaagatattattgctaatattatcaaagttcaaggcgttattaattttgttggtgttagtaaggggcaaaggcctattcctattaatgatgaagaagtaaaaagtgtttttatgcttactggtgagattaaagcaaataaatctatttttatgctttatgactttgaagaaggagaaagagttagaattaaaggcggaccttttgactcctttgaaggacttattagttctattgattatgaaagaaagaaattaaaagttgcagttcaaatttttggaagatcaacgcctgttgaagttgatttccaacatatagaaaagatttaa

SEQ ID NO: 10938 - DNA, 180 bp, Borrelia burgdorferi
atgggtaaaaagaagggcaaaggagctgttgagcttatatctttgatttgtgaagaaacaggaattagaaattataccactactaagaatagacgcaataagcaagaaaagttagaattgatgaaatattgtccaaaattacgaaaacacactcttcataaagaaggaaaaataaaataa

SEQ ID NO: 10939 - DNA, 1467 bp, Borrelia burgdorferi
atgagtgattttatagcatcaaaagaagatgattattctaaatggtatttagatatagtccagaaagcaaaacttgctgattacagtcctgtaaaaggatgtatggtaattatgccttatgggtattctatttggagtaaaattcagagtatacttgataaaaaatttaaagagacgggacacgagaatgcatatttccctatgcttattccttatagttttttagaaagagaaaaggatcatattgatggattttcacccgagtttgctattattaaggatgctggtggagagagtttggcagagcctttggttttaaggcctacctctgagacaattatttggaatatgtatagtaagtggattaagtcttacagagatcttcctcttaaaattaatcaatgggcaaatgttgttcgttgggaaaagagaacaaggccttttttgcgcactaccgaatttctatggcaagaaggacatactgctcatgctaccgaagaggaggcattagaagaaactttacttattttagatgtatataaaagattcatagaagactatttggccattccggtgttttgtggtaaaaaatctgaaaaggaaaaatttgcgggggctgtttctacttattcaattgaggcattaatgcaagataaaaaagcgcttcaagccgctacatcccattatttaggtttaaattttgcaaaggcatttgatgtaaaatttcaagacaaagatggcaagatgcggcatgtatttgctagtagctggggtgtttctaccagattgattggtgctttgattatggttcattctgatgagaaaggtttagttttgccgcctcgcattgctccaatagaaattattgttattcctatttttaaaaaagaagatgagattaataaaaaaattttagattattctgattgtgttgtggatgctttaaaaaaagcagaatttagggttgaaattgataaggacgttagaagttctccgggatttagattttcatctgccgagtttaaaggaattccaatacgccttgaagtggggataaatgatgtccttttaaattccgttactatttcaagaagagataaagacagaaaatttaagtatcaaatatcacttgattctcttataagcaaggttaaggtagagcttgatttgatgcaaaaagatttatttcaaagagcattaaattttaggatcttgaatactaaggagatttttagaagcagtaaggatagttatgagacattcaaagcctatgtgaatgattattctggatttgtgctttcttgttggtgtggcagtttgaattgtgaaaatattattaaaaatgaaactaaagccacaataagatgtatccccgatgattttaaggccagagatttaacaggcatgacttgtatttattgttcatctaaagctaaatattttgttttatttgccaaatcctattaa

SEQ ID NO: 10940 - DNA, 1119 bp, Borrelia burgdorferi
atgaataatgaagataatatttttttaatgaaaaataatattaaagaatatgattggggcggaattaattttattcccaatcttttgggtgataagattgatggaaagcccaaggctgaaatgtggcttggagcacacaagacattttctagtaagattttgtataaaaatgaatatgtgcttttaagcgattttttagaagatcataaagagcttttaggctgtaatgacgaatttccttttttgcttaaggtattgtctgcaaataagcccctgtctattcaaattcatccttctaaagatattgccttaaaagggtatgaatcagagaataataaagggatagacattaatgatcccaaaaggacatacaaagacaaaaaccccaaaattgaacttatttatgctcttagtgatttttatgctcttaaaggctttttacccttagatgagattaaaaaaatttatgaaattctggaattaaatttcgactttcaatcacataaagattttgtaaagactatttttgatttacaaatgtatgaacttgagaagattattgaaaaaattttaaaaaatttggatcttattgataattttaggggctattggtttaatgaaatttacaatatttatggtatagatgtgggccttttggtatttttaggtatgaatattttaaaactaaaaccaggagaagttgtttatacaaatagtcaggaggtgcatgcatatcttaagggagattgcattgagcttatgaccaattccgacaatgttattagggctgggcttactacaaagtatattgataaagacgagatgttaagagttggtcaatttgaggaaggaaagttatcatttttaaatcccgattttcaagataattttagcgtatttagacttccaaatactaatttgaaattgattcaaaaaaaaataaatgagaacatttgtattaatagaaatagtgcaatggtcttgctagttttaaatgggtgcgtgagtataaataaatccttaaatcttaagaaaggtgagagcatatttataggtaaaaaagcagaaaacttgtttattgatggggacggcgaagcttttattgctggttttaattaa

SEQ ID NO: 10941 - DNA, 1878 bp, Borrelia burgdorferi
atgttttttaattttttgaaaaaagatcttgtatttgttttgccagaagtaaattcaaaagaagatgtaattgattttttaattgaaaaaatcaatgataagggatatatagataataaaaaagagtttcttcaaggaattcttgatagagaaaagataggtgacacttcttgggaaaatggggttgcaattcctcattttataggagatgttgttaagactagttttatttcattgctttacattaaaggttctggggttaagtggtctgaagaaaacccccctgttaatttaatatttttgatttgtatgtcaaaaaaacaacaaggtaatgaacaccttaaggcgattgcttttatagctaaactatttgaagatgatgcttttcaaaatgctttacgcgggtttgttactactgatgacatttattattatattgaaaatgttcaaagaaaggctaaagaagaggtttttggagctacaaaagcagaaaaaatagtggccgtaactgcttgtcctgttggagttgctcatacgtatattgcagctaagaaaattgaaaatgaagctaaaaagcagggttatagcattagagtagaaactcaaggatctattggtattgaaaatgccttaacagaagaggaaattaagaatgcgtccgttgtaatacttgctgttgataaggatattgatgaaaagagatttgaaggtaagagagtttataaagtttcaactgtaaaagcgataaacaatacagaaaatattattaaggaatcttttaatgctccggtatttaaaagcaaagactccggtactaatagtgatactaaagcttcggttgcaacaggcaaaggtagtttttataaatatttaatgagtggggtatctccaatgattcctgttgttgcaagtggaggaattttaattgctcttagcattgcttttgttgggattggacctgatgggcctaattttgctgagcatccattttataagcagattgcagatattggttctatagcttttgggatgatgttgcccgtgcttgctggttttattgcaatggcaattgctgataagcctggtcttacccccggtcttgttggtggagtaatgtctgggaatgtaaaagcaggtttcttgggcgcaatatttgcgggctttcttgcaggttatgttgcaaggtttttagcaagaagatctgttcctgagtggttaagacctgtaatgcctatatttgtaattccgctaataagcaccattattgtcggcttttttatgctgtattttggtgtttatattggaaaatttatgggggtgcttgagagtgggcttaaatctttacagagtaattcggaaacttttggcgtgttgggtaaaattttcttaggcttagtactaggttcaatgattactgttgatatgggcggaccttttaataaagtggcatttctttttggtgtagggctaattcctcaagtgccagaaataatgggaatggtagcagcagcaattcctgttcctcctatggctatggggcttgcaacctttttagcacctaaattgtttgaaaatgaagaaaaagaatctggtaaaatagcctttttaatttcatttattggtattagcgaaggagctattccttttgctgctagtgatcccggacgggtaatcccttcgatagtggtagggggagctgtatcaagcattattgccgcttttttaggcgttgctaatcatgctccacacggaggaccaatagtacttcctgttattgataataaatttgggtttattattgcaattgctgttggagttgcggttgcaacagctttggtaatttttttgaaatctttaaaattaaaggaatctgaatga

SEQ ID NO: 10942 - DNA, 780 bp, Borrelia burgdorferi
atgaaatcaatatttgcaaagttaaacgcttctatcaatctctttctttttataatttttattttggcaacaatagttatactgactttctcctataaaataaaatataatgaaaactatcaaaattatattctagaaatttacaataataattttataatattggttaataaattaaccatctttattgctgggatcataggctcgctgtggtcatacattaactacaaaagaaccaacaatatacaatttatatttttctattgctttattagctcatatacattagaccctattttaatctctgaagatttttttttaaaaaacaatctaaattcaagttattatttgtttacaaaatttatcctttttgtaaacactttttcattattaaatttattttttctcagtttatatatatgcgatttcaaaataaaatcaatacattatacaatttacattattttgatctttgcctgcatatatagttacacaatgcctattaattcgtacgaaaatagccaaaaccacggaattcttaaaatagaaaatacaaaattttacatagatgcattcttgctacttattttaacaaactttatagtagcctttttaagaaaaaaaagctttgactattttttcctttttgtttcaatgcttttaatattaagtggaatttacttgaatttgctaaaaatgccttatgcctttctcccaatctcaattggtataccaatctacttaaaaaaatcagggaaaattttcttttactggctataa

SEQ ID NO: 10943 - DNA, 636 bp, Borrelia burgdorferi
atggggcttgtatttttaggtcctccgggttctggaaaggggactatttcaaaaattatttctaatgaatttaaatatcaacacatttcaacaggagacttatttagagaaaatattttaaattctacggctcttgggcaagaaataaaaaaaattgttgaaaggggagaactggtccccgacctaattacaatcaaaatagtagaagataaaattaaagctattaaaaagaacaaagattttattttagatggatttccgcgcaatatttgtcaagccgaggctcttgacaaatttttgccaaatgtaaaaataataaattttttaattgatgaagagttagtgataaaaagactctcgggaagaagaatttgcaaatcttgcaataatattttcaatatatataccctaacaacaaaaaaaaatggtatttgcgacgtttgtgggggagatctttatcaacgagaagatgataaagaagaatgcttaaaaacaagactcaaagaatataaattacaaacaaaaccgctaatagaattttactcaaaatgctctagacttaacaatgttgatgcatctgttaaaattgatgaaataaaaaaaaagataattaaaataatgttaaaaaaaaattaa

SEQ ID NO: 10944 - DNA, 4485 bp, Borrelia burgdorferi
atgaaaaaagcaaactttttaagtactaattttttaattttacttttggtttgctttgtcaacgtcaatttattttctaaggatattttcaagtttaagcttgtagatcaattttttcctttttactacaagaataataaaggagaatatgaaggacttattttttctattttagataaatgggcaaaagataataatgctgatattatggttgagcatattgataatttaaatgaaagtgaaattgaagacgaagcaatatatttaggattaacttataatgtaaaattaaatgattttttttattttaaaagtgagcttgctaggagtatttcaattttattttttaaaaactctaataaaaaatataaaaatacccattcaacatttttatccaattttaatataggagttattaaaaatacaatatatgaagatatcttaaggttaaaaaacgttaacaccatttttttggctgataattctcaagagttagtattggccttaaaaaacgataaagttgattatatatatggtgattgcaagactttacattatattgcaaataactttttaagtgaagatcttgtgatttttaccggggatgttttttatagtatcaaaaatagagtggctattagtagaaatgctcctgagatagtaaagaatttgaatttagatttgttttcatatttaatgaaaatgcctgaggaacttgttttttcttttttagatagcaatgctaagggaagttttgttgatgttggtttatataatgattatcctcctttaagttttattaattcacagggaaaattgtctggcattttagtggatttgtggaatcttctctcaagacaacatatctttaaacctatttttaagggattttccaaagaggatattaagaaatcattagatggaaaatcagtaggtatttttggaggaattattagcaatgatagtgtgttggaaaatgttaattatgtagtaagtaagccaatatatcctcttaattttaaattttattctaaagacctaagcaatgatgctggtccaataaattctcagtttattgattttaattttaataatattcaattaaataagaataaagatattgttaataactttatagatattgttaataattcatatgggtttatagaaaattcaataacaacaaaatatttgttaaaattaaatggatataacggtagattaaaatcttacgattcgatttttaataaaaataggtttttagtattagccattgataataggatttataaggttattaaatatattctcaattctatatttgatgatatttcatttgaatctttgcttcaaatagataaaaattggttggataaagaagagattaatagttctagaataaatagttataaaattatgaataaggttaaatttaatatagaagaaaaaatttggttatcaaaaaataataaattaaatcttgctgttaaaaattggtatccaatagattatgttgaggcaaataattataaaggaataaatcaatttttgcttgataagattagaatgttttcaggtttgagatttaacataattaaagtacacagcagtttagatcttaaaaaattaatcaaatctggaaaaatcgatatgctaaatactaatgcaaccgattcaaatttagataatgttttcaacataaaattaaattctcgaattccactttatattttttcaaataagaaaagggtgcttccatctagatctttagaaaagtttgctatacttgattttttatatagtaaaaatttggcttctaatattaaatcaaagcttattctggtaagcagttttaatgaagcgttgcttcttctttataagggaaaggtagatgggattattagcgatgagtatacagctgctgctgtttttgaggaattaaatattgatgatgttgaaaaaattcctacttttagagatttggcttttgatttgagtcttgctatttataatcaagattatatcttgaaagaaattattcaaaaagttgttatgcgttcaaatgttgacagtcagatgtatttaaatgattggaaatttgatatttattataaatccagaagtatcaggtttaaaaatttcaaatttttagtgataacattcattatattttattttacttttttaggatttgtaattatatttatgttcagattatcatttgagcagaaaagaagatattcttttgtgatgaatgaaaaaaagattgcggaagccgctaatgctgctaaaaccatttttatagccaatgtcagtcatgatattcgtacccctattaacggaataatggcggctactgagcttttggatacaactattcttacagatgttcaaaaagattatgttaggatgataaattattcatctgattctttgctttctttaattgatgatatattgtatttgtctaaaatagatgtcaatgaattatatgttgagagtcaagagattgatttagagagtgaaatggaaatggttttaaaagcttttcaatctcaatgtgcaaagaaaaatattgatttattctcttattctaaatctatttttaataattatataaagggtgatattgtaaaaattaaacaagttttaattaatttaataggaaatgcttttaagtttacagatgatggtgttattgttttaaattatgaagaagtatgtagaacaagaactgatggtaatagggttttggttacagttgaatttaaggtaatagatacaggcaaagggattgaaaaagaaaatttttctaagatatttgaaatatttaaacaagaggatgattcttcttcaagggttcatgaaggtgcaggattgggattgtcaatatctagagagcttataagactaatgggtggtcttggtattgctgttgatagcaaggtgggagagggtacaactttttcatttatgttgccctttttattgggtagtgagcttaaaagtaaaaaattgtcaatcaatagatttcaatcagtaaatggtgacaataaagtattaaatgtgcttttaagtcaaaaatctattaaaatttttgagcactgttcgattttattgggatgctcttctaatgtgcgctatgtagcgtcttttgaggatgcttataaagtcttcaagaaatacccttcttataattttgtttatataaatgtaaataacgataatattcaagagggtattcgacttgccaataatattgaaagactaaattctgatgtacaaattatttttttattttattatttagataataaagctctaaaaaatttaaaatatggttatgttaaaaagcctttaatggggcttggtatatgctctattctttataaaaaagagtttaacccagaaatggattttgaggatttggttccaatagatagtgctttaaggataaaagagcccattaatgttttaatagctgaagataatcaggtaaatcaaaaagtgttgaaagatattcttgttgttataggcattaatgaaaattttattgatgttgtagatgatggagtaaaggctttaaaatctttaaaagataaaaaatatactatctcttttattgatatacgaatgccaagatatgatggattttcggtggctaaggaaattagaaaatttgaaaaggcaaagaatttaaagccttgtgttttggttgctgtaacagcgcatgctttgcaagagtataaagacaagtgtcttgcaagtggtatgaatgattatatctcaaaaccaatacacataagttcaattaaaactatattaaaaaaatacttacagtttgaagttgatgatattggggagaatgaaaatttgaatcaacttgttaagtttcctaatttagatgttaatagggctttaaaagaattaaatctttcatatgtatcatattctgaattatgtagagggcttgttgattttatctctattaatattattgatttggaaaaagcttttgatgaggaagatttgtctttaattaaggatatatctcattcaatatctggagctctttctaatatgcgtagcgaattgtataaagattttcaaaaaattgaaacaagtaaagattcaatttctgagttgaaaaaaatgtattcttttgtaaaagatgatttatttcaactaataagcgacataaaggaaaatattttgtttgagtctgagattgttagtgagaacaagctatattttaaaaataatgatcaatttttaaaccttctcaacaaacttttaattggtattaagactagaaagccaagagaatacaaagaaattcttgagagcattaataaatatgttttagacgataatattcaggtattatttagtgatcttcgcagaaatttaagattatatagatttgctgagagctctaagattcttgaagagattattgaaatgcttaataataagagatattag

SEQ ID NO: 10945 - DNA, 792 bp, Borrelia burgdorferi
atggcttatgtcttattcttgtatttggtaagtaaaaggttttggatttttatcattaagaaaaatgtttttaatatattttatttatttttagttttggaggaattaaaagggcctgtgttatatattgttggtacgccaataggcaatttagaagatattacttatagagcaattgatgttttaaaatcggtaaatgttatctttgcggaagatacgagagtaactagcaaacttttgtctcgatataaaattaataaaaaaatgatttcttgtaatgccgtaacagaaaacaagaagataagcttgctattggattatttggcaaaaggaaattctgttgcttttgttagcgatgctggtactccggggcttagtgatccgggtagcttattagttgctgctgcttttagagagggatacaaagtttgtccaattcctggagtaagttcttttaatacaattgtaagtgttaatccttttagagataaatcagtgttttttgagggatttttgcctaacaaaggccttaaaagatttaaaagaattgctgagctatataaaaggggagatgcttttgttctgcttgaatctggtcatagaattttgaaattgcttgttgaaatttcttctgttagtttagatgcgaaggttcttattggtcgcgagatgacaaaaatttatgaagaatatcaaattggcaaacctttagaattaaaaaaatattttgaatcgagtaaggataaggttaaaggagagtttactattctagtcagcagaagtcgttcataa

SEQ ID NO: 10946 - DNA, 753 bp, Borrelia burgdorferi
atgaaaataatatctgtaatcaatcaaaaaggaggcgtaggaaaaaccacaagcgccattaatatttcttattcaatgaccctgcttaataaaaaaattcttctaatagatattgattcgcaaggaaactctactagcggcacaaatacctcaaagcatatagccgaaaaatcaagctatgaacttattaacaaaaaaataaaggtcaaacctttaaatcattttggattagacataattccttctagcattaaattagctttgcttgaaaaagaattaataaatgaactttcaagagaaaattttttaaaaaatgcattaacactgtatgaaaaagacaaatatgattttattattatcgactgcccccctacactttcaatattaactataaatgcacttattgcaagcaattacttgttaataccaattgaaacggaattttttgcatttgaaggcataaatcaactaatagatacaataactactgtaaagcaaataaataaaaatttagagattgcgggtgtttttataaataaatacgacataaggaacaaaagtaaagaaaaatatgtaagctcgctaaaaaaagtttttaaagaaaagcttttaaatacaaaaataaggaaaaatataactatctcaaaatctcaagaagcaaaaatgcctgtatatgaatatgacaaggaaagcaatgctgcaaaagattttttagagctctcaaaagagataataaacaaaattaaggaatag

SEQ ID NO: 10947 - DNA, 2433 bp, Borrelia burgdorferi
atggcagttggagaaaataaagaacaaatattaaatgttaggatagaagatgaaataaaaacttcttatttaaattatgcaatgtcagttattgtttctagagctcttccagacgtaagagatggtcttaaaccagttcacaggagaatactttattctatgtatgagatgggacttcgttctgataaggcttttaaaaaagctggtagaatagtgggagatgttcttgggaaatatcatcctcatggagatcaatcaatttatgatgctcttgtaagacttgctcaggatttttcgcttagatatcccgtaatacggggacagggaaattttggatctattgacggagatccccccgctgctatgagatatactgaagctaaaatggaaaaaataactgaatatattgttaaggatatagacaaagagactgttaattttaagtctaattatgacgattctttaagtgagcctgagattatgccgtcatcatttccatttcttttggtaaatggctctagtggaattgctgttggaatggctactaatatggcacctcataatttaagagaaatttgtgatgccattgtttacatgctagataatgagaatgcttctatatttgatttgcttaaaatagttaaagggcctgatttcccaacttttggagagattgtttataatgataatttaattaaagcatacaaaactggcaagggaagtgttgttattagggcaagatatcatattgaagaaagagcagaagatagaaatgctataattgttacagaaataccttatacggtaaataaatctgcacttcttatgaaagttgcgcttttagcaaaagaagaaaagctagaaggacttttagatataagagatgaatctgatcgagaaggtattaggatagttcttgaagttaaaagaggatttgatcctcatgttattatgaatttgctttatgaatatactgaatttaaaaagcattttagtataaataatttagcccttgttaatggtattcccaaacagttaaatttagaagaattgttatttgaatttattgagcatagaaaaaatattatcgaaagacgtattgaatttgacttgagaaaggcaaaagagaaagcacatgttcttgagggattaaatattgctttaaataatatagatgaggttattaagattattaaatcatctaaattagcaaaagatgcaagggagaggcttgtttcgaattttggtctttcagagattcaggccaattcagttcttgatatgaggttacaaaaacttacagcccttgagatttttaagcttgaagaggagcttaatatactgttaagcttaataaaagattatgaagatattctcttgaatccagtaaggattattaatattataagagaagaaactattaatttaggtttgaaatttggcgatgaacgtcgaactaaaataatttatgatgaggaggttttaaaaactagtatgtcggatttaatgcaaaaagaaaatattgttgttatgcttacaaagaaaggtttccttaaaagactttcacaaaatgagtataaattgcaaggtacgggaggaaaaggactaagttcgtttgatctaaatgatggagatgagattgttattgctttgtgtgtcaatactcatgattatttatttatgatttcaaatgaaggaaagctttatttaatcaatgcttatgaaataaaagattcttcaagagcttcaaaaggtcagaatattagtgagcttattaatttaggagatcaagaagaaatattaactattaagaatagtaaagatttaactgatgatgcttatttattgcttacaactgcaagtggaaagatagctagattcgaatctacagattttaaagcagtaaagtcacgaggtgttattgttattaaactgaatgataaagattttgttacaagtgcagagattgtttttaaggatgaaaaagtaatttgtctttctaaaaagggtagtgcatttatatttaattcaagggatgttaggcttactaatagaggtacccaaggtgtttgtggaatgaaattaaaagaaggtgatttgtttgttaaagttttatcggttaaagaaaatccttatcttttgattgtttctgaaaatgggtatggaaaaaggttaaacatgtctaaaatatctgagcttaaaagaggagccactggttatactagttataaaaaatctgataaaaaagcgggtagtgttgttgatgctatagcagtttcagaggatgatgaaatcttgcttgtaagtaaacgttcaaaagctttaagaacagtagctggaaaagtatctgaacaaggcaaagatgctagaggaattcaagtattatttcttgataatgacagcttggtttctgtttcaaaatttattaaataa

SEQ ID NO: 10948 - DNA, 1920 bp, Borrelia burgdorferi
atgaatggaaggtttatgaattatgttgctagtaacattcaggtcttaaaaggacttgaggctgttaggaaaaggcctggcatgtatataggctcagtttctattaatggattgcaccatttggtttatgaggtggttgacaatagcattgatgaggctttagctgggttttgtgatagaatagatgttattatcaatttagataatactataactgtaattgataatgggagaggtattcctaccgatattcatgaagaggagggtattagtgcccttgaacttgttttaacaaaattacattctggtggtaagtttaataaaggcacgtataaagtttctgggggacttcatggcgttggaatttcggttgtaaatgctctatcttcgtttttagaggtttatgttaatagagatggaaaaatttttaggcaaactttttcaaaaggtattccgacttctaaagtagaagttgtgggggaatcttctgttacggggactaaggttacttttttggcggattctgaaatttttgaaactttagattataatttcgatgttcttgaaaaaaggcttaaagagcttgcttttttaaacgataaaatatacatttcaattgaagataaaagaattggtaaagaaaaatcttcaaaattttattttgagggtgggataaaatcttttgtagattatttaactaatgacagcaaagcttttcaatcagaaccttattatattgatggttttattaatgatgttattgttaatgtggggcttaaatggactgaaagctattctgacaacattctttcttttgttaataacattaatacaagagaagggggaactcatgttatgggatttagaagtggacttactaaggccatgaatgaagcttttaaaaattcaaaaataagtaaaaaagatattccaaatcttacaggagatgattttaaagaggggcttacagctgttatttctgtcaaagtaccagaacctcaatttgaaggtcaaacaaaaagtaagcttggtaattctgagataagaaaaatagttgaagttgttgtatatgaacatttattggaaattattaatttaaatcctttagagatagacactattcttggaaaagcaataaaagctgctcgtgctcgtgaagctgcaagaaaagcaagagaatcagaaagaaaaaaaaatgcatttgaaagcttggcattgcctggaaaattggctgattgtacttctaaaaatcctttggaaagagaaatctatattgtagaaggtgattctgctggaggaagtgctaaaatgggtagaaatagattttttcaggccattttgccactgtgggggaaaatgcttaatgttgagaaaacaagagaagataaggttatcaccaatgataagcttattcccataattgcatctcttggtgcaggagttggtaaaacttttgatattacaaaacttcgttatcacaagatcattattatggcagatgccgatgttgatggatctcatattagaactttgcttttagcttttttctttagatatatgagagatttaattgaaaatggatatatatatatagccatgcctcctctttataaaataaagtatgacaatcgtatttattatttttatgaagagaaagaaaaagaaaaatttttagattctattgaaactaaaaatcgcaatagtatttctcttcagagatataaagggcttggggagatgaatccaacgcagctttgggaaacaactatggatcctgctagaagaaaaatgagattgatgaatatagatgatgctattgaagctgaaaaaatttttgttactcttatgggagatttagttgagcccagaaaagaatttattgaacagaatgcacttaatgtaattaatcttgatgtgtaa

SEQ ID NO: 10949 - DNA, 1461 bp, Borrelia burgdorferi
atggaaaaatcaaaaaatatatggagcttgattttaacagaaataaaaaaagaactatcagaagaagaattttatgtttggtttgaaaatttgtgctttttagaatcaataggtgacaatattaaaatatctactccaaatttatttcataaaaatcaaatagaaaaaagatttacaaaaaaaattaaagaaatccttataaaaaatggctacaataacatagtcattgtatttacaaatcaaccacccaaaactcattctaacaaacaagaaactaaaaacccggctcttaacgaaactttttcaaagttcgacaagctcaaagaaaaaacaacttccaaagaagcaatccaaaatattcaagatcgtataaaaatgtatatcaaaaaagaagaagaagagcccacaaattttaaaaacccctttcttaaaaaaagatatacatttgaaaattttatcatcgggccaaataataaacttgcttacaatgccagcttgtcaatctcaaaaaatcctgggaaaaaatataatccgtgtttaatttatggtggagttggacttggaaaaacacatttgcttcaaagcataggaaacaaaacagaagaattacatcataaccttaaaatattatatgttactgctgaaaattttttaaatgaatttgtagaaagcataaagacacacgaaacaaaaaaatttaaaaaaaaatacagatacttagacatgctacttatagacgatatccacgacttacaaaaaaaagaaggtatacaagaagagctttttcacacatttaatgccctttatgaagacaataaacaactagtattcacatgtgaccgatctccttctgaacttacaaattttacagatcgattaaaaagcagattcacaaggggattaaatgttgatatatcaaagcccaattttgaactcagagcagctattgtcgaaaaaaaagcagaagaagatggcataaatgtccctaaaaatatactaaatctggttgctcaaaaagttacaaccaacgtaagagaccttgaagctgctgtaacaaaactaaaagcatatatagatttagacaatatagaaattgacattgaaattgttgaaaaaataatcaaagaaataataatttacgaaaaagaaacaaccaatgagccaaacaataaaattaatatcgaaaatataaaaaaaatactcttaagagagctaaaaatcacacacaaagatattgaggggcatagtaaaaaaccagagataacaaaagctagacatatttatgcgtaccttttgagaaattttacagagctatcaacagttgaaattggaaaaattattggagggaaaacccattcaacagtgctttattcgataaataaaatagatagagacagaaataatgacaaagaaattaacaatttaatcacagaacttatgaacaaaataaaaaaaaattaa

SEQ ID NO: 10950 - DNA, 1158 bp, Borrelia burgdorferi
atgctacacaacacattttttatttgcgaaacaaatcaaattatgaatgagatagaaaaagcaaagggaataatattaaacagaaatatgaatgatatttggagtgcattgttaatagaagtaaaaaaatctaatctcataatcaaatcaacagacagaaatatattttttgaaagcacaatttcaattgtttcagaaacagattttaaggtattaattaatgcttcaaatttttatgatgcagtaaaagcattcagtttttataagaaaatcaaaatagtttttaatgaaaataatagtaaattagaaattatgggagagttaaatgatgagaaagaggaatatgaagatcatttaaaagagcccactttttcatacgaagaaatagaaaattacaattatgatatggttaatgaagattatacttttggaattgaaataaaacaaaaatcttttaaaaaagtaataaatagaatagctttttcagcacatcttgatgaatctaagaatgtattaaatggtgtgtatttttcaaaagatgaagattctaaattactacttgtttctactaatggtcacagaatgtctatttgtaaaacagaagtcatagttgaagaagatgtgaattttatagttcctgtaaaaatatttaatttcttaaaacatcttatgtcgggagaaggtatggttaaaataaagttttcggataaaaaattttatgttgaatttgataattataaaatagcttgtagcttaattaatggtaattatccggattataaaagcattatacctaaagaacagaaaaataaatctttagtttcgctaggcattttaaaagatagacttgcaagagtcaatttatatgttgataaatcaagaaagttggttttaactttctctgagttacaattaaaacttcttggagaagatttgattactggaagaaaaggtgaatttttcattaaagatccaaattatctgtatgacggagcagatgaggttatggctattaatatttcatattttgttgaagctattagtgtttttgaaacttcaaagatagaaatacaatttaattcgggcaatgtattaaaattgagcgaacctgaaaattttaattttacgcacttgataatgccgatgtctttgggttaa

SEQ ID NO: 10951 - DNA, 156 bp, Borrelia burgdorferi
ttgaaaagaacttatcaacccagtcgtgttaaaagaaatagaaaatttgggtttagagctagaatgaaaactaaaggcggaagacttattctttcaaggcgaagggcaaaaggaagaatgaaattaactgtttctgatgagaaaaagaaatattag

SEQ ID NO: 10952 - DNA, 360 bp, Borrelia burgdorferi
atgagaaaaagaaatattagtttaaaatcaaaaatagaaattcaaaaaattttcaaagaaggcaagctgattagatttagcaatcttaatcttaaaatgttctataaatcaaatcatttggtttattctagaattcttgttaccttttctaaaggctttaggggatctgttaaaaggaatcgcattagaagactttttaaagaagcttttagaaaaagattagaattgttagaagggattgctttagatattatttttgtagtttcttatggtaagttaactttgacttattttagcattgaatctctcatgaaaggtttggttttaaggtgtgaaaggggcataggtgaatcaaagtag

SEQ ID NO: 10953 - DNA, 1635 bp, Borrelia burgdorferi
gtgaatcaaagtagaagaattttaagaacagtttatttgtctttatttttaataggtcttttcatgcttattaatgatattttttcttcaaacattttaagttctaagtcttctgataaggaagtgcagtttgatttaaacaaaagttttgatgataatgagatgtcttcagttaagagtaatagctttaatttgattaataaatctcaagatattattgtagagacagggatatatgttgctactttttctacatttaaaggaaatttggtttcattaaagcttaaaaatcatttaaatttggaaaaaaatcctacagatttgattaatattgatcgcaaaaatgaaactttttttgacattagttttgactattttgtagatgatttgtttttgtataaaaagatagatgattttaatcatgaatttaaagcttattttaaaaataatggtaaaacttatgaatatgtaaagaagtatacattttcgaaaaaagatgagtacttaatgcaattcaaagttactgtaaatggtcttgaggattataacttatttgattttgattcttataaaattatttttagttctgagattgaaaggttgagtgataaagcaaagctacaatataataattatttgtctcaaataatttattatgataataagcttaaatatggtaaagatggtctaaggattaacaatcccagatggattggttctagtactaagtattttggggtgttagtttcyaaagaaaatatggaggttgaatttaagaaggaaagaggaactcttaaatcgtttattattaataatgttagaaataaaaaaaatattagcgatgagttttttatttacgctggacctaaggataatagatatttagacgtttttgacaagagagatgacaatacctttggtttatttgatattttttttggaatgtcagtggaaaagagtttttggtatttgattcaagttcctatgcaaatggtaatgcaagttttttatgatgttatacctaattgggggctttcaattatttttttgacaattgttgttagaatacttatctttcctttgacatttaagggatttagagctactgcggarctttccaagcttcaacctaaaatgaaagagcttcaagcaaagtttaagcatgatcctaaaaagttaaatgaagagatgggaaggctttataaagaagaaggagttaatcctcttggggggtgtcttcctgtaattttgcagcttcctatattttttgctctttattcacttgtaaataatttatttttattaagaggagctagttttattccaggatggattgatgatttatctatcggtgacagtgtatatcattttggatataagctttattttgtttcttggaccgatattagaattttgccttttattatgatgtttactcaattgggatctacaattgttagttctaatatggatttaaaaaatcttggggcgcagcagaagtttttatattttggaatgcctattatgttttttttcatactttacaatatgccatcagggcttttaatatattggattacaacaaatatttttactattttgcagcaatactatataaagatgcatttgtcttaa

SEQ ID NO: 10954 - DNA, 1080 bp, Borrelia burgdorferi
atgggtgttttagataagattaaaccaggtgtagtttatgggaaggaactacattttttatatgaaatatgtaaaaaggaaggatttgctattccttctattaattgtataggaacaaattctattaatgcagttttggaggcagcaaaagaaattaattctcctattatgatacaattttctaatagtggatctgcttttatttctggaaaaggattaaagatggaaaaaccacaaggagtttcaatagttggagctatttctggtgctatgcatgttcatttaatggcagagcattatggtgttcctgttgttcttcatactgatcactgtgctaaaaatttgcttccttgggttgaaggccttttagaatatggagagaaatactatagtcagcacaaaaaaccattattttcttcacatatgttagatttatcagaagaacctattaaagaaaatattgaaatttctaaaaaattcttagaaagaatggcaaaaattgaaatgtttttggaaatagagcttggaattacgggtggggaagaggatggagttgacaattcagatagagctttgcatgaactattttctactcctgaggatatttattatggatattcagaacttttaaaagttagcccaaattttcagattgcagcagcttttggaaatgttcatggggtatataaaccggggaatgttaagcttactccaaaagttttaaaagatggtcaagattatgtcatatcaaaaacaggagtaaatatggctaagccagtttcttatgtttttcatggagggtctggatctacaattgatgagattaatgaggcgctttcttatggcgttgtaaagatgaatattgacacagatacacagtgggctgcctgggagggtgttttaaattattacaaaaaaaatgaaagtcgtttgcaaggtcaattaggagatggcaaggatattgatattccaaataagaaattttatgatccaagggtttggttaagagaagctgaagtttctatgaaagaccgtgtgaagattgcatgcaaaaatcttaataatattaatagaaattaa

SEQ ID NO: 10955 - DNA, 1521 bp, Borrelia burgdorferi
atgataaatgcaaatatgaaaacaggacattttgaaatattggcaaaaaacattgaaattatctcaaagtgcaatgaattgccatttatgatagaagatgacaataatgcaagtgaaaactcaaaacttgaatacagatacttagatttaagaagagattccttgaaaaataaaattattttaagatgtcaggctactcatcttattagaaattttttaataaaaagaaaatttttagagctagaaactccaacttttgtaaaatcaacgccagaaggtgcaagagattttgtaatcccatcaaggattcacaaaggatctttttatgcactacctcaatctccacaactttacaaacaactcataatgatagcaggatttgacaaatactttcaaatagcccgctgctatagagacgaagattcaagaggggacagacaaccagagttcacccagctcgatcttgaaatgagctttgtcaaaaaagaaaatatttttaaattaatagaaaatatgctttttttaatattcaaaaattgcatcaatattaacctacctaaaaaattcaaaaaaataacatacaaaaaggcaatgaacaaatatggaagcgacaaaccagatactagatttgaacttgaattacaagatataagtcgtaatctaaaaaattcagaatttaatatattcaaagatactctaaaaaacaaaggttcaattaaaattttaatagtaaaagataaagctgacaagttttcaagagcaaaaataaacaatttagaagaaattgcaaagctttacaaaacacaagggctttattttacaaaaattgaaaacaataaattttccgggggaattgcaaaatttttaaaaacagaagaacaggaattaataaaaacctattctttagaaaataatgacataattttctttacagctaataataactgggaaactgcatgtaaagcaatgggtcaaattagaataaaaattgcaaatgatcttggactaatagatgaaaataaatttgaatttctatgggtctatgattttccactatttgaatatgacgaaaatacaaaaacctattcaccagctcaccacatgttctcgcttcccaaaaagcaatatattgctaatttagaaaaaaatccaaaaaaaactataggtgaaatttacgatcttgttttaaatggcgtagaacttggctcaggttcaattagaatacataacaaagagcttcaacaaagaattttcaaaataataggatttcaaaaagaaaaatcagaagatagatttggattttttctaaaagcattagaatatggagctcctaatcatggtggcattgctattggcattgatagactaataatgttgatgacaaaatcaacttcaataaaagatgtaatactgtttcctaaaaattcttttgcagcaagccctcttgataattccccctctaaaatctcaaatgaacaactcaaagaactgggaattaatattgttgatggtgacaattaa

SEQ ID NO: 10956 - DNA, 2106 bp, Borrelia burgdorferi
atgaacaaaaaaattttttacataacaatactgctgcacttacctaatcttctattttcatactcaacaaaatacgacattgaagtaaaaatgtcggcttttgtcatgagtctggcaatcatcgtaatctcatctatttcaataggcaatctagtagctaaaataggaattccaaaagtaatagggcaaataacagcgggaataattctaagtccgaatgcctttggaaaaattcaaatacctttattattcccattgggaataactcaaattggagaaaattatttaataaatgaaaaaatatttgcaatctctaccatagcttcaataatattgcttttcacagcaggacttgaaactgacttaaaattgtttatcaaatttttgccacgcggaggaattattggaataacagaggttgttggaaccttcacaagttttgtactaatggcaagcataatttttaacgttcccctaataagcccaacctcactttttattggaataattggaaccccaacatcagcaggaatcgcagcaagcatactctcggcaaagaaaaaaatgagtacctcagaaggagtgacaataatctcaacttcaattattgatgatgtgctttcaatgcttatgcttacaagtgtaataactatatcaagatctatatcagatcttgatatagcaagctcaataaaagctatagttcaaaacatagtaatttggctatgcttaactttctctttaatatatatatcagaaacactctcaagactgttgaaaaaattaaacagtgtcaccttagcaaccgtaataacgctctctctagcccttactattgcaagcattttccaaaatttaggaatgtcttttgttgttggggcttatgtatttggacttgctatgtcaaaaacagacattgtatacgtaattcaagacaaactaacaatctttgaaagattctttatcccgatcttttttacatcaatcggacttatgtcagatattaatgaaatactttcaaaggaagttcttattttaggattagcaattagcgcaatagcaataattactaaaagtatattttgctttatcccagcactctttttaggatttaataaacttggagccttaaaaattgcaaccggaatggttccaagaggagaagtttcacttattatggcaaatgtagcattatcttcaggatttattagccaaaaaatatttggaatcataataataatggtgtttttgccaacaatcattgcaacacccataataaactttttatttaaaataaataaaagtggacttaaaaaagaactcccaatagatcaaaatacacacatatgcgtatcatttgaatatgataatttagccaaaattcttatatgggactttaaaaatgagttaagaaaagaaggattttttacacaacaaattaaaaatgattcttcacaatatattaatgcaagaaaaaacaatatatccttctcaataaaacgagaaggtagcaaaatcacatttgaatgcccaaataatcatttaattataatacaagatctttttagagaaacaatcttaaacctagaaaaaataaccaaagaagttgaaacagtctctttaagagcaaaaaaactagattactcaataaattacgataaaatccttagtaatatcaacctaaataaaagaataaaaaaggaaaacattattctagaattaaaatcaagcaataaggctgatgtaataagagagcttctaagcgtaataaacattgaaattgataaagaaagaatattccaagatttaatggaaagagaaaagttaattactactgcactaaaagaaggctttgccattccccatttaaaaacaaatttaatatcaaaaatacatattgcaataggaataagccatgagggaattgactttaatgctcttgacaagaacttaagtcatgtttttatattaatactgtgcccagcaaaagattacgttagctaccctagaattttagcatctgttgtgggcaaagttgatctgtacaaaaaagaaattttaaatgcaaaaacagataaagaaatttataatataatagtgagctaa

SEQ ID NO: 10957 - DNA, 843 bp, Borrelia burgdorferi
ttgtttaaggagttttttatatttcaagattattttaattatattattgagggcgtggtaggttatggtctaaaagtttcgattgctatagtgctatggtattttttaaagttaatagttagtaaaatgggaaaaattttatttaaaactttagaaaagtccagattagaggaaaagttagaagttacagtttttaactttttaaaatctttttttaaaatattaacagactttgttattgttttaataatattgccatatcttggggtgcctacaacatctattattgctgtatttggatcattagggcttgccattgggcttgctgctcagaatattctatctaattttgttagtggatttattgttttgaattctaagttttttaagtgtggagatcatattcaatgtggagatgttgaaggtttggttgcagatgtccaaattttttttactacacttgaaacatttaacaaagaaattattaaaattccaaacagtaagcttacatccaattttgttgttaatttttcgtcatgtactagaagaagagttgtgttttcttttcaagttccctatgatacgaatattggtttattaaaggataaaatagaggatttaatgattttcaataataagaaatttaatgttgagctttgtgctcctactcttattgttaaaaaatacactccttattatatagttttgcaagttcgattttttgttaatacagaggttttttgggattttcaatattttgttggtgagtctattcaaaatgttttattggatatgaaaattaaggttccaatttgttttgtgccttttgataagctgtattaa

SEQ ID NO: 10958 - DNA, 1152 bp, Borrelia burgdorferi
atgaaagtcgcaatatttacagatacatatatcccagaaaaaaatggagtagcaacatcaataaaacaaattaaagagggatttgaaaaaaatggctatgaggtttacatattttgcccaaaatccaaaaaatctttaaacgaaaaaaacgtttacagatgctcatctattcaaataaataaaaaacttgatgctgtaatagcttttcccaataaaagaaaaatatccaaaataatacaaagctataaaccagacatcattcatactcactctgaattttctatgggaaaaattggaaaacaaattgcattaaaacacaacataccaatagttcatacaagccatacaatgtgggattattatttgcattacttaggaatttttaaatattttatcaaacccgacaaaatgatgcgaaaacattataataaaataaaacattttatttacccatcaagtaaagcaaaagagagatatttccaactttcaaataattcttctaactataaaataattccaaatggggttgatagaaagctttttataaaaactctaagcaaagaaaaaaaagatgaaattttgaaaaagcacaatataaagcaaacagacaaaataataatatttgttggaagaataaataaagaaaaaaatataaatttattagtaacacacttaaaagatcttttaatgcaaaacaataattataagcttatacttattggtaaaggaagtgaagaaaaggaaataaaaaattttagcatcaaacatgggcttgaaaaacaaatattgctaataggaacaattccatgggaagaaatatactattactacaaaatttctgatatctttgctagcctatcaaaaagcgaagtatatccaatgacagtaatagaagcattaaccgcgggaatacctgctattttaataaatgattatatatataaagacgtaataaaagaggggataaacggattcttaataaaaaaatatgaaaacttatctcggtacatagacaaagtaataaaagatgatgaaatactaaaaaaatttaaagaaaatgcaaaaaaacactccactaaattttcaagctattttttcacaaaaaaaattaaaaactattactcagaaattattgcaagaaaaaatcattaa

SEQ ID NO: 10959 - DNA, 1683 bp, Borrelia burgdorferi
atggcgtcttcaagaggcactgctcttaagaaacgccccagagatttcaactctcttgaagggcaagactttgttgttgaaactctaaagcattctatagagaaaaataaaatagctaatgcttatatcttttcagggccaagaggcgttggtaaaacttcatcagccagggcttttgccagatgcttaaattgcaggaatggtccaacagttatgccatgtggggagtgcagcaattgtaaatctattgagaatgatagcagccttgatgttgttgaaattgatggtgcctcaaacacttcggttcaagatattaggcaaattaaagaagagataatgtttcctcctgcaatttctaaatatagaatatatattattgacgaagttcatatgctttccaattctgcttttaatgctcttttaaagacaattgaagagcctccaaattatattgtttttatttttgccactacagagtcacacaagcttccagagacaataaaaagcagatgtcaacattttagttttaaacttttatctttagataagatttacaatatgcttaagaaagtttgtttagaggatgatattaaatatgaagatgaagctttaaaatggattgcatataaaagtagtggtagcgtaagagatgcttatactctttttgatcagatagtttcttttactgattctaacattaaattagatcaaataagatccaagatgggcttaaccaatgatgaatttttagaaaagttgtcagttagcattcttggtgaagatgtgaaagagttaatttgtgttcttgattctatttttttatctggagtgtcttatgagcaatttcttttagattcaatcgaattttttagagaggcattatttttaaagataggtattaaaaattttgagtttattggaattaaatctgaggatttgagaaagaaattaattgagtttgatttgaactatcttgaaagaattattgttgttttgcttgaaacttacagggatttgcaattttcggttaatccaagatatgagcttgagattaattttattaaaattttaagacttaaaagttatgttccaaatcatgttttaataaagcaaattcaaaatcttgaagacaatctgttagaaaatattgctacagattcaaacaattttgatgttttatcaaataataagagcgaagatgatttggcttttattccatcaaaatctagtttaaaatgtgaatttcccgaaatcaaatctttagaaaaagaggaggctgatcgtgatgaaaatttatcaacaaaaattgataaaaatattttagagaccaatagtattgacgagattgatgagatttttattgaagatgataatgcgagtaattcaaatgattttattgatataagagataaatttatttatattgtttcaagatatgttcaaactttagttcattcgggagaggttgctattgatgacaatgttctttattataaggtgtttagtgagtttgaatataatgagcttcaaaattataaaggtgagataagatctgaattttacaaagaattccccaatttaagcattgtgtttcagaaaaattttaaaaaccttgaaaaggattttgaaaaactagaaactgtaaaaaatatttttggagcaagtgaagttctggagggataa

SEQ ID NO: 10960 - DNA, 1329 bp, Borrelia burgdorferi
gtgcgatttaattttattaagtttttatatataggaggatggattatgcatagttatattgtagaaggcggctataagataggtggtcaaattacagctagtgggaataagaacgctgctttaccctgtattttggctgctttacttaccgatgaagaggttattttagaaaatattcctaatattaatgatgtaaaagttgttttagatattttaaatgacataggagcagatattgcaagagagggaaatactttaaaaataaaagttttaaatattgtgaaaacagaaatagattcttcttttacagatttaattagggcttccatacttttattagggccttttgtttctaggtttggaaaaatagatatggcgcttccaggaggagatgtgattggaaagaggaggcttgatactcatttttacgggctttgcaagctgggggccaagttaagcacaaaagatagaaggattgttttaaaggctaacaagcttgttggcgctgaaatgtttttagatgaagcttctgttacagccacagaaaatatcattatggctgcagttcttgctgaaggaaatactgttattatgaacgctgcttgtgagccacatgttcaagatttgtgtaatatgttaaattcaatgggcgctaatattttaggaattggttcaaatgttttagaaataaaaggtgtaaaaaaattaagtgggaccgtatttagaataggagccgatttcatgcaagttggttctttaattagccttgctgcattaacagggggtgagttggaaattaaaaaagcagatccccaacatttcagattaattaggcatgtatattcaagacttggcattaattttgaatatgacagggaaaatgtatatgtaagaaataaacaagaattaaaagttaagttagattttggtgggcacattccaaaaattgatgatggcccatggccagcctttccaacagaccttatgagtattattgtagttactgcaacgcaagtagaaggcacagttttagtttttgagaagatgtttgaatctaggatgttttttgtagataaattaataaaaatgggtgctcgaattgtgctttgtgatccacaccgcgtagtagttacgggcaaatcttctcttaaaggcaatgttttgtcttctccggatgtacgagcgggaatgtctcttcttattgctgcttttgttgctgaaggtcgcagcgagattcaaaatgtttatcaaattgaaagaggatacgaagatgtagttaacaaattgattaatttgggtgcaaaaatcaagaaagttaaaagtcaatag

SEQ ID NO: 10961 - DNA, 1206 bp, Borrelia burgdorferi
atgaaatttaggaggttagtcatggcaaaagaagtttttcaaagaacaaagccgcacatgaatgttggaacaataggtcatgttgatcatggtaaaacaacactaacagcggctattagtatttattgttcaaaattaaataaagatgcaaaagcattaaagtatgaagatattgataatgcacctgaagagaaagcaagaggaataacaattaatgctaggcatattgagtacgaaacagctaatagacattatgctcatgtagattgtccaggccatgccgattatataaaaaatatgattacaggagcagctcaaatggatgcagcgatacttttagttgctgctgatagtggtgctgagcctcaaacaaaagagcatttgcttcttgctcaaagaatgggaataaagaaaataatagtttttttaaataaattggacttagcagatcctgaacttgttgagcttgttgaagttgaagttttagaacttgttgaaaaatatggcttttcagctgatactccaataatcaaaggttcagcttttggggctatgtcaaatccagaagatcctgaatctacaaaatgcgttaaagaacttcttgaatctatggataattattttgatcttccagaaagagatattgacaagccatttttgcttgctgttgaagatgtattttctatttcaggaagaggcactgttgctactgggcgtattgaaagaggtattattaaagttggtcaagaagttgaaatagttggaattaaagaaaccagaaaaactactgttactggtgttgaaatgttccagaaaattcttgagcaaggtcaagcaggggataatgttggtcttcttttgagaggcgttgataaaaaagacattgagagggggcaagttttgtcagctccaggtacaattactccacacaagaaatttaaagcttcaatttattgtttgactaaagaagaaggcggtaggcacaagccatttttcccagggtatagaccacagttcttttttagaacaaccgatgttactggagttgttgctttagagggcaaagaaatggttatgcctggtgataatgttgatattattgttgagctgatctcttcaatagctatggataagaatgtagaatttgctgttcgagaaggtggaagaaccgttgcttcaggaagaattcttgagatattggaatag

SEQ ID NO: 10962 - DNA, 312 bp, Borrelia burgdorferi
ttgattgctaaagataagatacgcgtaagattgtttagttttgatgttaaaatattagaccagagtgccgaatctattgttaaagctgttcagaaggctaaggctcagattaagggtccaatccctttgccgacaaaaataaaaaaatatactgttttacgttctcctcatgtcaataaaaaatcaagagagcaatttgagatgagaactcataaaaggcttattgatatcttagaacctacttctgctttaatggactctttaatgaaattagagcttccagcaggtgttgaggtagatattaaacagtaa

SEQ ID NO: 10963 - DNA, 621 bp, Borrelia burgdorferi
atgttgggattgattggaaaaaaagttggcatgactcagatatttcagaaaaatggcattgtggttcctgttactgttatagagtttcagcccaattatattatagggaagaagacagtcgatagagatggttatagtgctcttatagcaggttctgttgatcttaagagttctaaagtttcaaagcccataaaaggtcaatataaaagtttaaaagatattgaacctaaaagatatgtgatagagcttaaggggcttgacgggtatgatgctggcgatgagattaaggttgatgtttttaagtcagttaagtatgtagatgttacagggactactaaaggcaagggttttcaaggggctatgaaaaggcataattttagtggtggtccatcttctcatggatcaaaattccatagacatcttggtggaacaggacaagctactactcctgcaagaacatttaaagggaccaaaatggctggtagaatgggcggaaatcaacaaactattcaaaatcttgaagttgttttaatcgatgaagaaaaaagagcccttctagtaaaaggggctgtgcctggtgctaagggttcttttgttgttgttaagaaatctaaaaagtag

SEQ ID NO: 10964 - DNA, 630 bp, Borrelia burgdorferi
atggaaagaaaagttttttctaaagatgggaaagagattggaactataaatttggatgatagagtttttaatatagaaattagtcatgggtctatttataatgctataaaaaacgagttgtctaatcttagggttggaacatcttcaactaaaaccagatcagaggttaggggtagttctaaaaagccttggaagcaaaaaggaaccggtagagctagggttggtacaaagcgaaatccagtttggattggcggaggtatagcattagggccaaagcctagggattatagctatagattgcctaaaaaggtaaaaaagcttgcatttaagtctgtattaagtttgcgtgctgctgatgaaaatagttttaaagttattgagaattttaatgttgaatctggaaaaacgaaagatcttgctttaataataaaaaattttgcaagttttaatggtaaggtggttattcttttgggcaatgatgatcagatgataaaaagggctggtaaaaatataagagatttaaagattttatcttttgataaacttagggttgttgatttattttatgctaagaatttaatagctctagaatccgctgttaacaagctcaatgagttttacattaaataa

SEQ ID NO: 10965 - DNA, 312 bp, Borrelia burgdorferi
atgttgaggataagtatgaaggcttatgatataatagtttcacctatgcttactgaaaaaactaatactcaaagggaaagtattaatgtttatgtttttaaagttaataagagagcaaataaaaaagaggttggtgcagcaataaaagaacttttcaatgttactccagtatcgtgtaatttgctcaatattaaaagtaaagccaaggttgtggtgtctagaaaagggtaccctataggtaagggaaaaacttcttcatggaagaaggcatatgtttatctcaaaaaggaagataaaatagatattttttag

SEQ ID NO: 10966 - DNA, 834 bp, Borrelia burgdorferi
atgggtattaagacttataagccaaaaacttcttctttgcgctataagacgactttatcttttgatgatttgagcaaaggtaatgatcctttgaaatctttaacaaaaggtaaaaaatttaaatcgggcagagattcttctggtaggattagtattagaagaagaggtggtgggcataagagaaagtataggttgattgattttaatcgaagagataaatttagcattcctgctcgagttgcttctattgaatatgatcctaatagaagtgctaatatagctttgcttgtttataaagatggagaaaaaaggtatattatttctcctaaaggcattaaggttggagatgttttggaaagtggtcctaatgctccaattaaaattggcaatgccttacctcttgaaaatattcctattggaagaaccgttcacaatattgagcttaatgttggaaagggtggacagcttataagaagtgctggtggatatgctatgatacttgcttctgacgggaattatgtcactgtaaaattatcatctggcgagatgagattgatttttaaaaaatgtattgcaacaattggtgaaattggaaatgaagattatgccaatatttctatagggaaagctggtaaaagtaggtggcttggtagaagacccaaggttagaggtgttgctatgaatcctgttgaccatccacatggtgggggtgaaggaaaaacttctggaggtcgtcatcctgtgtctccttggggacagcctactaaaggttataagactcgcaagaaaaagagatattcagataaatttattattaaaagaagaaataaatag

SEQ ID NO: 10967 - DNA, 279 bp, Borrelia burgdorferi
gtggcaagatctattaaaaaaggaccttttatagaaaagagtctttatcaaaaagttttatcgtcttttggaagtgagaagagggttgttattaaaacctactccagatcttcaacaataattcctgaaatggtaagccttactatatctgtttacaatggcaaaacttttatacctatttatattaccgaggatcttgtgggacataagcttggcgagttttcacctacaaggatttttagagggcatgctaagtcagataaaaagggaaggaagtaa

SEQ ID NO: 10968 - DNA, 363 bp, Borrelia burgdorferi
atgttggtaaatagaagatatacggcaaagggcaaaaatttaccctcttctccaaaaaaagttaggccaatagctgacaatatccggggagagtcttatattaaggctattgcagtgctttgttctatgcctaataaaggagctaagcttttagaaaaagttgttaagtcagcagcatcaaatgctatgtatcacaataaaaatctttccgaggacatgatatttgttaaaacagttatggttgatgatgggcgtcgtcgtaaaaagatttggcctagagctaggggtagagctgataggcttgttaatagaaattgtcatatttttgttgaagttgatgaaaaaaaagatattaaaggataa

SEQ ID NO: 10969 - DNA, 882 bp, Borrelia burgdorferi
atgggccaaaaagtacatccatatagcttaagggtaaaaattaataaggattggaagtcaaaatggtattttgataaaaaattgtattctgcaattcttcatgaagattttttaataaggcgagaaattatgaaatttcttaaagggattaaatttgatatttctgatatagaaataattagaaataatccccaaaaagtaacagtagtaattgttactccaaggcctggttctgtgatagggcttaaaggttctaatcttgaaaagattggtcaattgttaactaaaaaaatttctaaaaagattagcattaagattaaagaggttaaaagacctgagcttgatgctcaaattattgctaatgggattgcaaagcaagtagaaaatagggcgtcttatagaaaagttttaaaatcatctctttctacctctatgttaaaaggtgctcaagggttaaaaattaaaattgctggtagacttggtggggcggaaattgctcgaagctttgaggttaaggaaggtcgggttcctttgcacactcttagagccaatatagattatggattttctgaggctcaaactacttatggcattattggagttaaggtttggttatttaaaggtgaagttttggggagacaaactaattctgatgctggccaggtaataaataaaaagccttttagggaaagaggcgatgctgttaaaaattttgataaaactttaaataatagagaaaaggctaatgaaaagcaaactaggcttttggataaaaaagatgggctgtctaaagatgaagtagatcttttaaacaaaaaaaaatttagtgcgtctttttctaaagaaagagacgattctaatgagcaggatattggaggataa

SEQ ID NO: 10970 - DNA, 417 bp, Borrelia burgdorferi
atgttaagtccaaaaaaggttaaatatagaaagaagcagagaggaagattgtctggagaggcccagaagggcaataaaatttcttttggtgaatatggacttgtttctttggaaacaaattttattactgctcgtcaaattgaggctgctcgtattgcaatgactcgtaaaataaaaagaggcggaagggtttggataagaatatttcctgatattccttatactaaaaaaccagctgaaactagaatgggtaagggcaaagggggtgttgatcattggaatgctcctgttaagcttggcactgttatgtttgaaatgtcaggggttgttgaggaacttgctcaagaggctatgtcgcttgcaagctctaagcttccagtaaaaaccatgtttgttgtaaggcgagatttgaggtaa

SEQ ID NO: 10971 - DNA, 201 bp, Borrelia burgdorferi
atgttgaaaaatttcaaaaattttactcttgaggacatgaaggctaaaaggctagaattaaagaaagaatatttagatttaagatttaaatctgttgttggtcatgttgaaaatcctttaaagaaaagagagattagacgtgatattgcaaggcttaatacaatgatttgtgaatatgaattaggtattagaaaggtttag

SEQ ID NO: 10972 - DNA, 255 bp, Borrelia burgdorferi
atggcaagagaaaataaaaaagaattaattggtaaagttgttagtgataaaatgtctaagactatagtagtagaaattgttcaaagaaagatgcatccaatttatcataagtatttaaaggttagtaaaaaagttaaagcacatgatgaaaaagaagtttcaaaggttggcgataaggtaaaaattattgaagttcgacctattagtaaagataaaagatggtctcttgttgaggttttagaaaaattaaaatag

SEQ ID NO: 10973 - DNA, 375 bp, Borrelia burgdorferi
ttgattgtgattcagatgcaaacttatttaacaattgcggataatactggtggcaaggtggctcaatgtattaaggtgcttggtggcagtaaaaggcgttatgccaaaattggggatataataaccattgtagtaaaacaagcaattcctaattcttctgttaaaaaaggagatgtttataaagccgtaattgttaggacttctaaagaagtaagacgtaaaaacggaacttatgttaggtttgatgataatgcttgtgtgatacttgatgctaatttaagtcctaggggcaaaagggtatttgggcctgttgcaagagaacttagggatgctaattttatgaaagtagtatcattggcttcagaggttatatag

SEQ ID NO: 10974 - DNA, 306 bp, Borrelia burgdorferi
gtgaagacaaagttgaagataggtgatagcgtaaaaattctttctggaaaagataggggtagaataggtaagattgctagtataaatagaaaaaaaaataaagttattgttgaatcttgcaatatggttaaaaaagtcattaaagctaggacaccccaagaaaaaggcagaataatagataaggaggccgctatagatatttcaaatgtgatgatatttgtcaagggaacttcttcaagattgggcattagatttgaaaataatgaaaaaataaggtatcttaaaaaaaatggacagaggatatag

SEQ ID NO: 10975 - DNA, 549 bp, Borrelia burgdorferi
atgaattatgttcctgaattgaagaaatattataaagacagtgttataaaagagcttgttaaggaatttgaatataaatctataatgcaagttcccaagcttgagaagatagtgatttctgtaggtgttggggaggctgttaggaataagaagttattagattctgctgttttagagcttgctcagatcactggtcagaaagctgtaaagacaaaagcaaaaaaagcaatagccgggtttaaaattagacaaggacaagaaataggtgctaaagttacacttaggggcaatgcaatgtatgaatttttatataagcttattcatttagcattgccaagagttaaggattttaggggaatcaatggggatgcttttgatggcaatggaaattactcttttgggataacggaacaaataatattttctgaaatagactatgataaaatagagagaatatctggtttgaatattacaattgtgacaacagcttcaaatgataaagaaagtaaagctttgcttttgaaatttggaatgccgtttagtaattag

SEQ ID NO: 10976 - DNA, 225 bp, Borrelia burgdorferi
ttggaatgccgtttagtaattaggggatttataaggtatatggcaaaaaaatcaatgattattagggctttaagaaagcctaagtataaaacaaggcaaaataatagatgtaaattatgtggtcgtccaagaggatatttaagagatttttgtatgtgtcgaatatgttttagaaagtatgcgtctgaaggattaattcctggcgtttcaaaatcaagttggtaa

SEQ ID NO: 10977 - DNA, 399 bp, Borrelia burgdorferi
atggcgattacttattcaataggagacatgctaactaaattaagaaatgcaagcagagttgggcatggatctgtagatttaaagatgtctaatatgaataaatcaatattaaacattcttaaagaagagggttatattaaggattttaattttttagaaaagaaaggaattgcttttattagggttttgctaaagtatgacaacaaaagaaatcctgttataaataaaatagatgccatttctactcctggtagaaaaatttattcttcatatagaaatatgccaagaataaagaatggatatggaatattaattatatcttcttctcaaggtgttattactggtaaggaagctaaagataaaaaaataggtggtgagttgatttgctcagtttggtag

SEQ ID NO: 10978 - DNA, 543 bp, Borrelia burgdorferi
atgtcacgtattggaagacttccgataaagattccagatgctgttaaggttgatgttaaagacaacttagtgatagttgaaggtattaggggaagattagttcaagatataaaagacagtattaatgttaaagttgagaatggcagcgttattgttgatcgagttttaaatgataaaaaagcaaaagcctaccatggtctttacagaagtttaatttttaacatggtaaaaggagtgactgaaggattttctaagtctcttactataaatggtataggatatagggtagagcaacaaggcaatagcctttttttaagccttggttattcaactcagtttgaatatgttattccagatggtattagcgtaaagcttgatgggaatactaaaatttcagttgaaggaatagacaagtttaaggttggtcaggttgctgctgagattagaagtttaaaaaaaccagagccgtataaaggaaagggtattaagtatgataatgaagttattagaagaaaagttggaaaatctggtgtaaaaaaataa

SEQ ID NO: 10979 - DNA, 360 bp, Borrelia burgdorferi
atgaaaaaaataaaagaagcagaacagagaaagcttagacgtaaaaaaagaataaaggacaaaatagggcgcggagtagctagtaggccacgaattactgtatttaaatctaataggtatttttatgcgcaagttatagatgatagtaagggacatactattgcaagtatttctactattgaaaaaagtcttaatttaggcaaaaatattgatgatgtaaaaaaacttggagaagttcttgctaaaaggcttaaggagaaaaatataaataatcttatttttgacagaaatggttataagtatcatggacttattgcaagttttgcaacttctttgagagagtttggtattaatatttaa

SEQ ID NO: 10980 - DNA, 498 bp, Borrelia burgdorferi
atggtagatgttcatgctcaaagaaagcagatagaaaaattaatatcactcaacagagttactaaggttgttaagggcggaagaagattctcttttgctgctttcatggttgttggagatggagaaggacatgttggttggggctttggtaaagctaatgatgctagtgatgcaataaaaaaaagtttaacaagtgctaggaagaatttaagatttgttcctattcgaaaaggaacattgccacatgaggttattggctgctttaaaaaagctaaggttttaatcaaaccagctactcatggtactggtgttattgcagggggccctgttcgtgctgtaatggaggctttaggagtgcatgatattttgagcaaatctcttggttctaataattctatgaatgtagtaaaggcgacttttaaggcatttgatttagttttgaatgctgaaaaagtagcagaaatgcgaggaaaaactttgaaaactttatggggttaa

SEQ ID NO: 10981 - DNA, 306 bp, Borrelia burgdorferi
atgattaaaaggaaattaagattacaactaaagaaagctaggtttaatgcttcaaggtctagatctaagaataaatgttttattaaaagaatggaaaataatagaaaaattatttctaaaaacaatattaatgtgcaagtttttcttgtaagaagtcttattgggaaattaaataaaaaggtcaaagttttaaaagcattaggtttaaataaaataggcgataaaaaggttcattttttaaatgaatctattaagggtatgcttaacgagactattaatatgattttattaagcgaggtaatgtaa

SEQ ID NO: 10982 - DNA, 438 bp, Borrelia burgdorferi
atgtttaacttgttaaagcctaagggagcgagcaagcgacgtaaaattgttggcagaggtccaggttcaggacttggcaaaacttctgggagaggtcaaaaagggcaaaaagcaagaaatacttcgccaagacttggatttgaaggtgggcagactcctctttatagaagattgccaaggaaaggtttttctaatagtgattataaattggaatatgcaattgttaatcttggagatatagataaaaaatttaaggatggacaagttgtcaattatgatactttgcttgaaaataaacttataaaaaagaaaaataaaaaaattaagattttgtctaatggtaagcttacaaaaaaagtttcttttgaggtttctaaaatttctaaatctgccgaaagccttgtaataaaaattggttgtactattcaattagtttaa

SEQ ID NO: 10983 - DNA, 1305 bp, Borrelia burgdorferi
atgaaagaattgtttttaagtttatttaccgttaaggatttgagaaataagttcttgtttactttatttgttctttttctttttagagttggttcatatttgccgataccaggaatagattctgtagctcttaaaagttatttcaagtcgcaatcagatttttcaattgctaattattttgattttttttcagggggagcttttagtaatttttctatatttatgcttagtatagggccttacatttcggcatctattattgttcagcttcttgtttattcttttccttctttgaaaaaaatgcaagaaggtgacggcggaagacaaaagactaaaaaatatacaaaatatttaacaatagttgcagctgtagttcaaggatacgcaacaagcctttatgctaaaggtattccgggtgctgttaccattcccttttatagatatatatttgttgctattttaacggttactacggggacatttatccttttgtggtttggagagcaaattaatcaaagaggtgtaggtaatggaacatctttgataattttttctggcatagtggttagacttcaagcagctttgtttaacttattccaaagcatgcaggatccttctcaaaatgttaatcctgtttttgttatacttattataagtatatttattttagttgttatattgattatatatgaatataaggctcaaatgcgaattgccattcattatgctagagcaaattctaataatacagttagttcatatttgccaatcaagttgaatccatcgggcgttttgcctgttatttttgcctctgttttaattactctgcctttacaaattttaagtggcttcgcagaaacttcttccatagccaggcaaattttatcttatttaaggcctaatggtttttattatacttttttgaatgtaattttgataattggatttacgtatttttattctaagattcagttaagccctaaagacataagtaataatattcgtaagaatgggggcactattccaggaataaagtctgatgagatggaaaaatatttagatgaaattatgaataaaactttattttcaggatctatttttttgtcaattattgcaattattccatttttagtgcaaaatatttttagatttccacacgatgtttctagaataatgggggggtcttctttgcttattatggtaggggttgctcttgatacattaattcatattgatgcttatttgaaaactcaaggattttctcatggaaataaaaagaattatgcatttttgcaaaaaatttag

SEQ ID NO: 10984 - DNA, 120 bp, Borrelia burgdorferi
ttgattatgaaagttagagtaagtgtaaagccaatttgtgaaaaatgtaaggttataaaaagaaaaggtgtattaagaattatttgtgataatttaaagcataaacaaagacaaaagtaa

SEQ ID NO: 10985 - DNA, 378 bp, Borrelia burgdorferi
atggctagaatatcgggaatagatttaccaaataataaacaattaaaaatagctcttacttctatttatggtataggtagaacaagagctttggaagtttgcaataaatcaagtatttctccaagcaaaattgctaaagatttagataatgatgaagttaatcgacttaggaaggtaattgagagcgattatattgtagaaggaaaacttagaagtgaagttgcaatgtctattaaaagacttatggatatagcgtgttataggggcgttaggcatagaaaaggattgcctttgagaggacagagaactaaaacgaatgcaagaactagaaaaggaaaaagaaagactgtagctaacaagaaaatagctagcaaataa

SEQ ID NO: 10986 - DNA, 405 bp, Borrelia burgdorferi
ttggagggcaagttgagcgcaaaattatcaactaatagtaaaaaaaaaattaaaagaaatatcggagaaggaaacgtttatatacaagctacttttaataataccatagttactgtatctgatataaagggaaatgctttagcttgggcaagtgctggtggtatgggttttaaaggtgctaaaaagtcgaccccatatgctgctcaaataacagcagagtctgctttaaataaagtgagagattttggaattaattatgttcatgtgtatataaaagggccaggcattggcagagaatctgcaataagagctattggttcgattggtatgactgtaaaatcaatttcagatattactcccattcctcataatggatgcagaccgaaaaaaaccagacgagtttag

SEQ ID NO: 10987 - DNA, 1038 bp, Borrelia burgdorferi
atgatgcttgtggaaaaatttttgaaagatttcactatacctgaaaaaattgaatttttgaaaagccaaggtgatgggtcttatggtaaatttacgatatatccttttgaaagaggctttggaattactataggtaatactttaagacgtgtgttactttcttctattgaagggtatgcgattactgctatgagagttcagtctaacaataaagactcttcgtcaaaggttgtttcaagtgaatttgatttgattcctggagtttctgaagatactcttgagattattgctaatattaaaaatattcatttgaaacttggagaaggagagcaaagaaagacaataagctttagtgttagcggtaaagacaccaatgttttaaaagcttctcattttgaaagagatggagttgaggtttttaataaagatttagttatagctactttatcacatgatgttaatttagatcttgaatttcaaattaattatggtaggggctatgtgtcttctgagcaaaattctaagtatttagaagaggttaatgttattgctttagattctatattttctcctatagagaaagtttcgtattctgtagaagatactagggttggtcaaaggtcagattatgacaagcttgtaatggaaatttggactacaggtgtgatttctgccaaagatgcaataaaaaaggctgcatcaatagtaagagagtttttgtttcctcttgttgattttgaagacaatgttaatacatcttttgagaaatcaaaatcagaaagttctaacttgcttgatatgagtattgagaaattgaatttgtcagtcagatctttaaattgtttggccaaagaaaatgttaggactttaggagaacttattagtaaaaacgcagaagagctttctaaagctagaaattttgggaaaaaaagtttggaagagataatcgaaaaacttggttcttatcgattatatttaggaatgtctaaagaagatgctctatctgtattgagtaagaatgttaaaatatctgaataa

SEQ ID NO: 10988 - DNA, 372 bp, Borrelia burgdorferi
atgaaaacaaaattgggttttaatagattaagtaggaagtctagtcacaggagagcgcttttaaaaaatatggtaatttctttttttaagcatgaaaaaatttcttccactaagacaaaattgttcgaagttaaaagatttgctgaaagattgattacaagggcaaaagttgatactgtgcataataggcgagaattatcaaaatttatacatgataagcatattttaaataagctatttaccaaaatttctcctgtttttagacaaagaagtggtgggtatactcggatgattaaattaggaaaaagatatggagatgcggctgaaatggctatcctagaattagttgaaaagcctttaaaagttgaataa

SEQ ID NO: 10989 - DNA, 1533 bp, Borrelia burgdorferi
atgatatatattattttttcttctatttttgctggctttatattaggatttttagtaagagtttttttaggtagattgtctttattagatttagaaaaaaatctgaaaaaagtaagagtagaatcacaattagagatagaaaatgaaagaaggcaaattattgctaatgcaaaatctcaaatgcttaaagaaaaaaaccagcaagatagggatataagagatcggaaaaatgagattgttaatttagaaaaaagattattacaaagagaagaaactttagataagagaatatctgctcttgacaaacagcagtctagagttgattttaaaattaaagaatttgaacaaaaagaaaaagtaataagagaaaaagaggccgatcttgttaaaagattggaaaatatttctggtcttacaagagaagatgcaagaaaaattgtaattgaaaaagttgagcatgagtccaaaagagatgctcaagttattatcaataaaagtgagcaggaagcacagctattagcagataaggttgcaaaagatattttagtatctactatgcagcgtattgttacggaggtgagttctgagtttacagtggcttctgttgagctacctaatgatgagatgaaaggtaggattataggtaaagaagggcgcaatattagggctcttgagactttaataggagcagatatcattattgatgatacgcctgaagctgttgttatatcttgctttgatccaataagaaaagagcttgccaagaggactttagaaaggcttgttacagatggcagaattcatcctgctaggattgaagaagttgtgtataatgttaccaatgagataaatagcattattcaagaagagggtgagaaggtggtttttgaccttaatatacatgggcttgataagagacttattagggggttgggaaggctttactttagaagcagttatggtcaaaatgttttaagccactctaaagaaacggctataataggagaaattttggctaaagagatgaaattagatcctgttgtagtaaaaagagcatgccttttgcatgatattgggaaagggatggaaagtatttctgataatagcgagggacatgctattactggtgctgaacttgctcaaagttgcggagagagcgaaattgttgttaatgctattgctgcgcatcacaatgaggtgaaacccgagagtcttgaggctattgtggttcaaatagcagatgccatttcagcatctcgtcctggagcaagaagggaaagtttaaataactatataaatagacttaaaagacttgaagacattgcgtatagttttgagggtgttcaaaaatgttatgctattcaggcaggtcgtgaagttagaattattgttgacaatgctttaattaatgatgaaaagtcaattttacttgcaagagatattgctaagaagatagaagctgaaatgagatatcctggaaaaattaaagttacaattattcgcgaaaccagagttattgaatatgcaagatag

SEQ ID NO: 10990 - DNA, 789 bp, Borrelia burgdorferi
atgcaagatagcactattaaaaccttgataattggggatataataggcgagagtggattaaaaaaagttttttttaatcttaaaaacattaagaataaatatagaatagatttagtaattgctaatggagaaaattcttcaaatggttttggaataactccagaaatagcaaataatctttttagatcgggggttaatgttattactaccggtaatcatgtgtattctaattgcaaaataaatgattacctaaataagcaaacatatatcttaaggccaaataatttttcagatttgttagatgggcatggttattgttttttaactattagagatgaaaaagttgctgttgttaatgttcaaggggttttaaatatgaattttattgttaaaaatccttttgataatacaaaaaaattggttaatatgctgagtaataaagccaaaaccatttttgtagattttcatgctgaaagtaattatgaaaaagaaagttttggatattttttaaatggttttgtaacaggtgtggttggtactcatacccatgttatgactcaagatgaaagaatattgtcaaaggggacagcctatattagtgatattgggatgacaggtggattaaattctgtaataggatttaatcccgacatttctcttaagggcttacttgaatatacccccttgagagctgaagttgtagaagatgacacaattttacaaggagttattattacttctaatttaaagacaggccgcgctttaaaaattgaaaggattcagaaataa

SEQ ID NO: 10991 - DNA, 1302 bp, Borrelia burgdorferi
ttgcttagttataaaaaggttcttattgttggtagaccaaatgttggtaaatctgctttatttaatcgaattttagatacaaaaagaagtattactgagagtacttacggtgttactagagatttagttgaagaagtttgtaaggttgattcttttaagtttaaattaatcgatactggtgggtttactatcttgaaagatgagattagcaaaattgttgtgcaaaaggttttaagctctttagaaaaagttgatttaattttattggttttagatattaatgaaattttacttgaagattatcagattattgaaagactgagaaaatatagtagtaaggtggttttggttttaaacaaagtagatactaaggataaggaatgtttagctcacgaatttcataatttaggattcaagcgctattttctggttagtgcagcccattgtcgaggcattactaagcttagagattttttaaaagtagaagttggtgaagttggcattgagagtggcgctgatattaaggttgggattataggcaagcctaattcaggcaaatctacccttattaattatttatctggaaatgaaattgcaattgtttctgatcaacctggtactactagagattttattaaaactaagtttactagaaatgggaaagtttttgaggttgttgatacagctgggataaggcgaagggcaagagtaaatgaaattgttgaatattattctgttaatagggccctaaaagtaattgacatggtagatattgtgtttttattgattgatgttcaagaaaaattgacttctcaggataaaaaaattgctcattatgttactaaaaaggggaaaggaattgttattgtgtttagcaaatgggatcttgtggatgagtctaaaggttattttgaagccttaaagagccatgtgaagtttttttttcctattttaaattttgctcctatatttagaatttctgttcataaaaggataggtttagattctctttttaaagaatcttttaagttaaaagatcagcttgagcttaaaaccagtactccagatctaaataaaatgttaaatttatggatcaaagattatcatttaaatatttctcataaaatcaaatatattacacaagttagtactaatcctgttaagtttattctttttgcaaataaaataaagaattttccaaattcttactataattatttagtaaataatttgcgtaaaattggatataaaaatattccaattttagtagaattaaaggaaaaaataagagatttaaagtga

SEQ ID NO: 10992 - DNA, 1587 bp, Borrelia burgdorferi
ttgaaggttatatttatgaaggcagatttaaatttaataaaaacattgcaccctcttgagataaaagtaattgtaaataatgaagaagaggatgatatttctgcttcaattattattgaaaaattggggtttaatgaaggtcaagcaaataaaacaattgaatggttaaattctaaagggattattgaagagatttataggaaattaaatgtattttataaagcaacagaaaggggtcttggtgctttaagagatggttttgttgaagaaaaaataataaatttagtatctcaaaaggcagtgttggcttcaaatttagccttagagcttgatattgatgttaaagaagtaagaaaagcctttggtaatttgttaaaagagggcattctttctcttgatttagataaacagattattataaattgtttagatggcacagagactaattatcaaaaagtacgtgttttgttggaaagagcaaaaaatagcgatcttcttagagaaagtttgacaaccgaagagcttttattaatatcaaattttgctaagaaaaaaggagcagactctgtattttttaaaataatagaaaaacttgatttaaagtttagattatctagttttggattggaagttaaaaattttttaatgaaaagcaaattgactggagatgagcttactaagcttactcccgaaattttaaaaaataaaacgtatgagaacaaaaaatttagagcttacaatattcatattccatcagctaagacttttattgggcgtgccaattcttatttagattatatttctaaaattaaagataaattagtaggtcttggctttcaagagtttgatggtcctttggtagaaacagaattttttaacaacgatgctctttttatgccccaatttcatccttctcgtgatattaaagatgtttattacatttcagatcctagcatgcaagaatctttgccagagccttatttttctaatgtaaaattagcccatgaaacaggatatgcaacaggttcaagaggctggagatatagttttagtgaagatctctctaagagattggttttaagaacccatggtaccgttctttctgcaaaacaattaattaatgccaaaaatccaagcagatattttggagttattagatgttttaggtatgatcaagtagatgcaactcacggagtagatttttatcaaaccgaagggattgttattgaggatggtgttagcattaaaactttgctaggccttcttgaaatttttgccaaagagcttgcgggcgctacagaaattaaatatgttcccgcatattttccctttactgaaccttcgattgagatacatgtaaagcatcctgttcttggttggtttgaacttggaggaagtggaatttttagaccagaagttacaaagcctttaggcattgatctgcctgttattgcttggggaattggaatagatagaatggctttaatgcacttaggtctaaatgatttgagagatctatttacttatgatattggtgatgttattttaagacgaggaaagatagatgccaaagttagaaatttataa

SEQ ID NO: 10993 - DNA, 1701 bp, Borrelia burgdorferi
atgccaaagttagaaatttataaaaatctttttttagataaaataggaaaaaattttacaaatttagagatttcagaattacttgaaccatttaaggcagaatttgatgggtttgatgagagttcgggaaaaatcaaaatagaatttaatgatacaaataggccagatttgtggtcttatttaggacttgctcgtcagataaaaacgtatttttttggagaaatgccctattatgattttttttcaaaaaagggagattttaagaagttttatggtgaaattttagttgatggcaaaatgtctcaaatcagaccgtttatttttggatttttagcaaaaggattgattattaatgataaaatgcttgagacactaattcaatttcaagaaaaactttgtcagaattatggacaaaagagaagaagaattgcaatggggatgtataattctaattttattaaattcccaataagttatattgcctcatctcctaatcacaagtttgttccctttggaatggattatgagctttctcttttagagataaatgaaaagcatcccaaaggattggaatattcacatattattaaaaattttgataagtttccgttattattagatgataataataatgtagtctcttatcctccaataattaattctaacaatattggatctttaaaggttggtgatactgatttatttgttgaggttacaggtattgattttgaagcaactttgttagcgttatctatagcagcctgtgatttttatgatatgggttttgaaattttgcccgtaaaaactgtgtttagagagccttttaatttagattttaaagaattggtatgtccttattattttcaagaagaagtggagtttaatgttgaaaatattaatagactgcttggaagcaatttaacattagagcgtatttgccttagtttaaaaaaaatgggagtaaattcttattccaaagattttaagaattatattgttccacctttttatagaaacgattttcttcatgaggttgatgtaattgaagatgtaatgataggggagggtctttcaagttttaatccggagcttcccaaggcttttgcagtgggaaggcttagtcctttagaagagttttcaaggaatgttagaaatttaatggtgggtatgggatttcaagagatgatttataattatatgggttctaagaaagattttattgacagaatgaatattaatgatcaaaattttttaaaagtatctaatccaatgacagagaattatgaatatattagagcatcaataattcctaatttattaaaatcagaaagtgttagttctaattttccctatccacataaaatttttgaaattggcaaggtggctttaaagaatctggatactaccgaaggaacaagtacttttactaatttagcttttttaatgtctggtaaagaaatttcttttaatgagattaattcaattgttgcaacacttttttattatttaaatattgagattaatttaatagaatcaaaaaccactttttatattaatggcaggggagcggatattgtaattgaaggttttaatataggtggttttggcgaaatttcaccttatgtgttaaataattttggtatttttattccatgttctgtttttgaggttaatataaacaaacttatgagtcgatcttaa

SEQ ID NO: 10994 - DNA, 1908 bp, Borrelia burgdorferi
atgggcaaaataataggtattgacctaggaacaacaaactcatgcgtagctataatggagcatggaaaaccagttgtaatacaaaattcagaagggggaagaactactccatctattgttgcttacacaaataaaggcgaaagacttgtggggcaagttgcaaaaaaccaaatggttacaaaccctgaaaacacaatttattctattaaaagatttatgggaagaagatttgaagaggttgcaagcgaaataaaaatggttccttataaaatagaaaaaggactaaatggcgatgcgcgagtaaacatttcaaatataaaaaagcaaatgtcaccgcctgagatctcagcagcaactcttacaaaaatgaaagaaacagcagaggcttatttaggtgaaaaagttacagaggctgttatcacagttcctgcttactttaatgatgctcaaagacaagccacaaaagatgctggaaaaatagcaggtcttgaggtaaaaagaattgttaacgagccaactgctgctgctcttgcttatggaattgaaaaaaaacacgaagagatcgttgctgtttacgatcttggtgggggaacatttgacatttcaatattggaacttggagatggtgtttttgaagtaaagtcaaccaacggagacacacatcttggtggtgacaattttgacgacgaaataataaaacatttaatttcagaattcaaaaaagaaagcgctattgatttatcaaacgacaaaatggctcttcaaagactcaaagaagcagctgaaaaagctaaaatagaactctcaggcgctcaagaagcttcaataaatcttccatttattacagcagatgcaaatggtccaaaacacttacaatatactctaacaagagcaaaattcgaacaaatggtagaccacttagttcaaaaaacaaaagaaccatgccttaaggctattaaagatgctgggcttaaagcttctgatattaatgaagtaatacttgtaggtggatcaacaagaattcctgctattcaaaaaattgtaaaagatatatttggacaagatcctaacaaaggagtaaatccagatgaagctgtagcaattggagctgctattcagggtggcattctaacaggagaaactaaagacatggtactccttgacgttactccactctcactaggaatagaaacactaggcggggttatgactaaacttattgaacgaaacaccacaattcctacaaaaaaaagtcaagtattctcaacagctgctgacaatcaaacctctgttgatattaaagtccttcaaggtgaacgtgaaatggcagcacaaaacagaatacttggtaattttatacttgatggaataccagcagcaccaagaggagtgcctcaaattgaagttagctttgacattgatgctaatggaatagttcatgtgtctgcaaaagatatgggaacgggcaaagaacaaaaaattagaattgaatcatcatcaggactctctgaatcagaaatagatcgaatggtaaaagatgcagaagctcatgcggaagaagataaaaaattaaaagaaaatattgaagcaaaaaatacagctaattctttaatttatcaaacagaaaaatcattaaaagaatattctgaaaaaatttcaagcgaagacaaagaagctattgaaagtaaaataaaagaattaaaagaaagtcttgaaaaagaagacatttcacttataaaatctagaacagaagaacttcaaaaagcttcttacaaaatagctgagatgatgtataaagattcttcccagcaaaatgcaaacagccaacaagaaaatggcccacaaagcaatacaagcgaagagggtaaagaggctgattatgaggttgttgacgaggataaaaaatag

SEQ ID NO: 10995 - DNA, 948 bp, Borrelia burgdorferi
gtgaataatcttaaagacaagataaatacttatagcaaattaattttagggtcttggcaattcggaggaggatattttaagcaagtcgaaaaagaaactgctaaaaaaatattaaaaaaagcatatgatcacgggatcagaaatattgatactgcaagagcttatggaaatggaatttcggaaaaaataattggcgaaataatagaaaaagatccaacaataagagaaaatattttaattgcaagtaaatgctacccaatggaaatttcagaatatagagagaactttaatgaaagtcttaaaaatttaaaaactgattatatagatatttactatatacactggcctaaagccgattttgacctaagaccaatcgcatcatttcttgaagaaatgagagtaaaaggaagaataaaatatgtaggcgtaagtaattttgaaatatcacacatggaaagcataaaaaaagtttgcaaaattgacgtaaaccaaataggatacaaccccttatttagaaataaagaaaaagatgtaattccttactgtgaagacaacaatattgccaccatatcatattcaacaattgctcaaggacttttatctaaagctaatataaaagacaaaaacaaatttaatgatattagaacagaaaaattgatacttttcaaaaaagaaatttggccttatactttgaaaaccataaataaacttgaagagatagcaaagataaataacttaacaattttagaattaacatattcatggcttaaaaaaacaaaattaagtggatttatagtgggctttagcaaggaaaattatgtagaatcaaacgtaaattcatttaaagcagaaattaatgataaagtatatgaagagattacatcaattttagataatttcaatcaccaaacaaaaaacttcccaaatttatttaacaaaaaaatttaa

SEQ ID NO: 10996 - DNA, 2802 bp, Borrelia burgdorferi
atgaattatcaaagaattaagaattattgtaaatttacaagcgtttttctattttttttgttttcctgtgtttctaatgagttaaagttagatcaaagtttggtaaaaggaaaacttgtcaatgggctaaggtattatatttataaaaatcaaaccccaaagaatgccgttaatatgggaattgtttttaatgtgggctcacttaatgaagaagataatgagaggggaatagcgcattatcttgaacatatggcttttaatggtacaaaagattatccagggaattctatagttgatgttcttaaaaaatttggaatgcaatttggtgctgacattaatgctgctactagttttgatttcacttattatagacttgatttgtcagatggtaataataaagatgaaattgatgaatctataaatattttgagaaactgggcttctcaaatcagtttcatgaaagaagaaatagatctagagcgaaatattattattgaggaaaaaaagcttggtgagacttatcctggaagaatttatgagaaaatggataagtttttgacaagcggaagtctttatgaatttagaagtcctattggacttgaagagcaaattttatcttttcagccagaagattttaaaaaattttatagaaagtggtataggccagaacttgcaagtgttattgtggtaggagatattgatcctatagaaattgaagagaagataaagaagcaatttgtttcttggaaaaatccaaccgataaaattaaagaagtaaaagtaagtttagacgtagagcttaaggataaatttttacttttagaagatttggaagttggagagcctagtttaatgttctttaaaaaggaaattattaactttgtaaagaccaaagatgaccttttaaatgctattaaaaagtctttattagccgctctttttgaaaatagattttctgaattaaagactgctggggtaaagcaatttaaaaatgtttcaaataaagattttttctcatttaaatcagataacaataccattgttgcaaaatcgatttctttaaactttaatccagatcatttgaacgaaggaatacaagactttttttatgagcttgagaggataagaaaatttggatttacccaaggtgagcttgaaaaagttagatctcaattttacaaatctttagaattaaggaaaaagaatataaataaaacaaattcatgggctatttttcaggatttaatagaaattgctattaatggttctaataaatttgatatgaatgaatattgcgatctttcttttcaatatttggaaaagattgatttaaaaacaataaacaatcttgtaggaagagagtttgatgtaaaaaattgtgcaattttttattcttaccatggaagagcacatcctgttttaactcttgaagatattgacaatcttcaaaagatagctttaaaaagagagttaaagccttatgagaattctttaattgaaggtaaattttttaagaagtctttagatgataaagatattattagagaaaatgagtttgaaaatgaaatttcgtcatttgttcttgaaaatggggttgaagtttattttaaatataatgatcaaaaaaaaggtgtaattgattttagtgcaacttcttggggaggtttaattaatgaagatttaaaacttattcctgttttatcttttgctcccggagtagtatctggttcgggttatggtgattattctgcattacagattgaaaaatatttatcagataaagctgtttctttaagagttggggttggagctcaagaatcatatatttctggaagttcagataaaaaagatcttgaaactctttttcagcttatatattttacttttaaggaacccaaaattgatgatgtttctttgcaaaatgctattaataatataaaagcattaataaagagcaatgaaaatagttctgattatcattttcataaagccattagtaaatttttaaacaataatgatcctagatttgaagatacaaaagatagtgatttgcaatattttacaaaagaaaatattttgtctttttataagaaaaggtttacttatgcaaataattttaagtttgtctttgctggagactcagatattcagacaataaaggcttattcaaagaaatatttgggcaatcttaactttaaagaaataaacgagtataaagatttagattactcttacagtaaaaattttaataaaatagttgtaaggaagggaaaaaattcaactagttttgcctatgtaatttatccttttaaatttaattatttagcagagacctggttaaatttaaatgctttagcggatcttttaacggatgggcttataaaaaatattaragaaaaaatgtctagtgtttatgcaattcaagcctcttttgactccaatttaagaaaaaatgtagattccgatggtattttgtctattttttttactaccgagcctaaggagctggacaatgtcttaaattctattaatcgctatatgatcgaaaggcaaaaaatagattttaatgataaagatttttcttatgttaagaagaattatattaaaaatacaaaaataaattcagagaagaatggttattggatttcaaatatattggcgtcattatcctggtatggagtatttaaaaataattttggtgttaagtttatagagacaaacttaaacaaagatttaataaatgaattttttaagaaaattaatcttgatgaaaaagcagaaatattgctaatacctgaatag

SEQ ID NO: 10997 - DNA, 2082 bp, Borrelia burgdorferi
atggactataataaattacgaaacataggtattagcgcacacatcgactcaggaaaaaccactcttacagaacgtattcttttttattgtaataaaattcatgcaattcacgaagtaaaaggcaaagatggggttggtgcaacaatggactcaatggaacttgaaagagaaagaggaatcacaatagcatcagctgcaactcacgttgaatggaaagattttccgataaatattattgatacacccggacacgtagattttacaattgaagttgaaagatctcttagagtgcttgacggggcaatattggttcttgattctgttgcaggagttcaatcccaatcaataactgttgatcgacagcttaaaagatatagcgtgccgcgccttgcatttgtaaacaagtgtgataaaaccggagcaaatccctacaatgtaaaagatcaactaagatcaaaacttgacttaaactccgttttaatgcaaattccaattggattagaagacaaacatattggagttatagaccttgtattaatgaaagcctactattttgaaggaaaagatggaacagaaataatagaaaaagaaataccctcagatctcttagaagaagcaaaaagcaaacgagaaataatgcttgatactcttgctgactttaatgatgaacttatggaattacacatggaaggaaaagaagttcctactgaaataatatacaatgcaactagaacaggaacattggctttaaaattatgccctgtatttatgggatctgcttataaaaacaaaggagtgcaattgctcttagatgctgtaaccagatttttgccatcccctcatgatataaaaaacaccgctcttgacctaaataataatgaaaaagaaatcgatcttaaaattgacaacgagctcccaactgttgctcttgcatttaaacttgaagacggacaatacggacagttgacttatgtgagaatctatcaaggaattttaaaaaaaggacaagaacttatcaactcaagaacttctaaaaaattcaaagttggaaggcttatcagaatgcatgccaataatacagaagacattgaatttggaggaagtggtgacattgttgctttatttggaatagaatgtgcatcaggagatacgttttgtgatccatcgatcaactattcaatgacatcaatgtttattccagatccagtaatttctctttctgtaaaaccaaaggataaaaaatctgctgataatatggccaaagcccttggaagatttacaaaagaagatccaacatttaaaacttatgttgacattgaatcaaatgaaacaataattcaaggaatgggagagctacacttagaagtttacattgaaagaatgaaaagagagttcaaggcagaagttgaaaccggaatgccgcaagtagcctatagagaaacgattacaagaaaagctgaatttaattatactcacaaaaagcaatctggaggagctggtcagtttggacgagttgcagggtttatggaacctcttgacaaagaaggagaaacatacgaatttgtcaatctaataaaaggaggagtaatcccaacagaatatatcccatcatgtgataaagggttccaaaaagcaatggaaaggggaacattaattggctttccaatagttgacataaaaattacaatcaatgatggccaatatcacattgttgactcatctgatattgcattccaattagcagcaattggagcttttagagaggcttatgaaaaagcaaagcctacaatccttgagccaataatgaaagttacccttgaaggacctactgaattccaaggcaatatgtttggacttttaaatcaaagaagaggaataataacaggttccctagaagatggaagtttttcaaaagttgaggctgaggtgcctttaagcgaaatgtttggattttcaacagtccttagatcctctacccaaggaaaagcagaattctcaatggaattcttaaggtatggaaaagttccaagcactatatttgatgaacttcgcaaaaaatttaacgatcaaaacaaatcttaa

SEQ ID NO: 10998 - DNA, 579 bp, Borrelia burgdorferi
ttggataatttaaatagtataaatagtattaaggatttaagtaaattttttatgtataaattgttgtttattattgtttttgttttgtcttgtagctctatttttaaggaatatcagaacatatcaggtgaatactataagcttgctaaattaaatgaagagcttggtaatgatgagacttctgttttgctttatgaaaaatctattaaatttaatattaatgctggtgatgattcaagttacaattttattttagcttgcattaatttgaaaaaatatgttgaggctgagttgaaacttaattctattataaaagaagatccagaaaatattttgttaatcaatcttaagggatatttgctatttaaaaaaaatgatttggacaatgctttgatttattatttgaaaactctagaatttgcgcctgcaaataaagaggctctatttaatattttttacatttatcatttaaagagtgacaaaaaaaatgcaaaaaaatatatctcaaaatataaagagctaaatcatcctataccaagtggtgcggaagaaatagtttcttctattcttaagagttaa

SEQ ID NO: 10999 - DNA, 1221 bp, Borrelia burgdorferi
gtgaatttacttaaaaagaaatcaataggaattattgcttgtcctgggggtagggtttttgctagtaaaataatagaagagcttgacagaatatttataaatattgaaaatgagattatagagagcatatgccaagattctaaagccttaaaggaagaaatttttaagattgaaaaagttttatctccttttttagaaggacttagtttgtctactcttaaaagcaaagagcctttagaaattcctgtaaaatttgttaaatttgccaatggtgaatttaaaacagaaattttaaaaacaatcagaaataaggatatttttattgttcaagatgttgctaatgcttatgaagttgagataaacagtagcgaaaaaataattatgacggttaatgatcacataatgaatttaatgacaacaatagatgcctgtatgcaggccaaagccaattctgttagtgttattatcccgtcttatccttattcaagacaagataaaaagcattcaagagaatgcttaacagcaagtcttattggaagatttttagaagagttgggcattagacatattttaaccctagatattcactcaaaggctattgagaatgtctttaggaaagtttattttgaaaatttaaatgtttcttatgaaatctttaattctcttaaggatttaatcgacattagagattctaatttagttattgtttcacccgatacaggtgctgtaagtagaaataaattttttgcatcaagccttaagagccctcttgctttgctttataaggagagagattattcaagagtttcaaatgatgttgctgattcaaatatttctgtaaccaagcttttaggagatgtcgaaggcaagaatgtttttatgagtgacgacatgttagctactgggggcactctaattaaggcaatgaaattacttaaaagcatgggtgctaagaagattatatgtgggattagtttgccgtttttcaatggagatgctattaaatattttgataaagcttatgaggagggatttttttataaaataattggaacaaatgctgtttgtcataatgatgaattaataaataaaccttggtatcatgaggctaatgttgcgcctctttttgcggaggcaatatttgcaatttataataaagttggtttgcaaaaaattcttgatagaaaggatgatattcaaaaattgattaccaagggttaa

SEQ ID NO: 11000 - DNA, 861 bp, Borrelia burgdorferi
atgaaagatttgaatgaaaacaatgataataataaaggattttttgtagcattaacatcaattgcaacagtttgtatcataatatttcttgggacaattattttctttccaaacaaaaatttggcttcagacattgcagaaaaaaatattgttttagaagaagataaagatccaaacaccttagaaaaggttgaccaaaatgaaaaatctttaaaggtatctgaaactcaaaatgaaataattatagatttaacacaagatttaaataaagaaaaaaaacctacaaacaaaatacctaatactcagaaatcaaaaatcatcgaaaagcctcaacccacaactcaaaaaatatctaatacttctcagaaatcaaaaaccatcgaaaagcctcaacccacaactcaaaaaatatctaatacttctcagaaatcaaaaaccatcgaaaagcctcaacccacaactcaaaaaatatctaatacttctcagaaatcaaaaaccatcgaaaagcctcaacccacaactcaaaaaatatctaatacttctcagaaatcaaaaaccatcgaaaagcctcaacccatagcccaaaaaactttaaatactgataacatttatgatcctaatatagaatattacatacaatttgtatcactctcagacccaatcaatgcagacaactatattcaaaaattactcaaatataatataattgctagaatatattctgcaacagtagataataaagatatttacagagtaagatctggtccttataaaacaaaatcagaagcaaaagcagactttaaaaaaatagcaggaataggtgaatttaaagaaacttatatattacccgttaacaaatag

SEQ ID NO: 11001 - DNA, 2727 bp, Borrelia burgdorferi
atgaaagaactttacctaattgatgcactaaacataatatttagaaattatcacgtaatgaaaaattatccacttttaaacacacaaggagaaaatgtaaacgcatttattggctttttcaaaacattatttttcataataaaagaaaaaaatcctgaacatttgattatcacctttgactcagaggtaccaacttttagaaaacaaaaatatccaagctacaaggcaacaagagatttacctccggacgatttaatacctcaaataggatggataaaagaaggccttttaaaggcaaaaataccaatctttgagatggaaggctacgaagctgacgatcttttagctagttttgccaaaaaggctgcaaagaataactatttaacttacattatttctccagataaagacttgctgcaaacaatgtcagagtacgtaaaaatacttaaaattgaaaacaacagctttattgaaatggataatgagtacgtaacaaaaaaatttggagtaaatagctttcaaataaaagattatttagctattgttggagacaggtctgacaatatacctggaataaaaggcattggcgcaaaaggagcagcaaatttattaagagaatttaaaaccttagacgggatatattcaaatttagaaataataaataaaaaacaccgagaacttttaatcaaagaaaaagaaaatgcttttttaagctatgaacttgtaagtcttgaagaaaatttaaaaattccagaaattgaaaacttcgccttaaaaaattttagcgaagagataatatctttgtttgaaaagcactcagcaattgccctaataaaaacttataaaaaggatatcttaaaacaagaaaaagaaaatgcagaccaaaaaagtctatttaagcaagaacctactaccaacagcttagatgacataaatacaattgacacagaaaatgttaaataccgctcaataacaacaaaaatagagcttgatgatttaatagaaagccttaaaaaggctaaatacatatcaatagacacagaaacgtcttcgcttgatacttacacagcaaaattaattgggatttctatttcatttaaagaatttgaaggttactatattccaatcgaagccaaaggaaaaatttacatagaaaaaaactatataatacaaaaatttaacaatctttttgaatcaaatccaaaaataattggtcaaaattataaatttgactataaaatacttaaaaacaatggatttaaccctataccaccttattttgacacaatgattgctgcataccttatcgacacaaactcaaaagtatcgcttgattttcttgcagaaaaatatttaatgcataaaaacattaaatatgaagatgtgatacaaaaaaatgacaacttcgcaaatatatctttagaaatggcaacaagctattcatccgaagatgctgatattacatttagattatttaatatatttaccaaaaaattaaaagaagacaaactcgacaagttaatgcacgaaatagaaatgccttttaacaaggtgattatagaaatggaagaaaatggaatttaccttgataaagaatatttaaaagaatatggaaaagaacttggaaaagaattagaagcaatcgaaaacgaaataataaaaagcataggaattgattttaatctaaattctccaaaacaaatgcatgaaattttatttgaaaaattaaatctaaaattaccagaaaaaatgaaaaaagattcaactgatataaaagtgcttgaatctctcagagaacagcatgaatcaattgaaaatctaataaaatacagacaaattgcaaaattgaagagtacttacacagataatttgatagaactaataaactataaaacaaacagactgcacacaagctttatacaaacaaaaacagcaactggtagaatcactagcataaaccctaacttgcaaaacataccaataaaagatgaaaaagggcgaaaaataagaaaagcatttaaaccagaaaatggaaatatttttatttcagctgattattctcaaattgagcttgctatacttgctcatttatcacaagatgaagtccttattaaagcatttgaaaataataaagacattcatacagaaactgcttctaagcttttcaaaatagaagaaaaagaaattactcctaacttgagaagaatagcaaaatctattaattttggaataatttatagaatgtcagattttagacttgcaaaagaactgggaattacaaaagaagaggcaaaaggatttataaactcttactttgattcttatccaaaaatcaaagagtttataataaatcaaataaacttcgtaagaaatgctggatatagcgaaaccatcttaaaaagaagaagatatataaaagaaattaatagcaataattatctggaaagatctgccgctgaaagaatagcaataaatagcataattcagggaagtgccgccgatatcatgaaaattgcaatggtcaaagtatttaatgaatttaaaagtaaaaaaatggaatcaaaaatattgctacaggtgcacgatgaaatgctcattgaatctcctattgaagaagaaaatgaagtgaaaaaaatattaaaaattatgatggaaactgcttacacattaaatctgcctttaagagcaaatattgaaacgggtaaatcgtggggagaaatccattaa

SEQ ID NO: 11002 - DNA, 1983 bp, Borrelia burgdorferi
atgagcagcaaagtacagcaagaaattgcagacttgaagaagttgattagaaagtgggataaagaatattatgtcgattctttgcctagtgttgaagattttgtatatgataagcatattttaaggcttcaagagctagaaagtaagtaccctgaatataagaccttagattctcctactcttaaatttggcagcgatcttttaaatgattttaaagaggttgaacattctgcacctatattaagtcttgataaggtttatgatcttgatttgctaaaatcatggatagataagattgattttaataattcttttaacatttctgttgagccaaagattgatggatgttctatcgttctttattataaagatggcgttcttgaaaaagctcttactagaggtaatggaaaatttggtaatgatgttactataaacgttagaaccattagatatatacctttatttcttgatgaaaaggttgatttagtattaaggggtgaggtttatattactaaagaaaattttttgaaaataaataaatttttggaaaagccttatacgaattctagaaatttggcttcgggaatacttagaagggttgatagtagagaagtcgctaattttcctttaaatattttcatttatgattttttgaatgctggattagaatttaaaaccaatgatttagctactgcaagacttaagaaattgggttttaaagtcaatcccttgattaggttttttgatctaaaaaattcaattggagaagttttaaattacatagcagatataacaaaaaaaagagattcttttgaatatgaaatagatggtgttgttcttaaggttagtgattttgctttaagagaaagattggggtatactgcacatcatcccaaatgggcaatggcttacaaatttgaagcgctttcgggttttagtagggtaaatagcattgttgttcaggttggacgtagtggtaaaattactccggttgctaatattgataaagtttttgtttcaggagcttttattactagtgcaacgttacacaatcaagattatataaggtctattgggttgaatgttggtgatgttgttaaagtttcaagaagaggagatgtaattcctgctgttgaaatggtgataaataaattttcaacaggatttttcaaagttcctgataattgcccagcttgtaaaacggctgtagtaaaagagggggcacattttttttgtccaaataataattgtccttcagtagcagttgagagaataaaatatttttgtagtaaaaattgtatggatattgaagggttttccgacaagataatttcttttctttttgaaaaaaaatttattttttcagaaattgatctttatacttttgatttttataagcttcttgaatttaaagggtttaaagatagaaagataaataatttgataaattcaattgaagctagcaaaaaaaaaccatttagtaaattacttcttagtatgggaattaaagatttaggggaaaatacaataaggttgttgtttcttaataatttaaattcattttcaaagctttttaagctttgtcaagacagatattttgcattttcaacattgttgaaaattaaaggcataggagaaaaaattgctttaaatattattgaagcttttaatgattcagtaatgcttaataagtttaaattttttgaaaatttggaatttaaaatggaagaggttgttgcgattgatggtgagaataagttattggccggtaaaaagttttgcattactggaacttttaatggttattccaggtctattattattgataagctaaaaaataaaggagcaatttttaatacttgtgtgactgggagtttagattttcttattgtaggagaaaaagctggatcaaagcttaaaaaagctttgagtttaaatataaaaattatgtcttttgaagacataaaaagttacttagattag

SEQ ID NO: 11003 - DNA, 261 bp, Borrelia burgdorferi
atggtaaaaaaagaagcaattattaaggctgtaaacggtttgcatgttaggcctgcatcaacttttgtaaaaaaagctaaagagtattctagcgagataacaatagaatctgatggaaagtctgttagcggaaaaagtttgttcaggcttcaaactttggaattatcatcaggtaaaaagcttttgatatgtgctgagggtgaggatgaagagattgctgcttcagagcttgcagagcttatcgaatcttttaaggaatga

SEQ ID NO: 11004 - DNA, 1722 bp, Borrelia burgdorferi
atgactttatcgggcaaaagaatatccaaagggataggcattggggaagttctttgtattaggaaaaattttgataaaattataagtagagaaaaaatagacttttctcaggttgatagcgagatatcaaaattcaataaagcgaagtcaaaagcaattgaagcgcttagggatcttgagagaaaagctatgcttcaatttggagatgataaaaaaggtatttttgaaggtcaggtgttgatcgttgaagacgatgaacttgatgagcttgttattgagcttattgtaaaggaaaattatagcgctgcttattctatttatttagcgtttgaaaatttggttaaaagtgtagaagattataaagatccttatttaaaagaaagagcgtctgattataaggacattagaaatagattaatttctatcattttaggccaagtatccgatttttctgagattaataaagatattattcttgttaccgaggaattaaccccatctgataccatgcaatttgacttaaattatgttaaagggtttttaactgctgttggaggagaaacctctcatgctgctattttagcaagaacaatggggcttccagcgcttgttatgactttgtcagatattgatgcgttaaaggatggtgataaaatagtaattgatgcaatgtcttctattgttattaaaaatccttcttctgatgagattaatctttatgaaggtaagattttgcgacaagtagagttagaaaaagagcttttttctttaaaagataaagatgctgaaacaaaagatggcacaaaggtgtttttaaaggcaaatattggaacacctgttgatattacctatgttaataaatatggtgttgagggaataggtctttttagaacagagttcttatatatgagatctttacaacctccaacagaagatgagcagtttgaaacttataagagagttatagaaacaatggaaaagaaaggggttgttacgattcgtactcttgatgttggtggtgataaagaaattccttatcttaattttaagaaagaggaaaatccctttttgggctttcgggcacttaggatgtataaggaatatgaggaattaatccaggcgcagtttaatgctatttttagggccagtcattatggtaagataagggtaatggttcctatgcttaccatatatgaagagatcgaaacgatagaatattttgttaataatgcaaaaatcaacttaaagtctagaggcttgccttttgatgaaaatttggaagtgggttgcatgatagaagtcccttctgcagctttaatttcctctaaacttgccaataaattgaaattttttagcatagggactaacgatttaacccaatatgttttagctgttgatcgtggtaatcaaaagatatcaaatttatatgacaagtataatcctgctgtgttgaaattaatcaaaaaggttcttgatgatggggttagttctggaattgatgtgtctgtttgtggtgagcttggaggagatgatgctggagcactgcttcttgtaggccttgggtttaggtctttaagcatgattcctagtgctacgcttagaattaaatatttgcttaaaaagtatacaataatggaattagaagaattggcaaataaggttttaaatagtgattccaagcaagaaactttaagttattttgataaatttataggagattag

SEQ ID NO: 11005 - DNA, 1953 bp, Borrelia burgdorferi
ttgattctaattttctattttaaacaaattgctttatttattatttttagattatgttatattataaaaaaagtaaagattaaattgaaaaggaaaagttgcatgaaaaaacaatttgatacagaagtaaatgatttgctttatttaatcatccactctctttactcccataaagaaatatttttaagagaattgatatcaaatgcgtctgacgccattgataaactcaagtttttaagcttgacaaacgaaaaattcaaaaacattgctctagaaccaaaaatagaaatatcgtttgatgataaaagcatcctaattaaagataatggaatcggaatggatgaacaagatttaactaatcatcttggcgtaattgcaaaatcaggaactaaagaatttattaacaatttaaaacaagatgaaaaaaaatctgcaagcctaattggccagtttggagttggattttacagcgcattcatagtatcagaaaaagtagaagttacatcaaaaaaagcattagaaagcgacgcatatatttggtctagcgacggcaaaacaggatatgaaatagaaaaagcaaaaaaagaagagtcaggtacagaaataaagttatatcttaataaagaaggccttgaatatgctaataaatggaaaattcaagaaattatcaaaaaatattcaaatcacataaattatcccatttatattaaatacagcgaacctataatgaaggacgggaaacaagagggaatagaagaaaaagaagaaaaattaaatgaaactactgctctttggacaaaaaataaaagcgaaattaaagcagaagaatacaatgaattttataaaaatacaacctttgattatgaaaatccattaatgcatattcatacaaaagccgaaggaaatttggaatatactaatttattttacgtcccaagcaaagctccctatgatttatattacccaaacactaagcctggggtaaagctatttataaatagaatctttattacagattctgaaggcagcttgcttccaaactatctaagatttataaaaggaattatagactgccaagatttgccactcaatgtaagtagagaaattttacagcaaaataaaattttgtctaaaataaaatcatcttctgtaaaaaaaatactaagcgagcttgaaaagctaagtaaaaaaaatcctgaaaaattttcagagttttctaaagaatttgggagatgcattaaagaaggtgtttattctgactttgaaaacagagaaaagcttatatcattaataaggtttaaatcctcaagtgtagatgggtttgtgtcttttaaagagtataaagaaagaatgaatgagagtcaaaaaagcatttactacataacaggcggtaaagaaaatatattaaaagaaaacccaatagtagctgcttataaagaaaaaggatttgaaatcttaatcatggacgatgaactcgatgaagctattttaaatctaattccagaatacgaaggattaaaactaaaggcaataaataaaaacgaaaccagcaatgaattaaaagatgaaaatttcaaaaaaattgaagaagaattcaaagatacccttacaaaagtaaaagaaatcctcaaggatcatataaaagaagtcaatctatcagcaacattgataaaagagccttcagcaataataattgatagcaatgatccaacttaccaaatgcaaaaaatcatgctgtcaatgggacaagaagtaaaagaaataaaaccaatacttgaattaaaccctaataataaaatagtccaaaatttaaaaaatctagagcctgaaaaattagaaaaaataagcattctcctttttgaagaagctatgttaacttcaggaatgcccagcaaaaatccaggaaaatttataaatataataaacgaatttatagaaaaagacttcttataa

SEQ ID NO: 11006 - DNA, 1395 bp, Borrelia burgdorferi
atggatgtaggaatttatggacttggtgttatgggtagtaatttagctctaaatattgctgataacggttttaatgtttctgtttacaatagagataatgaaaaaactgaaatttttgttaaacaaaattctcataaaaagataaatggttttaaagatattgaatcttttgttaaaagcttaaaaactccaaaaaaaatcatcttaatggtgacaagctctgctatagaaaaggttattgagcaaattttaccctttatgaataaatcagacataattattgatggtggaaattctcattataagagcacaatgagattggaaaaagaattgtttgctaaagacatttattttgtaggacttggaatttctggaggggagagaggagcaagatttggtcctgcgctaatgtatggaggaagtaaatcagcctatgaaattcttgagcccatgttaaataaaattgcagctaaaactaaaaataatgatatttgttcgacttatattggggagaacggttctgggcactatgttaaaatgatacataatggagtggaatacgctgatatgcagcttatcagcgaggtttattttttcatgaaaaaagctttcaatttagataatttgaaaatttctgaagtttttgaaaaatggaatgaaggcgatctttcagggtatttactagaaataacttctaagattcttaaatataaagaaaataatgaatatttagttgataagattttagatattgcaaatcaaaaaggcactggtgtttggacagctattgatgctcttgaatctggtgtgcctgtaaatttaattgttgaatctgttttttcaagatttatgtcggggttaaaacacgaaaggattattgctagcgatttacttaagatggatacttcttcttttgagtttgagcttagtgattggattttagatctttattatgctcttttagtttcaaaaatagtagcttatgctcaaggttttatgatgcttaagaccgcgtctgtgaattatggttgggatttgaatttaggtaaaatttctttggtttggagagaaggctgtattattcgtagcagttttttagataaaattaaattggcttatgataaaaatcctcatcttattaatttgctttttgatgattattttttagatttactaaaaaataatcacaaatctttaagaagaataatttcaaaggctagtgaaattgggattcctttgccagcattttatgccagcctttcgtttttagattcttattctactaattatctgccttctaatctaattcaagcacaaagagatttttttggtgctcattcttttgaaagattagactcaaaacgaggtgaattttttcatagcgcttggcaataa

SEQ ID NO: 11007 - DNA, 543 bp, Borrelia burgdorferi
atgagcacagattcagatgtgcaagattctttaagtcagtatcttttatttagtttggacgaactttatgctattgagattaaatatgttgttgaggttttagaatatactaagatatcaaaaatcccaaggactcccaattacatggcaggaataataaataataggggcaaaatcgttccaataattgatattcgaaaacaatttggaatgagcgatcgtgctgttgatgaggatgataaaaagaggaataagggagttaacatttcaaatattattatattgaatttggtttacgagggggatgaatttaatcttggaattttagtagattatgtcaatgaagttcttgaattagatccatttagtattgatgatgctcctaagattggatcagggtttaattcaaaatttatttcaggaattggcaagagtaatgataagtttattattattttaaatgtagaaaatttgtttgacgttagagagctttctaaatttagaaatacaacaatatatgatcctgaatatcagcagcaatag

SEQ ID NO: 11008 - DNA, 375 bp, Borrelia burgdorferi
atgaaaaaaagaattttggttattgatgacaatagggcaataaggcaaagcgttgcttatattttagaacaaaacggttttggagtctcagaagcaaaagatggtttagaaggggttttaaggtttaaagaagcagttgggcaaggagataaagattttgaccttgttattacagatatcaacatgcctaatttagacggcattggggttattaagcagataagagaatttggcagctttgttcctatacttgttcttaccactgaatctgagcaatctaaggttgatgagggtcgtaaagcgggcgctactggttggcttgttaaaccttttaatcctgaagctttaatgaagacaatctcaaagatattttaa

SEQ ID NO: 11009 - DNA, 1077 bp, Borrelia burgdorferi
ttggaggatattgtgcataagtataaagtttctgttattatttgtttttttaattcggctgaaactcttgatgcaatgataaaggatgctgttaatcaaacattaaaagataaagaaattatattaattgatgatggttcttatgatggtagtttagagatagcagaaaaatatgccaataagtatagctttattaagatttttagtcaaaaaaatatgggtctttctgcttctagagacaagggactttctgaggctcaaggggaatatgttatttattgggatggtgatgattctgtagagagcaccatgcttgaagttctatataacagagcaaaagcagataattctgatattgtttgttctcaattttatatttattttcttgcaataaatgtaaaaagaaaatctctacttccttttcctaattatccattaacaggcaaggaggcgtttaaaaatttgctttttactgtttatgcgacttttggaaggaaaaattttgttgttggaacgttatgggataaattgattagacgggaattaattttaaagaataatattcgtcagcaaaatgtagtatttgaagatatagtttttgttatgcaaatttttttaaaagcttctaaagtttcttttgtaaataattatttttatactaatttccaaagaatgggaagcatgagttcttctattagtgttttacataaatctaaattatctcttaatacaatggaaactttattaaaaagagaaggtatttttaacgaatgtcaaaatttgtataaaaaatttttcttgcaattttattattttatttcttttaagcaaatttatattattagttggaatatctctgataagcttgtttatagggcttataaagaaaagcttatttctgttcttgatgagattaaaggattatctgaatttcaagattgttatgaatatgcaaaaagttttggatttaatgaaattcaaattttacctagaattatgctaaaaatttggaattttagctcaagactttatgtaaatttttctatatttatttataagtttttcataaaaaattga

SEQ ID NO: 11010 - DNA, 1602 bp, Borrelia burgdorferi
atgaaaaaaaacttaaagattttagtaataacaggaggcgtgatctctggaattggtaaaggagttacatcggcaagtattgcaaggttgtttagatatgattttagagttactccaattaaatgtgatgggtatttaaatactgatcctggtactattaatcctgttgagcacggagaagtttttgtgcttgatgatggaggagaggttgatatggactttggtcattacgagaggtttttaaatcttaatgccaagtctagttggaacattacaatgggcaaaatatacaaaaagatacttgaaaatgagcgaaagggtaaatatttgggaagaacagttcagcttattccccatgttactgatgagatcaaatctacaatttttcagattgcaagttctgagaatagtgatatgttgataattgaaattggtggaaccgtaggagatatggaaaatattttatttattgagacagtaagacaaataagacaggagattgggagtggtaatatttcttttattcatttaacatatgtgccaagtccagctggaattaatgagcaaaaatctaaacctactcaacaaagtgttaaaaccttaaataaagcaggtattttccccgatttaattattgctagaagttcacaagtattgacagaccaaatcagaaaaaaagtggcaatgttttgcaatgttgagagcacttctattattgacaatgttgatgtttctactatttatgaaattcctatatctttttataagcagggtgtacatgagattttaagctctaagttaaatattaaggttgatccaaaaatagaagagctttcaaagcttgtaggagttataaaatctaatttttttgtgcctaaaaaaattattaatattgctatttgtggtaaatatgctgaacttgatgattcttatgcatcaattagagagtctttggttcatgttgcagcccatttggatttgcttattaaaagcactttaattgattctaatgatttaaatgagagctgtttaaaagagtttgacggcattattgttcctggcggctttggaggcaaaggatatgaaggtaaaattatggctattaaatatgctcgtgagaataatattccctttcttggaatttgtcttggtttgcagcttgctgtaatagaatttgctcgtaatgtttgtggaatacttgatgctgatacggaggaaaatttagcaagagacaagcccttaaaaagtcctgttatccatttacttcctgagcaaaagggaattaaagataagggcgctacaatgaggcttggtggatatcctgtgattcttaaaaagaatacaatagcttttaaactttatggccaagatcggataattgaaagatttagacataggtatgaagtcaataatgattatatagatttatttgcaaaaaatgggcttatagtatctggattttcaagtgattttaaaatggcaaaattaatagaaattcctgaaaataaatttttcgtagcttgccagtttcatccagaacttattacaagaatagaaaatccagccaagctttttctaggattaattaaagcttgtatttga

SEQ ID NO: 11011 - DNA, 3486 bp, Borrelia burgdorferi
ttgttaaaaatcaagttttattttgataaaataattttaggtatgagttttaggtctaggtttattcatcttcatgttcattcagattattctcttttggatggagctgcaaaaatatcagatattatatcaaaagcaaaaaaatgcaatatgtcgcatattgcattaacagatcatggcaatctttttggagctattaaattttacaaagaagctaaaaaagcaggaattaagccaataattggcattgaagcctatatggcaaaaacttctaagtttttaaaaaaacaggatgatcttggaaaaatgtcttaccatttaattttgcttgccaagaatgagttgggttataaaaacctattaaagttaacaagtatttcttatcttgaagggttttattatcgtccaaggatagataaagatgaccttgaaaaatattcagaaggtttgatttgtacttcagcttgcattggggggctcattccaagacttattttggccaatagatttgaagatgccaagaatgaaattctttggtttaaaaaagtttttggcaatgatttttatcttgagcttcaaaggcatggtattaaagatcaagacattgtaaatgaaaggctggttaagtattctagagaacttggagttcctttaacagcagctaatgattctcattatgttaacagagaagatgcaactgctcaagacatcattgtttgtattggtactggtgctaagaaaagcgatgagaatagattaaaaatggaaaccaatgaattttatattaaatctcaagaggaaatgtgtgaactttttaatgatttgcccgaagctttagaaaatactgtaaggattgcagaaaagtgtgatgactttaaaataacttttccaggtcctattttgcctgattatcaaattcctgttgaatttaatactcttggtgaatatttggaacatctcacacttgaggggttgaaatttagatataaaaatttgacaagcaaaataaaagatagagctttttatgaattgagcgtaataattggaatgggctttgaaggctattttttgattgtttgggattttattaaatttgctcatgataacgatattcctgttggagctgggcgtggttctggtgctggttcaattgtggcttatgctcttaggattactgatattgatcctttaaagtataatttgctttttgagagatttttaaatcctgagcgtatttctatgcctgattttgatattgatttttgttttgaaggcagagatgagattataaaatatgttaccaacaaatatggagaagataaggtagctcaaataattacttttggaaccttaaagcctaaggctgtagttaaggatgtggctagggttttagatattccatttgctgaatcaaatgaacttactaagtttattcctgatggtcctaaagtttctttaaaagaggttttagatgacaattctttgaaagagtgttttactagcaagcctgtttataaagaattaatgaatgccgcattggttcttgagggaatgaatagacatgcttcaactcatgctgcaggaattgtgatttctaaaacccctttaaccgactatgtgcctctttataaggattataagcaaggttctgtttctactcaatacacaatggatttgcttgaagaatgtgggcttgttaagatggattttcttggtttgaaaacattgacgttaataaaaaatgcagaaaatcttattagaagtgtaaatccagattttaaaataaaaaatattccagataatgatgttaagacttttaatatgctaggagaaggaagaagtgcgtctgtttttcagtttgaatctgaaggaatgcagcaaattctaaaagacgcaaagcccgatagcattgaagatttaatagctttaaatgctctttataggccaggtcctatgcaatttattcctcaatttattgctgctaaaaaaggtgttaagagaattaaatatcctcatcccgatttaaaggaagttttaagaccaacttatggggttattgtttatcaagaacaagtaatggaagttgcaaaaataattggaggcttttctcttggcaaggccgatattttaagacgtgctatgggtaaaaagaaagaagacgagatgaatgaaatgaaagtcgacttcttaagaggcgctattgagaaaggatatgacaaagaaattgctagtgaaatttttgaacttttaaagcccttttctgggtatggatttaacaaatcgcatgcagcggcgtattctttaatagcatatcaaaccgcttatcttaaggctaattatcctgaatattttatggctgccaatttgaccaatgaaattaataataatgataagctttcttattacatcgaagagtcaaaagctataggcataaacgttctcaagcccgatataaatcgatcatttagggaatttcgtgtaactgattctgggatttcttatgggcttaatgggattaaaaatcttggaggaattgttgttgatttaataattgatgagagagaaaaaaacggcaaatatagttcttttgaagattttataagacgtgtagatgataaagtaattaataagaaatttttagaatctgcaataaaatctggactttttgatagtttggatcaaaatagaaaaactttatttgaaaatcttgatcatttgattgaagttgtttcagaagataaaaataataaaaaacttggtcaaaacagcttatttggtgctcttgaaagtcaagatccaattcagcaaagttttaattatcaaacttttaaagagtattcttattctgagcttttaggatttgaaaaagagcttttaggattttatgtgtcgggtcatcctcttgatccttataaaaaggcaattgacagtttttccagtttaaatgttttaacagatcttgctgccaaaaaagatagcattgttcaattttctggaattttaaattcagtaaaagttattcaaactaaaagaaataatgcaaaaatggctttcggcgttatagaagattttaaaggcgcaatagatattgtagtttttacagaaagctatgaaagatatagaaattttttacttgaaggcaatgttattggggttgtaggtaggcttacgtttaacagagataaattttcaattgtggttgaaaaagttgtaaatattgagagactttccgaatataaaataaataatattcatattaagtttttaaataataaattaaatgacctacaattacttaattctttaaaggaaagtataagtaattttgaggacaattctggattttcaaatgtttatttttatttaagggaaaatggtaaagatttgaaattaaaaatgaattcaattttaaattttgtgccagatgaagataagcttgataagttgagaaagtgtgtgatagttgaagatgtttgggttgattag

SEQ ID NO: 11012 - DNA, 1356 bp, Borrelia burgdorferi
gtgcttttagacgaaattaaaaatttaaattttttaatcatgggtttaggccttaatggaggaggagtagctctttctagatttttattaaagcgtggggcaaaattagtaattactgatcttaaaagcgagacggaattagctttaagtattgatgctttaagagattttgaggatcaaattaggtatgttttaggcaaacacgatgtaaacgattttaaaaatgctgacattgttgtaaaaaatcccggtgtgaaacccaataataaatatttaaagtttgcaaaacgaattgagacagatattagcttatttttaatgtttaacaagaaccctatagttgcagtaacaggcactaaaggaaaatctactcttgtatctcttttgtatcaagctttgaaagaaaaatatccgggggtaaagcttggaggcaatattggtgtatctcctttaagtttttttgatcaacttgatggaaaatctcctttgattttagagctctcttcttggcagttgcaatctttagagaattttaatcctattattagtattattacaaatgtttacaacgatcatcaaaactattatttaaattttgatgattatattattgataagtcaaaaatttttgtaaatcaaacttcaggaattgtgattattcaggatcaggcttattgcaaatatttttcaaaatttaaatcaaaagtcagagttattttattttccgaatttaatccttgtgattttgatcaagatattttttattgcaatgaaggcaaagtatattttaatgacagcttgattggaagtttttctaattcacgagctgtttttataattcctaaagttattactttttttgtttcgtattatttaaacatagaccttaatcgcacgggtcagattttaagtaattttaaaggtattgagcacagattagagtttgttaaatcagttcaaaatgtaatgttttataatgatacagcttcaactattcctgagtctactgttttatctgttaaaagtttgaaaacaaaagataaccgtatcaacttaattgttgggggaaccgataaagagcttgattttttaagttttagcaagattgcagatattgtgagaacttggattttaataagaggtagtgcaactgtaaaaattattaagattttagaaaaaagtagcatacaatattttctatttgattctttaagagatgcagtaaattatgctttcaagatttcaagtccgggtgacattgtgttattttctcctgctagtgcttcttttgagctttttaataatgagtttgatagaggtttgcaatttaaaaatttagttaataatcttggttaa

SEQ ID NO: 11013 - DNA, 1044 bp, Borrelia burgdorferi
atgactattaaaaaaataaaaacaaaagaaatggaagaaaattatcttcaaagcgaactgtgggcattaataaaaacaacaaaaaacagttattggaaagccatagcatttgagagcgatgttcttggcaaaattgttgtaatgcaaagaagactatttaaaaatttttacttagcatatattccgcatccagaattctcaaacaaaactcttgaaaacattaatattgataaaatcagtaaaagtattaaagaatttagcataaaaataaaaccctacttacataaaaatacaatctttttaagattcgatttaatgtattactaccaaagaacactgaatgacaaatactctccattaaaaactaaaatcaaatatctaaaaaaatcctttgatgacatacaacccgcaaacacaacaatattaaacttaaataattctcttgaagagattttgcttaacatgaaaaaaaaaacaagatataacataaagctcagcacaaaaaaaaatctaaatataataatagatgataaatttaaacatttaagtgaattttacaagctatacaaagaaactagcaaaagagataaatttactattcactcagaagaatatatacaaaacctaattcaaatattcaaacaagacaaaaatgctcaaataaaattgataattgcattttacaataacataattatttctggcataatagtgggaatttacaaagaaaaagcagtctatctttatggggcttcaagcaaggaatatagaaatttaatgcccaattacgctgtacaatttaaagcaatagaaatgttaaaaaaattagaaataaaagaatatgatttattaggaattcccccaattgcaaataaaaaccaccccttatatggtctttttagttttaaaacaggatttggaggcaatattattcatagaattggttgttatgattttacttacaaaaattttatttataagatttatgcaaatcttgaaaaacttagatacttctattacaaagtaataaggaaaaaaatttaa

SEQ ID NO: 11014 - DNA, 2205 bp, Borrelia burgdorferi
atgaaaaaaatgaatctagttacagctgctctaccctatgttaataacatacctcatcttgggaatttagttcaagtgctatcagctgatgcttttgcaagatattcgaaaatgtcaggaattgaaactctttacgtctgcggaacagatgaatatggaacagctacagaaaccaaagccttaattgaaaatactacccctttagaactttgcaataaatattatgaaatacataaatcaatttacaaatggttcaatattgaatttgacatctttggtcgcacaaccaacaagaaccatcaagacattgtacaaaattttttcctacaattagaaaaaaacggctatataaaagagagagaaactgaacagttttattgcaataaagattcaatgttcttggctgatagatatgtaataggagaatgcccagaatgccaaagcatggctaaaggagatcagtgcgacaactgttctaaacttctaaatccaacagacctaataaatccaaaatgcataatttgtaaaaacaagcctattttaaaaaaaaccaatcatctttatttagatcttcccaaaataaaaacaaaacttgaaaaatggataaaaaatccagatactagcaagaattggaataccaatgcccttaaaatgacaaaggcttttttaagagatggccttaaagaaagggcaattacaagagacctgaaatggggaattcctgtgcctaaaaaaggttttgaaaataaagtattttatgtgtggtttgatgctccaataggatacatttcaattaccaaaaacattatcaaaaattgggaatcttggtggaaaaacaatgatcaagtaaatcttgtacaatttattgggaaagacaatatattgtttcatacaattatattcccttgcatagaaattggaagtgaagaaaattggacaatattaaatcaactctcatcaagcgaatacttaaattacgaaaatcttaaattttcaaaatcagaaggaacaggaatttttggaaacgatgctattactacaggaatcccctctgatatttggcgattttatatttattataacaggcctgaaaaatctgattttcaatttatgtggcaagatctcatggaaagagtaaatacagaacttattgataatttttcaaaccttgtaaacagagtattaacatttcaaagaaaattctttggagatgtaatagaaacaatagaaattcaaaataagttttggaaacaaataacaccaaaatataataaaatactaaatctttttaaaaagacagaactaaaatctgctctcaaagaaatacttaaaatttcttcccttggaaataaaatatttcaagataacgaaccctggaaaagaaaaaacaactctccacaagaaacaaaagaactaatctcaaacttaatatacctaatcagagacttatctattttaatgatgccattcattcccgaaacaagcaaaaagatacaacaattctttggcaacagttatcaattttcaaccaaaattcttggaactaaatcgggaattaaaaaaattgaattcacagaaatattattcaataaactagagcaaaaaaaaattaataatttaaagctaaaatattcaggagataaaaacatgaaagaaaacgaacaagcagaaaacttgcctatagcaaaagagcaaccggaaaacttgtttagagaaaaagtgctcttaagagttgtaaaaataaataaaatagaaagaaatcccgaggctaaaaacttatttatattaaaactagatgacggaactaacaaggataaacaaatagtaagcggccttgaaggatattacacagaagaagaacttttaggaaaacatataataatagtagacaatttaaagcctgcaaagtttaggggaataaaatctgaaggaatgctaatagctgctgaggacaaaaataaaaattttaaagttataattgtagaagattcaattcaaaatcctattgctggagagagaataatacttgaaaacgatcagaataaagatcttgcctgcccacctaaaattgacataaataagtttttaaaagccaatatagtagcagaaaacggagagcttaaaataaacggaataaatttaatattagaaaattctaagaacaaaattttatctaaagatattccaaacggaacagtttgctaa

SEQ ID NO: 11015 - DNA, 798 bp, Borrelia burgdorferi
atgaataattgtttaataaagttttttatttttttattagttttttcaaacagttatgttgctttttctaaaaatgtcaatgttttaatagtaactgctatggactctgagtttgatcagataaataagcttatgtctaataaggaagaaatagttcttaaggagtatggtcttaataaaaagattttaaaggggaagttgtctaatcgcaatgttatggttattatttgtggggttggtaaggttaatgctggtgtgtggactagctacattttgtcaaaatacaacataagtcatgtcattaattctggcgttgctggtggcgttgttagtgctaaatacaaagatattaaagtgggagatgtggtggtgtcttcagaggttgcatatcatgatgttgatttgactaaatttggatacaaggtaggacagcttacaggaggattgcctcaaaaatttaatgccaataaaaatttaattaagaatgccatagaggccattaaatcaaaggttggaggttctaatgcatattcaggattaatagtttcaggagatcagtttattgatccaacttatattaacaaaattataggaaactttaaagatgtaatagctgttgagatggaaggtgcagcaatagggcatgtttctcatatgtttaatataccttttatagttattaggtcaatatctgacattgtaaataaagaagggaatgaggttgaatatagtaaattttctaaaatagctgctttcaattcagccaaagttgtacaagaaattttaagaaaactttaa

SEQ ID NO: 11016 - DNA, 1059 bp, Borrelia burgdorferi
gtgttgtattctttttataaggtgttttgtttaaaagattatgtttttaagaaggcaagaatatttgtaaaagagaataagcttaaggccaatatagtttttcccgaaagtagtgattctagagttttaaaggcagctattgttattttgcaaaaaaatcttgcagattcgattattttgataggcaaaaaagatactgttattaattctttaaaagaattttctaattgcaatgatattttaggaagaatagaagttgttgatcctaattctttcccagatattgaaatgtatttggatgaatattggagtttacaaaagttaaagggagttacgaagcaaagtttaaagactcaagttttagatgaaattacttttgctatgcttatggtaagatttggttatgctaaatcttgtgtttgtggggctgtctcaacttctgctaaagttttgtctaatgctttaagaataatccctaagttggaaggtgttaagattatatcatcttttatgattatggatactttatgcactgckcgtaatgttgatttttgttttggacataatggaatcttattttttgcagattgttctgtagtggtcaatcccaattctttagagcttgcagaaattgcattgcaaagtgctaaatcttttaaagatattttaaatgcaaagcccaaggttgctcttttgagtttttcaacaaaagggtcttctagtgctaaagaaactgaaaaagtaaagaatgctttaaatattgttaggaataaagagagtgatttacttattgatggtgagctgcagcttgattcagccataataaaagatgttgcagagaaaaaatgtagagaatctttagtagcaggttctgctaatgttttaatatttcccaatttagatgcggggaatattggttataaattagtagagagatttgcttttgccaaggcctacggtccctttttacaaggtttttccaagcccattagcgatctttcaaggggctgttctgttgatgaaattgtatttgcaagtgctttaatgataagcatttaa

SEQ ID NO: 11017 - DNA, 846 bp, Borrelia burgdorferi
atgatactatctcttttatctatgaatatcaactataacagtataactagcataaaacaaacattaaaagaaagaaaaatcgctccaagaaaattatggggacaaaactatttaatcaacgaaagcataaggcaaaaaataatagaaagcttagatataaaagaaaatgaaaaaatctgggaaattggcccaggccttggcgcaatgactgagattttattaaaaaaaactaatcttttaaccgcatttgaaattgacttaaaatattcagaaatattaaatgaaaaatttggaaaattaaaaaactttaaattgataaaaggggattttttaaaaaaatacaaaaacgaaaatcaaaacattgataaaatattttcaaatttgccatacaatattgcatcaaaagtaatatctaaattaattgaagaaaactttttaaaagaaatggtattcacagtgcaaaaagaattggccgacagaataactgcaaaaataaacagcaaaaactattcttcatttacggtcttagtacaatcacacttcaaggtaattaaaatattagacataggagaaaacaatttttatcctgcacctaaggttaagtccacaacactaaaattaattcctaaaaaaaacaacataaaaaacttcaaagaattcaataaattggttagaactgtattttcaaacagaagaaagaaattaaaaaacactattattaatttcattaccaataaagctactctgagagaaaattttttaaaagaatatttagacaaaagacctgaaaacatttctgttgaagaatttatacaaatttccaacactttaaatgcttatcattaa

SEQ ID NO: 11018 - DNA, 1776 bp, Borrelia burgdorferi
gtgttaaagaggaaaaaaatgaataaaagtgttaaaaaaaagattaaagacgaaattaatgttatagttactaatctagcattatcaaataacataaagctagataatatcaatataaatattcaaaaacctccaaaaagtgatctgggagatatttccatattaatgtttgaaattggtaaaaccttaaaactccctattgaaatcatctccgaagaaataataaaaaatcttaaaactaaatatgaaattaaagctgtggggccttacttaaacatcaaaatttctagaaaagaatatataaataatacaatacaaatggtaaatactcaaaaagatacctatggaacaagtaaatatctagacaataaaaaaataatattagaattttcatcaccaaatacaaacaaaccactgcatgtaggacatcttagaaatgacgtaataggagaaagtctgtcaagaatattaaaggctgtgggtgcaaaaattacaaaaataaacttaataaatgaccgaggggttcatatctgcaaatcaatgcttgcatacaaaaaatttggaaatggcattacccctgaaaaagcttttaaaaaaggagatcatttaattggcgatttttatgttaaatacaacaaatactcacaagaaaatgaaaatgctgaaaaagaaattcaagatctacttttactctgggagcaaaaagatgtaagcacaattgaactttggaaaaagttaaataaatgggcaattgaaggaataaaagaaacatacgaaattacaaacacctcatttgataaaatttaccttgaaagtgaaatttttaaaattggaaaaaatgtcgtattagaagggcttgaaaaaggattttgttacaaacgagaagatggcgcaatatgcattgacttaccttcagactcagatgaaaaagcagacaccaaggtaaaacaaaaagtactcataagatcaaacggaacatctatctatcttacccaagatttaggaaatatagcagttagaacaaaagaatttaattttgaagaaatgatttatgtggttggaagcgaacaaattcagcacttcaaaagcttgttttttgtagcagaaaaattaggcctttctaaaaacaagaaacttattcatttgtcacacggaatggttaatcttgttgatggaaaaatgaaatcaagagaaggcaatgtaattgatgcggataacctaatctcaaacttaatagaattaataatacctgaaatgacacaaaaaattgaaaataaagagagcgctaaaaaaaatgctttaaatattgcattgggagcaattcactattatctgctaaaatcagctatacataaagatattgtatttaataaaaaagaaagcctgtcttttacgggaaattctggaccatatatccaatatgttggagcaagaattaatagcattcttgaaaaatataaagcactttctattcctgtaatggaaaaaattgactttgaacttttaaaacatgaaaaagagtgggaaattattaaaattatatcggaattagaagaaaatataatcaatgcggcaaaagatttaaacccttcaatacttaccagctattcatactcgcttgcaaagcattttagcacgtactatcaagaagttaaagtaatagatacaaacaatatcaatttaacagccgcaagaatcgaatttttaaaagccatattacaaacaataaaaaattgcatgtacctgctcaatattccctatatgttaaaaatgtag

SEQ ID NO: 11019 - DNA, 909 bp, Borrelia burgdorferi
atgcctaaaagcctaaataattttcttaaaaaaatcaatattaagcctcaaacaaaaaatctagctaactatacaacatataaaattggaaacatttcgaaattatttctcacccctaaaaatattaaagaggctgaaaatatttttaaagcagcaatagaagaaaaaattaaactatttattcttgggggaggatcaaatattttagtcaatgacgagagagagattgattttccaataatatacaccggatatctaaacaaaatagaaattcacgaaaataaaattgtcggcgaatgtggtgcagattttgaaagtttatgtaaaattgcacttgataacagcttaagtggcctagaatttatctatggactacccggaacactagggggcgctgtgtggatgaatgctagatgtttcgggaatgaaatctctgagatactaaaaaaaattacatttatagatgataaaggaaaaactatttgcaaagaatttaaaaaagaagactttaagtataaaatatcgccttttcaaaataaaaactttttcatattaaaaattgaattaaatttaaaaaaagacaataagaaaattattgaagaaaaaatgaataaaaataaacaagcaagaataaatagaggtcattatttatttccaagtggtggaagcacttttaaaaacaataaagcatttctcaagcctagtggacaaataattgaagagtgcaagctcaaaggattaagcattggaggcgccacagtatctaaatatcatggaaactttattatcaatattaacaatgccacttctaaagacataaaaagcttaattgaaaaagtaaaagctgaggtctacttgaaaactggacttttactagaagaagaagttctttacataggattcaaataa

SEQ ID NO: 11020 - DNA, 1443 bp, Borrelia burgdorferi
atgattttaaagttatataatactagaacaaaggatttttcagaattaacaaattttgaaaatgttaaagtgtatgcttgcgggcctactgtttataattatgctcacatcgggaattttagaacttatatttttggagatttgttaattaaaactttaaggtttttggggtataaagttaattatgcgatgaatattacagatattggacatttaacaggtgatcttgatgatggagaagataaggttgctaagaccgcaagagagaagggccttacagtttatgagattagtgaatttttcacagaggctttttttaacgattgtagaaaattaaacattgtatatcccgacaaagttcttgttgcaagtaaacatattcccataatgatagaggttgttaaaattcttgaagaaaaaaaaattacttatttttctaatggtaatgtgtattttgatacttcttgttttaaaagctatggtgagatggccggcattgatcttattgataaagatatgactttacccagagttgatgttgataaatttaaaaggaataaaaccgattttgttttgtggtttactaattctaagtttaaagatcaggagatgaaatgggattctccttggggatttggttatccaagttggcatttggagtgcgctgcgatgaatttggagtatttcaaagatgctcttgatattcatttgggaggagttgatcatattggagttcaccacataaatgaaatagcaatagcagagtgttttttgaataaaaaatggtgtgatgtctttgttcatggagaatttttgattatggattataataagatgtcaaagtcacgtggaaattttattacagttaaagatttagaagatcaaaatttttcccctcttgattttagatatttatgtttgacatcgcactacaggaaccaattaaaattttcattagataatcttcaagcaagcaagattgctagagaaaatttgataaacaagctaagttatttttatgaatctttagatccagttgatttaaatacacttaataaggatttaaaaaattttggttttagtgtagaaaaagaatattatgactcttttgtagaaaaaatttcttttgatttaaatgttgctcaaggattggctttgctttgggagataattaaatctgacaatctaagctttgtttcaaagcttagattagcttttatttttgatgagattatgtcacttaatctgagagaagaaattttaaaaaatttacaaaaccatgacgtagttattgatgagaatatgaaagctttgattgaagagagaagaatagctaaatgtgaaaaaaattttaagcgtgctgatgaaatcagagatttttttgccaaaaaaggttttgttttggttgatactaaggaaggaactaaggttaaaagaggctaa

SEQ ID NO: 11021 - DNA, 1254 bp, Borrelia burgdorferi
atgagagatgatcaaatatttaatttaattgaaaaggaaaaattaagagaaagagagcatattgaacttattgcttctgaaaattttacatctttagagataaggcaggctgttggtagtattttaactaataagtatgccgaaggatatcctttgaatcgatactacggtggttgttcttttattgatgagattgaaactctggcaatttcgagagcaaaagagctttttggcgcaaagtatgccaatgttcaacctcatagcggatctcaggccaatatggctgccataatggctcttattagcccgggtgacaggattcttggtatgcaattatctcatggagggcatttaactcacggcagcagggtaaatttttctggtatattttttaacacttatttttatggtgtttctagagattctgagctaattgattatgatgaagttcttaaaatagctaaagattgcaggccaaatttaataatagctggagcttcttcttattcaagagaaattgattttaaaaaatttagagaaatagcagatgatgtttctgcttatcttttgtgtgatattgctcatattgcaggccttattgttgccggttttcataattcctcaattgatgtggcgcatcttactacaagtactacgcataaaactttaagagggccaagaggtggaataatactttctggaaaggattttgacaaattagtaaactttaatggaaaagagaagcctttgtttaatgctgtaaattctacagtttttcctggaactcaagggggtcctttagttcatgttattgcgggtaaggctattgcattcaaagaagctcttcaagaaagttttaaagaatacattgctaacgtaataaaaaatactaaagttatggctgaatatttcaaatcggaaggatttcgtattgttagtgggggcacagacaatcatttgtttttggttgatcttagtagttcggatctcaccggtgctgatgctgagaaattacttgagagcgtaaatattactttaaataaaaatgctattccttttgataaaaaaagcccttctttggcttctggtattagaattgggggcgctgctattacttctagaggcctaaatgaaagcgattctttaaatgttgctaaatttattgttagagctttaaaggcaaagtctgatattgaattaaaacaaataaaaaaggaagttgtaagatttattagagattttgacatgccttga

SEQ ID NO: 11022 - DNA, 1980 bp, Borrelia burgdorferi
ttgtctaatgatgattttttaaaaaattctctcaatcaatttcaatatgaagcagttactactattgaaggcgctcttttaattattgctggtgctggtagtggaaaaacaagggttgttactcacagaatagcgtatttgcttttaaaaggcattgctcagagggaaattttagccttgacttttaccaacaaggctgctaatgaaatgaaagacagaattaaaaaaattttaaaaagtcctcttagtaatcttatggtttcaactttccatgcttttgggctttactttttaaaagaaaattataaattgttaggatatagaaaaaactttagtatttatgatgacaatgatagaatctctcttcttaaagagattttacttgatgagggtctttttaataaaaaagtttctttaaattcgcttagcaatgttatttcacttttaaaaaacggtattctcactcttaatgatttaaaggaagaagatataaatatttacaggctttatgaagagaggttaaggctttataattcttttgattttgatgatttgattttaaagccaaaagaattgttaagtaataattctgatattagaaataaatattctaaaagatataaatatgttttgattgacgagtttcaagatacttctttgattcaatataattttattcgccttttgataaatcatagtaatttgtgttgtgttggggatgatgatcagtcgatatattcttggcgcggggctaattataacaacatgttgcaatttgaaaaagattacaacgttaaagaaataaagcttgaacaaaattatcgttctgcaaaaaatattttagatgttgccaattctgtgattttaaataataaaaatagaaaagaaaagaccttgtggtcctcaaagatgtgtagcaaagttatagatgtttttatatttgaggatgaaattcaagaatctgagtttgttgcaaatagaatcatgcagctttcaaggctagaggattttaagtctaaaaagataggggttcttatgagaaccaatgctctttttaaaaacgttgaaatgatttttagaagacaaggcataaaatataaagtttcagggggaacatcttttttccagagaaaagaaataaaagatattatttcttatttgaatgtaataataaatcctaaaagtgattatgatcttcttagaatcattaatgttccaagaagggggattggcaaggaatatttgaaaaaaattagagatatagcagacaagaagggttgttgcatttatgatgctctttgtgacattactttttcttttacaaatatttctagttatgacaaggctttaaataagcaggtcattgaaagcatagaagattttgtatcttttattgaagagtatcaatataagtttagtataacaaaaaacacgtattccaatataatcaaagaaatgatagaaagtattgaatattggggatttttagttagtgaaaatcccaattcaatcaaagtggctgaatataagtatcaaaatatagaagggtttttaagcataattaaaaattgggaatccaaacaatttggtgagttgagagatttaagtagctttttaaattacatagttcttcaatctaacgaagtaagtgaggaagctgaaaatattaatattaatttaatgacagtacattctgctaaaggtttagaatttgattatgtattttttattgctgttgaagacaatattattcctcatcatagaatcattgaagatagtgaggttgacttagaagaagagaggcgagttttttatgttgcgttaactcgcgcaaaagattctcttgttattactatggctaataagcgtaaaaaagataggcaaatttttgatcagttgccttcaagatttatttcagaaattcctaaagaatttttaaattttaattattatgcagattttgttgaaaacaaagcttaa

SEQ ID NO: 11023 - DNA, 1293 bp, Borrelia burgdorferi
atggcaagagtaaaaggtcaaaaagtaaaagagtgttctttttgtggacttagtgtcgctgagcttggtggtaatgttgttatatctaatggggtagcgatttgtccggaatgttctaaaatatgtcacaatctttttaaagaaaagttgtgtaagccgctagattctaagtccaacggtttgccaactcccaaacaacttaaagatcatttagacatgtatgttgttgggcaagaagatgctaaaaaagtcttatctgtggctgtttataatcattataaaagaatattgaaaaataataaatatgacaatggtattgagattgaaaaatctaatatacttttggttggtcctacaggcagtggtaaaactttgcttgcaaaaacgttggctgcagagatgaatgtgccatttgcaatagcagatgctacaactttgacagaagcaggatatgttggcgaggatgtagaaaatattttgcttaaattgatacatgctgctcatggggatgttagcttagctgaaaaagggattatctatatagacgagatagataaaattgctaaaaaaaatgaaaacgtctcaataacaagagatgtttctggggaaggggttcaacaggctttgttaaagataattgaaggcacggttgccaatgttcctccaagaggcggtagaaagcatccttatgaggatactattgaaattaatactcaaaatatactctttatatgtggcggtgcttttgttgggcttgaaaacattgttaagaatcgaataaataaaagttctattgggttttcagcaattgaaaaaaagaatataagagaagatacttcattaaagtatttagaaatggaagatttgattaaatttggcttaataccagaatttgttggcagacttcctgtgcattcgtatcttgaaaagttgaataaagaagatttgttgagaatattggttgatcctcaaaattctattgttaagcagtattatcatatgtttaaaatggacaatgttgaattggtatttgaaaaagatgctttagaatcaattgtagatgaagccattttaaaaaatactggagcaagaggtcttagatctattttagagggtcttcttaaagatgttatgttcgaggttccttctattagtaaggctaagaaggttgttgttacaaaagaatctgttttaaatgcagatgttaacccattaattttagtgggaaatgcaattaaaaaaccttgggcaaaagagttatatgaaatcaatcttaaatatgataaaaaatag

SEQ ID NO: 11024 - DNA, 2442 bp, Borrelia burgdorferi
atgcaattaaaaaaccttgggcaaaagagttatatgaaatcaatcttaaatatgataaaaaatagaaaagaagatcttccaattgttattttaaaagaaaatgttctttttcccaatattacattgtgggtaacctttgataatgaatatgtaattaattccatagcgcaatccatgttagaggaaagattgattttatttgcttattcaaatgagcctaattgtgatgaatctgataggggagtagttaaaaacctatgctctgtgggtacttattctaaacttattcaggttataaagattagtaaagacgtaataaaagttttagttgagtgtcaaagtagggttcttatagacagtgtttctaaaaaaaatgattatttgagagctaaagttacttttgtgcctgattctagtggattaaacagagagctttttacctattctaaatttttaaaagaaacctatgaagcttatagaaattccttatctttaaaatcttatgatgcggataatgaaccaattaattattttgagaatccaagtaagcttgtcgatattatagcttctaattcaaatttggaaaatagcataaaattagaacttttacaagagctaaatgttaaaaccagaatagaaaagttgattgttaatttaagcattgaaattgatcttttagatcttaaaaaagatattaattctaaagttagagctaagttggataaggggcaaagggattattttctttctgaacaagttaaagagatacaaaaaagattaggtaaagatgaaaacgattatattgatagattaaactctaaagatattccagaagatgttaaatctaagattgaaaaagaaatttctagattgtctaaaatgcagatgaattcacctgatgctaatattattagaagttatatagaattaatattagatcttccatggaatgaaaatactgttatgaaaaatcatttaagcgagattgaatttatcttaagaaattctcattatggtatggatgaagcaaaagaaaagataataaattttttggctgtttatcagattaattctaaggtcaaagctcctattttatgtcttgtggggcctcctggtattggcaaaacatctcttgtggagtctattgcaagatcactgtctagagaatttgttaaaatatctcttggtggcttaagagatgaggcagaaattagggggcatagaagaacttatgttggttctcttccgggtgtttttattagcgcaatgaaaagatcaggtaaatccaatcccgttattcttcttgatgaaatagataaaattaatagtagttataagggaaatcccgaatctgcccttttggaagttttagatccggagcaaaattataagtttatagatcattatttagaaattccttatgatctttccaatgttttatttgttacaacagccaattctcttaatggtatgtcaaagccgcttttagatagaatggaaataattaaggttgagggttattcttatattgaaaagttagagattgctaagatttttctgattccaagcataattaaagagagttttttggacaaagtttatataagaatagaagatgatgttatttttaatttgattagaaactatactatggaatctggtgtaagggggctaaagagagttttgactaatttgattaggagacttgtaagggagctgctttatgagtattctaaagatcaaatcatcaaaggcaacttttattcaccaagttctttgatacatgggaataattcgctttttactcatgatcctgatattccaggtatttataaaataatcaatattaataattattataattatgttgatactgaggataacttggatttaattaagattgattcttcggggtttgtttatgggcttgcttggacaaattatggtggtacagttcttcctgttgaggcaactaagtttgagaaaaagggagacattattctaacaggtagtcttggagctattatgaaagagagtgcacagcttgcatattctatagttaagacctattcttctaagcttaattttgatgtgaaggaaagtcctgaaattcatttgcactttccagaaggagcaacaccaaaagatgggccttctgcaggtattaccattgcaacggcaattgcttcgatattgtctgacaagaaagttcctttggatcttgcaatgactggtgaggtgactttaaagggctttgttcttcctgtgggcggcattaaagaaaaagttttagcagcctatagaaacggtataagtaaagttattttgcccaaagataataaaaaagattattctaagcttccagaagaagttaaggacaatatagatgttaagtttgtctccagcttggaagaagtttttgattatttgaatattatttaa

SEQ ID NO: 11025 - DNA, 630 bp, Borrelia burgdorferi
ttgatgaatagaaaacaaatagctaaaggcaagctggtaaggagatttggtatcaacatttttgagcagccaaaatatgacaaaatcctcaaaaaaaagccgcatcctcccggaatgcacggaaaagccagaaaagctaaaatcacagaatatggaaaacaattaatagaaaaacaaaagataaagtttacttatggtgtaagtgaaagacagctaaccaacacttttaaagaagcaaaaaaacatcacggtgttactggagacaacttgctctcaatacttgaaagaagaattgacaatgttgtatatagggctggatttgccatctcaagagcacacgcaagacaaatagtttctcacggtattattatattaaatggaagaagagttacaatcccttcaataatactaagagcaaatgatcaaattcaaataaaagaaaaagacagcctaaaaaaattaataagatcaaatatagaaaaaacttcgtctcttagaaatttgccaacttggatagaagtaaatgctgatgatttaaacataaaagtaaagcatgctccatcaagggacgagatacctacgcttgctaatgaacaaatggttgtagaatattattctaagagagcataa

SEQ ID NO: 11026 - DNA, 1356 bp, Borrelia burgdorferi
atggtcaaggtaataagcttaaaaaacattcataaatttgcttatttaaaactggatcctttaaaaaaagaggatatctacattgtttatattgaaactaattcaaaattaattgcaaatcttaaagcaaaaacaaaagttgatcaaattgaaataattaatttttatattgatgatgattttaaatcggaaggcatagaaagaataatgattagcaatttaattcactacggcaaaaaaaataagtttaaaacaatttcatgccaaattgctgaaatacaagaagagcttttaagcttgggatttgaatataacgattctaaatataaaaaagaattagcatctgaaatagaagaagataaatttgtaatgggaataggaataatctctatatttaccgaagtagcatcaatatcttctaagcttactgttggaatactgtttaattcatttgcacttattgctgatgctttccacgtaatggccgactttgttttatctacaataacttattttagtttgaaaattacaagcaagcctgaaaccattcattatccctatggacacaaactaatggaaagcttaatagcttttatcatgggaataattatacttatgacaggatttacactatttctaaatacaaccggattaaataaatttatcactcttgggggagagtctggatttaatctacacatacaccagaacaaaaataaaaatgatactatatatgaacatgaccattgccattcacacgatcacgatcacgatcataaccacgaccacaacgaagaagacaaaaaaaacatactagaaatattttcaaataaatctcttaaaaaaagcttgtggataccattaacccccttcattttttttatagtgaaaataatagaatatttgacaaaatttcaaataggaaaaagatacaacaatcaacttctcttagcactagcttctgctgataaaaactgtatattctcacatggtgggattacactaagtttactgcttgcaacctacatgtggagtggctttgacaaaattatgtctatatttattggctttatcataataaaagaagggcttaacgtaataataaataacgcaaacaatttgctatcaaaacaaaatatagatcttaaaagaagcgtaaaagacacgttaaaaaattcaaatataaactttaaaacactcaattttcataatcaaggcaacaaacttgtgctttatatcaaaataaatttaaattcagaaaatgactttaaaaattttataaataaaacacaagatattaaaaaaatcataaaacaagaatataaagaaataaatgatatatattttttagtctaa

SEQ ID NO: 11027 - DNA, 993 bp, Borrelia burgdorferi
ttgttttgcggaaggtttgcgaactttattatgagagatgttattaattttattaaaaaatataataattttgttattattgggcacaaagatcctgattttgattgtataggttcttctttagctttatcctcttttctctcaagaattggtaaaaattctattttgttaaatgaaggtccttttattagaaaagaaatagttccttttaaggataagtttttatctgaatggcccaatattgagatttcagagtattcagttattattttagattgctcgattttagataggataggtgatgaatttatcttttatgtaaagaatatgcctactttagtaatcgatcatcatatgtctggtgaaaaattagaatgtgagggctatattgatccttttgcaccttctactacttttttaattgaaaaattgataagagagtttggacatgatcttacaaaagaagaagcttggtatattttagtaggattttgtactgatactggtttttttaaatttatttcaagaagtgatccagagccttttgaaatggttgcaagactggtttcaaaaggaataagccttaaagaagtttatagctatatagaaaccaccaaaagcctaaaatcaatagaaactcttaagttaatgcttaacagtcttgaatcttattggaatggaaaggttttgtttacatttttatcttcttctagctctggcaaagatggtggagttagtggggttaatgagcttttttatatgattttaagcaatgttgagaataatgaaattttaggcattttaaaggaaatggaggatggttcgattatagttgggctaagatctaaagattcttttgatgttggaaaattggcagaagattttggaggcggtgggcataaaaatgccagtgggtttagaatcaaacaaggttctctagagattgtaaaaaatcgaatgctagcatacattaaggataatatttatttataa

SEQ ID NO: 11028 - DNA, 1668 bp, Borrelia burgdorferi
atgaaaagaaatttttatctcattgtcctttttatagctaataactgcttttctattgatttttgggatacgatggaaagagaaaaattaataaatgaaatggtaagcaaaatgcaagatcatgaattactggggcaaatgttcatgataagctacccaaatcaatcaatcacaaattttgttcttgattttataagtaaaaaaaatcttgggggaattaaaatttttggatggaacgcaaaagatttaaaaaatttaacagaaagtattcataaagctcaaaaaacatctcaaaataataaatttaaaattcctttatttgtagcaacagatcaagaagggggattggcgcagcacataaaattaaatacatcagaaacaattggcaatcttggaattgcagcatcgctttctccaaaagattcttataatacaggatattacatagcacaagagctaaggcaacttggaataaatctaaactttgcgcccatagtagatatatacagccatgaaaataattttgcaataggaccaagaacatattcggataaccccaaaatagtatcacttctttctctggccttttataaaggacaaaagcaaggaggagtaatttctactgcaaaacatttcccaggacacggcaataccactcttgactctcatatcaatattccaataataaattctaatttactagaaataagcttaaatgaacttttaccatataaaatattaatccaagaaaacatccccgtaataatgacaggtcatttagcatatccaaagcttacaaatggagaaaatattcctgcatcatcctcaataaaaataattaaagacatacttagaaaaaaattaaaatataataacataataattactgatgacctattaatgaacgcagtaaactacaataatgagagcatttataatacgattgaaagaatagttagaaccaaaagtgacatttttttaatatctttaaatgaaaatatacaacaaaatgcttacaacatgctattaaatttaatgaaaaaagattcagaaataaaaaacaatattattgaatctaataaaagaatattaagaataaaattaatgtacttaaaagaaaataaaaataaatctgatctttatcctaatttaaacaaaaatgagaaaatatattcaaaagaaggtgaaaaattttttgaacaaaacacattaaggagtattacaaaagtaagaatagaaaaagaaatatctaaaaccaaaaaaacacttataatatctccttactacaaaatgattgtagagggtaaaaaaatatttcaaaatacatacgcttattattacaactattatcccttaaacggaattaatccccaaaaactcgacgaaattaaaaaattaattaataaatttgaacaagtaatatttaatttatccacacctggaagcttgaaatatttagaaaatttgaaagaatacaaagacaaaataagcgtaattgtatctcttactcctcaccatattaaaaaattaaattggataaaaaacatagtaattatttatggaacaacacccttggcatttaaatctggatttttaacactcactaaagattttgatccaaaaggaaccatccctttaaaaaatattataaataaatattatccttaa

SEQ ID NO: 11029 - DNA, 3378 bp, Borrelia burgdorferi
atgaatatagatgaagaactaacaacaatattaaagaataattctaatttaaaaaaaatgaaagaatttttagaacaaaatatatttttttcattaacaggatatgaaggatttttcaaggcttttttaattaaaaaaatcaaagaatatagcaaaaccgggaaaataatattaatagttaaagacgagcacacattagataaaatcaaaaacgatttacaagtaattacaaatcaaatctttgagcttaactattttagcccccttgtatacaagggcattggctcaaaaagtacgatctttaacgaaagaatcaaattcttattcaatttttataaaaaaaatcctggaatatatattacagtcttgaaatcattgcttagcaaaatacccgataaaaatacattactaaagaatatatataaaattgaaaaaaataccaatattaatacagcagacattgaaaaaactcttataacattgggatatgaaaaaacattaagagtaacaattccaggagaatttacagtaaaaggagaaattatagatatatacccttttggagaacaaaatccaataagaattgcactaaactttgacaaaatagaagaaataaaaaaatttaatcccttaacccaattaaaacacgataatgaaattttagaattccaaattcttccaaaaaaagaaattatttgggacgataaaactattaacaccttaaaaacaaaaattaaatctgttgaatataaaaagattcttgaagagttggattttaaaaaagaaacaaaaacagaagaaatgttttatccactagtagcaaatacttacttaggtgatgagattgaaaaacacacacctattgtaaactttgaaattaacaatttcgaaaaagaaattgaaaaaatacaccaagaatatgaaaagctttacaaagaagcagaagaagccggtaaaaatataattgatccaaaaagaattctcttaaattataaaaccttcaatctaaaaagcgatgttttattttcaaaaattaaaagccttaaatccaaagaaactatagagtttaaaatcgaaagtgagagaaactttttttcaaatatagcacttacaaaagaagaatttgaaaattggctgaaaaatggatttaaaatcattattgcagcagaatctgaatcacaaaaagaaaaacttaaatatattttcaaagaattgccaaaagtatcaattgaggttttaaaaatatctagctctttaataatagaaaaagaaaaaattgccattattcttgaatcaaacattttcaatacggggcaaaaaataaacaaagcctttgaatcttcaaaaacaaaagctattgactcttttgttgagattgagaaaaatagtcacgtagttcacataaaccatggaattggtatatttaggcaaataaagagaataaaaacaagctctcttgaaaaggattatattgaaattgaatacgctgaaggagaaaaactatttattccaattgaacaaacaaatttaatccaaaaatacattggaagtgatcctaaaaatatcaaattagataaaataagttctaaaacatggataaaaaacaaagcaaacgcaaaaaaaagaatcgaggagattgcagacaaattaatagaactttattcaaaaagagaaagcattaagggtattaaatacccagaagataatgaattacaattgttgtttgaatctgaatttccatacgatgaaactccagatcaaataagagcaataaaagaaataaaagaagatatgatgagctttaaagtaatggatcgccttctttgtggagatgttggatttggaaaaactgaagttgccatgagagctgcttttaaagccgtaatgggaaacaaacaggttattgtactctcaccaacaactatcttagcagaacagcatttcaatacatttaaaaaaagatttaaaaattttccaatcaaaatcgaagtattaagcagatttataaaaaataacgcagaaagccggatcttaaaagaacttaaaagtggaaaaattgatataatcataggaacgcacaaaattctttcaaaaaaattcacctgcaaaaatttagggttaataataattgatgaagaacaaagatttggtgtaaaagaaaaagaaaaacttaaagaaataagaatttcggttgattgccttgctctttctgcaacaccaattcccaggtctcttcacatgtcactaattaagcttagagatatttccgttttaaaaattccgcctcaaaacagagtaaaaatagaagcttatttagaatcatttagcgaacttttaataaaacatgcaattgagagtgaactgtctcgagatggtcaagtttttttagtaaatcataatattgaagaactgtattatttaaaaacactaattgaaagattaaccccttatgcaagaattgcaataattcatggaaaactaacaggagaagagattgaaaatataatgcacaattttattaaaaaagcgtatcaaattttattggcaacaacaataattgaaaatggaatagatattccaaatgcaaatacaataataataaataatgcaaacaagtttggacttgcacagctatatcaactaaaaggaagagttggaagaggatctcagaaagcttatgcttattttttgtaccaagacagcgaaaagctaaatgaacgctctattgaaagattaagagcaataacagaattttcagagctaggagcaggatttaaaatagcaatgaaagatatggaaataagaggtgttggcaatttacttggtagagaacaacatggggagattgagtcgattggactagattactatctaacaatgctaaataaagcaattgaaaagaaaatgggaaaaatctcatcagatgaagaagaggttgatattaaaattaactatagtggatttattcctgaaaattatgcaaaaaatgagcaggataaaatactaatctacaaaaaaatctttaaaattcaaactgaagaggaaagtaaaaaaataagatcagagctccacaacgactttggcccaatacccgaagaaataaacagtctattaatgttagctgaacttaaaattctagcaaaagatttaaacataacaaaattaaaagaaaaaaacagggctttggaaatagaatacaaaaatatagaaagcattcctatggaaaaaataatagaaatacttcaaaaacatcctaatttattaatattaaatccctcatatcaaaaatcaatatttttaagctttaaaaatattgaaaaatctgaaaaaataaattacatatataaaaatattaacttactaaaaacaagcacataa

SEQ ID NO: 11030 - DNA, 546 bp, Borrelia burgdorferi
ttggaaaaaataaaagaaataattgtagttgagggaaaagatgatcttaaaagaatcaaagaatcttttgactgcacagtaatagaaacaaaaggatttgctttaaaaattgaaactattaagttgttaaaaaaagccttaaaatacaaaggaataataatcttaacagacagcgataaatctggaaatattattagacaaaaaatagtcaaatatctgggagaaaataataaaatcaaacatgcatatcttaatactaaagacactgaggttgaatcagtaaataaaacagaaataataaaaatacttaagggggttggaactttatctaaagataatcaaaaagatttattaaaattaagcgatttgttagaacttggcataataggagaaaactcaaaagaaaatagacaaaaaatacaaaaacacttttgtttgggggatggaaatagtaaaaaactcttagaaaggctgaattactttaaaataaaaaaaacagacctaaaaaaccaattggctttaactaactcccccagaaggacttga

SEQ ID NO: 11031 - DNA, 1881 bp, Borrelia burgdorferi
gtgattattatgcaaaatttattttcaaaaaacttgattgttttaaattacaatgcaactagtaaagaagatgtaattagaaaaatggctagcatgttcaatgaaaatggatacttaaatgacatggaagcatttataaaagaaattaaaaaaagagaagaaactaacggaacaggcattgaagagcatatagctatgcctcatgcaaaaggcaatttcattaaaaaacacggaattgctattttaagagttgttggcaatggttttgacttcaactcttctgatcaaaagctttcaaaactgtttttcatgatggccctacccgaagaaactccaagcaatgcacacataaaagctatatcatacctaagtaatacttttagcaacaacctattaagacatgaacttatgagcacaaataatgaagatagatttttagaaataatattgaataatgacaatataaatgaatctaacaatttaaatacaaaaaaagatttcattcttgccgtaacagcatgtcctgtgggaatagctcacacctatatggcagcagaaagccttaaaaaagcagctttagaattaaacataaatataaaagtagaaacaaatggatctagtggaaccgaaaatccaataacagaagaagaaataaaaaaagcaaaaggagtcattattgcatctggcaaaactatcgataaagaaagatttagcggaaaacctttaatcgaagtgggagtaaaagacggcatacacaaagcaaaagagcttatccaaacaattcttaaaaacgaagcaccaatttacaaaaaaagcaacacaaacaaaaccaccgaaaccctccaaaaacaaaacaaaaaaacggggatttataaacatctaatgaatggggtctcatttatgcttccatttgtagtctcaggaggaataataatagcaatatcattcatgtttggaatcaaagcatttgacataaacgatccaagctacaataaaatagcagatattctaatgcaaatcggcggtggaagcgcatttgctttaatgatcccaatacttgctggctatatttcatttagcatagcagaaagaccaggacttgcacctggaatgattacaggattaatgatgaacaatggaaatgcaggatttttgggaggcatcttagcaggatttatttcaggctacgttacactaactgtaaaaaaaatatctgacaaaataattcctagcaatttaagaggaataaatccggtattaacttatccttttttatcagttataatttcaggaattttgatatatggaatgcttagtccaatatctgttattaatgaatcaataacaaatatgctaaatcaacttagcggtactaatatggcaatacttggagctttgcttggaggaatgatggcaatagatatgggagggcctgtaaataaagctgcatatgcatttggaattgcaatgataactgccaaaaattatattcctcacgcaagcataatggcaggaggaatgatacctcccataggaattgctcttgctacaagtttatttaaaaatagattctcaaaagaagaaagagaatctggaaaagtttgttattttttgggagcatgctttattacagaaggagtaattccatttgcagcagcagatcctttaagggtaatacccgcatgtatactaggctcatctgtaggaggatttatttctgcacttttcaaggtagaggttatagcaccacacggcggaatatttattctaccaatagtagtaaacccattaatgtggataacatctatcctggtaggatctattataacagctgttttaataggaatccttaaaaaagaatacaagaatataaacgattaa

SEQ ID NO: 11032 - DNA, 924 bp, Borrelia burgdorferi
ttgatatatactctaacactcaatccttctgtggattataaaatagttttaaaagaatttcaggaagaaagtcttaattatgctttaaataacaatttttttgctggcggtaagggaataaatgtaagcaccgttcttaaaaatttaggaaaacctagtacggctttgggatttttgggaggttttacgggtgattatataagattttctcttgattctaggggcataaaaaacgattttattaaaataaaatatgatacaagattaaatattaaaatgatagcaaatggcagagaaacagaaattaatgccaattctccagatatttctgagaatgaatttgaacttttgaaaaataaacttaaaaatttagcaaataatagtacattagtgatgtcaggaagtgttcccgcagctcttggtgaggatgcatacaatgaaatagctaatagcatttctaatgatgttaagcttatcattgataccagtggcaaacctttgcgaaaaattcttagattaaatccctttttaataaagcctaatatttatgaacttgaagatctttttaatgctaaatttgattctacaaaagaattgattaaaatcggaaaaaatcttgtagaaagtggggttcaaaacattataatttccatgggaagtgacggagctatttttattggcggcaaaaatgttgcttttagggcctttgttcctaagattaattttgttagcaccattggagcaggagactctgtgattgccgggtttgtatatgcttttgataatggaagtactttagaggattcatttaaatttggtgttgcagctggtacagctacggcattaaaaggcaatctttgtgaatttcaagatgttaaaaagatgctttgtcagattagggttgaggatatttacacttcttaa

SEQ ID NO: 11033 - DNA, 1833 bp, Borrelia burgdorferi
atgagagattttttagtattaagagaatttttaaaagataaaaacaaaaaattcttaacccccgagcttaaactttatgaaataattgaacttttaaatatcaataaaaaaaattgttataaagcacaaacacttgcaagatccacaaacaatgaaaatattgtaatatttttaatatttttatttaactactttgataaaggccatttaagagctgacataaatctattagcaaaagatattcaaaatacaataatattcacaaaagacaacctagaaaaaaccaataaaagttacaacaaattaataaaaatactaaaagggctagaaacatttggaaatctagaaactattaagaatatagttttacttttaaagaaaaacaacatactaatggaatttaacaagcttaaaattacaactcccctaatcctggaaaacaatatttacatttatactcaaaaaaactacagagaagaagaagaattaataaaacaaattataaaaagattagaaaaccataaaagcgaattaaatgacaataaaatacaaaatataatatcaaatttaaataccaataatttaaataaagagcaaattacatcagtgagaaaggcattaaaaagcaacttctttctattaagcggaggcccgggaacaggcaaaacaacaactgttaactatatcttaaaagcaattaataaaacattaaacaataaaaaaaaaggattagtagccattacagcacctacaggaaaagctagcctaaggctgcaaacaagtatcgactattcattcaaaaatttagaaatagaatgtaatacaatccaaaaactattgggaatcaaattcataaacaaaaaaaatctatatgatgaagaaaatcaattaaattttgacgtaataataattgacgaagcttcaatggtagatgcacatacttttttaaaactactgaaagcaactccaataaccactaagttaataatggtaggagataaaaatcaactcccgtcagtaaacgaaggaaatgtatattcaagtcttttgggaatacaaaaaataaatagcgataatgtagaagatcttaaagaaaatttcagaagcaacaaagaaataaatttactctcaaaggcaatatacaaagaagatagtactttgatttgcaaatacattaataataataaaaatattcaactgaaagaaatagaaaaaataaacttaaaaaaagatctaatagaatatacaaacaatttatacagaaaaatacccacttttaatcttaaattactaaaagaatcaaaaattgaaacaatacttgaaactttacttgaaaatataattttaagttcaaaaaattttggcaaatttggaactaaaacactaaatgaaataataaaaacttacctgaaaaagacctatggaagctttattggccaaataataatgataactaaaactgactataaaaataaattatttaatggagaacggggtgttatttttaatgaaaattctaaattttatgctttattccaaagaaaagatgaaaaatataaaaaaataaatttagatttactaacaaattatgaattcagctttgccacaacaatacataaaagccaaggatctgaatacaaacatataaaagtaatattagaaaataacccttttttgacaaaagaacttatgtatactgcaataacaagagccaaggatagcttagaaataatttctaacaaagagactattattaagttaagcaaaaaatctagcaaaagagattcaaaaatactagaacacgtaaactcatttaaagaaattgacaaataa

SEQ ID NO: 11034 - DNA, 3510 bp, Borrelia burgdorferi
atgaacaaaatcctagaaaaaattcaaaataacacaacaatattaatagaagcatcggcgggcaccggaaaaactcacatactggaaaatgtggttataaatttaataaaaaccaagctatactccataaatgaaatcttggtattaacttttacaaaaaaagccacagaagaaatgcacacaagaatactaaaagtaatagaaaatgcttattctaactcaaaaacaaatgaaatcttaaaagaagcttatgagcaatcaaaaaaactctttatatcaacaatcaataaatttgcattacatgccttaaataattttcaaattgaaacagaaaattactccaaatataaacctaaagaaaaattttcaaaagaaatagatgaaatagtttatgactttttaagaaaatcagatagcttgattcaagctcttgatattaaagactacgaacttaaagtgtttaaatctgatgctaaaaaaacagaagagattgttttaaaaataaaaaaagcttacgaaagagatacgactcaagagcttggagattggcttaaaacccaaacggcttttgaaaacattcttcttaaaaaggaagagctgatcaaagattacaacaaaataatagaagacttagataaaatgacaaaagatgaaatattaagtttttataataaacatattcaaactggcaaacttgaaatagaatactctaaagaaaacgacatattcaaaatagcagaaacattattaaaaaataaatttttttcaactctaatagaaaaagaaactaaaaaaaattctaaattatcgcctaaagaacttaagattaaaaatgatttaatctgtttgggaattaatattaaacatgaaaaatataaatcagaagacaatagaaataaaaatagaaacaatttaaagcaatatgtcattttaaaagttgaatacaaaatactaaaatatatagaaaaagaactaaagaaaactattaaatcaacaaacacaatagatcaaaattacataatttcaaatttaaaaaattacttaaaatcagaagacaaaaagcttctaaatgcaatcaaaaatcggtacaaaatcattttaattgatgaagcgcaagatttaagcctaatacaaattgagatatttaaaatattaaaaacagcaggaataaaattgatattcatagccgatccaaaacagataatatattcctttagaaaagcagacatttcattttataacaaagaaataaaaaataaaatcaatacagacgctagaattgtactaaaaataaatcacagatcaagtaaaaaactcatagggcctttaaataaaatttttaataatatatacaataatgcaatagccgatgaaattgaaaaaattgattttaccaattcacttccaaatcaaaaaaacgacaataataaaattgtcatcaacggacaagaaatagaaggaatcaatataataaccacaaatacagaaagcgaagaagacatttaccaaaaaacagcattaacaataaaatatttgcttgcatatggaaaaattgctgagaacaataaaattagaaatattaaaatgcaagacattaaagtactttgcagaggaaaaaatgaaatcaatttaatagataaagcattaaaaaaagagcaaatccaaacaaacaaaactcaagaaaaatttttaaaaaccaaagaatttagcgaaattttttatattattaagtgcttagaccgaaagcaaagttttaaaactctaaattatattctaagcagcaaaatattaaatgtgccgtggaatttacaaagaattttaatcaaacaagacaaaatttgccttatagaagaatttattgaaaatataatagttttgcttgaaaaaaatgaaataacattaataaatgcaattaacaaaattacattcgaaaaaaacctgtggatcaaaattgcaaatatcaccaaagatcaaaaaattattgaatgggcaaaaaataaaataaattacaaaggtcttcttattaaagaaggtaagcttgaaaatttaaaaacctatgaaacaacacttgagatcatctctaaaatatatcataaagaacaaaacatacaatctctaatctctactttagaaagcctaataataaacgaagaacctgaagaaatagaagaaaaaataaataatataaataatgataatgaatctatagaactcatgacaatacacaaatcaaaagggcttggcatgaatattgtattcttactaaatacaactccaatagaaaatagcaattttttttcaaaaaaaaatcaattttacaaattttatcaagacggaaaaattgaatatgatttttttaaattggaagaaaataaaaaatacgcaagactaaaaatactaagcgaagaaaaaaatatattttatgtgggagcaacaagagctaaatttgctctttttattataaaaataaatagcataactagcaaattactagaaatagcaaaaatttttactatcgatgatattaaacatgactttaacatacatgaatttattggccaaaagagattcaataaaaaaaaatacaatacaaatgtaaatacaaaattaattccgccaaaaccaataattaaaaacatgtttaaaaaagaatatacatctagtttttcaagtttaacagcgcaagctcatcataaagaattttacgaaaactatgattttaaaaatattaactacgaaaaagaaacagaacttgattatgagcctggattagaagagactctgcccaaaggaaaagacatcggaaacattttacatgcagcaatggaggaaataatctttagcacagcaaaagatacatttgataattttaaaaaaaataacattgaaattattgaaaaacaaatacaaaaaattaactcaaatctcaatacaatagaaatacaaaattcattagctaaaatgatttataatatactaacttataatataagagcaattaatactcgtctgtgtgatattgaagaattacaaaaagaaatggaatttttaataaaaataaatcctgaatttcaaaaacaaaaatatctttttgacaaacactttgaagatcttcacataaaactaagtgatggatatttaaagggaatagtagatcttatatttaaagctaataataaaatatatatcctagattacaaaacaaactatcttggaaaaaataaggaagattataatataacaaatttagaaaatacgataaaaaaagaatattatgatttgcaatataaaatatatgcccttggaataaaaaaaatattatttaaaaacaaaaaagaatataatcaaaaatttggtggaataatatatctttttacaagagcatttgaagacaatattgaatgcttaaaatcaaaatttgaaaatggtatttattttaatcttccaaaatttaacgacgtggatttagataaaatcatcttagagttaggcattaaaagacacttatga

SEQ ID NO: 11035 - DNA, 1446 bp, Borrelia burgdorferi
atgaaaaatctatcactatttacagatttttatgaaatttcaatgatgaacgcttattttacaaaaggaattaatcctaaagcaaaatttgaagtgttttttagaaaaacaccctttaaaaatggctatattgttttagctggaatgcatacattgattaatgaattaaaaaatattcgttttggagaaaatgaacttaaatatttaaaaagctttaatatattagataaacaatttttaaactttctaagagaattcaaactaaacgtaaaaataagctcaatagaagagggtcgaatagttttcccccaagcaccagtagttgtgattgaaggacacttaatagaattattattaatagaagggttagtgttaaatataataaacttcgaaagtttgatagcaacaaaaaccgctagaataaaagaatctggtgcaaaaattttagcagaacttgggctaagaagagctcaaggaataaatggagcactttctgccagcaaagccgcctacatagggggagcagatttcacaagcaatatgcttgctggatataaatacaatataccagttacaggaacaatggctcatagttggataatgagctttgaaaccgaagagcaagcattcagagaatatgcaaaaacatatccaaacaaagtaagtttgctaatcgatacttacgacacgcttaacagtggattaaaaaatgccattaaaatattcaaagaattaaaacatgaagaaaaaaataatttttcaataagaattgacagtggagatcttgaatatttaagtaaagcagcaagaaaagaattaaaccgaaatggattaaatcatgtaaaaattattgcatctaatgagcttgacgaaaatattatcatgtacttaaattcaataaatgctccaattgatatttggggcgttggaacaaatttagttacagcaaaaggagatccaagcctttcaggagtatataaaatgatctctatagaaaaaaatggaaaatttataccaaaaataaaaatatcaaataacgcagaaaaatccacattacctgaccaaaaagaagttgcaagaatctatttaaatgaccaaatgatccttgattttatatttttaaaagaagaaaaagataaaatcaaagatcatctgaattcaagaaaagaatttaccgtttttcatccaatacaagataacattttcaaaatcatcaaacaatatgacgattttgaatttctaacgcacactgtcttagaaaatggaaaacttcgcaaaggctacgagtctagcttaaccaatattagaaataaaaccaaactcgacttaagcaaacttgaacatacgtacaaaagaataattaatccccacatatataaagtaagtatcagtaaaaacttaagaaagttaaaaaacaaactcacaaaagatatcaaaaacaattaa

SEQ ID NO: 11036 - DNA, 1437 bp, Borrelia burgdorferi
atgaaagaaagaagtgtttctaattttgatattgtaatttttggggttaccgggaatttgtctagaaaaaagcttattccttcactttttaatttatttaaaaataaatgtattagcaattttagggttattggtttttctcgtaagatttttacagataaagaatttagattgtatattaaagattctttatggcaggaagagaccgattcgttgattgagatttttttaaatttttttgtttatgtatttggcgattttaatgaaaaggagtcttataaaaatttatttaaatttttagatagaagtcgagaaacgatatattatctttcgacgtctcctgcattttatggacctataattaatcatttgaaaaagtattttttaagcgaaaaattgactttgtcaaaaatagttcttgagaagccttttggctctagtcttgagacagcaaaaaaattaaatagtttgctttattctgcttttaaagaagatcaaatttatagaatagatcactatttgggtaaagaaacggttcaaaatatttttacatttagattcggcaattctatttttgaaaatatttggaataatcgttatgtagattttgttcagattacggtagcagaagaattaggtcttgatggaagagtagagtattacgattctgttggcgctttgaaggatatggttcaaaatcatattttacaattgttaagccttgttgcaatggagtctcctattaaatttgattctgagtttattcatgatgaaaaagtaaaagttttaaaaagtttgaggaaaattagcaaagaagatattaagaattacattgttaagggtcaatatataggctcacaagttcaaggggtttttaaaaaaggctataaagatgaaacagaatttttgggaaattcaaataccgaaacttatttagctatgaaagtgtttattaataattggcgttggtctggggttcctttttatcttagaactgggaaaggtcttgctaggaaattttcagaaatatatattcaatttaaaaaaccgagctttactctttttaacaatagttctgttgatttttctaatgctttgatatttagaattcagccaagggatggaattgaaatcaaattcaataccaagaagcccggatataattatgaaattcaaactgctaatatggagttttcatatcacggagcatttaaaagattgtttgatgaggcttatgagcgtttattgttagacgcttttttaggagatggtactttatatgcgacaagtgatgagattgaaagttcttgggaatttgtttcagatattgcaaataaatgggcagatattgaaatttgtaattatttttatggctctgaaggaccaaaagagatagactctattttagaaaaagatcatttttggcgtaaaatttaa

SEQ ID NO: 11037 - DNA, 1047 bp, Borrelia burgdorferi
atgaaaaaaatttttatattaatagtaattcttacaacttttgcttgcactaacaaagacacaataactttaaacgtatttaattgggcagaatatattgacaaaactttattagatcaatttgaaaaggaaaacaatataaaaattaattatgaaatctttcacaataatgaagaaatgatggctaaatttaacaacacaaagaattactacgatataatagtcccatcagaatatttaatccaagaattaatcgatgaaggcaaaattgaaaaattagactactcaaaattgccaaatgtaacaaaaaatattacccaaaatcttacaaacttggaacatgatcctggcaatctttattcagtgccagcctactggggattaatgggcatactttacaataaaactaaaatagatttaaatgacatgcaaggttttgacatattatttaataaaaaatataaaaaagagattacaatgctagattcccctaaagacaatattggggttgctttaaaaaaacttggatactcaataaatgagcatgatacagataaaattaaagaagctggggaacttttaaaaatccaaaatccactattaatcggatatttttcagatgtgcctgcaaaatcattaatgctaaatggagaagcatctattcaactcacatggagcggcgaagcacaaagcgctatgctaaaagacaaaaatttagatttttatgcacctgaaaacaccaatctatggatagacgcatttgtaattcctattgatgctccaaataaaaacttggcttacaaattcataaactttttatacgagaatgaaccatcttataaaaatttcaaagaaactagatataattctccaaacaaaaacgtaataaaaagaatagaagaagaggcaaaaaataaccccgaaatgaaattatatttagaagaaaaatttttaccaaaagatttttccaaatttgaaatttttaaaaaaatacctaaaaaaataaaagaagaaatccttaaaatatatttaaatctgtcttcttaa

SEQ ID NO: 11038 - DNA, 840 bp, Borrelia burgdorferi
atggcaaataaaatcaactggtttcctggacatatgaaaagggccttagatctgataaagaataatttacaaaaagctaatattgtgctagaaatacttgatgctagagctccatttagcagtaaaaatccattaactgaaaaaattactaaaaatcaagctaaaataattcttctacacaaatcagatgttgctcaaataaatgaaattataaaatggaaaaaatattttgaaaatcttggcaatactgtaataataagcaatatttacaaaaaaggaatgcgtaagcagataatagatattattaaaaaattggccattgttaaaaagataaaaaactataaagaaaaaataaaggttttgattattggagttccaaatgttggaaaatcttcaataataaatctattatccggcaaaaagagcgcaaaagttgccaataaacctggatatactaaaaatatacaaatagtaaaaataaatgaagaaataaatctttttgatatgccagggattttatggcataatctagtagaccaatcgattgcaaaaaaacttgcaatattggatatgatcaaaaatgaaatagtagataacacagatcttgcattgtatttacttgaaataatggatcaaaataataaaaatattttactaaaaaaatacgaaatatatcataaaaattcacttgatattctacaaaattttgcaaaagcaagaaaattaatcggtaaaaaaaatgaacttaaccttgaaaaagcatcaaaaatattaatcaaagaatttagagagggtaaatttggcaaaataattcttgataagaattataatgccttttaa

SEQ ID NO: 11039 - DNA, 1545 bp, Borrelia burgdorferi
atgttaaagggttttgaacaagctcagaaatttggacgttcttttatgcttccaattgctattttgccagcagcggggctgcttttaggaattggaggctctctttctaatccagaaaccgttaggacgtattcttttttgaatatattcttcttacaatcagttttcaaaataatgagtgcgtcgggttctattattttttcaaatttagcgccaatattttctattggaattgctgttggacttgcaaaatcagataaaggcacatctggaatcgcagcatttattggctaccttgtaatgaatgctactattggagttttaattgatgtgtcaggcagagcggagtctttctctagtggtgctgtgggttttgttcttggaattaagactttagaaacgggggtttttggcggggttgtagttggtattttgacttattatcttcattctagatttaacaaagtagatttacctaaggttcttggatttttttctggatctagatttgttccgatcattgtttctttttctagtatttttcttgctgttattatgtttcttgtttggccatttgtacaaagtggaattaataaagtagggggcttagtagattcaaccggttatattggaacacttatttatgggatttttttaaggatgcttggaccttttggtcttcatcatatattttatttgccattttggacaacaggccttgggggatctgttattattgatggaaagttaattgaaggaactcagaatattttctttgcagaacttgctgcccaaggtacagatagattttttatcggaactagccgttttatgagtggacgatttattaccatgatgtttggtttgcccggagctgcacttgctctatattacactgcaaagcgcgaggagagaacaaaagtttttggtcttttgatgtcttcagcgctaacgtcatttttaacaggtataacagaacctcttgaattttcttttctttttgtagcccctattctttatgttgttcatgctacatttgatggatttgctttcatgctagcgcatattttgcaaattacaataggtcaaacgttttctggagggtttgtcgattttattctttttggcattttgcagggaaattcaagaactaattggcttttggtgccagttataggcattgtttggttttttctttactactttacttttatatttttaataaataagtttgattttaaaactccgggtagaacgcaagatttaaattctgaagattctccaagttctaagagtagtgaatttgaagaaaattatgccactaaggttattattgggcttggtggtgcttcaaatattgttgagcttgattgttgtgcaactaggcttagaattacagtaagggatgttcttaaagtttctgaaaaaattttaaaaaaaactggttctaaaggagtaattattaaaggcaatggggttcaggtagtttacggaccaggtgttagtgttcttaagaatgaaatagaagaattgctagaggcttga

SEQ ID NO: 11040 - DNA, 984 bp, Borrelia burgdorferi
atgaatataaaaaatatcatttttatacttatattcttattactcttaatactggttagtccgaggataaaatttaaaaatgaattttcaaaaaaactgattcctaaaaacatagaagaaattgacaattacttattaaaagaagaattgcaatttaatttagaaagcaatacaaaaaaagaaataatctggtataaagaaaaagcacaaaaaacaaattattctgtggtctatattcatggatttggagcatcaaaaaatgaaatttatccggttccaaataatattgcaaaagctcttaatgcaaatattttttttacaagacttaaaggacacggaattaacaataaaaatgcatttcggggaataactacccaagattggctgagagacattgatgaggctattaacattggcaaattaataggtgataaattagtattaattggaacctctaatgggggcactgccagcatctgggccttggcaaactatccaaatgaaataaactcggcggtattaatttctcctaatatattcccttatgacaagagaacaaatatcgtttactatccttgggggcgacaaattgcatatcttataacaggtggctacaataaattcgaaacaaaagagtataaacgaaaagaacacccgactataaaaagccactcttcaagagtacagcatgtagacgcaattattgcaatgatgggccttgtcacattattaaattcatataatttcaacgaaatcaaaatacctttaataataacccacacaccaaatgatcatacagtagacccaataaaaataaacgaatttataaaaaattatgggggtgaaaaaaaggatattcccatcatacttcttgaaaattcacacgctcacttacctattggaaaccaaagctacaaaagcgcccaaaacacatcatacttcacaaagtatgtatttgatttcataaacaagattaataagtaa

SEQ ID NO: 11041 - DNA, 1638 bp, Borrelia burgdorferi
atggctaaagacatatattttaatgaggatgctagaaaaagcttacttagtggcgttgaaaaattatccaatgctgtaaaagtaactcttgggccaaaagggagaaatgtccttattgataaaaagttcggctctccaacggttacaaaggatggggttagcgttgctcgtgagattgagcttgaaaatccgtttgaaaacatgggggcacagcttttaaaggaagttgctattaaaacaaatgatgttgctggtgatggaacaacaactgctactgttcttgcttatgctattgcaagagaaggccttaagaatgtgtcttcaggaatcaatcctattggaataaaaaagggaatagatcacgctgtaaatttggctgctgagaaaattcgtcagtctgcaaaaaagattacaacaaaagaagagattgcacaagtagcttcaatttctgctaataatgacagttatataggtgaaaaaattgctgaggcaatggataaagttggaaaagatggtgttataacagttgaagagtcaaaaacctttgatactacgatttcttatgttgagggtatgcaatttgatagaggatatctttctccttatttttctaccaataaagaaaatatgagtgttaattttgacgatgctttcatattgatatatgagaaaaagattagttctattaaagagcttttaccagttcttgagaaagttttagggacaaataaacctttattaattattgctgaggatattgagggggatgctcttgctgctcttgttttaaacagcgttagaggagctttaaaggtatgtgcaattaaatctcctggttttggtgatagacgaaaagcaatgcttgaggatattgcagtgcttaccggcggtgttttaatcagtgaggagctaggccttactcttgagacagttgaaattgagcaacttggacaggctaaaactattaaggttgataaagacaataccactattattaataccggcaataaagagcaaataaaggagcgttcagagcttattaaaaagcaaattgaagattcaacatctgaatatgataaagaaaaacttcaagagcgtcttgcaaaacttgttggcggagttgctgttattaatgttggagctgttactgaggtagagcttaaggagaaaaagcatagagttgaggacgctctttctgcaactcgtgctgctgttgaagagggtgttgtgcctggcggtggatcaactcttattgaagttgctatgtatttagatacaatagatacaagtaaattaagctatgaggaaaagcaaggttttgagattgtaaaaagaagtcttgaagagccaatgagacagattatttcaaatgctggttttgaaggatctatttatattcatcaaattaaaacagaaaaaaaagggcttgggtttgatgcttccagctttaagtgggtaaatatgattgagagtggaataattgatcctgctaaggttacaagaagcgcgcttcaaaatgctgcttcaattgctggacttttattaacaacagaatgtgcaatcacagatattaaagaagagaaaaatacttctggtggtggtggttatcctatggacccaggaatgggaatgatgtaa

SEQ ID NO: 11042 - DNA, 831 bp, Borrelia burgdorferi
atgaccaaagactactacaatatacttggaatacaaaaaaatgctagtaatgaggaaataaaaaaagcttacaaaaaattggcaataaaatatcacccagacaaaaacaagggaaacaaaatagctgaagaaaagtttaaagaaataaatgaggcttatgaaattttatcttctcctgataaaaaaagaaattatgactctttgggtaacacaaattttaatggcaacaacgaccattttgaaagagaatttagcagcacaagatttggcaattttgaagatttagattttttttccaaaatctttggcggatcctcaagaaaaacagcagacagagaaataattataaatatttcactttatgatgcttatatgggaagtaaaaaaataatacttataaacaacaaaaaaatcgaggtaataattccaaaaggaacattagaaacaactacaataaaaataaacaacaaaggtcccattaatccaatttctggaataaaaggaagcttaatagtcaaatttaatatatcaagttataaaaattttaaactgaatggaaaaaccttagaaacaacaatagaagtttacccctgggaaatagctttgggttgcgaaaagctatttgaaacaattgaagggaaaaaaataaaacttaaaatcccatcagatgcaaaaaatggagaaattctaaacttaaaaggattggggatgcctataattggaagcagctcaaaaagggatcttaaagtcactttgatagtaaaaattccaaaaataataaataatgaagtaaaaactatttacgaaagattaaaagagatatacagctaa

SEQ ID NO: 11043 - DNA, 873 bp, Borrelia burgdorferi
atgaaatcgggatttgcagcaatacttggtagaccatcaactggaaaatctacccttttaaattcaatatgcggacataaaatatcaataatatcccctattccgcaaacaactagaaataatataaaaggaatctttacggacgacagaggacaaattatttttatagacacaccgggatttcatctgagtaaaaaaaagtttaatattgcaatgatgaaaaatatccactcttcaataggagaagttgaactcattttatacataatagacattcaagacaaacctggagaagaagaaaataaaatgttagaaataattaaaaactctaaaattaaatttttagtaatacttaataaaattgaccttaaaaacacaaaaataaaagaaataacgcaatttctaaaagaaaaaggaatagaagatagtaatataattaaaatatctgctgaaaaaaaaattaacacagaagaactaaaaaataaaatttatgaaaatttttcagaaggcccactttattatccacaagaatactacaccgatcaagaaataaattttagaattagtgaaataataagggaaaaagctattgaaaacctaaaagaagaactcccctattctttgtatgtggatattgataccttagaaaataaaaaaggaagtctttttatcagagcaaatatttttgtagccaatgaaagtcaaaaaggaataattgtaggaaaaaacggaaaagaaataaaatcaataggagaaagggcaagaaaaacaattgcaaaaatttttgaaacaaaatgcaacctattcttacaggtaaaacttaaaaaaaattggaacaaagaagataagctaataaaaagacttataaattaa

SEQ ID NO: 11044 - DNA, 1029 bp, Borrelia burgdorferi
gtgccattgagctttgggaaaatgatattattgattgatttgattttgttttcatatttaagcttgtattctaagacccccgattatttaaatgttcttgatttttttgatactaatgtttttaggtttgattttaacattgaaaatgatgtttttacaattgaaaatgataagggatatttgaagtttagggtaggctttgaatatgcgcttacatcttctggttattatatgtttgtagacccaattattgacattcgtggagaaattttaataagtcaaaaggtattaaaacaaattgaaaattattttagttctcttaaagactataataaacccagaattacttcaataatcattgatcctggacatggcgggcatgatactggtgctgttgtgactttaaagataaatggttatgacgttgtgcttcaggaaaaagattttgcattaacctattctatatatttgtctaaaattttaagtaattattttgtaaataaaaatattttgttaactcgtataaatgatgtttatttaactttaaaagaacggtcggaatttgcaaatgcaataaagccaaatttccccaataatgttatatttttatctatacatgctaatgatgctccaaacggtgaagctagaggagttgagttttggtatcttcctaaggattcaaaaagagaagttattaaagattttaagggatatgatattaaaggtaatagatacttaagcgagcttaatgatatactagatattaaatataaatatgaatcaaaaagattggctgaaattttgtataaagtgtttaaaaatgagttaagcgaaactaatattaggccaatcagaaaagagcaatggtttgtaataaaaaacagcagtatgcctgctgtgttgattgaaatggggtttttatccaatattttagatgctaaattaattttggattataattacatgagcaagtttaatattctaatacttaaagctttaatggaatttataaatttttatgaaaaataa

SEQ ID NO: 11045 - DNA, 1152 bp, Borrelia burgdorferi
atgacaattagtaaaaacgtatttagtaaatttattttgaaatttttaaattcttcagcatttgttagtgtatttgctctatttgttggatttttaattgttgggctagtggtgatggggcttggtcattctccttttagaatgtattttataatattagaaattattttttcttctcccaaacatttaggttatgttttaagttattcagctcctttgatttttacaggtctttctattggtatttctttaaaagcgggtctttttaatattggggttgaaggccagtttatactaggatctattgttgctttaatagcatcagttttacttgatttgcctccaattttacatgtaattactatttttattattacttttttagcttcaggcagtttaggaattttaatcggatatttaaaagccaaattcaatattagcgaagtgatttcaggaataatgtttaattggatattatttcatttaaataatataattttagattttagttttattaaaagagataatagtgatttttcaaaacccattaaagaaagcgcatatattgattttttagcttcttggaagctctcaccagaaggtcttgcttatagatcttctcatccttttgttaatgagcttttaaaagcacctcttcattttggaataattttaggtataatttttgctattttaatatggtttttacttaataaaactattattggatttaaaataaatgccacaggaagtaatattgaagcttcaagatgtatgggtattaatgtaaaagctgtgctaattttttcaatgtttctctcagcagctgttgcaggtcttgctggtgctattcaacttatgggtgttaataaagctatatttaagctttcttatatgcaaggaattggttttaatgggatagctgcttctcttatgggaaacaattcgccaattggcataatattttctagcattcttttttctatattgctttatggaagcagtagagttcaaagtttaatgggccttccatcttcaattgtatctttgatgatgggaataattgttcttgtaatttctgctagctattttttaaataaaattgttttaaaaggtgttaagcgtgtcaaatataataatattcttgattag

SEQ ID NO: 11046 - DNA, 2262 bp, Borrelia burgdorferi
atgttattgaagcttaaatacaggtttgttggatttttattattgtttttaatttttatactgctacttttttccacgatttttaattttgttttatgcggttatttagaagattattataagcagcttacaagggcgcaagtaagaagagcagctttttctttgcaatcttttttagacaccctgcatgtcataatcaatggtgcagcttctaatttggcacttgaaaccatatcagaatttgcaatgtctgagaatagaggaaaagatttctctgagtcggaattgatagatttaagaaaaaatccaaaatttgttattgactctgtaaaggtgagcaaaaaatatcgacaatacttatacaattttatggccaatcttaaaaatgataccctttttgaagaattcgctttttttgattttgaagggagagtaattgttagcacaagacatgagaataatatggattttggtcattctgaggctaataccaattattttaaaaaagctgttgaggattataggcaaaaccaattaaaatttataggttggtattcaaatctttctgaaggaatatccgcagaagttgctattaggtctaaacaaagcgaaaaaaaggcttttgcaataattgtacctgtatattccccagaagataaacttgtttgtgggtatttggccggatatttgcttaatgatattgtggcagatagttttgatagatttagattcggtttttataaaagaggcaattttatttatgtggatcccaacaatatagcagttaatccttttgaagaatataatgaaaccagcagggttagttctaaatttttgaatgttcttaaagatgttttctctaagcccccttttccatcaaacattgccagtgaagtgtcggtttacactattgatagaatacttttgtccgaaatgggagaagattgttattatgcaatgttgcccataagtagtaaattgggagaaaagagtggagtacttattgctaggcttccttataaggatatttacggagtaatatctagtctaagatttcagtatattttatattcagtcttaggcattatagcattaagtattgttctttcaattagaatagacaggattattagttttcgtttaaacgcaattagagttctagttcaagatatggttaagggcaatttagataaagattatgctcttgatgatgatgaaaatactcttgatgaacttggcatgttaagtcttcaggttgttaaaatgaaaaaagctatttctgtagcaatttctagtgttttgagaaatattagctatgtaaataaggcaagtttagaagttgccagttcaagtcaaaatttaagctctagtgcattgcaacaggcatctgctcttgaagaaatgtcagctaatgttgagcaaatagcctcaggtgtcaacatgagcgccaataattcttatgaaacagaacaaatagctttaaagacgaatgaaaattctcagataggtggtagggccgttgaagaatctgttattgctatgcaagacattgtggagaaagttagtgttattgaagagatagctagaaaaaccaatttacttgctttgaatgcggctattgaagctgcaagagcaggagatgagggaaagggatttgctgttgtggccagtgagattagaaagttggctgatttgagtaaaatttctgctcttgagattggagagttagttgaagataactctaaggtagcaactgaagcgggagtgatctttaaagaaatgctacccgaaattgaagaaacggctaatcttgttaagaagatttcagaaggtagctctaagcaaagcgatcagattgctcaatttaaaatggctttagatcaggttggagaagttgttcaatcttcagcttcaagcagtgagcagctttctagtatgtccgataaaatgttagaaaagtctaaggaacttagaaaatctgtattatttttcaaaattaaagattctaaaattgaaaatccagaaaatgatgattatgatttcaggttaatagattgtcctgaaaattcttttaaagatgaaaatcaaaatttgaaaagcaatggaatttctacttcaaatgccagtgggcataataattattctttagatattgagagcgaatcttctgtaagaactattaataagcgagttgatcctaaaaaagctatcgatattgctgataaggatttaaattttgatgatgatttttcagagttttag

SEQ ID NO: 11047 - DNA, 1068 bp, Borrelia burgdorferi
atgaaaatagccgtgcttttatctggaggagtcgacagttctgttgccctttatagaattataaacaaaggatattcaaatataaaatgctactatttaaaaatctgggttgaagatgaactgtcttatattggaaactgcccttggcaagaagatttaaattatgttgaagctatatgcaacaaatttaatgtaccgtatgaaataataaactttcaaaaagaatattataacaaagtagtaagctatactattgaagaacttaaaaatggcaataccccaagtccagatattttttgcaatcaaaggataaagtttggagcattttttgagaaaatcaatagccaatatgatttggttgtaacgggacattacgctaaaatacaaataaaagaaagtaaatttttattaaaacaggcaaaagataaaattaaagaccaaagctactttttatctcatctctctcaaaaacaaatgtcaaaactatactttcccttaggcacattacttaaaagcgaagtaagacaaatagctaaaaacataaatttacccaacaaagatagaaaagatagtcagggtatttgctttttaggaaaaattaaatataacgaatttatcaaataccatcttggagagaaaaagggaaatataattgaaaaagaaacgggaaaaataataggaattcacaacggatattggttttttacagttggacaaagaagaggaataaaacttagcaacgggccatggttcgtcatagaaaaagatctggaaaaaaatattatatacatatcccataacgagaattatttaaaacaagcaaaacgcaaatttttagttcacgaaatacattggataaacgacacacctacgaactttgaaaatttcaaaattaaaataagacatggcgaaaagaaatactcatgcaaattaaaacttattacaaataacttaatggaaatttctttaaacaaaaaagatcaaggaatctccccaggacaatttgcaattttttataaaaacacagaatgcctggggggtgctaaaatttttaaaatcatagaataa

SEQ ID NO: 11048 - DNA, 1083 bp, Borrelia burgdorferi
atgatggataccgagtttatgggtatcgagcctaatatattagaaaataaaaaaaggcatattgagatttgtttaaataaaaacgatgttaaaggtggctgtaatttcttaaagtttattaagctaaaacacaatgctcttagtgattttaatttttccgagataaacataaaagaagagatatttggatacaatattagtatgcctgtttttatttcttccatgacagggggcagtaaagaggggaatgactttaataaatctttagttagaattgcaaattatttaaaaattcctatagggctaggttcttttaagcttttgtttaagtatcccgagtacataagagactttactcttaaaaggtatgctcataatattcctttgtttgccaatgttggtgctgttcagattgttgaatttggtatttctaaaatagctgaaatgattaaaagattagaagttgatgcaattattgttcatcttaatgcaggacaagaattgatgaaggttgatggagatagaaattttaaaggaataagagagtcaatagccaaattgtcagactttttaagtgttccattgattgttaaagagacaggttttggaatttcgccaaaagacgttaaggaattgttcagccttggtgcttcttatgttgatcttgcagggagtggtggaactaattggattttagtagaaggcatgaagagtaataatctaaacattgcatcttgtttttctgattggggtataccttcggtttttactttacttagtattgatgattctctaaaggctaatatttttgcatctggtggatatgagacgggcatggatattgctaaaggcattgcccttggagccaggcttataggtgttgcagcagttgttcttagggctttttatgattcaggagaagatgctgtatttggtcttttttctgattatgaacatattttaaaaatgtctatgtttttaagtggaagcaaaagtttattagagtttagaaataataagtattttttaagtagttatttgcttgatgaacttggagtctttaagcagttttatggaacttag

SEQ ID NO: 11049 - DNA, 1296 bp, Borrelia burgdorferi
atgaacttggagtctttaagcagttttatggaacttagtaaaaattttagacataaaagcgttttagaaaaaaggcaagagataaaaagttttttggaattatcttataaagattttttttataataatgccaatgaagattttctttttaatatgatagaaaattatattggatatttatcttttcctattggaattgtaaaaaatttgaaaataaatggcaaatactattctttgccaattgcaacagaagaatcttctgttgttgctgccctaaattttgcggcaaagattcttgaaaatgctgatttaaggtattctttgggtgaagtgttgggaatttcgcaaatttatataaaatcggaaaaagatttaagtaaaatttttgttgaccttggtgataaaattaagacttggattgaacctcttttaaccaatatgaatcaaagggggggtggatttagaaggttgtcaactaggcacattaaagaattaggtattcaaaaattaaatatttatgtggatacttgtgatgctatgggtgctaatttgctaaactcaattgcagagcgtgtagcagaatttatttttttagaattcggatatgagtgtgttttaaaagttttaagcaatgatattagtgaatttacagccaaagcccgttttgttttagattttaagcatttgctaccgggtaaagaggattcttggaatttggctaaaaaaattgaacttatttctagtataggtttttacgaagaggagcgagctgttactaataataaaggtattatgaatggaattacaggggtgtgtcttgcaacttttaatgacacaagagctcttgaggcctctgttcataaatttgcttcaaaaagcggcaaatattttccccttagtaaattttatactactgacaatgctttagttggagaaattgaaattcctttgcaagttggaactaaaggtggggttatatcttttaatgaagcttcaattttaagttttaaaattatgaatgtaaatagtaagagcgaatttattggtattctctcttgtgttggacttgctagtaattttgcagcattaagggctcttgcatttaatgggattcaaaagggtcatatgagattgcatgttaataaaatactccatcttttaaagacaaaatataatatttctgattttgaaaaagacaaattattattggaaatggaaagaatgaatatttattcttttgattttgcttttaaaattttgaagaaaataaggttagagaatgaaaataaagtgtaa

SEQ ID NO: 11050 - DNA, 939 bp, Borrelia burgdorferi
atgaaaataaagtgtaaagttcatgcaagcttagctttaattaaatattgggggaaaaaggatgtttttttaaacattccagctacttccagtcttgctgttagtgttgacaagttttattcaataagtgagcttgaactttcaaatcgagatgaaataattttaaattcaaagccagttatattaaaaaatagagaaaaggtgttttttgattatgcaagaaaaattcttaatgaaccaaatgttagatttaaaattaaaagtaaaaacaatttcccgacagcagcaggccttgcaagttcaagttcaggttttgcttctattgctgcttgtattttgaaatattttaataaatattcttgtaatagcgcatctaatcttgcaagagtaggatcggcttctgcggcaagggctatttacggggggtttactattttaaaagagggttcaaaagaatcttttcaattaagagatcaatcttattttaatgatttgcgaataatatttgccataattgatagtaatgaaaaagaattgtcttcaagagccgcaatgaatatttgcaaacggcataaattttattatgatgcttggattgcctctagtaaaaagatttttaaagacgctttatatttttttttaaaaaaagattttatacattttggagcaactattgtaaaaagttatcagaatatgtttgccttaatgtttgcatcttctattttttattttaaaaatagtacaatagatttaattaggtatgctgctgatttgagaaatgaggggatttttgtatttgagacgatggatgcaggcccccaagtaaagtttctttgtttggaggaaaatttaaatactattttaaaaggacttaagcaaaattttactggcattgattttattgtttcaaaggttgggtgtgacttagaatggatttga

SEQ ID NO: 11051 - DNA, 954 bp, Borrelia burgdorferi
atggatttgattagtttttctgtacccggaaatttacttttaatgggggagtatactattttagaggaaaagggattggggttggcaattgccatcaacaagagagcatttttttcttttaaaaagagcgattcttggcgcttttttagtaaaaagaaaaaaatagacgatttttctttaatagaaaatagaagcgattttgtttttaaaatgtttgcttacttgagtcaaaattgtttttttaatctagagaattttgcgtatgatgtatatattgatacaagtaattttttctttaatgatggaactaaaaagggatttggttcaagtgctgtcgttgctattggcatagtgtgtgggctttttttaattcacaatgctaccaatgttgttgagaaaggtgaaatttttaaatattgtttggaagcttacaggtattctcaaggaggaataggcagtggatatgatattgctactagtatttttgggggtgttattgagtttgaaggcggctttaatcctaaatgcaggcagctgggtgctgtagagtttaatgatttttatttgatgcagggtttgcaagcaattaaaactactacgtctatttgtgaatacaataaacatagaaattctattttagattttatattgaaatgcaatttggagatgaaaaagcttgttttaaatgctagcaattccaaatccgcattaatttctagtttaagaagggctaaagaattgggattggcaattggagaggcaataggagtttcggcagctttgccttcaagttttgatcaccttttaggtcaatgtgatttgattaaagctttgggagccggaaacgaaacttttttagtttacaggcccaatattgaagcttttaatttgtcaaaaattatttcaattgttttagagaatgaaggcattaagtttgaaagcgataaatgctaa

SEQ ID NO: 11052 - DNA, 570 bp, Borrelia burgdorferi
atgtattataataattatataaaggagatagttatggaaaagtatttaagctatataaaaaaggatgatttagacgcaatacaattaaaattacaagaattgttagcaagtttgcatattttttattctaatttaagaggtattcattggaatataaaagataccaatttctttgttattcacaaaaaaactcaaaaactttatgaatatattgaaaaaattattgatattgttgcagaacgctcaagaatgcttggatatgattctgaatttagatattctgagtttatgaaaaaatcctttattaaggagcttgatattgaatcaacttctaattttttgccctcaatggaaagcattgtttgcagtcttactgagattttgaagaatatttttggaatgagaaaattaattgatactgctggtgattatggtactgctaatattatggatgatatcatgagtgatcttgagaaacatttatggatgcataaggcattgcttgaaaattgcgattgtttttgtcacgatgagaatgaaagcaaatgttgcgagtgtgatgcaaaatag

SEQ ID NO: 11053 - DNA, 1344 bp, Borrelia burgdorferi
ttgtttttaatgcttgaaagtttggggtcaaattttagaaattttataaactatctttctggaaaatctacgataaatgataaaaacattgcagaggctattgagattattaaaaattctttagttgatgctgatgttaacttaagagttataaggcgttttttaaattctataattgaagaatccaagggagtaaaagttttaaggggcattgatcctaaatctcagtttattaaaattgtcaatgataatcttgttaaatttttgggaggcaaaaattatgagcttagtttacatcctgccaataagcaatcttatattcttatgttgggacttcaaggttctggcaagaccacgacatgcgccaagctttctttaaagcttaaaaaggaaaatagaaaagtacttcttgtagctgctgatacttttagagcggcggccgtagaacagttaaaaatattgggtggtcaagtaggtgttccagtattttcaattgaaggggaaaaagatcctattaaaattgttaaagcgtctatgaagtttgctgaatctaatttttttgattctgtaatagttgatactagaggacgacttgaaattgaatctttgttggttgaagagataaaaaaaataaaggggattttgcgacccgcagaaaccattttagtagtagactctatgatggggcaagttgctgtaaatattgctaaggaatttaatgagaatgttggacttaccggtgcaatattttctaagtttgattcagatactagggggggagctgtattatcttttaaaagtatttgtgcagttcccattaaatttattggtgttggagagaaaatcgaagatcttgattccttttacccagaaagaattgcttctagaattcttggcatgggggatgttgttagtcttgtagagaaggttcaaagtgttgttgacaaagaagaggctattaagcttgaagaaaaaattaataaagccagttttaattttgaagattatctgagtcaatttaggcgcattagacaagtaggagggttttctaattttgtaagttttttaccaggtgtttcaaaatcaatgctgaatagcaataatttaaatgaagaaagttttaataaagaagaagctattattctttctatgactaaaaaagaaagaataaatccagtgattttgaataatccctcaagaaaaaaaagaatagccatgggaagtggaacaactgtttttgatgttaataagctcataaaaaagtttagtcaagcaactttgattatgaaaaaaatgaaaaataaagattttcaaaataagattgcatcccttttgggaaaataa

SEQ ID NO: 11054 - DNA, 261 bp, Borrelia burgdorferi
ttgagcgttaagataagattgaaaagaatgggagctaaaaaaagaccttattatagggttgtagttatgaattctacgtctcctagagatggtagagcaattgaagaacttggttattatcatcctgttgaaaagcaaaaccaaataaaaattaaggaagatagaatgaaagattggataagcaagggagcaattttaagtgatacagtgaaaatgcttttaaataaaaacaacttgaatgcgaaaagtcaggaggtttaa

SEQ ID NO: 11055 - DNA, 249 bp, Borrelia burgdorferi
atgaaagagtatgggaatgagattgaacttatagagtttatagtaaagtctcttgtagataaagaagatgaagtaaagttaaatgtaattgaaggggaaaaatcaactattttggaattaagggtttctcaaagtgatgtgggcaagataatcggaagacggggtcgtattgcgcgggctattagaactttgcttggagcttgtgctgccaaaaccaataggcgagtgcaattggaaattttagattaa

SEQ ID NO: 11056 - DNA, 501 bp, Borrelia burgdorferi
atgtttattaaaggcgttatattatcgtcttatggagttaatgggtatgctagggttaaaagcatatccaataatttttgtgattttattaatctaaaaaacaataaagttcttttaaaaaaaagcaatagttccagtgttgaagttaaagttgtagatgttaatataaagggtaattccttatttttgaagtttgaagagattgatactccagaggcagttaggccgctgattggttttgaattgtgggttgatgattcgcttgcatcgagtttaaaagaaggcgaatattatttaggaaagcttattggctatgccattgttaataataataaaaaactaggagaagttgtagctttctttgaatatttaaatagtgtatttcttgaggtcagagtgggtattaaatttttctttattccctttttaagtatatatattggagatataaatactcaagaaaaaacaattgagcttaaggttctagatcttttaaaatga

SEQ ID NO: 11057 - DNA, 720 bp, Borrelia burgdorferi
atgaaatttacggttttatccctttttccagcaataattaagccattttttgaaaattcaataatgaaaaaagctattaataagggaatagtaagttttgagcttgttgatgttagagatttttcaaaagataagcataaaagatgtgatgatttgccttatggaggcggtgctgggatggtattgaaggccgaaccgatttcttttgctcttgagcatgtagagtctgccaagaaaacgacaatatttttaagtccttctgggataaagtatagccaagagttggcgtattccttgtcaaaaagagaagaaattgttataatttgtggaagatatgaaggaattgatcaacgtattatagatttgtatgttgattttgagatttctattggagattatgttttatcttcaggagagattgcagctcttgttttaatagatagtgtatataggttgctagatggagtaataaatcccaattctttattagaagaatcatttggtgtaaaaaatggattgcttgaatatcctcattataccaggccctatgattttaaggggataaaggtcccagaagttcttctttcgggacatcatgcaaatataaagaattggaggcttgttaaagctagagaaaaaactaagaaaaatagatatgatttataccttaaatatttagagataataggagaagataatggatttgataagaaaaattga

SEQ ID NO: 11058 - DNA, 366 bp, Borrelia burgdorferi
atggatttgataagaaaaattgaagctcagaataagaaaaatgaggcttttgtttttaatgtgggagatactgtgagggttgtttacaaaattattgagggtagtaatgaaaggttgcagagttttgaagggattgttatttctttccaaaacaagggaattggcaaaacatttttgattagaaaaatttcttcaggaataggtgttgaaaaaattttcccagtatattctcctattatagaaaaggttgaagttttaagaaggggaaaagttagaagggcaaagctttattatatgaggaatagaatcggtaaggctgctatgaagataaaggagcgccttactattaaaaaagttaagcattag

SEQ ID NO: 11059 - DNA, 243 bp, Borrelia burgdorferi
atggataatgatgaaatttttagcaaggttaggtctattatatctgagcaacttgataaaaaagaagatgaaattaccacagactctagatttgttgaagatcttaatgcagatagtctagatatttatgagcttttgtatttgcttgaagaggcctttgatgataagattccagagaatgaagccaatgaatttgagacggtaggcgatgttgttaattttattaaaaagagaaagggttga

SEQ ID NO: 11060 - DNA, 1233 bp, Borrelia burgdorferi
atgaatctagggaaaaacaatccaaatataattaaaattggtaaaatatttaaaaaaaataactacgaattttatttagttggaggcgctttaagagacttactgcttaataaacagccttacgattttgattttgcaacaaatgcaactcctgaagaaataataacattatttccaaataacatcaaaacaggaataaaacatggcacaattggtattatttttaataaaaaaatctttgaaatcaccacatacagaatagaaaaagaatatgaaaacaacagagcccccaaacaagtagaatatactaaaaatttacttaaagatcttgaaagaagagattttacaattaatgcaattgcaatggatattttcaacttcaacataatagattgctataatgggaaaaaagaccttaataagaaaataataagatgcataggaaatccaaacaaaagacttgaagaagacgcccttagaatacttagagcagcaagattttcatccacacttaattttaacattgaaaaaaatactttaatttcaatgaaatataaaaaagaaaatattttaatgatttcaaaagaaagaataaaaaatgaatttcacaaattgttagaaggcataaatatacaaaaaggaatttattatcttaaaaaagttgatttttttaaaaatttttttaatctagaaataaaaacaaaagtaatcaaaaaaattgctctacttgataaaaacaaattttatctaaaggcaatcacaatattgacaattaaaaaacctataaaagaactaaaagaaaaattaactttacttaaattctcaaataaagaaattaagctgattttattttatagaggcataatcgataataacaatatttttaatgtcaaaaaattaagtgatattagatatttgcttagcaaaagcacaagagaacattataaagaaataattgatatatacaaagcactcaaaggaaaaaataaaagatatttatttataataaaaaacataaaaagaaaaaaattgctaaaaaatcctctctctttaaaagatttaaaaataaacggaaaagatattcaaaatctagaacaaatagaaaacaaaaatataggtaaaattttaaatatgctactaagatgtgtaattgaaaatcccaagcttaatactaaaaattatcttataaaaaaaatcaaaaccttaaaggttaatgttttccatagcttttaa

SEQ ID NO: 11061 - DNA, 1572 bp, Borrelia burgdorferi
atgaagtatttacaaactgtagcttcaatgaaaagcaaatttgatattgtagctattgtggagcaatatattaagcttgttaaatcgggatctgcttacaaaggtctttgtccttttcatgctgagaagactccctctttttttgtaaatcctttgcaaggatatttttattgttttggatgcaaaaagggtggagatgttattggatttttaatggatatggaaaaaatcaattacaatgatgctcttaagattttatgcgaaaaatccggtattcattatgatgatttaaaaataagtcgaggaagtgaaaataaaaatgaaaataaagacatggtttcaaaaatttactctttgaattctcggttaattaataccattaaattttttttaagtaaaaacaaaaaagctttagattatgttttaaagagtagagcaatatctaaggaaattgttgatttatttgaacttggttatttgccatttaactttaaaaatggtttagagcttcatgattttttagtttcaaaaggatactcttctgaagtacttagaaaaagtggtttgttctcgaaaaccaatcccaaagtttctattttatttcaaagattaatttttccaattaaagactttaaaggaaacgttgttggttttggaggtcgagatttagatgggaaaggttctaagtatattaatttaggtgaaactgaagtttttaaaaaaagggagcttctttatggattttatgagggttttgaggagattaaatctacaaaatcagttatattggtagaagggtatatagatgttcttgctttttttacatctgggattaagagagccgtatctactcttggcactgctttttcaaaagagcatttagctttaattcaaagatatgctgatgagataatattttcttttgatggggatgatgctggactttctgcaactttaaaagcttatcaaatttgtttgccgtttaatatcaatgttagtgttgttcgaatggattttggtactgatcctgcagatgttcttaaaagtgagggtgtagactccttgcaaaaaattttaaataatagatgtgatgcttttgaatatcttttggatgtttattctaataaatataatttaaataaaactgtagatttaaatgccatgattaatttatttttaaatttgataaatttatcaaaagtagatactcagaaaaaaatttttttagacaagctaagcaataaacttggtattggtgtgacaactttattgaaagattattacagaataaaagaaagatttgtagttgacaataataaaagaaatttgtatgctcataatgatgattcttatgagaggtatctaatagtagctttgttgaaaaattttagttattttagcatagtaaggcgcaatattattgatagtgatttaattaatgtcgatgccagaaaagtttttatgtgctttgaaaatttatttgaaaataataaagatttttcattaatggatttaaaaaaaaatttaaaggatacctataaagttagtgaattttttttgaagaaattttaa

SEQ ID NO: 11062 - DNA, 1896 bp, Borrelia burgdorferi
ttgtcggatttggaaaagaaatattcgaagctgatagagggtattattactcatttgggagatagaaaatctcttagttttagtgaattatcaaatttgcttcccgatgatatattagaaccagagattcttgattgtatttgttcggtacttgaggataggggaataaggttggttaataaaatttcggaattagatctggttgtcagtgaagatggaaatgatgaagaggaagaggttgagattgaatctgatagaaattttatgattttagatgatggttttcaaagtgatgaggaagatattgacattgatgttaagctggatgattgtgatgaagaagatatttctgttaaggatgatttaggttcagggtatattaaaggcaatgttttaaaagatagtcactcagaagatccaatcaagctttatttaaaggaaataggaaaagagtttttattaacgggaaatcaagaagttgaacttgcaaagcaaatggattctggagagagtataattgagaatattcttaagaatgagggacttgttatagaaaattattataatcttgtgaatactatttactcaagaatggaaagagaagagttttttaaaagagaaaaagataaggataaagagagtagtccggattattataataaaaaaaaaagaattgcctctttttacaaaattcctttaaagccaattcaagatcgtttaataagttatgtagataataagcatagggtgtatgatcttgggggggatatttttgaaaagaatttaaaaaaggaaagattggccctaaaagagcttttgagagacattcctttgtatcaagaggaattaaggattttctcagatgattatattgactctgctaacaaaataaaagatttacaaagacaacaaagaataattctaagcaggctgaaaattgaaaaaataagagatttgagggtgcttggaagagatttgactattgctgaaaaaaaaatagagatagaaaaatctctcaagcttaaagaagatgctattaaagagcagattacagaggctcagcttgcccaaaaagaacttgagagaattgagatgtattatgaatatccaactgataaaataataagcatgtcagaagagattgctaaagggaagcaaatgatgcagcatgctaaagatcagttgattaaggctaatttaaggcttgttgtaagcattgctaaaaaatatgcaaatagaggtcttcatttttttgatcttgttcaagaaggcaatattggattgattaaggctgttgaaaagttcgaatataagagaggttttaagttttcaacctatgctacttggtggattagacaagccataacaagatctatttctgatcaagctcgcacaattagagttcctgtgcacatgattgagcaaataaataggcttaatagagaaactagatatttaattcaagttttaggcaaagatcccacagatgaagagctttcagacaggcttggatgggaacttaaaaaggttaaaactgtaaagagtgtttcaagagaacctgtttctcttgaaacaccaattggagaagaggaagattctgttcttagcgattttattgaggataaggcaataaaaaatcctgcaaatcacacatcttttgtagttttgcaagatcaaataagagcaattcttggaactcttcctgaaagagaacaagaagttgtaaaaatgagatttggacttgaagatggctattctttaactcttgaagaggttggacttcattttaatgttacaagagaaagaattaggcaaattgaatctaaagcattaaggcggcttaaaaatcccaaaaaaactcaaaaattaaaagattatcttgaagatttaaattga

SEQ ID NO: 11063 - DNA, 1086 bp, Borrelia burgdorferi
ttggaattactttggaagacttttagggaggttgttttgaatttgtttaagtcttttttgatagatattggcattgatcttggaacatgtaatacattggtttatattaaagattatggcgtggttatgagcgagccttctgttgttgcaatagatataaccaaaggtaataaagttgttgcggttggtagaaatgctaaaaaaatgctttggaaaactccagaaaatattaaagccgtacgcccacttagagatggagttattgctgacattgagaatacagagaagatgatcaaatattttattaatcaaattttttctcgtaaaaaattattttttaagccgagaatggtaataggtgttccaacttgtattacagaggttgagcgaagagctgtaaaagagagcgcaatgaatgccggtgcaagagaagttaaagtaatagaagaatctcttgcagctgctattggatctgatattcctatttttgaacctacaggtcatatggtgtgtgatattgggggtggaactacagaaatatctgttatttctcttggcggcatggttgtaagtagagcaattaggactggtggtgacgaatttgatgagagcataataaagtatatgagaaattctcataatattataattggtcaacagacagcagaaaaattgaaaattaagataggaaatgtatatcccgatattcaaaatttaagggtagaaaaaatagacattaagggtacagatgctgtaactggtcttcctagaaagcaacttgttgattctatggaagtaagagagtctttgcaagaacctataaatgttgttgtggatgaagttaagcgcactcttggtgcaactcccccagagcttgctacagacattgttgagcgtggcattattttgacagggggaggggctcttcttaagggtttaaatagacttctttcaaaagagactggagttcctgtttatgttgcagacaatccgcttctctcggtagctgttggtgccgggttattttatgattatgccaatagaatagatattagtaaaaatatttacagttttatcaatgaataa

SEQ ID NO: 11064 - DNA, 1746 bp, Borrelia burgdorferi
gtgagcaaagatttagataaagaagatattctttacaaaaaaagacactcaatagctcatgttatggcagaagctgttcttgatttatttccaaataccaagattgcaataggtcctcctattaaagatggtttttattatgattttgaatttaaaaagcagattacagaagattctcttttagacatagaaaatagaatgagagaaattttaaagaccggaagttcttttgaaaaagagataataagcgtagaacaggctcttgaaatttttaaagatgaaccttataagattgatttgattaaaaattttgatttacaaaatgaagtttctatttacaagagtcacaattttgttgatctttgtagaggtcctcatgttgagaatatgaataaaattgatccaaaggcatttaagcttactagtattgctggggcttattggcggggcagtgaaaaaaacccaatgcttaccagaatttatggaactttatggaataatgaaaaagaactgagatcttatcttaatttgagagaggaaataaaaaaaagagatcatagaaagcttggaaaagagcttgatttattttctatacatgaagagattggaccaggacttgttttttttcatcccaatggtgccaaaataagagctttaatagaagatttttggagagaagagcactccaaaaatgggtatgatattctttttactcctcatattggcaaatcttggctttggcaaacttctggtcatttagacttttataaggatagcatgtttgaaaaaatagaaatggataaaagtgattattatcttaaacccatgaattgtccttttcatattgcmatttacaatacaggtaagcattcttatagagatttgccatttagatgggccgaacttggcactgtgtatcgttatgaaaagataggtgctttgcatggtatgatgagagccagagggtttactcaggatgatgctcatattatatgcacccattctcaggttttagatgagattaaagaagttcttaggtttgctatttatatgtggagtaaatttggctttagcaacccaaaggcatatctttctacaaagcctgacaaatctgttggcaatgattctgattgggaaatgtctttaaaagttcttgaagagactttaagcgattttgaagttccttatgaaattgataagggtggaggtgctttttatgggcctaaaattgatcttaagatagttgattcgcttgagagagagtggcagatgagtacaattcaatttgattttaatctccctgagagatttaatatgacttataccgctgaggatggtaaagaaaaaagaccatttatgattcatagagctttgttgggatctattgaaagattttttggaattcttgtagagcactatggtggtgcttttcctttatggttatctcctgttcaagtagtaatcattcctgttaacaatattgtcgaagattatgctattaaggtttttaataaatttaaaaatgaggggattagaataaagcttgataatagttcctcaagaatgaatgctaaaattagagaatatcaggctaaaaaaataccttatatgtttataattggtgagagagaagcaacagaagagagaatatctattagaacaagaacaaatgagcaaataaatggaatgaaacttgatgaagctcttaaatttattttatttaaaataagagataaggagatttga

SEQ ID NO: 11065 - DNA, 630 bp, Borrelia burgdorferi
ttgaataatttaatcaaggtcattacccctaataaaataacattagttagaattgcactttcctttatcatattaattttattttttttggaaaatgtatttttttcgtatttgttttttggaattatttggtttttaattatttttaatgaatttactgattttattgatggttatcttgcaagaaaatatggtcttgttagcaatgtaggtaaaattttagatccttatgcggatgttttgcagcatttaacatattttgtttttttcttttacaaaggtataaccccctattatttttttgtaatatttatttatcgtgaaatttctattgggtttgttagaaatttaattattcagtttaatgtagttcaacaagcaaattttttggggaaattaaagtcacttctttatgctgtttgcacttttgcaagccttttattttatactttaaatcaactcaactttacagagtctgttcaaaattttattagttacattttaacttttaaatttaaatttttatttattgttcaaatgacatatgtttgtgctgctttttttgcaattttatcatttttagaatatgtgttaatatttttgaatgtaaaaaaatatgaaaataaataa

SEQ ID NO: 11066 - DNA, 1332 bp, Borrelia burgdorferi
ttgtatgatatgttgaaatttgaatttagcgacaggtttttactttttagttattttgttttaattatgtttataggctctcttttgttgatgttgcctatttcctgggaaggtgatggcaaattagcatacattgatgctctttttactgctgtttctgctgtaagtattacgggccttacaacggttaaaatggaaggcttttctacttttggatttattttgataatgttgctaatccagcttgggggacttggatttataagtattactactttttatttgcttatacctaaaaagaaaatgaatttaacagatgcaagaataataaagcagtattccctttcaaatatagaatataatcctattagaattttaaaaagcatattgtttataactttttcaattgaaatgataggtttaatattaatacttatttgttttaaacttaggggagtgaatatttcattcttagaggctttgtttacgacaatttctgctttttgcaatgcaggtttttccatgcattctgagagtatttatgcatggcgagatgttcctgaagctatagttgtggtctctattttaataatttgtggtgggcttgggtttatggtctatagagatgtaaataacactattaaaaacaaaaaaaaactatcgcttcatgccaagatagttttttctttaagcttctttttaattataattggtgcaattttatttttttttacagagatgcataaattaaaagctggttattcaatgagcactttaatatttaattcaattttttattcgattagtaccagaacagctggttttaattatcttgataattctttaataagcggaagaactcaaataatttctctaccattcatgtttattggtggtgcacccggatcaactgcaggagggattaagattacaacattttttttaattgtattggctgttgttaaaaatcaaaacggcaatggatatattattggttcttacaaggtttcaatagatagtataagatttgcacttttattttttgcaagagctatttttattttaagtttttcttttttcatgcttcttttttttgagggaggatctggcaattggaaggttattgatttaggttatgaagtattttctgcttttggaacggttggtctttcagttggagtaactcaggatttgtcattttgggggaaagtcattataatttttactatgtttgcaggacgaatagggcttttttcaatggctgtttttgtttcaagaaagtcgcgttttgaagaatttacaaggccaaggcaagatattttggttggttga

SEQ ID NO: 11067 - DNA, 1347 bp, Borrelia burgdorferi
ttggtgtatagaattaaaaatgaaaatttagattttaaaatagatagcttgggagaatgcaagcaaaacaatcctttgattgatttttatgctagtgagggttcttcccattttgttaatgaaaaaaataaaatcaagtttagtgtatataggaatgaggataagggagataggtatgaagatgttcttttagaaaaagctgggcctagagaaaaaatttattttgtgcccaggcatgttaaagctgctattactacttgtggtgggctttgtcctggttttaacgatgttattcgctctattgtgcgaactttatggaaaatatatggggttcgcaatatttatggagtaaaatttggatatcaagggcttcttcctgagtcaaattcaccttttattaatcttaatccagatgttgttgatgatattaataaatttggaggtactattcttggttcttcaaggggtggtattaagcctgtggaaatagttgatactttagagagaatgaacattaatatgatttttaacattggcggggatggtactcaaaaggggtctcttcttattgctgaggagatagaaaaaagaaatttaaaaatagcagttgtgggcattcctaaaaccgtagacaatgattttatgtttgttcaaaaatcttttggatttgagactgctgtagaacaagctgttgcagctgttgctggtgctcattttgaagctaatagtgcttataatggcattggacttgttaaagttatgggacgggattctggctttattgctgctcataccgcactttcttctaatgatgttaatttttgtttaatcccagaacttgattttgacatagaaggtcctaatggatttcttgttcatcttgaaagacgacttttagagaaagaaagcttagaagagattccccatgcagtaatattgatagcagaaggagcaggccaaaaatattttgatcattttcctaagaagaaagacgattctgggaatttgctttatgaggatattgggctttatattaaagataaaattacagaatattttaaagcaaaaaatatacaatttactcttaaatacattgatcccagctatattattagaagttcacctgctaatgccagtgattcgctttattgtgctaggcttgggtcgaatgctgtgcatgctgcaatggctggtaagacaaaaatgttgattagtttatggagtacaaaatttgttcatatacctattaagatggcagtaattgacagaaataaggttaatccaaatggttctttttggagagatgttctttcaagtacggggcaaccaattagcatgaagaattaa

SEQ ID NO: 11068 - DNA, 1599 bp, Borrelia burgdorferi
gtgtttatgttaaattacaaaaatcttaatgaacttgaaaattttaaaatccttgaaggtattgctccagaagtgctcaaaacggcattaactggaaaaaggataaaagaatacgacattacaatagaaggagatagtgtacattataactatgcttcaaaacaaattaatgaaacccaccttaaaatttttcaaaatttaagcgatgaagcaaatttaatagaaaaatataaagaagtgcttgatggggaaaagatcaatattagtgaaaatagaaaagtcctgcatcaccttacaagagggcaaattggtaaggacgtaatagaagacaataaagaaaatatgagagagtttttccaatcagaacttgaaaaaatatataattttgcaaagcaaattcattctgggaacattaaaagttcaaatggcaaaaagtttaaaaatgtagttcaaataggaattggtggatctagcctggggccaaaagctctttacagctcaataaaaaattatgcaaaaaaacacaatctagccctaatgaatggttattttatttcaaacattgatccagacgaatcagaagaagtattaagcagcattaatgttgatgaaacgctttttattattgtctcaaaaagtggaaatacattagaaactaaagctaatatgcaattcttaataaacaaattaaaattaaatggcataaaagaatataaaaaacaaatggtcattataacactaaaagatagcatgttggcaatagaagaaaaaggatatcttgaatatttcttcatgcatgactcaataggtggaagattttctccaacatcagcagttggacttacactacttactctttgcttcacagaaaaagttgcaaaagaaattctaaaaggagccaatgaggctgacaaaaaatcattaaacaaaaacgtaaaagacaatgcatctctcttggcagcactaattagcatatatgaaagaaatgttctaaattacagtagcaactgcatcattgcttattctaaagcaatggaaaatttttatcttcatttacaacaacttgaaatggagagtaatggaaaaagtgtaaacagatttaatgaaacaataaactacaaaactgtaagaataatttggggaggcattggaacagatgttcaacactcattctttcaaatgcttcaccaaggaacggatatagttccaatggatttcataggttttaatgaaacacaacttaaagaagatgtaatatctgataacagctcaagcaatgataaattaaaagcaaatttaatagcccaaataatagcattttcaaaaggtaaagaaaatagcaataaaaataaaaatttccaaggcgagagaccttctgcactaatatattcaaaagaattaacaccttatgcaataggagcaatactctcccattatgaaaataaagtaatgtttgagggatttttattaaatataaactcattcgaccaagaaggagttcagctaggaaaaattattgcaaatcaaattttaaaaaatgacaattttaaagatgaagtaatagaatcttattctaaaaaaattctaaaaaaattttaa

SEQ ID NO: 11069 - DNA, 2799 bp, Borrelia burgdorferi
atgaaattgaatagccctaatttgaaaaaaataaatacgcataagctgcttatatatttaacatatttcgcagttagcttttctattatcacactctcattagcagtatctaagactataaacatacaaaaagataaaaatttcggatatgtaaatccagcagttccttcaagacttttagatattaatggaaaacaaataactcaatttatatctgatgagaacagagaattaatgcctttgagaaaaatgcctgacaatctaattaatacgcttttgatacgggaagatattggttttttttctcatcgaggtttttccttgataggaatatttagagccgcatttaatattgttcttggcagatatttttcaggcggcagcacattaacccaacaacttgcaaagcttctctacacaaatcaagcaagaagatctattttgagaaaattacatgaaatatggtgggcaattcaacttgaaaaaaaactctcaaaatacgaaatactagagaagtaccttaataaagtttattttggaaacggaaactatggaatagttgcagcatcaaaattcttttttggcaaaagtgtaaataaaatcaatacagcagaatcagtaatgatgataatccagcttccaaatgcaaaactttattcacctctttacaatccagaattttcaaaaaaaatacaacgtgcagttttaaaccaagttgtatcaaatggaatagtcaaggctgaaattgctgaaaaagaatttaatgaatactggcaaaattatgattggactagaatggctgacacatctgcaatttcaaacaaaaaagaccaagctccttatttctctgaatatataaggcaaaaaatactaaaatatttaccagatggcgcaaacatatataaagatgggtactcaatatattcaacccttgatcttgaagcacaaaaatatgcagataaagttacaaacgacatgattaataaagcaagaacaatgcacaatttaaatagatcatctgaaacaataatcattaattcagaaattgtccctgtagtagatgcgatatcagatttattgggaattaaaaatttaagaataaatggaagacaatataaaaaactgagaaaaagaaaattttacgaagacaatattgatctaattgcaagttttggagctatacttggaattgataaaatagataaggcgacaaaagaatatattatcaaaaataaattaacaccgaaacttattgcacagcctgaaggagcaatgatagcaatagatacaacaagtggagcaataagagccatggttgggggaagtggacacactaaagacaatgaatttaatcgagccacacaagcaaaagttcagcctggaagtgcattcaaagcattatattttgcagccgcaattgatctaaaaaaaataacagctgcgacaatgttttcagactctccagtagcatttctaaataaaaatggagaagtttatgctccgggaaattatggcggcaaatggagaggcaacgttttaacgcgccaagcattagctttgtccttaaatattccggcattaagaatattagaccggctaggctttgactctgcaattagctactcctcaaaactactaggaataacagatccaaaagaaatagaaaaaacgtttccaaaagtttatccactagcgctaggtgtaatatcagtttctccaatccaaatggcaagagcctttgcaattttaggaaatagtggtagcgaaatcgaaccttatgggataagatacattgaagacagagctggaagaataataacaaatgaagaagcaagcatattggctaaaataaaaaacaaagaacaccaaactcaaatagtatctcctcaaaccgcttacataatcacagatatgatgaaatcaacaattcaatacggaaccctagcaaatcaaagatatacaaatctcaaaaattttaaatcagacattgctggaaaatcgggaacaacacaaaattgggcagacggatgggcaataggatactctccttatataacaacagcattttgggttggatttgacaaaaaaggatattcactgggaatatctggaacaggaacaggattggcagggcctagttggggagaatttatggcagaatatcacaaaaacttacccaaaaaagtttttgtaaaacctgcaggaataattagcatccccgtacaagcagaaacgggtctactaccggaagaaattgctgatgaaaaaataataaatgaactatttatttccggcacccagccagttgaaaaatcaaaatattatgaaaataaacaagaatttaaaaatacaatagaatttaacatatatggaattgatgagattaataataacgatgaaataaattttgacactcctgaatttgaatatcttgataataatcttgaaagctttaataacaatagtaataatgataataatcttgaaagctttaacaataataacaatgatcttgaaagcattaatgataatgaagaaaataaaaatgaagatgaaatagaaatgaacattgaagaacccttaaatgaaatagaaaataaaaatccacaacaagatctagttaataacaataataaccaggaaatgcttattgaaaacaccaaagaaattaaagacgaagtcattgttaatgaaacaaacatagaaacacaaagcacaaaagaattaaattcaaacaacaatgaaaatgaaaaaattaacaacaaagacgtcaacggagaagatatccaattggattaa

SEQ ID NO: 11070 - DNA, 1008 bp, Borrelia burgdorferi
ttgttatgtagttattttatgaagtttttatttgatattcctcttccaattatgattttagctccaatggaagatgttaccgatactgtttttagaaatttaattcatttaataggatctgcagaaggagaacctcatatttattttaccgaatttatttctacaaaaggaattttaaatggatcaaaacaatctgttcaacatgtttttttaaaacccaatgaacttaataggcctttaattgctcagatttggggcaatgttcctgagcaattttatagagcaatagaaatattagggagcatggggttttggggaattgatattaatatgggttgtcctaagagtaaaataattaaaaaaggagtttgttcagctttaattaataataaatctttagctaaagagataattcttgcaagcaaagaagcttgtgcgagatttaatttgcctcttagtgttaagaccaggcatggattttcatatccagaagttgatgattggctggggtttttgttaggccttgaaattgatatgttaacggtttatccaagacttgctgttaatcagagcaaaggtcctgttaattttgatattttttatgaacttgttaaattacgaaataatcttagtccttctactctgattattggaaatggggatgttttgagtctcaaggaagctagatattatgttgataaatatttaattgatggaattatgtttggtcgtggaatttttgataatttgaatttatttaagcccttttcaaaacactttttagatagtaatttaaattttaggttaaatatattaaaattccatataaaggattttcatgctacttggggacttgaaaaagattttaataaacttaaaaaatattttaagatatattttactgagaaggaaagacagagtaagtatttctcaaatcttataaattcaaaaacttatgaagagctttttgaaaatttaaaagttattgacatggtaggagatttttaa

SEQ ID NO: 11071 - DNA, 2628 bp, Borrelia burgdorferi
atgaattgtagacctcttgaaaaatatgatcctaaggcatttgaagatgaaatttacactaagtggcttaaaaacaatgtttttttgccagataattctttatttgaaaaatttagtatggttgcgcctcctcctaatgttactggcgtgttgcacatggggcatgctcttaattttgttttgcaagatgttcttgtaaggtataaaagaatgaaaagacacaatactttgtggctttttggcacagatcatgcaggaatagcaacgcaggctgtttttgaaagacatcttaaaaagattggtaaaagcaaagatgattttgaaagagaagagcttgttcaagaaatttttaaattaaaagataggcatagagggataattgttaatcagataaacaaacttggggcgtcttatgatcactcaagagaaaggtttactcttgatgagaatctttgtaaggctgttaacaaggtttttaaggacttgtattttaaggggttgatttataggggtgagtatcttgttaatcttgatcctggatctgggagtgttgttagcgatgaagagattgaatacaaagaagttgatggtaagctttattttgttaagtattttattgataactcttcttttattgaggttgcaacaactaggcctgagacaatgtttggggatactgctattgctgttaatcctaatgatgagagatataagtctttagttggcaaagaagttacaattcctttgacaactaaaaagataaaagttattgcagatttttatgttgacagcgcttttggcactggggctttaaaagttactcctgcacacgatcctaatgattttgaaatttcaaaaaggcacaatatttctaaggtcaatattttaactcaagatggaaaacttaataaaaatgttcctttgcaataccaaggattaagtgcgaaagatgcaagatttaaaattgaaacagaattaatggaaaagggttttttgcaagatgttaagaagcataaacaacaggttgggcattgttatcggtcaggtgaggttattgaaccttatttgtctactcagtggtttgtgagaatgaagcctttagcagacaaagctttaaaggctttagagaatggcgaattaaaattttatcctaaaaagtgggaaaatacatataaatattggttatcaaatattagagattggtgtatatcaagacagcttgtttggggacatagaataccggtttggtacaatgttgatacatctgaacttattgttagtgatactgatccttctttagatgaaaagaatatggggaagaggtttgttcaagatccagatgttcttgatacttggttttcttcttggctatggcccttttcttcgcttggatggcccaatgttgatgttgattttaaaaattattatccaacaaataccttgataacagcttacgatataatatttttttgggttgcaagaatggtgatggcaggattagaatttacagggcaagttcctttcaaagatgtttatataacacctcttttgcgtgacaaacaaggtaaaaaaatgtcaaagtctttaggcaatggaatagaccctcttgatattattaatgagtatggaagtgattctttgcggtttactttatcctttttgtctgttcagggtcaagatttaaatattgacgctaaagattttatgtttggggctaaatttgcaaacaaagtttttaatgcttccaaatttattcttttaaatttaaaaaatagaaaaatattaaatgatttgaaatttaacgacattgacaaatggctgcttacaagcttaaattcgactattcttggtgtagagtcttcttttgcaaattataaatataacgaagcttcaaaatttgtttatgagtttttttggaatgatttttgtgattggtatattgaaattagcaaaattgatttaaataatgaaaatgttgatattcaaaatatggctatttctaagttgctattttttcttaaaaaatcattgttaattttgcatccgtttattccttttgttacagaaaaaatttattctgaatttgcagaaaaggaagatattttagctttaaatgaatatccaaattttgatattgccaataattttcaagaagaatttgaaatttttaaagtattgaaaacttttattatagctattagaacacttaagagtgaatttaatatacctgctagtgttgaaattgatgttgctttgaagtttgatgctgattttaaatatgaggcatactttaaggctaatgaaagcattgtaaaaagaatgattaattttaaaaatatattttacaatgaaaattatgatggcatgcttggtgtagctgcagttggttttgaaatttatgcagatgttaagtcattgatagataaaaccaaagagttgataaggcttgaaaagcagcttgaaaagtataaaatgctcaatatttctgtttcaaagaaacttgaaaatgaaaattttttaatgaatgctcccaaggaaattgttgaatctgaaaaattaaaatttgtagaattttcttctttaattaataaaataaataattatattattaatttaaaaaatctgtaa

SEQ ID NO: 11072 - DNA, 1698 bp, Borrelia burgdorferi
ttgaaaattaaattaattttcaagataattttgttattagaatatcaatttaggcagggtaatggtttgataactgtaagtaatttggaagttgcatttggagagagagttttattcaaagatgtaaatattaaattttctcctggaaattgctatggaataattggtgctaatggggcaggaaaaagcacttttttaaaagtattagggggaatgattgaagctagtaagggtgaaatatctatccccaaaaatcaaagagtagcagctcttgaacaagatcaatttgcttatgatggatataaggttatcgatactgttattatgggtcacaaaagactttattctgttcaaaaagaaaaagatgaaatttatagtaagcttgattttactgatgaggatggaattagagctggagagcttgaagcagaattttcagagcttggaggatacgaggctgaatctgatgcagcggttcttcttaaaggtcttggaatagatgaggcaattcataataatttaatgggtgatgttgaaggggctttaaaagttagggttcttttggctcaagcactttttggtgatcccgatgtattacttcttgatgagcctactaataaccttgatctacaatctattaaatggttagaagagtttttaattaattttgaaaatacagttattgttgtatctcacgatagacattttttaaatcaagtttgtactcatattgttgacattgattatggcaagattcaagtgtatcttggaaattatgatttttggtatgaaacaagtcagattttaaacaagcaactaaaagatgctaaaaagcgatctgaagataaaattgctgaacttaagacatttattcaaagattttctagtaatgcatctaagtctaagcaagcaacatcaaggaaaaagttgattgaaaaaataaaggttgaagatttaaagccttcttcaaggaagttcccttatgttaatttcaaaagcgaaagagaacttggcaagaatgttcttacaattaaaaatttaataaaagaatttgaagggaatttaattttaaataaatttagtattattgttgaacctcagcaaaagattgtttttttgggaaatcccatgtttgcaacttttttgtttgatattattacaaatgaagatagaaattataaaggtcattatgaatggggatctaccgttaatttttcgtattttaataaagataatggaaaatattttgatttagatttaaatttagtcgattggttacgtcagtattcaaaagaacaagatgaaacttatattagaggatttttaggtcgaatgcttttcagccaagatgaagctttaaaaaaggtaaatgttctctcagggggagaaaaagtaagatgcatgcttgctaaggctatgcttagcggagctaatgttttaatactggaccaacccacaaatcacttagatcttgaggcaattacatctttaaattccgggcttaaagagtttaaaggagttgttctttttacatcacatgatcatcaatttatagatactgttgctaataggattatagagtttactcctaacggaataattgatcgatatatgactttttctgagtatgttgatgatgctaagattagggatctgagaaataatctttatggcaataatgctggttttaggctttag

SEQ ID NO: 11073 - DNA, 930 bp, Borrelia burgdorferi
atgataaatgtagaaaaagttactaaaatgtatgggccatttacagcactatttaatgttagctttaaggttgaagaaggcgaagtacttggtatacttggcccaaacggagccggaaagtccacattaatcaaaatcttaacatcatttcattatccaagcaaaggtaatgtaaaaatttttggaaaagacattgtagagcattcgaaagaaatactacagcaaataggatatgttcctgaaaaactagctctttatccagagctttctgttaaagaatatttaaagtttatatcagaaataaaaggtgttaaaaaattaaaaaaagaaattgacagagtaataagcatattcaaattaaaagaggttgaagataagctgatttctcaactttcaaaaggatttagacaaagagtaggaatagctggcgctttaataaacaatcctaaacttgtaatacttgatgagccaacaaacggtcttgatccaaatcaaataattgaatttaaagaatttttaagagaacttgcaaaagaaagtacaatattattctcttcgcacatactaagcgaagtagaatctatttgtaaaagaataattattgtcaacaacggagtaattgttgctgatgacacaaaagaaaatattattaaaaataaacttaaagagattgaaatagaattaatagtttcaaaaaaatctgaaaatgagaaaaaaattttcaacagcaaaaatgatattttttcattaataaagcttgaagaacacgaaaaagacttaaatatttcattaaaactatctcaaggcaaaacagaagaagatctctttagctacatagtaaaaaataatataatcttaaaagcaatgattccaaaacatgaaagccttgaaaagatatttagcaaattaaccaaggagagagaaaaatga

SEQ ID NO: 11074 - DNA, 1149 bp, Borrelia burgdorferi
atgaataattttttcaaaaaagctttaacaaagctaaacaaattatctaacgaacaaaaaactaaatttattgaacaaatttacaaaaaaatagaaatatatgacggaatatttgcatcaattaatgaaggaatcattgtacttgacaaacaaaacaatataatctatgcaaacaagattttataccaaattttagctttaacatctaaatcaaaaatagaaattcttgatgacattcaaattccaaacttaataaatttaataaaagaactagttagaacagaagataaaataataggattagaagttccaatctcaaacggcatatatattaaaatctcatttatgccttatgtaaaagaaaaaaaacttgaaggcaacattattttaatcgaagacattaaagagaaaaaaaagaaagaggaactatttagaagagttgaggctttggcctcttttacaaggcatgcaagaaatattgcccatgaaatcaaaaacccacttggagcaatcgatataaatttacaactgctaaaaaaggaaattgaaaaacaaaaaatgaaaaatggtaaagctgaaaattattttaaagtaataaaagaagaaataaacagagtagataaaatagtaacagaatttttactaactgtcagaccaataaaaattaacttacaagaaaaagatattaaacaagtaataggcagcgtatgtgaattgttaaatcctggattagaaaataaacacataaaactattgcttaatttaaacaaaataagcaatattctcattgatgaaaaactattaaaacaagttattataaacatcgttaaaaacgcagaagaagcactgcttgaaacaaaaaaagaaataaaaaaaatagaaatttttctcttcgaaaaagacaataaaatacatatcaacataaaagataacggaaacggaataaaagatggggtaaaagaggaaatatttaagcctcaatttagcacaaaagaaaaaggaagtggaataggacttactatttcttataaaataataaaagagcttggaggtgaaatttttgtggaaagcaaagagggcaaaggcactatttttacaattacgctgcctaaactaaataaaaaaaatattttaattgaagggtattga

SEQ ID NO: 11075 - DNA, 1092 bp, Borrelia burgdorferi
atgtcaaataaaaaaataatattttttacagggggaggaactgggggtcacgtatttccaggaatttccatcatacaaaaattaaaagaatttgataatgaaattgaatttttttggataggtaaaaaaaattctatagaagaaaaactaataaaagaacaagataatattaaatttatttcgattccatgcggaaaacttagacgctatttttcttttaaaaattttactgactttttcaaagtaatacttggaataataaaaagcttttacgttttaaaaaaatataaacctcagcttatttacgcaaccggaggatttgtttcaactcctgcaattattgcatccagcttgctaaaaataaaaagcataacccatgaaatggatctagatcccggacttgcaacaaaaattaactctaaattcgcaaataacatacacataagctttaaagaaagtgaaaaatacttcaaaaattacaaaaacattatttacacaggatctcctataagaagagaatttttaaatccagatcccaaaataatcaaacaattgacacaaaacactaacaaaccaattattagcatacttgggggatctcttggcgctaatgctttaaacaaccttgcactctgcattaaaaaggatgctgaaatctacttcatccatcaatcggggaaaaatttaaatgacctaagcgaaaagaattaccttagaaggcaattttttaacgcagaagaaatggcaagtatagttaaattttctaatctaataataagcagagccggagctggagcaataaaggaatttgcaaatgctggtgcatgtgcaattttgattccatttaaaaaaggctctagaggagatcaaattaaaaatgcaaaattactaacaaatcaaaatgcctgcatttatatagatgaagatgaaattttaaatataaatattttaaaaattataaaaaaaactttaaaagatagagaaaaaatcaactctctcaaagaaaatatcaaaaaattcaataataagcattcttcaactttaatagccaaattgctaataaaagatattaaggagacaaaatctaaatga

SEQ ID NO: 11076 - DNA, 1041 bp, Borrelia burgdorferi
atgaaagtgcttggaatagaaacctcttgtgacgactgttgcgtagctgtagtagaaaatggaattcatattttaagcaatataaaattaaatcaaaccgaacacaaaaaatattacggcatagtgcctgagattgcctcaagacttcatacggaagctattatgtctgtttgtataaaagcactaaaaaaggcaaatactaaaatatctgaaattgacttaatagctgtaacatctagacctggacttattggatctttaatagttggattaaactttgccaaaggtctagcaatttcattaaaaaagcccattatttgcattgatcacatcttgggtcatctttacgcccctttaatgcactcaaaaatagaatatccatttatatcattattattaagtggtggacatacattgattgctaaacaaaaaaatttcgatgatgttgaaatacttggaagaactctagatgatgcttgtggagaggcttttgataaagtggcaaaacattatgatatgggatttccgggaggtccaaacatcgaacaaatatctaaaaatggagatgaaaatacatttcaatttccagttaccacctttaaaaaaaaagaaaactggtatgatttttcatactctggactaaaaacagcttgcatacaccaactcgaaaaattcaaaagcaaagataacccaacaacaaaaaataatatagctgcaagcttccaaaaagctgcctttgaaaatctaatcaccccactaaaaagggcaataaaagatactcaaatcaacaaattggtaatagcaggaggtgttgcaagcaatttatatttaagagaaaaaatagataagcttaaaatacaaacttactaccctcctcttgacctttgcacagacaatggagcaatgattgcgggacttggatttaatatgtatttaaaatatggagaaagtccaattgaaattgatgcaaattcaagaatagaaaattataaaaaccagtatagggggaaaaataatgaaaagaattttagcaatgcatga

SEQ ID NO: 11077 - DNA, 882 bp, Borrelia burgdorferi
atgtttgtattttatattaaaaaaaacaagtttattattgtaatttttattataatttctattgttattgcaataactcaggcatttgcaagttttttatattttaatgacaattcaaaaattgcaaatgccccacttaaaaataggtttgaaaaaacacaaaaagaaagcttaataataaaaaacaacaacgaggataaaaaagccaaaagcaaacctaagttttacttaatcattgacgacgtgggctatgatgaatttatgttagaacaatttataaaacttaatcttaaaataacttatgctattattccatttttaccaaaatcaatgagtttatacaaaaaactaaaaaatgctaacaaaacagtaataatacatttcccaatgcaatcaaaacatagaaattcaatagaaaaatttcatataaacataaaagataaaaaagaagaaatacacaaaaaaatcgaaaaagcatttaaaaagtatcctgatgcaaaaataatgaataaccatatgggaagtttaatcacttcaaataaagatttgatgaaaatcattttagaaaagcttaaagagattgacagatattttttcgacagcgtaactattgcaggaagcgtaccagaaataataggcaaagaaattggagttaaagtagaaaaaagagacgtatttcttgatagcaaagacacagaagagtccgtaacaaaggagcttgaaaaagcaaaaaatattgctagaaaaaatggaatggtaaaagtaataggacacatttggtctaaaaatacgctaaaagtccttaaaaaagaaggacctgatttaaaccaggaattcgaattcgacaacttattaaatctttacgaggaaacaatcagatga

SEQ ID NO: 11078 - DNA, 312 bp, Borrelia burgdorferi
atgtatgcactggtagaaataaatggcaagcaatataaggctattgagggtgaatttttaaaaatagacaaaatttctcctgttgaaaaagataagttggaatttaatagtgttttgcttattaataaagacggagaggttaaaataggaaagccttatgtcgtaaattctcttattagatgtacctataaagaagataaaaaagataaaaaggttgtttcttacagatacagaagaagaaaatcaagtgagagaaaagttgggcacaggcaaacctattcttatattttggttgatgaaatagttttttaa

SEQ ID NO: 11079 - DNA, 246 bp, Borrelia burgdorferi
atggcaacaagtaaaagtggtggtagttcaaaaaatggacgagattctatatccaagcgacttggagttaaaagaagtggtggtcagtttgttaaagctggagagataattgttagacaaagaggtacaaagtttcataaaggtaaaaacgttggtcttggaagagattatacaatatttgcgctttcatctggtaaggtagagtttaaaactttaaaggggcgaaaatacgtaagtattgtttag

SEQ ID NO: 11080 - DNA, 987 bp, Borrelia burgdorferi
ttgtataactttaaggactctgtaaatataacggtagtttcgggcaatggtggttctgggtgtgtttcttttttaagagaaaagtttaatgcaaaaggtggtccagatggcggaaacggtgggagtggtgggagtgtaattttcaaggtgagggaaaatcttagcactttatctttttacaaaaatggtcatgtgctttgtgctgaaaatggtaaacctggaatgggttttaaaagaagtggtgctaatggtaaagatttaactctttttgttcctccaaatacagaagtttataatgaaaatgatggaactcttttgtataggcttaaaaatttaaatgacgaatttgttgttttaaaaggtggcagagggggtcttggtaattggaattttaaaacttcagttagaagggttccaaggtttgctcaacctggagaatcgggtaatagtttgagcgtgcgtcttgaactttttttggtggcggatattgggcttgttggattacccaatgctggtaaatcttctcttcttaataggataacctcagcaaaatctagggtcgcaaattatccttttacaacaaagattcctcatcttggtatgctcaggcgttcttatgatgatttgattattgcagatattcccggaataattaaaggtgctagttttggagtagggctcgggactaaatttttaaagcatattgctaaaactaaaattttagctttggttattgatatttctgaagcaaattttttggagtcatataacattcttttaaatgaattaaaatcttatagccataagctttttaataaaaaaaaaattattattgccaacaagcttgatttggacggttctgagaaaaattttgattgcctgataaaagccttaggaaaagaaaaggttgttggcatctctatttatgagaatagaggaattgatgaacttattaaagaattttttattttggctaaaactttttaa

SEQ ID NO: 11081 - DNA, 645 bp, Borrelia burgdorferi
ttgggacgtcgacaagtggtaagtcaactggttttggtccagtcattcgagggttcgaatccttccgtcccagtattttacattaggagttttttggtggaaaatagcagggttttaagttgccaatatagatcaagctttggatcttctaatgctcgcagaataagagctaagtctgaaataccagctgttgtttacgggcaaggtaaggatgtttcacacttgagaattaagagtagtgaatttaataagaaatttgcaaaatttacggataatactgtcttaatattagatgatggcaagcttgaaagatgtgtttttgttaaagatgctgcagaaaatattgccagcaagctcatttatcatattgatttttacgaagtagataggaatgttgagcttgaaaaatatgttcctattaagcttattggagcttctattggggttaaagaaggtggaattttgactgttttaaaagagcaggttaaggtaaggtctttgcccttggatttgccagaattcatagagcttgatttaactcctgttaataaaggagatagcgttcttcttaaagatcttgtgttgccttctaatgttaggcttgcagaaaatgacgagaatttggaagttgttattataaagtga

SEQ ID NO: 11082 - DNA, 1323 bp, Borrelia burgdorferi
atgcattttttagacgaaaatatacaaattaaaatagataaattttataaaaaaaattctttagataaaaatcgggttattgttgctttttctggcggggctgattctacggctttattattgaatttaaaatattacctgagcaataatgttattgcattttattttgctcattttattagatctgataatgagcaaaatcaagagatagagcatgtaaaggggttttgcgatctttacaatattgctttacaaattaaaaaatgtgatatagatataaaaagtgaatcagctaggttgggagtatctattgaggagcttgcaaggaaatttagatatattgctttagaaaatgctcttaaagaaaatggcgcaaattatattgcacttgctcataacgaaaacgatcaaattgaaacaataattatgagattttttcaaggatcttttttggatggtctttcaggtattcctagtgtcaatagaaacattataaggcccttgcttgaggtttcaagactagaaattgaaaattttttatctttgaataatattgggttttttgttgatagtacaaatgctcaaaatttatatctaagaaatagggttagaaataatttgctacccgctataaaaaaggtttttaaaggatatgaaaaatgtcttaaaagaatatctgaattttcaaaggaatttgcggattattttggaaaagatgaattttttcctgttgagaaaggtaaatattattattcttttgatctgaaaactttcttagattttcctaagtatttggtatttagattgatttttaaaattttaaattcagaaggaattgcagccaaagtttcttataaagctcttaatgaagcgtttaaagtagagattaataggaaaaaaaataatgttttgttaaaaaccaatgatttttttttagaaaaaaggcataataaaattaatttaatttttaaaagggatgaaaaattttacaaaccttttgattttattttggaagttggtaaatggcatagtttatctttaggtaagattttgctaaaatatttagagtgtaatgcagcttctgtatcaagattaaaatgttgttcttatgagtttaggtataaattttttaaggatagattgaaagcaaaaaaatttttttctaagtttataaggtgtaatccggcttatttaatgttgttagcattagataacaggttaattgggattattgatttaaatactttaaacttagtatggagtgaaaaaagcattcttaaaaaaattaatatatctttgattggagggcttttaaaggaatga

SEQ ID NO: 11083 - DNA, 1920 bp, Borrelia burgdorferi
atgaatggcaataataatatgaataacaatggaaaatctaacaacaaaaaaaagaataaaaattggattttaggacttgttgttgtttttctaatttcagcaatatttatgtcatattttataagggggggggaaagctataaaaatgttccttatagcacttttcagagttatttagacaatggtctagttgagtctgtagtaataattgataaaaatttgattcaatttgtcgtcaagggttctaactttgcaaagtcttatttttctaccagcattccctatcttgatataaatttactttcagaactaaaaaataaaaaagttgagcttagctcagggaaaagtcaagcttctctgattggggttttattacaaactttgccatggattttgttttttattttctttttctttatatttcgtcaaactcaaggtggcggtgggaaggtttttacatttgggaaaagtaatgctcaaaagtatgaagctggaaagaataaaatcacctttaaagatgtggctggtcaagaagaggttaagcaagagcttcgagaagttgtcgaatttcttaaaaatccaaaaaaatttgaaaaaataggtgcaaaaatccccaaaggagtgcttttagtgggctctccgggtactggcaagactttgcttgccaaagccgttgccggtgaggctggggttagtttctttcacatgtcaggctcagattttgttgaaatgtttgttggggttggagcaagtcgtgttagagatttatttgataatgctagaaaaaattctccatgtattatttttattgatgagcttgatgctgttggtcgaagtcgtggtgcggggcttggcggtggtcatgatgaaagagagcaaactcttaatcagctgttagttgaaatggatggatttggaacgcataccaatgtaattgttatggccgctacaaatcgtcccgatgttcttgactctgctttgcttaggcctggacgatttgacaggcaagtaacagtttctttgcctgatattaaggaaagagaggcaatattaaatattcattctttaaaaacgaagctttcaaaagatattaatttacaagtaatagcaagagctactcctggagctagtggtgctgatcttgcaaatttaattaatgaaggagccttaatagctgcaaggaataatcaagatgaaattttaatgaaggatatggaagaagccagagataaaatattgatgggagttgcaaaaaaatccatgactattactgataggcaaaagcttgagacggcttatcatgaggcaggccatgctttgcttcactattatcttgaacatgctgatccacttcacaaagttaccattattccaaggggcagggcacttggtgttgcattttctcttccaagggaagatagactttcaataaacaaacaccaaattcttgacaaaataaagatatgctatggtggttatgctagcgagcaaataaatttgggtgttacaacagcgggtgttcaaaatgatttaatgcaagctactagtttggctaaaaaaatggttacggagtggggaatgggtgaagaagttggtccaatatttttagtagacgatgaagcacctattttccttccgaaagagttttcaaaggctaaagcttattctgagaacactgccgataaagttgacagagaggtaaaaagaatacttgaagaatgtttaaaagaggcatcggatattcttttaaagcataaggatcaacttgttaagcttgcaaaagaacttgttttaaaagaaactttgacagacaaagaagtgagagagcttttgggttttgaagctaataaggatgaatacgatttattttcatcagactctactacaaaagaagtaaagggggaggatgtaaaaggttag

SEQ ID NO: 11084 - DNA, 1488 bp, Borrelia burgdorferi
gtgtttatgttttatttgaagatgggtttcattctttttatttctataaacctatatgcaatttcagtcaaagaagatgaagatatttcaagtattcttttcaatgagtctaaaaatttttccaatttacaaaaaggaaatgatttaatttatggatctcttgatttcaatttgctagcttcagatgctctttatgagctttcattaaaagagaatgttgctttaacggataaaatttatttattaaaagaagcaattaatattaataactttaaagcagtaacccttaaagaagtatacacttattatttttcgttgcttttaagacaaaatgaaaataagaatatgtatgaagaaattattactttgtatagaaacttgaatgaagaattgcaaatagacaaagatttaatttgcatgaggcttgaagcttctggaagacttgaaagttttggagatgatttcaaaaaaattttatttaaggctttttctttatatggtaatgattttttattttttaaatggtttttaaaagaagataggtttttttttagcatctttaatactattagatcaaaagaagattttttctttacaaccgaaaacattaattatatatttagaaattcaaattttaattatgacaattctgtttctttgttttcttttcttaagggcaaaattaaagaatataatggaattcacggtatttattttttaaaatacaaacttttagatcctgatgaagcttataggatttttaaaaaatttcctcctgagacaataaatgaatataaaatgttttatgatcttttagaggatcccgacatgaagagtaaatttttagaagattataaaagtttgtcaggaatttattgcattgataataaaaataatgttgccatactaaaagatggagttttagtaggcattttttcaggaatagtagattttgacagcaaatttagtttaaatagcaaatattttaataaaatttattttaaagataagtctccagtttattatgagaatagtttgcttggttataaaataaattattctgtttatccttatgttgatatgattgaggttcaatatcctgataaaagagatgtttatacctttgctttacatgcttttaagtttaatctttttaacaatttgggctgcaattttaatagttttgggatcagagagttgttcttgattgatattagggatttttttattccaaatgctttaaatttattttttgaaaaaacttctgttttggatattagatcaagcttgataagtaaaaaaaaatattttggatctaatttggtagaaattaaaaattatgtggttggaagtttggtttcaatttataaaaaagttaatagttctaaaaaatttaattatattgaaatttatgagaagaataaactaaaaataaagaaagctttgttagatgatgatagttttgaaagctattattcttttgaataa

SEQ ID NO: 11085 - DNA, 1104 bp, Borrelia burgdorferi
ttgggtttttgtttagactttgctaataaagaagatactaaattaaataacattgtctctgttagtcattttgattttagggtaaaaataaacttaattcttgtagttggacccatgggaagtggaaaaacagaatatgctgcaaaaatttataaagattcgcttgttgtaagaaaaaaatctttcaaggtattgggcaatattattaaaggaaatagaagtagggttaatgtattttttattagaaattttctcgacaagaggaggtttcaagattatccagaaaacgtaataccatatagaggcggtggaaaagataaaattgatgagattggttatgctagcaactcttttgatattgaaaatttaatagcctctaatcctagttgtggcacttttattattgatgaggcatgtttttatgatgaacgtttaatttttgttttaaataaaatttcatcaaatgagaatattttatttatattacctacactgctttataattttagaaaagaatctttcaatgatactgccaaacttttagtagaatattcagataagatttataagcttggagcttattgtgggcacattgattgcatggaagaatcttttttttcgtataggtattatttttacaacaataaagaaattccagctccttattttgatcctttgcttattgttggtggcgatgaagagattgaatctgctatttacccaaattactctacaagatgttcaatgcaccattatcttataggtaaggaatattttttttcttttttaaagccatttgctttgctatattcacaaggagataaaaaatttcttgaaaatgaaattgtagcactaagcactgatgttgaaaattctaattttgtaaattctttagatagtgaaaaagcgcgtgaatttagagccgaaattttaagaaatattttagaattgccttttttagcagaaagagccttaataactcttttctcagaatatagtattttgagtaaggataattttaaagatcttgtttttaagttttctttaaataaggattatataaataaaatttttttttccaaagagggcaaagagtttttttaa

SEQ ID NO: 11086 - DNA, 774 bp, Borrelia burgdorferi
atggaaaaaattattaaaacaaaaataaaaaatggcaaaatcaacaatataaatgtcttacttctcaaaaacaacaaattcatacactctatcgataattattattatataataattatcgataacctaattattgacaccaaaagaaaggaagaaaaaatatttgtgattaaaatattgaaaaacttttattgcatagaaggaattgatggaagcgggaaaacaagcatcactaataaactaaaagctctttgcaacgatgaatcaaggtattattttacaaaagaaccatcaagtggaataattggagaaatgataagaaagcaattaatgaattttgaaaatcctttagaagaatcaacatttgcatatctttatgctgcagaccgacacgatcatttatataaaaaaggtggaatactggaaattttaaacacaaaatctagaaaaataataactgatcgctatttattctcatcgattgcatatcaaggaaaattaggatatgaattaaataaaaatttcccattgcctgaaaaagtattctttatcgaaacagacccaaacatagcttatgaaagaatacagaaaaatagaacacaaagtgatctttttgaacttgaaaaatataaaacttttgaacaaattgctctaaaatatttaaaaatatttaaaaaactagaaaaaaaaattaatgtgatttacatcaacaattcaataaaagataatttagataaaaacgcaaaaaaaattttcaatctaataaaattctaa

SEQ ID NO: 11087 - DNA, 4398 bp, Borrelia burgdorferi
atgaatttgttgtttttgagaagtaagacatttatattgttgattttgccattttttatttttgttttaataattttttccattaatctatttgttcaagctcaaatttattctgcaaagttttttgctataaaatatcttgaatcaaaatttggctttaagattaaatatgataaaatttcaccgtatttcttatcatcaatcaagatagacggtttagagttaagcttggatggaaaagataaaatattaatagatattgttaggatagatttaaatctgtttaaattaattttgggtgatgaaaatattattttaaatgtttatgttaaaggaagtaatttcaattttgatataaacgactttagtttatctggcgatttaaatcctagcaatgcctattctgacaatgaaaatacagtttttaataaaattttaaactacctttatagattaaatattaatttagaaaatatcaatattaatatcaagcttaatgataatagttggcttaattttcaagttaaaaatttttccttaagtaccgtagatgaagattttttatttagctctgtagttgattttagtgctgttaaaaatttagaaattaatttaccctttgaaagagttgatgatggaattttggattcaactttctattttgaggggaaattcaaaaaaggctttgaagatggctatgttaattttagcttttttgaatttaaaacaagttatttttctttacttgagcaggggttccaaataaattattcaaaaggaaatttaaaaatttttaatttacgaagagagaattttgattttaatttaagttatgacaaggctaatggttttgttcgattagatgctttatttttcaatgttagtcttttagattggattaagctaaacaaaggctttgaaatttataaagattattttgatataagtttaaatgggcaattggcattttcttatgattttaaggacaaagatttaagatatgcaggaataatagattcatctttaaatgtagatactataggaaaagaagttcaaggcttgcagcttgaaatcaagggggatgatagaattgtaagtgttaagaatgcttttttaaagcttaaaaggggggttgtaaactataaaggttattattctttgaaagatttgcttccaatgggacgtcttaactttaagtctgcaaaaattttaaactttaacgacctaaatgggtatttagattttaataaagataaagatattttttcggttaagtctgataattttagtcttggaaatcttagttttcaaaatttaattttaaaaacttattttttaaaggataaaatttttgttgactatttgatttatttagaaaataaaaactctcaaatttctttaaaaggagatcttaatgatgaagaattttctttaagcttaggtattaaagaatttcctttgctttttttaaaagaagttattcccagttctcacttgataaatttttttcccaagactttattttcaggtaaatatttaaatttggtttctgattttaattttaataaatttaattatcataaaaataaattaaaaaaattcaatttcatggtattttcaaagttagacaatttcaaatttgtgcttgatgccagtggagaaaaaaatttttacaaatcaaacaattttgatttgcagtacaatgatcacaatttgcattctaacttgtttgttgaactatttgaaagtgggtttaatattagcacgaatttttcttatttgaataaagtttatcctttgcattttaatgttaatcttaaagataagtttattgttgccgaatctcctcttggtattaaattagattttaattattttgattctaaagtagtttatacccttaatgttaatgattttaaggtttacaataaaacctctgatcttttaataaatataaattttaatgggaactatttaggccttaatgaagatttgaaatttaaaatagacgagtttaatataataaaagtttctaaaacacctgcctataatttcaactttggttttaagggcttatatgaatatgataaattgtacatttctgatgttaaacttataaacaaactttcaaatttgcaaggatatggacaatttaatttaaaagataattttaatggaagtttgaatctattttctagcttaaattcagagagatattttttaggggttaattccgatgaatatggaagttattttttgcttaaatttcaagacttagatttttacaattttaattctttctcccttttagagggaaaggttaatggtaattttttgctaaattttaaaaagaatgattttaaaaattattctttgagtggatatcttgaggcakataaattaacttttttgggcgttcccgttcagttttctatgaatttaggattattggataataagcttaacatatatgacataaaagccaagcgcaataaaaaagagtttcttaccggaagcttaagatatgacctaagcagttctataggggtatctaatatagtttttaatagcgacttgttttcttacaggtttaatgcaaattttagaaatttccaaagtggagttgaagagcaatttggagttttgaaaaccaaaacagagggcgaatttttctttagagacattaagtataaaaatgaatctttatccaatcttacgattgaatttagcaatgattttgaaaaatttaatatggcttcaattgattatgaccttgttaatgttttatatcattatggcagtggggaatatagctttattttaaaagattatttgccccttagttttaattcgtcaggcaaaataattaaaaataaaattcttggaaatgtgagagatattaaatttgattcaaaaataatcaccaaagattttttggattcacattctttatttaatgttgacaatcattttattctttacgatcttgttttaaatggtgaattcgatattgatggggatttgtataatcctaatattaatggaagtttaaatattcaaaaaggatcaattagcactgagtatttaagagcttctagaaaatttggtggtgatagagctttagaaatatttgatatgccagttgcaattcaggataataaaatcatttttagtaatgagtttaacctagatcgatattccaagatttttgtttctactagtttaaatttaaattttttaagtgatactattattgattattacaaaatagatattaatgtgactggtagaacgggagttcctattaaatttgaaaaaattgccttaagctttacaggctatgctttaggcgatttttcaattgaaggaaatgctgatgaaattatgtttaaaggcattttaaatatttcaaatgcttgggtttattctcttgaaagttctgttgttgatttattaataaatcctttcaaacgagcaaaaagattgcaaactgatattaatcttctagattttgatattttaactgatcttgagataaattttgacagcggtgttacttttcattggccagatagtaatatttcttttttacaagctactatttcaagaggggataaacttgtaataaaatctgacacaaaaacagatgattttattattaagggagatttgaatattgcaagtggttttgttaattataataataaaaaatttatttttaaaagcggctcttatatatcctttaatgagagtagggctaaatttgatccatggataaaagcggaggctacaaatactattaaggatagaaatgataaactgcttgttacaataagcattgatagtcctttaagtttatggaaaattgagtttatgtcttatccttctagaaatgagcaggaaattaaatatttgctttcaggctcaacaataggagggtatgagggaggattgcgatcggcagggactaatgctgctgaaatggcaattggaatagtaagtgacattgctcttgattttttaattcaacccattgaagattatatgcgttctgtattaaacttagacttgttgagtataaagacagatatattgaaaaattctattaatagtaattttttcaaaatcgggaatcctacttttgttgatgttcttgacaatacaagtgttaaggtaggcaaatatcttgttgagggtgtttttattagtgggggctttggttttttgaaagaacaaatgtctcctttttcaaaagatttaaattttgttgtcaatttgggtattgagtttgattctccattttttttggttaattatgagtttgattacaattttatgaaaaaaggtttagatggaataggaaataatataggcatttcttggaaatttaaatattaa

SEQ ID NO: 11088 - DNA, 2589 bp, Borrelia burgdorferi
atggaaaaaaatgttaccccaatgataaggcagtatttagatatcaagaaaaaatataaagatgctgttctttttttcagagtaggaagtttttatgaaatgttttttgatgatgcaattgaggtaagcaagcttcttaatttaacgttgacaaaaagagaaaatgttccaatgtgtggggttccttatcataccagtaaagaatatataaggaaattaattttatttgataaaaaggttgcaatttgtgaacaagcgtccaattctacttctggggggcctttagaaagagaggttgttgaggtaataaccccaggcgttattattgatgaagattttttaaatgatgatattaataactatttagttgctattagtgattataaagattattattcgttttcttatatagatttatctacttccagtcttggaataatgttttatgagaatggtttttttgaaaaacttaaaagggatcttgagaaatactctcctaaagagataatagtttctgaaaatttttattatgaatactcagagaagcttaatcttagtagatttttaattaacagagttcctacttggcatcttgataaggatattgcaataaaaacaataaaggagcattttaacatacttggattgagctctcttggatttgatgaggaaaagccctattacatttcaatttttcttattataaatcatataaaaaataatttaaaaaatttattaagtaatattgataaaatagatatcaataatgattcttcgtacatgtttcttgatgacgtaactcaagttaatcttgaacttgtaaaaaataataatgatttttcttctcaatattcattatattctgtgttaaatgattgcaaaactgcaatgggaaagagacttttaagagaatttattttaaatccaattttaaatatttctgagattaataccaggctagatcatgttgaatttttttgcaaaaatattagcttgactgtgactttaagagaaacttttattaatatatgggatattgagagaataatatctaggattcaaatgaaaagatatattaaaaaagattttttatttattgaaaaagctctttctgtattttttacggtaaaaaagttatttgacaagcataattttgattattggaattttgataaatttgaagaggatagtatttctaaagtttattttttgataaatagtgcaatttcaagtgcacctgatgaacttattaaaagaggttatgacttaaagcttgataacttaaaagatttaaagattaatgcaaataaatatattgatcaatatcttgaatcagagagattgcttagcaagattaataacctaaagattagaaaaactaataatagggggttattttttgaagttacaaagagtaattatgctcaagtgccaccacattttatggaaagccaagctttaaattcttcaaaaagatataaaacagaaaaacttatttctcttgaggtggatattaataatgctgaagataatgtggttgcttttgaacaggaaatttttgatgaaatagcatcaaatgttgttatgcataataaagttcttaaaaaggttgcagaattttttgcatatattgatttagttgttaactttggttatttggcaaaaaaaaatgaatataaaaggcctgtattgacatctggtaaagaaattcttcttgaaaagtctcggcatcctgttgttgagcactacactaaaaatactgaaatctttactgaaaattttgtaagaattaataaagaaaagtatttttgtttaattactggacctaatatggcaggtaaatcaacctatttgcgtcaggtggctttaattactttaatggcgcatataggctcttttgtgccagcttctaaagctttaataggtattacagataaaattttttgcaggattggagcaagtgataacattgccaaaggggaatccacttttttagttgaaatgaatgaaacagccaacattttaaggaatgcaacagaaaagagtttaataattatggatgaagttggaagaggtactagcacaaatgatgggcttgctattgcttattctattatagagtatattttagagtatattaaagctagaagtttgtttgccacacattttcatgaattgtcgtctattaatcatcaggcttttattaatctttcaatgaaaattgaaaagcagggcaacgatcttgttttcttaagagaagttgaagaaaagccatctcttaattcttatggtatttatgttgctcgcatagcaggacttcccttaagggtaatagatagagctaatgttattctagaaagtttggtgggccgagagggcaactcttgtttagagtttcttccccatgtttcttctgatggtaatgataaagagatcttgaaaaatgacactgatattcatattaaattaaatgagtatttagagttaaaaaattttatttctaacatagatattaataatattactccttttcaatcaattgagctgttaaatcaaattgttttaaaggttatttctcagtccagttag

SEQ ID NO: 11089 - DNA, 1449 bp, Borrelia burgdorferi
atgataaagggcacggggcatatgattgtaaatattgcaaatgatcgtggcatgagtatagattctattagaaaaacaattaaagaatcagtattaatagcttataagaagtattttggaagcaatgagaatgcttttattaagtttgatgatgatacgggagatttgtctgtttatgcaaaaaagaaaattgtaaaagaggtaaaagattctttgcttgaaatattagaaaaagatatctcaaaggaaaatattgtagaaggtgattatgcttacattgaaattaatcccaaagtttttgataggctttctattcaggttgcaaaacaaagaaccaaaaatgacctgcaaggaattgaggataatgagattttatcagaatttaaaagcaagttgaataaggttgttattgggtacgttcaacaaaatagaaatggtgatctttatgttaatcttggtaatacggatggtataattcccaagaaatatcaatcgccaagagaagtttataaccttaatgataagattagagttttagtttataatgtcaaaaagggtaaaaatggtattgaagttattctttctaggacccatccaaagtttattgaagagcttttagcgcttgaaattccagaaattgaagaaggtattattaagattcataaaatagttcgcgatcctggttacagaatcaaagtcgctgtttattctgaaaaagaagagattgatcctgttggtccttgtataggacaaaaaggagtcagaattcaatctataattaaggaacttgaaggagaaaaaattgatattattccctatagtaaagatattaaagaatttataaaggattctttgactccttcaaagatagaacatgtttatattcttgacgaggatttacataaagctttagtggttgttagtgatgaccagctttctcttgctataggtaaaatgggtcaaaatgttagacttgctaatagacttcttgactgggctattgatgttaaaactagcagtcaatttgcagaaatgaaggctaattcggagtttaagcaagaaacactcgaaatgtttgataaagttatgcaagatgttgttgaggaggagcaatttgaagagattagtaaaataagtgatcttaaattgcttgatccttctgtgatttctaatttatcaaaagaggggtttgatgatattaacaattttttacaagcagatgagggagtgctttttaatcttggtgtaagttatgaaaaacaagaagaaattaacaaaatattaaaagaggggatgataataattgctaatgacaatgatgagtctatggaaaaggtagaagaagatgaagagcttctttgtcctgaatgcggtgttgttattaatgaaaatatgacctcctgtccgggttgtaaaatagggcttagttttgagtttgaggaggagtag

SEQ ID NO: 11090 - DNA, 2649 bp, Borrelia burgdorferi
ttgtcgaaaaatattgatgatattaaaaatgaagatggcaaaaaagttaagattattaagttgaaaaagaaggtagtaaaaattgtaacatataatgatttaagcgttaaaaatgattcaaatagctttgttgatttgcataataacagcaataaggctgaatattcgcaaagtagagacaatagaactggcgggtattcacaaaatagggacaatagagctggtggatattcacaaaatagggacaatagagctggtggatattcccaaaacagagacaacagaactggtgggtattcacaaaacagagacaacagaactggtgggtattcacaaaacagagacaacagaactggtgggtattcacaaaatagggataatagaggtggatattcacaaggcagagacaacagaactggtggatattcacaaagcagggacaatagaactggtggatattcacaaaacagggacaatagaactggtggatattcacaaaacagagacaatagaactggtggatattcacaaaacagagataacagaactggtggatattcacaaaacagagacagcttatcctttcaatatcaaggttcagtaaagaaaacatatgttgccaaaaataattctcaaaataaatatactactacttctatgtcttttagaagacttataaaaactaaagttcccgctattgttagcagcacacctgcagcggattctgagaatagtaaagagttaaatcgtaagcttggcgagaaaaaaaaacagcaacaagagagtcaaaaaagctataagagaaaaaaagcagaaactgagagcaaaacaattgaacaaaaagtttttgaacaacttcagaaaaagaagagagaaaatttagccaaccctattccaaagtcaattgacattatgggtagcattactgtttctgatcttgcaagaaagatgaatttaaaatcttctgatttgattgctaaattaatggctttgggcgtaatggttactattaatgaaaagatagattctgatactgcaactattttagttgaagaatatggttcaaaagttaatgttgtctctatttatgatgaaacggttatagaagaagaagtggaagatcaaagcaaaagagttgaaaagcctcctgttattacaataatgggtcatgttgatcatggcaaaaccaaactactttctgtgcttcaaaatatagatataaatcaaacagagtccggtggtattactcagcatattggagcttatactattgtttataatgatcgagaaataacatttttagatactcctggtcatgaagcttttactatgatgagaagtcgtggggctcaagttacagatattgttgttcttgttgtgtcagcaattgatggtgttatgccccaaaccattgaggctatcaatcatgcaaaagaggcaaatgttccaattattgttgctataaataagattgatttaccagattcaaatcccgataagattaaacaccagctttcagaatacggtttagtatctgaggattgggggggagatactatttttgtgatgatttctgctcttaaaaatataggaatttctgaactacttgatatgattcttttacagtcagatatgatgttgttaaaggcaaatccatccaaaagagctattggaaaagtgcttgatgccaagattgatttggggcgcggaatagtttgttctgttattattgaggatggaacgctttatgtgggagattcttttgtgggtggagcgtgctatggtaaagttaaggcattaattagcgaaaagggtgtttctgttaagagcgttggacccgctaaagccattagtgttttaggattttcttcaatgcctcaagccggggatccttttcaagtaactaaaactgaaaaagaagcaaaattgatcagttctaaaagacaagatcttaaaaaatatgaatcttccaaaaatgtaaagaaagttactatgttgaatctttatgattcaattaaagaaggagcgcttaaagagcttaaaataattttaaaagcagatgttcaaggctcagtggaagctttaaagaattctcttgaaaaattaacaaacgatgaggttcgagtaagagttgtgcattcatcagcaggggtaataaccgaaacagatattagctttgcttcagcaagcgatgctattgttattggatttcatgtaaggcctactgcaaaagctcaggtactagcagatcaggaaaaagttgagattagaaagtacaatgttatttatgatgctataaatgatgttaggtcagttcttgaaggaatgcttgagccagatgttgagcagcagtttattggctttgctgaagtgagagctgtaataaatgttcctaaaataggggtaatagccggttgttatgtttctcgggggctaataaagcgagatgcgattactaatgtaatgagagatggtttacagattcattccggcaaaatttcatctttaaagcgatttaaagatgatgttaaagaagttgctgagcaatatgagtgtggtattatgattgataattatgctaatattaaagaaggagatataattgaagcatttgaggtaaaaaaggttaaaaaatcttttaaaacttag

SEQ ID NO: 11091 - DNA, 849 bp, Borrelia burgdorferi
ttggaaaatggattccttttaattaataaagaacaaggtaaaacttcttttgaaactcttttccctataaaaaaatattttaatacaaatcgtgttgggcatgctggcacacttgataaatttgcaagtggaattttggtttgtcttgtgggaaaatacacaaagctttcaggttattttacttctttagataaagagtatgtagcagaattcagatttggattagaaacagatacccttgatccgaatggaagaatagttagtaaaacagattatattcctaatgtagaggatatagatttaaagcttaaagattttgtaggagagatttatcaaagtcctcctagattttcttctgttcatattgatggcagcagagcctataaacttgctttgaatggaaagttttttgaaattaaaaaacgaaaagtcactgtttataatattcaaagattaagttatgattttagttcttctttgcttagtttgaaaattagctgttcaaaaggtacttatattaggagtattgcaagagatttggcatattctctaaattcttgcgcgtatgttagtaatttaaaaaggactaaagtaggtatgtttagattaaaagattccacattgtgtgaaaatttgagtaaagcttccttaattagtctagaatctttaaaaagttttgaaaaggtttacattgattctaataagataaatcttgttaaaaatggtgtttattttgaaattgaaatcaatattaatgaatttaaaattttaaaatccagagaagagaaaatattagcagtaattcaaggagtgggtttgaataaatataaatatgtcattatattttaa

SEQ ID NO: 11092 - DNA, 267 bp, Borrelia burgdorferi
atgatagataaaaagcaaaagcaaaaaatagtttctgaatttggaaaaaatgaaagtgatactggttctgttggggttcagattgcacttattacaggtagaataaagtatttaactgaacatttaaagataaataaaaaagatcatagttcaaaaagaggcttgttaaagttagtagggcaaaggcgaagtttattgcggtattaccagaaaaaagatttagaagcttataggatgttgatatctaaacttggtcttagaaaataa

SEQ ID NO: 11093 - DNA, 2169 bp, Borrelia burgdorferi
ttgaggaaaatattaaagttgaaaataggcagagacgagttagtgtttgagaccggatttatggctaaacaggctaatggatcggttcttgcaacttatggtggatcttcggttcttgcaactgtttgttgctcgagtaacgtgagagaagatttagattttgttccgctttctgttgaatataatgagaaatattatgcagccggtaaaattccgggaggatttatcaaaagagaaggaaagccaaaggataaagaaatacttgtttccagactaatagacaggccgatgagacctctttttgataaaagatttggtcgagaaattcaagtaattcctacaactttagctacagatcagcttaatcctcctgatattgttggaatgaatgctgcttttacggcagtttttttgtcagatattccgtttaatggtccaattgcagctgttagaatggtttatttgaatggtaagtttatagtaaacccttcgtttgaagagattcatgattctgatcttgatattgttgttgccggaagtttaaatggaattactatggtagaaggtggtgctaatgaggttggtgaggatattttgctctcagcaatagatggtgctcatgaatatattaagcaaatttgtaatgctcaaaaagaatttttagatattgtaggcaagaaggaaaaacttcctttagcttttgaagaaaaaatatttgaatttaaagatgagcttagggattttgtttatgctgatcttaaagaagcttgttttgttaagggaaagcttaatagagataaagccataactttgctgcgaaataaatcttatgagtacttttcttctcttgagaaattgactgatagcaatgaatctctttttcataaggcttttgatgattttgagaaggagattgttagaagctctattcttaacgataatattagaacagatggcagaactcctaatgagataagagatattatctcagaagttgatattttaagtagaacgcatggatctgcgctttttacaaggggagagacgcaagctttagcggtaactactcttggtacaagcattgatgaacaaataatggatgatattgatggcgataaacgccttaattttatgctccactacaattttcccccattttcagttggtgagaccggtagactaatgactggcaggcgcgagattggccatggtcatttagctcaaagagctttagaatcaatggttcctggaaaaaatgattttccttataccattagggtagtttctgaggttttagagtctaacggatcttcttcaatggctactgtttgtgctgggagcatgtctttaatgtcagcaggggttcctgttaaagggcaggttgcggggatagccatggggcttattagcgaaggggataaatatgtagttttaagtgatattcttggagaagaagatcatctaggtgatatggactttaaagtggccggtacaaaaaatggaattactggatttcaaatggatattaagattgaaaatgttactaaagatttaatgagagatgctcttgagcaagcaagaataggtagaatacatatattatctattatgaatactgtaatttctaattcaagagttggtatatctaagtatgctcctaaaattgttcaacttcaaattgacattgacaagatatctcttgtgataggatctactggaaaaactgttaaggctataacagatgaatttgaagttaaggttcaaattgagcagaatggaaaaatcattcttttcggggatgatgattttaagatgcaaaaagctaaagaaagaatagagagtattgtaagagagccaaaggtaggcgaaatttatgaaggaactgtcaaaaagattaatagctttggggcttttattgaacttactcctgcaaaggaaggatttttaagtactcgtttgaaacccagagacagtaagtatggttctggaagatttgggaatagtaatagatattctagatttggtggcggtggagagaatataagaggtaatgcggggttagttcgacccccaaaattagaagaaggtcagcgaattaaggtcaaaataattgatatagacaagtttggaaaaattgatcttgaaattgttagagataaagattattaa

SEQ ID NO: 11094 - DNA, 1128 bp, Borrelia burgdorferi
atgtttagtgtaatcaagaatgataagcattttaatgcaagggttggatttttaaatcttcctcatggtagagtagatattccttgttttatgccagttggtactttgggggcaatgaaagggttaaaacatgctgttcttgagaagttagaatgtaatttgatgcttgcaaatacttatcatttatatttaaggctgggaattaaaactgttgaaaaatatgttggtcttcataattttacaatttggaataaaaattttttaaccgattcgggcggatttcgggtgttttctttttctgatctgagaaaaattgatctaaaaggtgtgcattttaaatctcatatagatggatcgtaccattattttacttccgagggaatatttgctatgcaagaaatttttggcagtgatattattatgccacttgacatttgcagttcttatgggattgattataatgaagccaatttatatacaaatattacaaccaattgggctagcagcacgttcaaatcttctaaaaacagaaaagagggatacaacgggcttttatttttaataactcaaggaaatttttttaaagatttaaggaaaagaagtatcaatgatatattggaattagacagcccaggtattgccattggaggcatttctgttggagaaccaagggagaaatatttagaaatccttgaatatagttttttgttgataccaaaagaaaaaccaaggtatgtaatgggtattggcactccccattacatacttaatgccatatattatggcattgatatttttgattgctttaatcccgcaagaattactaggcatgggtctcttttgacagataatgggattatgtgcattggtagaaaggagtataaggatgatacttctaaggtagagaaaaattgcatctgtactttatgtaaaaggtattcaagaggatatttaagacatttaataaaatcgaaagagctttttggaatagttttggcaagtgaacataatatccactatatgtttcgattgatttcaaagatcagagccgcaattctaaatgatgattttttaaattttagaacttcatatttaaaaaagtatgaagaggaaaatttcgatgaataa

SEQ ID NO: 11095 - DNA, 1539 bp, Borrelia burgdorferi
atgaagaggaaaatttcgatgaataaatatgttgtttctacaattttggtcatgatttccacttttttttcaagaataatgggctttgtaaagataaagattttctcttattattttggtgcaaatcttgatgctgatatttttaactatgttttcaatattcctaataatttgcgcaaaattctttcagagggcgcgatgacctcggcttttttgcctgaatttacacatgaaaaaaacaaatcgcacgaaaaagctgtttcttttttcagaactgtcataacctttaacattatttctattgggttaattgttttagttatgattatttttgcaaagcctattatgtattttatatcttattataggggagaaaacttaatttttgcaagttctgtatttggttatttggtattatatattttactaataagcctatcatcaatcttcgtgtctgttctaaattcatataaaatttttttcattccttcgttttcgcccattatgctttcttttggaataatattgagcatattcttattttatggtcgttttggaatatatagtgctgttattggcgtaatttttggggggtttttacaatttttaattccgtttgcaaattgccttatgattggttttgcctggaagccaacattttatttcagagaaaaagtgtttttaaattttttaaccagatggcttcgtatgatttttggattttccatttcaattattactcagcagatttcatttgcattagcatctactcttgagataggaagtgtttctatccttagtaatgctgtagtttattatcagcttcctgtaggaattttttatatttctattgcaacagtgattttccccaaaatggcagagcatgctgttttggggaataatataaaattaaatgcccttttagtagatggaattaaaattttattgttaatttttattccagtgtcttttttaatgtttatttggtctgattatattttaaatttatttcttatgggaggcaagttttctatttatgatactcaaaaaacagcgagtgttttgaaatgttttcttttaggtctgcttttttattcaatgtttggttttttccaaaaatattatttttctattcgtgatgcaaaaacaccgttttatttgagtgttttattttctattcttgatattgcaatatctgtttttggtattaattattatggtttgaacgctttagcattagctcaatctatttcttttatgatttgtgtaattgttttttattttataatattgaaaagaggagttaaaattgatttaattgaaattttatttgttcttttaaagtcaattattacactttttcctttatatgcaatttatttcttttttgaaaagtttcagtgggatgtggggtttagttttaaaaatctttattttttaatggcagctggaattgttagtatttttgttttgtttatttgttattctgttttaggaataaataagctttttagatatattagaagggatgctttatga

SEQ ID NO: 11096 - DNA, 1335 bp, Borrelia burgdorferi
ttgttattaaataaatattttcttgcaaatcgaaatattaattttattgttatggctttgttattttcttctagctatattagtgctagtagttttatttccggtccctctgctgtttataagtatggattatcttttatattattagctaccatacaaattcctacaactttaattgtttttattattgttggtcagagattaaatcgcgaatcaaaaaaaattaatgcaattaatattattgattatattaggcatagatatgaaagtgattttttggcgttaatgagtggatttgtattgatttttttttcaatgtttttgatttctgcccaattaataggtggtgccaaacttatagaagttttttggggtattgattacgtagttggtcttactttttttgccttcttggtttttatttatgtattttttggcggctttaaggcagtagcttatacggatttgattcaaggatttttaatgctagtttcatccgttattttgttttccaagatgctagatttgggagggggtattaataatttattcaaaacagcaacgtctagcttagataaaagccttttacttccttcaaatgctgacttaaagccacaatatataatttctttttggatattaataggaataggaatactagggcagcctcagattattaataattttatagcatttaaagatgagaatgctataaaattttctcttcccatttctacttttattattagctttttaattgttttgatgcatttaatagggttttttgctattattctttttccagatttaagtccaaatgataaagttgttttaaatgtggctttaaaagttttaaatcctttttcttgttttatgttttttataggtcttttatctgcaataatgtctacagtggattcaaatttgctattaataacatctgttttaataaagtcaatatttatttataaagaagatttaaaagaagatgtaaagattggcagaataataatgatttctaatattttttttattttaataatacttatattttctctctttcctcccaattttttattctttattaatatttttgcctttggagctttggaagtttcgtttttccctattattgtttttggactttatttaaattttgtaagcaaaatagcggcttttgcttctatgtttttagggttaatattttatttgtccattttattctttggtttaaatatttggttttttcaccccgtttttccatcattttttgtttctatatttacatttttagtagttaattttttttgtaaaaaaaatagtaaggtttgttag

SEQ ID NO: 11097 - DNA, 1407 bp, Borrelia burgdorferi
atgaaggttgattttgacgatttgaataatattttttttgtaggaataaagggaagtggggcttgttctctggcttgttttttaaattcaaaagggtattgtgtagaaggggtagatgtttctgataaattttataccgatgaaattttaagtaataataaaatatcttattatgataatatttatgagttttcattaaaacagcttgataggtcttttgatttaatagtatattcttcagcctataataaggatggtttgcaagttttacttgaggcaaaagaattaaatatacctattttatcttatcctgaggctcttggagagctttctagaaagtactatagcattggaattgcaggttctcatggtaaaactaccactacggcgtttttaggtgttctttttaataaattaggattaaatcccaatgttattgtggggtcaagtgttaaagattttaaagataattctgcaatagcaggtattagcaatatttttattgttgaaacttgtgaatataagaaacattttttgaattttagccctaatatgcttattttaaccaatgttgactacgagcatgttgatttttttaaaaattatgaggctcttgaagaggcttttttacagtatattaataatttaaagaaaaatggaatattgataattaattccgatgataataatttgcttaaaattaaaaggcaaatcaacagaaaagatataagtatttttagctatgggtctggagatttatctgattttcaaataagtaatattgcagttaggagtgaatatttttgtttttcttttttaggcttgttaaatgttgagcttaagactgttttatttcataatgtattaaatttttcagcagcgcttttggctttaaatcttttcttagaaagtaatgggaaatcaatttttgattttgaagaagcaataaagagaattgcaaaaaattatagcggtataaaaagaagggttgaagttgttaaagaggaaaatggagtgatttacatggacgattatgctcatcatcctagggaaattaaaaatactctttttggtattaaaaatttttataagaataaacgtataattttggattttatgcctcatacctttacaagaacaaaagaattttttgccgattttgttgaagttctaagtgctgccgatatattaattttgcacaatatatatctttcaaatagggaaaattttaatccagatgaactttctgttaaattgtttttaaatattaaaaaaataaataagaatacttatttttttaaggatgttaaagactctattaattttataaaaagtttattaatatctggagacttgtttattacaatgggcgctggaaataattttattttacacgattttctgtaa

SEQ ID NO: 11098 - DNA, 867 bp, Borrelia burgdorferi
ttgaaaagcatgacgggatttttttatttggaaaagataattggtaactatatgtttagtgttaatttgaaatcttataatggaaagtttttagaatttaaatttaggttaccagaaattttttctggctatgatcttgatataagaaatttgatttcaaaatatattagcagaggcaatgtttttttaaatgtaggatataaagaattggttcctagtgtgaattttacgattaatcccaattatattgaggctatttctaggcttagagattctttggcacataccaatcttaatattaaaaacgaactaagtttgggcgattttttatcattaaaaggagctttgataattgatgaggatagtgaacatcaagaagagatttatgggttgtttaaaggtgttctagaagaagctttattacattacaataatggaagaagttttgaaggagaaaataccaagtcagacatagtgtcaacccttgtgttaatagagcgggaccttaaaattgttaaagatgcttgcagtgatataaatgtcaaattatttgcaagtattaaagaaaatatttctaaattaatggatgaatttagagatttaaatattgcagaagaggcagctaaaatggcaattcgtctagacattaatgaagagatcatgcgcttagattctcatatagaaactttttataaaaatcttgaatatgagatatgtggtaaagctcttgaatttatttctcaagaaatgcacagagaaataacaaccatgagtaataaggcggttgatcttgatattaagaatttgattttgaatatgaagttaaatttagaaaaaataaaagagcaaataaggaatgttgaatga

SEQ ID NO: 11099 - DNA, 2547 bp, Borrelia burgdorferi
atgcaaaataaaaagttgataatagttgaatcgccaacaaaagccaaaacaataaagaagtttctcgatgaatcatttctagtagaagcatgcattggacatgtagtagatctaccaaacaacgcaaaagaaatcccaaaagaatataaaaaatacgaatgggcaaatatttctatagattataacaatggatttaatccaatttacattattcccagcaataaaaaaccaattgtatcaaaactaaaaaaattagtaaaaacaataaatgaaatatatcttgcaaccgaccaagacagagaaggagaaactatagcatttcacttaaaagaagtattaaaaatcaaaaactacaaacggatgatatttcatgaaatcacagaaaccgcaataactgaatcactaaaaaatactagaaatatagacatgaaccttgttaatgccggggaagctagaagaatattggaccgactatacgggtatacaatctctccactactttggaaaaaagtagcttatggactttctgctgggcgagtacaatctgttggattaaaattattaatagagaaagaaaaaactagaataaatttcaaaaaggcaaattattattcaattttacttcaatgtaaacacgagaaaaaaaacttgttgcttgaagcaaaattagaagaaattgacggcaaaaatatagcagagggtaaagactttgtaaatgaaactggaaaacttaaaaatattgccaaaacaacaataataacccaagatttaatgatagagcttgaaaaagaattaaaaaatggacaaaaaattgaattaatttcaatagaaactaaaaaaataaaaatacctcctccaaagccatttaccacctctacacttcaacaagaaataaataagcgtcttaaaattggaacaaagcaaatcatgcaacacgctcaaaaactttacgaacacggatacattacctatatgagaacagactctcataatattgctaaaattgcaaaagataaaataacaaaaataataaaaaataaatatgggaaagagtatatagaggaaaaagatagaatttatgaaaaagaaaaaatggctcaaaatgcacatgaggcaataaggccttctgaaatatttattccaaatgaaaccatagaaatagaaagcaaaaccgctaaagaaatttacaaaataatatgggatagaaccattatttctggaatgaaagatgcaataaaagaaaatataaaactgacttttaaatataaaaacttaattttcagatcaagttttacaaaaataatttttgatggatttcttaaacacactaaagaacaagatgaacatcttaacataaattttgacttaattaaaaagggagatacattttccatagttaaaatgaaaacaagtgagcacgaaacaaaggctccatttagatacacagaagcgtctcttgtgcaaaaaatggaaaaagaaggaataggtcgtccctcgacctattctacaattatatcaacacttttagaaagagaatatgcattcaaacttaacaacacattaatgccaactataaaaggcgctgctgtaataaatcttcttgagaaatattttccagtactcattgaactaaatttcacctctaatatggaagaaaaattagacaaaatagcaataggaaaactagataaaataaaatatctaagtaaattttataatggcaaaaaaggactaaaagatacagtaatgcaactagagcctaaaattgattcctctgaatttagaaccgttattgaaagtcaaaaaatagaaaataaaaatagcattaattacacaataaacattggtaaatatgggccttatttgatattcaaaggacataattactcaattaatgcaaaaactccattagaaaatttgtacaaaaaagatgaaatagaaaaaataataaatgaaaaagagctaaaacccaatatacttggggttgatcctttaacaggacttaatgtgatctttaaaaatacaatttacggaaacattgttcaacttggagaagatacccatgcccctcaagaatatacaaaaaaaggaaaacctaaaaaattaaaaataataaaagcaaaaaaagcatcaactaaaaaaattgaccctgaaaacataacattggagcttgctttaaaattgctctcactgccaaaaccaattggcaaacatccccaaaccaatgaacaaatcattgctgcaactggtgtttttggggattatattaaaactgaaagcggaagcattgcttgctcgctaaaaaaagatttaaaagcatatgacataacactagacaaggccatcagcctactcaacgaaagagccaataaagtgggtataatcgttaaaacaatcacattttctaaaaacaaaattggcaacaaaatatatatttacaaaaaaaacgacaaattttatgctaaaattaaaagaaagaagattgatttacctgataacattaatcttgaagaaataaatgagaaatatgtattcagcttgttataa

SEQ ID NO: 11100 - DNA, 1242 bp, Borrelia burgdorferi
gtgagcaattataaaattctgcatacttcagattggcacattggaaaaaaaattgaaaatttttcaattcttaaggagcagaaaaattttttatattttcttttagaatttattaaaaaagaaaatatagatcttttacttgttgccggggatgtttatgattccaaaaggcctgggtttgaagagcaaagattagtgaataattttttttatgaactttcttttacttcttgtaaatggtgtgtggttatttctggaaatcatgacaaaaaggattatttgagtataaataaaaaacttctctcacggtttaatttttttttaataactgaatatgattctgatgagcaaatagttttattaaaagataatggaaatcttaagtttattgttgtttgtcttccgcatataaatgaaaggcttattttaggtcaaaattttgacaatatttttggactggaagatcagtattccagcaaactatttcttgaaaatttagaaaatgcctacagagaaaaaatatcaaatttatctaattttttagaaaacaagtataaaggaattcctaagatattaatggcgcattctttttttggcagcagtaaaaagattgacaccttgggaggtagttatattatcccttttaatgtttttggaaatggtttttcttatgttgctcttgggcatattcataagttcatgaaactaagagataatattgtttattcaggatctcctatgcaatattcatttaatgagacctgtgataaatacataaacgttttacattttaatgacaataaattaatcttgcaagaagcatttccggtgccgattttcaataaattaatctttgctaaaggttctttaaatgaagttcttgattttttggctaattccaaaaaagaagagtcttttactatttatttgaaaattgaacttaatgaggcagttgatactagcgctgaggagtctatttatgatttagcaaggcttaattttatgaatttagtttctatttcctattctttaccctcaagtcaggatttgcaagacgattccaactttattggagaacttgaagtgcttgaaatggatgaaaaatatttttttgagaaaaagttgagatgggattttgagaacggtgttattagggatatcaaatttaaggaagaagagcttatttctctttttaacgaggttttagctaacggatatttgggtgaatatgaggataaataa

SEQ ID NO: 11101 - DNA, 2853 bp, Borrelia burgdorferi
gtgaatatgaggataaataagctcatatttaaaaatattgcttcttataaaggcgaacatgagttgaatttcgatacacttcttttaagacaatcgggcatttttttaatttctggtaatactggatcaggcaaaagcaccattttagattgcataactttggcactatatgctcgtgtttacagacttggaaaaaaaattgtagatattatatcaaaaggcgagactagcgcttatgttaaattaacgtttactatttctgggaagatttatgaatcttttgttgagcttaatgtaaaaaatatagagactcctaagagcatgttgcttaattgtttttttgataataggattatagagggtcgaaccgatgttttagagcatattaaaagtctttgtcgattagactttaaccaattttgtcaaactgtaattttaccacaaggcaattttcaagaatttttaacgtcaactcccaaagagaaagctgcaataattgataatatttttaatttgaaaaaatatgataatttggaattttatttaaaaagtgattttgagcgcacaaagtttaatatagataaattgttgaattctgaatcttatgaaaaatcaattcttgattatgatgagagtgagtgtaaatcccttaaaggttatttggatttggttgatattgatcgattagaaattgatcttgaaaatattagaagagctatttctttatgtaatcaggcaatagcgtctaatgagagatatttgggcttggaaattgaaatgtcttctctaaacgatcaattatcttctcagattaaatatttaaattctttagagaaggatcattcccttcaaaagaaattaaaagaaaatttggatttggatcgaaaagtttatttatgttcagatttttggagtttgaaaaatttagttgctgtacaaggcgaattgtttaatgatattggattgcttgatttagaactttcaaaagtgatgaataatttagaagaaattaaagatttgtatagcaatgattttaattttaattatgttaaggagctttataataaaaattgcaatctttttaatttaaaacttgttgagaatgattatcaaagcttgcttttaaggaaaaatagtcttgaggatgaaaaaaaagaattattaagatctcagagcaaaaaaaatgatgagattaaaagcatttcttctgagaaatctaattttgattttgacaaatatgtttactatgaagcattaaaattgttccaaacttttaatgatgagttgatttcaaaatatagagataggctagaatttttattaaaatctactggcaaagaagattttaataaaaataaggaaaaaaatattattaagattgacttgtataaagagttgttaaaatatcttgatgataaaaatttttctattgagagtgataaagagaagctaaaatatattgaggctgaatataaaaattatcagcataaagataaattatcgctttgcagtttgaaagagctttacgctttaaattcaaagcttcatttgatacaaaatcaaattgatgagcttaaatatcagctatcttgtagacaagaagaaatctctaaacaagaggttaatgctttggagtttgaaaagaataatgctgaaattttaagattgattggaaaaaatttatttgacaaatacataaattattttgacagagaaaaaattttagcatttgaaaataaattagaaaagcttgaacaatttaaggctaagaaaaaagatttaaaaattgaaatttctttgaaaaataaaaattttgatcaaaatcttttaaagattaaggatttattgttaaaacttaatttaaatttaagttttaatgattattcttctttggaaagggaatttaatgttgttttggctaagcagaaaagtgtggaaaatgaatggaatatgcttgttttaaatcttaaaaatttagaagatttaaaaattaaaaccgaaacacaaattaaatttacaaaggaatctatattgactttaaaagcgagattaaatgaagagcaaaataattttattaatctaatttcaaatttaaaaaatgttttttttagttcattttcttttgaatcaacaactgacttagagcaaattaataagaatagtctgtcttttttgcaaaaattgagtttatcaattagttctaagcttgaatttttatccagagatattgaaaagtataaaatcaagcttttaaattttcaaactcttcaaaaaaagattaatcaacaaaaaattaatttagactcgctaaggggtgaattaaatcttgctaaagaaaggaaagataagctagatgtattaaggaaggtcgttattagatcttctggattgaaatattatgttcaaacttttttaattaatgatattttaagactggcaaatgaaaagtatttaaggtggatttttcctgattttgagctcaaaacgaacaaagagagcaaagagtttgattttttaattgaagacaaaaaagatgttaataaaataagaacggtaaaaactttgtctgggggtgagaaatttcttgtgtctttagctttgtccttagctttatctgataaaataagggatagtgagttaaaaatagaggctttttttctagatgaaggttttggcaatcttgatgaagatactttggctcaagttatgcctaagctttctaagtttcaaatgatgactgggcgacaaattggcataatttcccatgtttcttatttgaaggagatgattaaagcgcaaatagttataaacaagatttctaaaatttcttatattgctatagaaaatttatga

SEQ ID NO: 11102 - DNA, 3129 bp, Borrelia burgdorferi
atgtttaaaaaagtagaaaacaaggcaaattttcctaaaatagaagaaaaaatattaaaattttggaatgacaataagatctttgaaaaatcaataaagcagagagaaggatgtgaagaatttacattttatgacggaccgccttttgcaacaggacttcctcattttggacattttgttccaaacacaataaaagacataattccaagatatcaaacaatgcaaggcaagtatgttaaaagaaattttggatgggatactcacggactacctgttgaatacgaagtagaaaaaaaattgggaatttctggaaaatacgaaatagaaaattatggcattgaaaattttaacaaagaatgcagaaaaatagtacttagatatacagaagaatggaaaaatataatcttgagacttggacgatgggtagattttgaaaagggttacaaaaccatggatataagcttcatggaatccgtgtggtgggtatttaaaaatctttatgaaaaaggtttaatctacgaaagttactatgtactaccctattccccaaagcttgcaactccgctttcaaatttcgaagtgaatcttggagaatataaagaagtcaatgacccatcattaacaataaaatttaaaataaaagataaaaacgaatacttactagtgtggacaaccaccccctggacattgccctcaaaccttggaattgcagtaggacaagaaatagaatattctaaaatttttgacaaaacaaaagaagagattttaatacttggatcaaaaaagcttaatagctattacgatgatgaaaattcatatactattatagaaaaattcaaaggcagcaagcttgaaggcatagaatatgaacctatttttaactactttttagaacaaaaagataagggggctttcaaggtacacacagctgattatgttacaactgacgatggaacaggaattgttcatattgctccttttggagaagaagactacagaatactcaaaaaacacacaaatgtcgatataatagaccccttagatgctgaatgtaaatttacaaatcaggtaaaagattttaaaggactttttgtaaaagatgctgataaaaaaataatagaaaacctaaaattacgcaattttttattcaaaagagaaaattatctacacaggtatccattttgttatagaacaaactgcccaattatttacagaccaataagttcgtggtttgtaaatgtagaaaaaataaaaaccaaacttttagaggtaaatgaaaaaattaattggatgccagcccatttaaaaaaaggaagatttggaaaatggttagaaaatgcaaaagattgggcaataagcagaaacagattttggggaaatccaattccaatttggatatgctcaaaaacaggaaaaaaaatttgcattggatcaaaaaaagagcttgaaaacctatctggccaaaaaatcgaagacttacataaagaccaaatagataaaataacctggccaagcaaagacggtggcaaatttatcagaacaagcgaggttctcgattgttggtttgaatctggagcaatgccttacgcaagcaaccattatccattcacaaatgaaattaattttaaaaatatatttcctgctgactttattgcagaaggtctagatcaaacaagaggatggttttatactcttacaatcctgggaactgctctttttgaaaacacagcattcaaaaacgttattgtaaatggacttgtgctttcaagcgatggaagaaaaatgtcaaaatcctttaaaaattatacagacccaatgcaagtaataaacaccttcggagctgatgctttaaggctttatttaataatgagccctgtagttaaagctgatgatttaaaatatagcgacaatggagtaagagacgttcttaaaaatataataatacccatttggaacgcttattcatttttcacaacttatgcaataattgataaattcaaacctccaaaaaatctcagcctggctaaaaacaataaccttgacaaatggatcataagcgaacttgaaagtctaaaaaaaatactaaatacagaaatagacaaatacaatctaacaaaatcaatagaatctttacttgaatttatagataaattaaacaattggtacataagaagatcaaggcgaagattttggaaatcagaaaacgataaagacaaaaatgatgcctacgaaacattatattatgcaatcaaaactttaatgattttacttgcaccttttattccatttataacagaagagatttatcaaaatttaaaaactgatgaagacaaacaatcaatacaccttaacgattatccaaaagcaaatgaaaatttcattaacaaaacaattgaagagaaaataaatctcgcaagaaaaataacttcaatggcaagatcactcagatcattgcacaatataaaaatacgcatgcctattagtacgatatatatcgtcacaaaaaatcaaaatgaacaaaatatgctaatggaaatgcaagaaataatattagatgaaataaatgcaaaagaaatgaaaataaaagctaacgaagaggagcttataacttacaaagcaaaagcaaactttaaagaacttgggaaaaagcttggaaaagatatgaaagcggtatctactgaaattagcaagctaaaaaatgaagacataataaaaataataaatggaacatcctacgagataaaagtagccaatgcaaagcattatttatcattaaatgatataatattagaaagagaagaaaaagagaacttaaaagtaataaatgaagaatccattacaataggaatagactcactaatcactaaagagttgtacttggaagggctgacaagagaatttgtaaggcaaatacaaaatttaagaaaagaaaaaaattttgatgttagcgatagaataaatttatacatagaaaataatgaaactttgaaagaaatgctaaataaatttgaaaaatacattaaaactgaaacattagccttaaatatcatattaaacaaaagtaagctagaaaaaaaaataaaccttgccgatgacatatttacactaataggaattgaaaaatgttaa

SEQ ID NO: 11103 - DNA, 2220 bp, Borrelia burgdorferi
ttggtagaaatagactcaaaagaaattgcaagaaaaaataaaaataaagaggtttcaatttggcacttattaatgtctataattaccactcccaaaaaatccgaaataaaatttatagatagcaaaactctaaaaaacattaaacaagaagttatatctgaaatagataaattagagaaaattttaatagaaaaaaacgaaataattattcccaaaatcaataaagaaatctttgctctcataaaagaagctaaaaaggaatttaaatccaaacctttaataggggcaaaagaaattttttatcaaatattaaaaaataaaaaacttcttaaaaaacataaactaagtaaatctagctttaactttaaagatcaaaatatattagaatacatggaaaaaaataaaataagattaattgaaacctacaaagaatttgatgaagaaatacgacttgaaaatgagcactttgaaattggaaagtatgtcaaaaatttaacagcacttgcaaaagccaaaaaattagaccccttggttggaagagaagcagagattaaaactcttacaaatatactcttgagaagaaataaaaatagtgcaatgctaataggcgaacctggtgtgggaaaaacagcaatagttgaaggccttgcatcaagcatagtgcaaaaaaaaataagtagcaaactacaagacaaaacaattctaatgcttaaggtttcaaacttggtatcgggaacaaaatatagaggcgagtttgaagatcgtttaaataatataattaagtatattgaaaaaaacaaaaacacaatcatatttattgacgaaatacacactctaataggagctggaaactctgaaggagctcttgatgcatcaaatatactaaaaccatcactttctagagctgaaatacaaattattggcgcaactacttacaatgaatatcgaaaatatatttcaaaagacaaagcattcgccagaagattccaaacaattaccgtaaaagagcctgatgaaaaagatacactaaaaataatcgaaaatattgcaaaaaattttgaagactatcatggagtgatctatgaaaaaagcgcgcttttaaatatagtaaaactttcatccaaatatctaataaataaaagatttccagataaagcaatagatataatagacattgccggcgcaattaaaaaggaagaacttacaaaagacaacatcataacatcagatgatatacaaaaggcaataaatgaaatattatctattaaaacagcaaataacactaaagaagaaattttagaattaaaagaaatagaaagcgaaataaataaaaaggtgatcggacaaaaacatgcggtaagcgaacttatcaaagaaattattaaagtcaaacttggacttaatgacgattctaagcctttaacttcaatattgttaataggatcaagtggatgtggaaaaactgctttaactgatgaaatatctaaaaaaattatcaaagatcaaaattcagtattaaaactagatatgtcagactataaagaagaaaactctatttcaaaattaattggcacaaatccaggatacgtaggctactctgatggaggcattctgacaaataaattaagacattcatttgaaactttaatattgtttgaaaatattgaaaatgcccacagctctgtattaaacctaataagtcgaatgcttgaaaacggagaacttattgacagcaaagaagataaaatactatttaaaaacacaattataataatgactacaaacattggatctagaatgcttcttggagaaaaaaatattggattcaacaaaaatcaacaaaaaagcttagaaacaaaaagctttaaagaagaaataaaccaagatcttgaaaaaagatttaaattatcctttttagacagaattcaaaaaaaaatcatcctaaatatccttacaaaggaaaatgtagaagaaatttgcaaaaactacttaaacacccttaaaacaaaatttcactctaaaggaatcgagatagaaataaaaaaagatgttgacaaattcataaccacaaaatactataaaaaaaattcaggagcaagaagcgtaattgctgcaataaaggggaaaatagaagaaaatattatcaccaaaatagctgaaaatcaaaacataaataaaataacgatttatttagaaaaagaaaaaataataatagaataa

SEQ ID NO: 11104 - DNA, 1713 bp, Borrelia burgdorferi
ttgatgctaaaaatcgaagctaaaagaaaattgaaaaattatattcttcttgaagaagatatgcattttaaagaagaagcaataaaaattcaaaaaacaaataattcaacagaaattttaaatagattttacaaagatctagaatttggcactgctggaataaggggaatcattggagctggaacatgttacatgaacacatataatataaaaaaaataagccaaggaatatgcaattacatacttaaaataaacaaaaaccctaaagttgcaataagctatgattcaagatatttttcaaaagaatttgcttacaatgctgctcaaatttttgcctcaaataattttgaaacatatatatataaaagtttaagaccttccccacaactatcttatacaataagaaaatttgactgtgatgctggcgttatgataacagcaagtcataattcaaaagaatataatggatataaagcatattggaaaggtggaatccaaataataccacctcatgacacactaataactaatgaaattaaaaatacaaaaaacataataaatacaattaccataaaagaaggcattgaaaaagggatcatcaaagaacttggcaatgaaatagacgaagagtatgtgaaagcaataaacaaagaattgcctgattttgaaaagaatagcaaagaaacaaacttaaaaatagcctacacagcattacatggcaccggtgggaccataataaaaaaactctttgcaaatagcaaaatacggctttttttagaaaaaaatcaaatactaccaaaccctgaatttccaacaataaattatcctaatccagaaaaacaaacatcaatgcttaaagtaatagagcttgcaaaaaaaaaagattgtgacattgcccttgcaacagatccagatgccgacagaatagggattgcatttaaagatcaaaacgaatggatattcttaaacggaaatcaaatatcatgcattttaatgaactatatactctcaaaagaaaaaaatcctaaaaatacatttgtaatatcatcgtttgtaacaacaccaatgctagaaaaaattgcaaaaaaatatggttctcaaatttttagaacttacacaggatttaaatggataggaagcttaattaatgaaatggaaaaaaatgaaccaaataaaaaatttgcttttgcatgcgaagaaagtcatggatatctaataggaagaaaggttagagataaggatgcattttcagccataaaaggaatttgttctttagcacttgacttaaaagccaaacaacaaacaattaaggattatcttgaaaagatatacaaagaatttggatattatgaagaatttaatatagaaaaaaactttgagggggccaatggagaaattcaaagagaaaagttaatgctaaaactaagaaaagaacaaaaagtacaatttgcaggaattaaaataattgaaaaattagactataaaactcttaaaaagattaactttaaaaatgaaatttcagaaattaaagaatataaataccccataaacgcaataaaatttatacttgaaaacgaaattgcaataattgtaagaccctctggaacagagccgaaaattaaattttacatatctgtaaaactagagtataaggaaaaacataaaatatttgatataataaatgcaataaagatggagataaaaaaatattaa

SEQ ID NO: 11105 - DNA, 2853 bp, Borrelia burgdorferi
ttggaaaaaagtttgaaaaaaaaaattattgtcagaggagcaaaagaacataatttaaaaaatgttgatgtagatattccaaaagatggtttagttgtaatatctggcaagagtggctctggcaagtcttctctggcttttgatactatttttgcagaagggcaaagaaggtatatggaatctgtttcagcttatgcaaggcagtttttaggtgtaatgaaaaaacccaatgttgattatatagatggactttctccttctatagctattgagcagagaacaataagcaataatccccgctctactgttggaacaattactgagatttatgattactatagactaatatttgcaaaaattggtaaagcatactgtccaaatgatggtagattaatagaagagcaatctttagataaaatagttaatactattttaagttattctgaaggatccaaggttatactttttgcaccaattgtaagggggtctaaaggctctcataaaaaggttttagaaaaaatattaaatcaaggttttaatagagttaggataaattctgaagattatttaatagaagatgcacttaatttaaatttacataaaaataaaaaacataccattgaaattatagttgataggattaagcttggtaataatgttcgagttagacttgcggaatctattgagacttctcttgctgtttctaatggatatttaagagtggaaattgataatgatttggaaaaaatagacaaactatttacagagcacaacagttgtcctttgtgtggattttcacttcctcttatagaacccagacttttttcatttaatagtccatttggtgcttgcagtgagtgctctggtcttggcgttacacttgagtttgattttgagagcatttgtcctgatactagtctttcttttaatgatgatgcttttcttacgtttaagacaagttcatcttggtctgtggctatttttaaaggacttgctaaacattataattttgacttaaatactcccataaaagacattccagataaagttcttaaacagattttatacggctcaaatgaaaaaatagattttatttaccagtccaaagaaatggaagcaaaagagctagatggaggatttcattattctaaaacatttgaaggacttttgccccttttaaaaaggcgatatcttgcaacagaatcagagagtactaaaattttttacgaaaatttgatgtctaaaaaaatatgtaattcatgcaaaggtaaacgcctaagcgttggagctttaactgtgaaaattaatggaaaagacattcaagatcttaccaatttgtcagtatttgattcttatgtattttttgaaaacttgcagcttgatatggtggacgaaaaaatatctaaagaaattttaaaggaaattaaaagtaggcttaaatttttaattgatgttggcctttcttatttatatttaaatagaatatcaggtagtctatctggtggcgaggctcagcgtattaggcttgctactcaaataggatcagcactttcgggtgttatttatgttcttgatgagccaagtattggtcttcatcaaagagataatgaaaaattaatctctactcttgttaatcttaaaaatcttggtaatactgtaattgttgttgaacatgatgagcaaactttgcgtactgcggactatattattgatatgggtcctggtgctggaattcttggaggggaaatagttgcaaagggagccttgattgatattttaaatagcaaaaatagtttaactggtcaatatcttagcggcaagtttaaaatagatgttccaagctctagaagaaaggcagataagggagaaattttgcttttgggctctaataaaaataatcttaaaaatatagacttaagtatccctttgggagtttttaccgtaataacaggtgtttctggtagcggaaaaagtactttacttaacgaggtgttatatccagctcttgatagtagattaaagcttaatgaaaagtattgtgatggctttaaagatattgttgggtatgaaaaaatcgataaaattattcaaataaatcaaaaaccaatagggagaacttcaagatcaaacccagcaacttatgttggattttttacagaaattagggagctttttgccaagcttccagatgcaaagtcaaggggttttaaagccggcagattttcttttaatgttaaaggtggaaggtgtgagaaatgtcaaggagatgggtatcttaatattcaaatgcattttttaccagatgtttttgttccttgtgatttatgtaagggtaaaaaattcaatgaagaaactttagaagttagatacaaaggaaaaaatatacatgatgttttagagatgagtgtttttgaggcaagtaaattttttgagaatgtcccaaaaattagtcattatttaaaatttttaattgaagttggacttgaatatattaaattaggacaatctgcaacaactttatcaggaggagaagctcagcgcattaagttggcttttgagttaagtaaaaagagcacgggtaaaaccttttatattattgatgaaccaacaactgggctgcattttgatgacataaagaagttgttagaggttttgcagcggttagtttccaatggtaatacagttgtactaatagagcataatttggatgtaattaaacaggcagattatataatagatttgggtcctgatggtgggttggcagggggaaatatcgttgtttctggtattcctgaagaggttgcaaaatgcgagaattcctatacaggaatgtttttaaaaaatcttttatag

SEQ ID NO: 11106 - DNA, 1449 bp, Borrelia burgdorferi
atgaaattatttaggagaaacgttatgatcaaaatgccaagtagttttacaataatattttctttaattgtatttgttaccattttaacgtatgtgattcctgccggtaagtttgataaagaatttaagcaaatgggtgatggatctaaaagggaaataattgttgctggaacttatcaatatgtagatcgaggctctaggggatttttacatcctattatgactattttaaccgcaatgtcaaaggggatggaacatgcagttgaagttattgtttttgttttaattgttgggggtgcttatgggattattatgaaaactggagcaatagatgtgggaatttattttttaatcaagaagttggggcacaaagataagttgcttattcctttgttaatgtttattttttcaattggtggaactgtaaccggaatgagtgaagagacccttcctttttattttgttatgattcccttgatagtagctttgggttatgatagtcttgttggagcggctattattgctttaggagctggagtgggaactatggcttctactgtaaatccatttgcgacaggaattgcatctgcaatagcttctattagcttgcaggatggattttattttagaattgttctttattttgtatcagtattggctgctataacctatgtttgtgtttatgcgtctaaaattaaaaaggatccctcaaaatcgcttgtgtattctcaaaaagatgaacattatcaatattttgttaaaaaagatggactttctaccggagataatgctcagaatgctcttgagtttacttttgctcataaattagttttacttttatttggatttatgatattgattttgatatttagcattgttaatcttggttggtggatgcaagaaatgacaatgttgtatcttggagttgctattatatcggcttttatttgtaaattaggtgaaactgaaatgtgggatgcgtttgtgaaaggttctgaaagtctgctaaccgctgctcttgttattggacttgctagaggtgttatgatagtatgtgatgatgggttgattacagatactatgttaaatgctgctactaattttttatacaatcttccaagacccctttttatcatattgaatgaaattattcaaatatttataggatttgttgttccatcttcatcaggacatgctagtctcactatgccaataatggctcctcttgccgattttttgtcaattccaagagcttcagttgttattgccatgcagactgcatctgggcttattaatttgataacacctaccagcggagttataatggctgtattggggatatccagattgagttatggtacgtggtttaagtttgttttaccattatttatgattgagttttttatctctattttagttattatagctaacatttatttaagtttttag

SEQ ID NO: 11107 - DNA, 1536 bp, Burkholderia cepacia
gtgacgatcctgcgcgcgtatgcgaaatatctgcggcaggtcggctcgaccttcagcgacgcgtatatcgagcgcgcgctgaccggcaacccggcgatcgcgcggcaactcgtcgagctgttcgtgctgcgcttcgacccgcggatcggcgacacgcgcgacgtgcaggccgaacggctgctgaaggcgatcgaaggcgcgctcgaccaggtgccgaacctcgacgaggaccgcatcctgcgccagttcctcggcgtgatcaacgcgaccgaacgcacgaactacttcctcgccgacgcgaacggcgaatcgaagccgtacctgtcgttcaagttcaacccggcgaaggtgcccggcctgccggaaccgaagccgatgttcgagatctgggtgtattcgccgcgagtcgagggcgtgcacctgcgcggcgggcgcgtcgcgcgcggcggcctgcgctggtcggatcgccgcgaggatttccgcaccgaggtgctcgggctgatgaaggcgcagatggtgaagaacgtcgtgatcgtgccggtcggctcgaaaggcggcttcgtcgtgaagaacccgccgccgcagagcgatcgcgaggcgtggatgcgcgaaggcatcgcgtgctaccagacgttcctgcgcgggctgctcgacctgaccgacaacctcgccggcaacacgatcgtgccgccgcccgacgtggtgcgccacgaccccgacgatccgtatctcgtcgtcgccgccgacaagggcacggccaccttctccgactacgcgaacgcgatctcgcacgaatacggcttctggctcgacgacgcgttcgcgtccggcggctcggtcggctacgaccacaagaagatggcgatcaccgcgcgcggcgcgtgggaatcggtgaaacggcacttccgcgagatgggcatcgacacgcagacgaccgacttcaccgtggtcggcgtcggcgacatgtcgggcgacgtgttcggcaacgggatgctgctgtcgccgcatatccggctcgtcgccgcgttcgatcaccggcacattttcctcgacccgaaccccgacccggcgacgagcttcgcggagcgccagcgcatgttcgcgctcgagcgctcgagctgggccgactacgatacgtcggtgatttcggcgggcggcggcgtgtatccgcgcaccgcgaagacgatcccgctgtcgccggcggtacaggccgcgctcggcatcgacgcgcacgcgctgccgccgaccgaattgatccgcgcgatcctgcaggcgccggtcgacctgctgtacaacggcggcatcggcacctacgtgaaggcggcgcgcgaaacccacgcgcaggtcggcgaccgcgcgaacgacgcggtgcgcgtgaacggcgcggacctgcgctgcaaggtcgtcggcgaaggcggcaatctcggctgcacgcagttcggccgcatcgagttcgcgcagcgcggcggccgcatcaacaccgatgcgatcgacaactcggccggcgtcgattgttcggatcacgaagtcaacatc

SEQ ID NO: 11108 - DNA, 1383 bp, Burkholderia cepacia
atgcgccggcgtcaacgttgcggcgtgccggcgatagagcgcgaacgttgccagcagcgcgcacaccgcggcgaagctcatccagtagcccggtgcggccttgtcgccggtcatgtgaatgagcccggtcgagatggccggcgtgaagcccccgaacacggccgtcgcgaggctgtaggcgagcgaaaagcccgcgacccgcacctgcaccggcatcacctccgtgagcgcgacgaccatcgcaccgttatagatgccgtacatgaacgagagccagagcagcacgagcagcatgtgggcgaacgacggcgcgtgcgcaaggaacgacagcgccgggtaggcggtcgcgacggtgagcatcgtcatgccgaccagcagcggccggcggccgatccggtcggacagcgcgccgccgatcggcagccacacgaagttcgacacgccgacgcaaagcgtcacgagcaggctgtcggcggtgctcaggtgcagcaccgtcttgccgaaggtcggcgcgtagacggtgatcagatagaagctcgtggtggtcatcgcgaccagcatcatgccggcgaccacgacgccccagttctggaccagcgtaccgaacacttccttcatgcccggacgatgcttgcgtgccttgaattcctgggtttcctccaggttgcggcgcagcatgaagatgaacggcacgatcatgcagccgacgaagaacggcacgcgccatccccaggcggcgatctgcgatgcgctcagccactgattgagcgcgaaaccgagggccgccgcgatgacgatcgccacctgctggctcgccgattgccagctcgtgaagaagcccttgcggccaggcgtcgccagctcggccagatagaccgagacgccgcccagttcggcgcctgcggagaagccctgcagcagccggccgatcagcacgagcacgggcgccagcagcccgatcgtcgcgtagcccggcacgaacgcgatcaggatggtgccgctcgccatgatggacagcgtgacgatcaggcccttgcggcggccgacctcgtcgatgtacgcgccgagcacgatcgcacccagcggccgcatcaggaagccggcgccgaacacggcgaaggtcatcatcaacgacgcgaactcgctttgcgcggggaagaagacgttggcgatctgcgtggcgtagaagccgaacaggaagaagtcgaactgctcgagaaagttgccggccgtgacgcgaaagatcgcggcggccttcgagcgttcggccggaaggctggacgagggatgcatcgagggtgtctcctgaaaatcctggaatacgcgggagggactggtctgattgtcgttttccggcatgttggcgcggtatcgctcaaacga

SEQ ID NO: 11109 - DNA, 751 bp, Burkholderia cepacia
gcgaagatcgaggtcaacaacctcaacttcttctacaacaagttccacgcgctgaagaacatcaacctgcgcattcccgaagggaaggtgacggcgttcatcggcccgtcgggctgcggcaagtcgacgctgctgcgcacgttcaacaagatgttcgcgctctatccggagcagcgcgccgaaggcgaaatcctgacggacggggagaacctgctgacgacgaatttttttattctcgctgctgcgcgcacggatcgggatggtgccccagaagccgaccccgttcccgatgtcgatctacgacaacatcgcgttcggcgtgaagatgttcgaaaagctcacgcgctcggaaatggacgaccgcgtcgagtgggcgctcacgaaggccgcgctgtggaacgaagtgaaggacaagctgggccagagcggctacgggctgtcgggcggccagcagcagcgtctgtgcatcgcgcgcggcatcgcgatccgtccggaagtgctgctgctcgacgagccgtgctcggcgctcgacccgatctcgaccggccgcatcgaggagctgatcgcggagctgaagagcgactacacggtcgtgatcgtcacgcacaacatgcagcaggccgcacgctgctcggattacacggcctacatgtacctgggcgagctgatcgagttcggcgaaaccgaaaagatcttcatcaagccggtgcgcaaggaaacggaagactacatcaccggccgcttcggctga

SEQ ID NO: 11110 - DNA, 1668 bp, Burkholderia cepacia
atgagccggcgcggcattcctcccgattcacgcttcactcgaaccgtcatgacgctgaaatcgctccccgcctggactgcccttcaatcccacttcgaacagatccgccacgcgcggctgcgcgactggttcgcgccggaaaacgaccgcgcgccgacccgcgccgaacgcttcacgattccgggcggcggtcttgcggccgatttctcgaagaaccgcatcgacgacgaaacggtgcgcctgctcgtgcaactcgcgcgcgacgcgggcgtcgaagcgcgccgcgacgcgatgttcgcgggcgagatcgtcaacccgaccgaaggccgcgccgcgctgcacaccgcgctgcgcgcgaccgacccgcaagcgccgttccacgcgcaggtgagcgccgagcgcgcgaagatggcgacgttcgcgcgcgccgtgcgcagcggcacgtggacgggctatacgggcaagcggatccgccacgtgatcaacatcggcatcggcggctcggatctcgggccgaagatggtcgtgcatgcgctgcaccacgtcgcaacgcccgagatctcgacccacttcgtgtcgaacgtcgacggcgccgatctcgcgcgcgtgctcgaacaggtcgatcccgaggaaacgctcgcgatcatcgtgtcgaagaccttcacgacgctcgagacgatgacgaacgcacgctcgctgcgcgactggttcgtcgcgcgcggctgccccgaggacgcgctcgcgaagcacttcgtcggcgtgtcggcgaacccggccgaagtcgtgaagttcggcatcgccgcggacaacgtgttcgaaatgtgggattgggtcggcggccgctattcgctgtggtcggcggtcggcctgtcgatcatgatcgcggtcggcccggagcagttcgacgagctgctggccggcgcgaacgacatggaccgccacttccgcgaagcgccgctcgagcgcaacctgccggtgctgctcggcctgatcggcatctggtaccggaatttcttcggctcgcagagctatctcgtcgcgccgtattcggaagcgctgcactacctgccgtcgtacctgcagcagctcgaaatggagagcaacggcaaatccgcgcggctggacggcaccttcgtcgactatccgacgtcggccgtcacgtggggcgagccgggcaccaacggccagcatgcgttcttccagatgttgcaccaggggccgacgatcgtgccgatcgacttcatcgcggtgctgacgcccgagcatccgctcgccagccaccatccgaagctgctcgcgaactgcttcgcgcagagcgaggcgctgatgctcggccgcacgctcgaagaagcgcgcaaggtcgccgggcccggcaaggaagcgctcgcgccgcacctgacgttccccggcaaccgcccgaccacgacgctgctcgtcgatgcgctgacgccgcgcgcgctcggtgcgctgattgcgctctacgagcacaaggtgctggtgcaggcgacggtgtgggacatcaatccgttcgaccagtggggcgtcgaactcggcaagattctcggcaaggtcgtcgaagccgacctgtccgccgaatcggtcgacccggcgaagcacgactcgtcgaccaccgcgctgatcgagcgcgcccgtgcggcgctcaagcgt

SEQ ID NO: 11111 - DNA, 849 bp, Burkholderia cepacia
atgacttccataccgcaatcgttccaactctttcaggagcacatgatgagcaagattcccgcattcggcctcggtaccttccgcctgcaaggccaggtcgtcatcgactcggtccgcaacggcctcgacgtcggctaccgcgcgatcgacaccgcgcagatctacggcaacgaagccgaagtcggcgaagcgatcgccgcatcgggcgtacgccgcgaagacctgttcctcacgacgaagatctgggtcgacaactacgcgccggagaaactggcggccagcctcgaggacagcctgcgcaagctgcgcaccgacgtcgtcgacctgacgctgatccactggccggccccgggcaacggcgtgtcgatcgacgcgttcatgaccgcgctggcggacgcgaaggcgaagggtctcacgcgccagatcggcatctcgaacttcaacatcgcactgacgaaggaagcgatcgcggccgtcggcaaggatgcgatcgcgacgaaccagatcgaactgagcccgtacctgcagaaccgcaagctggtcgagttcctgaacgccgaaggcattcacgtgacgtcgtacatgacgctcgcgtacggcaaggtgctcggcgacccggtgatcggcgcgatcgcgcagcgtcacgacgcaacgccggcgcaagtcgcgctcgcgtgggcgctgcaactcggctactcggtgattccgtcgtcgaccaagcgcgagaacctcgccagcaacctgctcgcgcagacgctgcgcctgaccgacgaagacatggcgcagatcgccgcgctcgaacgcaacggccgcgaagtcgacccggccggcctcgcgccgaagtgggac

SEQ ID NO: 11112 - DNA, 1548 bp, Burkholderia cepacia
gtgatcaaaaaattcatccgcaagctgctcggccaggacgaaaccgagcaaacgcctcccgccgctgccccggccgacgcagcggcccctgctgccccgcgcactccgaagggcgcccgcggcggcggcgcgaagaaaccgcgcagcaaccatgagccgaccgtcgtgccggccagcgtgcacggcatcaacccggcgctgatttcgaagaacgcggtgcgcgtgaccgacacgctgcagcaggcgggctttcgcgcgttcatcgtcggcggcgccgtgcgcgacctgctgctcggcatcgcgccgaaggacttcgacgtcgcgaccgacgcgacgccgaccgaggtgcagcgcctgttccgccgcgcgcgcctgatcggccgccgcttccagatcgtgcacgtgcagttcggccaggaactgatcgaggtgtcgacgttccgcgcgctggtcgacgcgccgcccgaggcggccacggccgaaccgccgaagcgcctgaagcgcgacgaactcgatcgccgcacgcacgcggtcgacgcgagcggccgcgtgctgcgcgacaacgtgtggggcgagcagcacgaggacgccgcgcgccgcgacttcacgatcaacgcgatgtactacgacccgtcgacgcagacggtgctcgactaccacgacgggatggccgacgtgcgcgcccgcctgttgcggatgatcggcgatccggccacgcgcttccgcgaggatccggtgcggatgctgcgcgtcgtgcgcttcgcggcgaagctcggcttcgagatcgaaccgcatacgcgcgagccgatccacgcgctcgccgacctgatcaacaacgtgccggccgcgcgcctgttcgacgaaatgctgaagctgctgctgtcgggccacgcgctcgcgtgcctgcagcggctgcgcaaggaagggctgcaccacgggctgctgccgctgctcgacgtcgtgctggaacagccgcagggcgagaagttcatcacgctcgcgctgaacaacaccgacgcgcgcgtgcgcgccggcaagccggtgtcgccgggcttcctgttcgcgacgctgctgtggcacgacatgcgccagcgcttcgagcaatacaccgccgcgggcgagatcccggtgccggcgctccatcgcgcgatggacgacgtgctcgacatgcagaccgagaagctcgcgatccacaagcgctactcggccgacatgcgcgagatctggggcctgcagctgcgcctcgagaaacgctcgggccgcagcgcgatgcggctgctggaacaccaaaggtttagagcggggtatgatttcctcctgttacgctgcgaatccggcgagctcgatgcggaagtcggacagtggtggacggatttcatcgaaggcgacgcggccgctcgcgaggcattgctcacgcagggcggctcgaaggaaaaatcgccccgcaagcggcggcgccgcggcggggcgcgcaaccgcaagccgggtgaaggtgccgccgagcaggcaccggataccgcaggcgataccgcgagcggttccgacgac

SEQ ID NO: 11113 - DNA, 348 bp, Burkholderia cepacia
atgaacgacgatctccccgccgggctgcccgcgcccgaccagatgcgcgccgccgccgaatcggcctgcgcgctcctcaaggtcatgtcgaatcccgaccggctgctgctgctgtgcgaactgtcgcagggcgagtgctgcgtgagcgatctcgaggcgcgactggacatccatcaaccgacgctgtcgcagcagctcggcgtgttgcgcgacaacgcgctggttcgtacccgccgggaaggcaagaccatccgctattcgctcgacagtccggccgtggtcgcggtgatgggcgtgctgtacgagcagttctgcggggcgaccgcgaaggaggcgcgcgatgcaggt

SEQ ID NO: 11114 - DNA, 390 bp, Burkholderia cepacia
atgccacacatcgtcgtcgaatacaccgcgaacatccgcgacgacgctcgcattcccgcgctgctgcgcacgatcaacgcgacgctgatcgcgcagggcggcgtgttcccgaccggcggcatccggtcgcgcgcgatcgagctgcacgactactgcgtcgccgacggcacggaggacgacgcgttcgtccacgtgatgctgaagatcggctcgggccgcaccgatgcgcagaaaaaagccgcgtgcgacgcgctgttcgacgcgatcaaggcccatttcgccgagctgtacgcgaaacgctatctcgcgctgtcgatggaactgaccgagttcagcgaaagcggctcgtacaagcacaacaacattcacgcccgctacaagcgggccggc

SEQ ID NO: 11115 - DNA, 834 bp, Burkholderia cepacia
atgacccgtcctgtccgtacccgcttcgcgccgagtcccaccggcttcatccacctcggcaacatccgctccgcactctatccgtgggcgttcgcccgcaagatgaaaggcacgttcgtgctgcgcatcgaggataccgacgtcgagcgctcgtcgcaggaagcggtcgatgcgatcctcgaagggatgcaatggctcgggctggatttcgacgaaggcccgatctaccagatgcagcggatggatcgctatcgcgaagtgctcgcgcagatgctcgagaagggtctcgcctatccgtgctacatgtcggccgaggaactcgatgcgctgcgcgaacgccagcgcgaagccggcctgaagccgcgctacgacggcacgtggcgtccggagcccggcaaggtgctgccggagccgccggccggcgtgaagccggtgctgcgcttccgcaatccgctgacgggcacggtcgtgtgggacgacgcggtgaaggggcgtgtcgagatctcgaacgaggaactcgacgacctcgtgatcgcgcgcccggacggcacgccgatctacaacttctgcgtggtggtggacgacatggacatgggcatcacgcacgtgatccgtggcgacgaccacgtgaacaacacgccgcgccagatcaacatcctgaatgcgctcggcggcgagccgcccgtctatgcgcacctgccgaccgtgctgaacgagcagggcgagaagatgagcaagcggcatggcgcgatgagcgtgatggcgtaccgcgacgcgggcttcctgccggaagccgtcgtcaactatctcgcgcgtctcggctggtcgcacggt

SEQ ID NO: 11116 - DNA, 420 bp, Burkholderia cepacia
atggtgcgacgttgggtggcgagctatcgcgagcatggtgaacaggggctgcgcaagaagcacagccactacgacgcgcgattcaaattgtcagtccttcagcggatgcggcgcgatgaactgtcgtatgcacaggtggcagcgctgttcggcatccgcaatgaacgaagcatcccgatctgggagcgtctgtatcatgagggcggtatagatgcgttggcgcctcgtcgccgagggcgccctccgaaaatgatcacctcaccaccaccgaaatcccccgacgataccgtgcagaaagagccgagccgcgaggaactgctcaaggaaatcgtgtatttgcgcgcggaggtggcatacctaaaaaagctcgatgcgctgctgcaatccaagaagcaggcagcgcccaggaaaaagcgcaaa

SEQ ID NO: 11117 - DNA, 825 bp, Burkholderia cepacia
atggcaatcgttaaagttaagccgacatcgccgggtcgccgcgcgatggtcaaggtggtcaacaagaacctgcaccagggcaagccgttcgcggcactgctcgactcgcagagctcgaccgccggccgtaacaacaacggtcgtatcaccacgcgtcacaagggtggtggtcacaagcagcactaccgtatcgtcgatttccgtcgcacgaaggacggcatcccggcaaaggtcgaacgtctcgagtacgacccgaaccgcagcgcgaacatcgcgctggtgctctacgcagacggcgaacgtcgctacatcatcgccccgaagggcctgaccgtcggccaacagctgatgtcgggttcggaagcgccgatccgtgcaggcaacacgctgccgatccgcaacattccggtcggtacgacgatccactgcatcgagatgctgccgggcaagggtgcgcaaatggcgcgttcggctggcacgtcggccatgctgctggcacgcgaaggcgtctacgcgcaggttcgtctgcgttcgggcgaaatccgccgcgtgcacatcgagtgccgtgcaacgatcggtgaagtcggcaacgaagagcacagcctgcgccagatcggcaaggctggcgcgaaccgctggcgcggtatccgcccgacggtgcgtggcgttgcgatgaacccggttgatcacccgcacggtggtggtgagggcaagacggctgcaggtcgcgacccggtgagcccgtggggtacgccggctaagggttaccgcacccgcagcaacaagcgcacgacgacgatgatcgtccagcgccgtcacaagcgt

SEQ ID NO: 11118 - DNA, 1119 bp, Burkholderia cepacia
gtgtgggtgttggtttacggcccgctcgcggggctgtgccaggacggcgaggacgcacgcacgctcgttcatctgcacgcgtaccgctactacccgctgctgcgccagatcgtgtccggggcgatcggcgtcgtgaccctcgtgctgctgctgcagatctggggcgtgccgatcttccgcgcgttcgaaaccggcacgatcggccaccggctcgcgtccgcgctggtgacgatcgcgatcgcggcgatcgtcgcactcgtcgtgtgggaagcggccaacatcgcgatcgagcgccgcctgcagcgctggacgcgcgaaggcaacctggtgcgcgcggcgcggctgcgcacgctgctgccgatgctgcgctcgctgctgttcgtgatgatcgcgctcgtcgtcgtgctgacgggcctcagcgaactcggcgtgaacgtcgggccgctgctggccggcgccagcatcttcggcgtcgcgctcggcttcggctcgcagaagctggtgcaggatttcatcaccgggatcttcctgctgatggaaaacgcgatgcaggtcggcgactgggtcacgctcgccggcgtgtcgggcacggtcgaatacctgtcgatccgcaccgtgcggctgcgcgccggcgacgggtcgctgtacacgatcccgttcagctcggtgacgacggtcaacaacacgaatcgcgggctcggcaacgcggccgtcaaggtcagcatcgcgtatggcgaggacatcgaccgcgcgatcgcgacgctgaaggaaatcggcgccgcattgcgcgacgatccgaagtatcacgacggcatcctgtcggacttcagctactggggtatcgaccaggtcgacggcgcggcgctcgcgctggccggacagatgcagtgcacggactcggcgcgctggagcgtgcagcgcgaattcaaccggcggatcgccgagacgttccgcgaacgcggaatccggatcgccaatccgcagcgcagcgtcgtggcctatgcggacggctcgcggcctgtcgccgccgacgaaaacgatccgcgcgccgacacgcggaatgccgccgatacggcagccccaccgccgtcgcccgacgaagcggcgcgcaagccgggt

SEQ ID NO: 11119 - DNA, 1956 bp, Burkholderia cepacia
taccggcccgacattgacggcctgcgcgccttcgcggtgctcgccgtcgtcgtcttccatgcatttccgtccgtgctaccgggcggcttcgttggcgtcgacgtcttcttcgtcatctccggctacctgatcaccggcatcctgctcgccgatctagggacagaccgattctccttcggccgtttctacgcacggcggattcgtcggatcttcccggcactggtcgtcgtgctgctcgcgacctacgggatgggctggttcagcctgtacggagacgagtatcgcgagctcggcaagcacatcgttgctggcgctggatttgtctcgaactgggcgtcgtggaccgaagccgggtatttcgaccaagcggccgaagccaagccgctgctgcacctgtggtcgctcggcgtcgaggaacagttctacatcgtctggccactcgtgctgtgggccgcataccggctccgactcaccggatgggtgtgcgccatcgtcggtctcgcctcgtttgccaccaacgtcatcctcatcagtcaccacgcgtccgctgccttctactggccagtcacgcgtacgtgggaactgctggcgggcgccgcgttcgcgataagcgcgggcgcgggtcgaccgatcacgggcaaccgcgcgaatgcgtggtcggccggcggtgcgatgctgtgcgtcgcctcctttgcgctgctcaccgcgcgtgacgcttttccgggctggtgggcggtgttaccggtcgtcggcacagtcgcactcgtcgcggctggtcgagacggctggatcaacaggcacgtgctcgcgcatcccgtatctgtctggctcggcaagatcagttacgcgctgtacctgtggcactggccgttgctgtcatttgcgttcatcgtggcaggtcggacgccctcgtcggtcgtgcgaggcgcgttgctggtcattgccgtcgtactggcgtggttgacgaccgccatcatcgagcggccgatccgttttggggtggcgaagcgctggaagctcgtcgcgccgtgtctgctgatgatcggcatcatctatctcggcgggatgacgtacgcgcgcggcggcctcgggttccgcaagggctacagcccggatgccgatgtgacgaccgcgaagctcggtgcgggtcacgagttcgtcaatctcacgtgcggcgtgtcgccggacgagcaacggctgtttccgttctgcgcgaccgacaagcgcgtgcgctcccatttcgccgtatggggagacagcaaagccgacgcgctgtattggggacttgtgcgtgaatcggctcccggcgaaggctggacgctgatcgcgcgtccgagctgcgcgccaatggcgggcgtctggcgcacgtcgtcgaacgcgggcgacgatccggcgctgtgtcgcgacgccaacatcacggcgctgcgcatgctgctggacacgcccgagctcaagaccgtcgtgctcgtcatgaccgatcgcgacgtaatcggacagactttcgccgatcgcgaccagaccacaccccgtgaatccgccgcgctcgacgggcttgatcaggccgtgacggtgctcgagcgggctggccggcgcgtcgcgttggtgctcgacaatccacgcctgcgcgatccgcgacagtgcatggatcgacgcccactcgcgtggccgttcgttcggcatgcactcggtgtcaccgacatgagcgcagcgcaacgctgcgcgatcggctaccgcgagcacgttgcccgcatggcaccgttcacggcgctcgttgacgcgctgaggcgtcgccatcccgcgctgctggtctccgacccggcaaatgccctgtgcgacagcagccgcgacgtgtgtccaatgacaaaggaccgccactacctctacagctacggcgatcacctgtccgactacggaaacggactcgtcgcccggcagttcctgcccctgctgcgtcag

SEQ ID NO: 11120 - DNA, 807 bp, Burkholderia cepacia
atgccgaagtttgctgcaaacctgaccatgctgttcaacgaagtgccgttcctcgaccgcttcaaggcggccgcggacgcgggcttcgacgccgtcgagttcctgttcccgtacccgtatgcgaaagaggaactcgccgaacggctcgagaccaaccgtctgcgcctcgtgctgcacaacctgcccgccggcaactgggatcagggcgagcgcggcatcgcgtgcctgcccgatcgcgtcggcgaattccaggaaggcgtcggccgcgcgatcgagtatgcgaaggcgctgaaggtgccgcagctgaactgcctcgtcggcatcccgtcggcgagcacggcgcgcgacaagacgttcgtcacgatcgtcgacaacctgcgcttcgcggccgacgcgctcaagcgcgaaggcatccgcctgctcgtcgagccgtgcaacagcttcgacatcccgggcttcgcgctgaaccgctcgtcggaagggctcgacgtgatccgcgcggtcggctcggacaacctgttcctgcagtacgacatctatcacatgcaacgcatggaaggcgaactggccgcgacgatcgaacgcaacctcgcatcgatcggccacgtccagctcgcggacaacccgggccgcaacgagccgggcaccggcgagatcaactatgcgttcctgttcgcgctgctcgaccggctcggctatgccggctacgtcggctgcgaatacaagccccgtaccaccacgacggaaggcctcggctggctgcaaagcgtagccggctgcgcaccggcctcggcgcgtcgcgccgcc

SEQ ID NO: 11121 - DNA, 456 bp, Burkholderia cepacia
ctcgtcgagacggcgaccggcatcgcggggctcgaccaggtgtgtgcggcgccgcgcgtcgtgcgcgtggcgttcggcacgctcgatttccaggtcgacctcgggatcgacggcgacggcgaagcgctgaacgcgttccgctcgcggatcgtgctcgcgtcgcggctggcggggatcgcgccgccggtcgacggcgtgtcgacggtcatcgacgatccggccgcgatcgaacggcatgcgcgctacgcgcggggcttcggcttcggcgggaaactgtgcattcatcccaagcagatcgatgcggtgcaccgcgcgtatgcatggaccgacgcggaacaggcgtgggcgcggcgcgtgctcgatgccgtcgacgcgagcggcggtgcggccgtggcgctcgacggcaggatggtcgacatgccggtgatcctgaaggcgcggcggattctgcgcggg

SEQ ID NO: 11122 - DNA, 1239 bp, Burkholderia cepacia
atgaacatctacgcagtaggcggcgcgatccgcgacgaattgctcggcgtgccggtgcaggaccgcgactacgtggtggtcggcgcgacgcccgagcagatgaccgcgcagggcttccggccggtcggcaaggatttcccggtgttcctgcatccgcagacgcaagaggagtacgcgctggcgcgcaccgagcgcaagaccgcagccggctatcacggcttccagttccactacgcgccggacgtcacgctcgacgaggatctcgcgcggcgcgacctgacgatcaacgcgatggcgcgcgaggtgagcccggaaggcacgctggtcggcccggtgatcgatccgttcgacgggcaggccgacctgcgcgcgcgtgtgttccggcacgtgagcgacgcgttcgtcgaggatccggtgcggatcctgcggatcgcgcgctttgccgcgcggttcgcggatttcacggtcgcggacgaaacgctcgcgctgatgcggcggatggtcgacgcgggcgaggtcgacgcgctcgtccccgaacgcgtgtggcaggaaatcgcgcgcgggctgatggaggcgaagccgtcgcggatgttcgcggtgctgcgcgactgcggcgcgctcgcgcgcatcctgcccgaggtcgatgcgctgtggggcgtgccgcagcgcgccgattaccacccggaagtcgataccggcgtgcacgtgatgatggtcgtcgactacgcggcgaagcagggctattcgctggcggtgcgcttcgcggcgctcacgcacgatctcggcaaggggacgacgcccgcggacgtgctgccgcgccacgtcggccacgaaagccgcagcgtcgagctgctcaagccgttgtgcgagcggctgcgggtgccgaacgaatgccgcgatctcgcgctggtggtcgcgcgcgagcacggcaacctgcatcgcgtgatggaaatgggcgcggccgcgctggtgcggctgttccagcgcagcgacgcgctgcgcaagccggcgcgcttcgccgagctgctgcaggcctgcgaatcggatgcgcgcggccggctcggactcgatgcgcagccgtatccgcaggccgagcggttgcgcgtcgcgctcgcggccgcgcgcagcgtcgatgccggcgcgatcgcacgcggcatcggcagcgacacggagaagatcaaggaagccgtgcatcgcgcgcggatccaggccgtcgcgcaggcgctcgcaatcggcgag

SEQ ID NO: 11123 - DNA, 645 bp, Burkholderia cepacia
atgaacgcacctgccccctcctccgtccgccgcacgaagaaactgccgccgctgcgcgtcggcatcggcggccccgtcggctccggcaagaccacgctgctcgaaatgctgtgcaaggcgatgcgcgaccgctacgacctcgtcgcgatcaccaacgacatctatacgaaggaagaccagcgactgctgacggtcgcgggcgcactgcccgaggaacgcatcatgggcgtcgagacgggcggctgcccgcacacggcgatccgggaagatgcatcgatcaacctcgaagccgtcgaccggatgctcgcgcgctttcccgatgccgacatcgtgttcatcgagtccggcggcgacaatctcgcggcgaccttcagccccgagctgtcggacctgacgatctacgtgatcgacgtcgccggcggcgagaagattccacgcaagggcggccccggcatcacgaagtccgacctgctcgtgatcaacaagaccgacctcgcgccgctggtcggcgcgaacctcgacgtgatggcgtccgacacgcggaagatgcgcggcgagcggccttacgtgatgacgaacctgaaggcgctcgacggcgtcgcggacgtgatcgcattcatcgagaagaagggtttgctgacggtg

SEQ ID NO: 11124 - DNA, 2553 bp, Burkholderia cepacia
gtgatggagctgtacatctccgaccatccgctcgactgcctcacctgccccgccaacggcgattgcgagctgcaggacatggccggcgtggtcggactgcgcgaagtgcgctacggcttcgatggcgcgaatcacctgaaggacgcgaaggacgaatctaatccgtacttcacgtacgatccgtcgaagtgcatcgtctgcaaccgctgcgtgcgcgcgtgcgaggaaacgcagggcacgttcgcgctgacgatcgccgcgcgcggcttcgaatcgcgcgtcgccgccggcgaaagcgaatcgttcatggcgtcggaatgcgtgtcgtgcggtgcgtgcgtcgccgcctgcccgacggccacgctgcaggaaaaatccgtcgtgcagctcggccaggccgaacactcggtcgtcacgacctgcgcgtactgcggcgtcggctgctcgttcaaggccgagatgaagggtacgcaggtcgtgcgcatgacgccgcacaagaacggtctcgcgaacgaaggccacgcctgcgtgaagggacgtttcgcgtggggctatgcgacgcacaaggaccgcatcacgaagccgatgatccgcgagaagatcaccgacccgtggcgcgaagtgagctgggacgaagccctcacctacgcggcgacgcaattccgcaagctgcagcagaaatacggccgcgattcgatcggcggcatcacgtcgtcgcgctgcacgaacgaggaaacctatctcgtgcagaagctcgtgcgcgccgcgttcggcaacaacaacgtcgatacctgcgcacgcgtgtgccactcgccgaccggctatggcctcaagacgacgctcggtgaatcggccggcacgcagacgttcgcatcggtcggtcaggccgacgtgatcgtcgtgatgggcgcgaacccgaccgacggccatccggtattcggctcgcgactgaaacggcgcgtacgcgaaggcgcgaagctgatcgtgatcgacccgcgccgcatcgacgtcgtcgacggtccgcacgtgaaggccacgcaccacctgcagttgcgcccgggcaccaacgtcgcgatcgtcaatgcgctggcgcacgtgatcgtcaccgaagggctggtggccgacgcattcgtcgccgagcggtgcgagacgcgcgcgttcgagcaatggcgcgacttcgtcgcgcaggccgacaattcgcccgaggcgaccgccgacgtgacgggcgtgccggccgagttagtgcgcgaggccgcgcgcctctatgcgacgggcggcaacgccgcgatctactacggcctgggcgtcaccgaacacgcgcagggctcgacgacggtgatgggcatcgccaacctcgcgatggcgaccggcaacgtcggccgcgaaggcgtcggcgtcaatccgctgcgcggccagaacaacgtgcagggttcgtgcgacatgggctcgttcccgcacgaattgcccggctaccggcacatcggcgacacggtcgtgcgcacgcagttcgagcaggcgtggtcggccacgctgcagccggagccggggctgcgcatcccgaacatgttcgacgcggcgctcgacggcagcttcaagggactctactgccagggcgaggacatcgtccagtcggacccgaacacgcagcacgtcgcggccgcactgtccgcgatggaatgcatcgtcgtgcaggacatcttcctgaacgaaaccgcgaaatacgcgcacgtgctgctgccgggctcgacgttcctcgaaaaggacggcacgttcacgaacgcggaacgccggatctcgcgcgtgcgcaaggtgatgccgccgctcgcgggctacgcggactgggaagtcacgctgctgctgtcgcaggcgctcggctacgacatgcactacacgcatccgtcggaaatcatggacgagatcgcgcggctcacgccgaccttctcgggcgtgtcgtacgagaagctcgacgcgctcggcagcattcaatggccgtgcaacgaacaggcgccggacggcacgccgaccatgcacatcgacacgttcgtgcgcggcaagggccggttcgtgatcaccaagttcattccgacgccggagaaggtcacgcagcgctatccgctgatcctgacgacgggccgcatcctgtcgcaatacaacgtcggcgcgcagacgcgccggaccgagaacgttcagtggcatgaagaggatcgcctcgagatccatccgcacgacgcggaagatcgcgggatccggaccggcgactgggtcggcatcgagtcgcgtgccggtcagaccgtgttgcgcgcgcgggtgtccgaccgcatgcagccgggcgtcgtgtacacgacgttccacttccctgaatcgggggcgaacgtgatcacgacggacagttccgactgggcgacgaactgccccgaatacaaggtgacggccgtgcaggtgatgccggttgcgcaaccgtccgactggcagcgctcgtatgcgcgcttcaacacggagcagctcgacctgctcgagcgccgcgccgccgcgccggccgccgtacgacaggca

SEQ ID NO: 11125 - DNA, 1042 bp, Burkholderia cepacia
atgcgcaccgcaaccgtcgttagcatgccgaatggccagtcaggaataccgcacatcgtgaaacgcattcttatcgtaaaagtgacatcgctcggcgacgtcgtcgagacgctgcccgtcgtcgccgacctgcatcgcgcctttcccggcgtgtcggtcgactgggccgtggacgaatcgtgtgcggagatcgtgcgctggcatccgggagtgagcaccgtcctgtgcgcgccgctgcgccgcttcaagaaaatgcgcaacgccggcgacctgaaggcgatctcggcgtcgatcggtgcgctgcgtgcgcaccgctacgacgcggtcatcgatctgcacggcgtctacaagagcgcgatcattgcggcgctggcgcgcgccgggcgccgcgtcggttaccggaccccggatctcggcgagacaggggcgcgttttgcgtattcgcatcgttttggcccgaagcctgcatgcgatgcgtggcacggcatgcgcatcagcgcgggcgaagcgctcggctatgcgcccgagggtatcgcctcgtacgggatcgaaccgcccgacgtcacgttgccgcccgcagttaacgagggtgcgccgttcatgctgctgttccacgcgacgtcgaattccgacaagaaatggccgaccggccattgggttgaactggctacccggatgatggcgcgcggcttgcgcgtgctgctgccatggggctcgtcgtccgagcaccgcgacgcgcaggagatcgcgatgcaggcgcctggcgcggtcgtgctgccggccatgtcgctgggcgaactcgccgcgacgatgagccgggcggcgctggtcatcggtgttgatacggggatggtgcatctgtcgcacgcgctgcggcgtccgacggtgatgattttcgtggccacctcgcgcgcccacttcggcatcggcggcgcaccgcacgcgctgtcgatcggtgagtccggcgccgcgccgagcgtggacgacgcgatgaaggcaatcgataccgtgggaccggtctacgacgtgttgccggtgcggg

SEQ ID NO: 11126 - DNA, 1008 bp, Burkholderia cepacia
atgacgattcgcgtcgcaatcaacggctacggccgtatcggccgcaacacgctgcgcgcgttctatgaaaacggcaagaagcacgatctcgagatcgtcgcgatcaacgacctgggcgatgcgaagaccaacgcgcacctgacccagtacgacaccgcgcacggcaagttcccgggcgaagtgtcggtcgacggcgactacctcgtcgtgaacggcgacaagatccgcgtgctcgcgaaccgcaacccggccgaactgccgtggggcgagctgggcgtcgacgtcgtgatggaatgcacgggcttcttcacgacgaaggaaaaggcgagcgcgcacctgaagggcggcgcgaagaaggtgatcatctcggcgccgggcggcaaggacgtcgacgcgacgatcgtctacggcgtgaaccacgacgtgctgaaggccgagcacacggtcatctcgaacgcatcgtgcacgacgaactgcctcgcgccgctcgtcaagccgctgaacgacaagatcggcctcgaaaccggcctgatgacgacgatccacgcgtacacgaatgaccaggtgctgacggacgtctatcacgaagacctgcgccgcgcgcgttcggccacgcacagccagatcccgacgaagacgggcgcggcatcggccgtcggcctcgtgctgccggaactgaacggcaagctcgacggttacgcgatccgcgtcccgacgatcaacgtgtcgatcgtcgacctgtcgttcatcgcgaagcgcgacacgacggtcgaggaagtcaacgcgatcatgaaggaagcatcggaaggcgcgctgaagggcatcctcggctacaacgacgcaccgctggtgtcgatcgacttcaaccacaacccggcttcgtcgacgttcgacgcgacgctgaccaaggtgtcgggccgcctcgtgaaggtgtcgagctggtacgacaacgagtggggtttctcgaaccgcatgctggatacggctgtcgcgttcgcgaacgcgaag

SEQ ID NO: 11127 - DNA, 1026 bp, Burkholderia cepacia
gtgacgcacgccggccgccggcatgcactcggcgcgctcgcggcggcactcggcgccgtgtgctgcggtgcatttcccgcatcggcggcggctgccgtttccgcggccggaggcgcaggcggtgcgcacggcggcgtgtcgctggccggcaatcccgtcgtgtcgcaggccagcgcgaagatgcccgtgcggccgcagcgcgtggtcgcgctcgacttcatgttcgcggaaagcgtgatcgcgctcgacctcgtgccggccgggatggccgatacggcgttctacccgggctggctcggctaccgcagcgagcagctcgcgcacgtgaccgacatcggctcgcggcaggagccgggactcgaggcgatcgcggcggtcaagccggatctcatcatcggcgtcggcttccggcatgcgccgatcttcgacgcactcgaccggatcgcgccgacgatcctgttccagttcagcccgaacgtgtcggaaggcggcgtaccggtcacgcagctcgactggatgcggcagatcttccggacgatcggtgcggtgacggggcgcgacgcgcgcgcgcaggcggttgaagcgcaactcgacgccggcatcgcgcgcaacgcggcgcggctcgcggccgccggccgccacggcgagcgcgtcgcgctgctgcaggatctcggcttgcccgatcgttactgggcgtatacgggcaacagcacgtcggcgggcctcgcgcgggcgctcgggctcgatccgtggccgaagaagccgacgcgggaaggcacgctatacgtgacgtcggccgatctgctgcggcagcgcgacctcgccgtgctattcgtgaccgcgtcggggatggacgtgccgttgtcgaccaaactcgattcgccggtgtggcgcttcgtgcccgcgttgaaggaccatcggatcgcgctgatcgagcgcaacatctgggggttcggcgggccgatgtcggcgctgaagctggccgacgtgatgaccgatacgatgctgaagctgccggccgtgcgt

SEQ ID NO: 11128 - DNA, 2483 bp, Burkholderia cepacia
ggcggcacgatctccggcgcgggcggcgtcgtgcagtccggctcgggcacgaccacgctcggcggcgcgaacacctacggcggcgggacgacgttgagcagcggcggactgagcgtgggcagcaatacggcgctcgggtccggcgcgttgaacgtgaccggcaacggcacgctgagcgcgagcgtaaacggcacgacgctcggcaacgcggtcacgctcggcgcgggcgcgacgctcgggctgaacggcgcgaacgatctcggcctgagcggcacgatttccggcagcggcggcctcgcgcaaaccggcgcgggcaccacgacgctcaccggcacgaacacctatgacggcggcaccacgttgagcggcggcgggctcgtcgccggcaacggcagcgcgctgggtaccggcgcgctgaacgtcacgggcgcgggcggctcgctcggcacgagcgtcggcggcacgacgctcggcaatgcggtgaatctcggcgcgggggcgacgctgaccgttgggggtgcgaacgatctcgggctcggcggcgggatctcgggcagcggcggcctgtcggtcagcggcccgtcgacgaccacgctcaccggcgtgaacacctataccggcaacacgacgatcggcggcggtagcacgctggcggtcggcgcgggcggcagcctgtcggcaggcagcgcgctcgatctcgcgggcacgggcgcggcgctcgacatcagcgcggcgaccacgccgcaaacgagcgggatgctgtccggcgtggcgggcacgaacgtgaatctcggcggcaacacgctgacgctggccggtaccggcaacggtaactatgcagggacgatcggcggcaccggcgggttgacgatggcaggcaccggcacggaaacgctgaccggcaccaacacgtacacgggcgcgacgacgatcaacagcggcacgctcgcgatcggcgcgggcggcagcctgtccgcgagcagcccggtgaacctgaccggtgcgggcgcaaccttcgacgtcagcggcgcgaccacgccgcagacgacgggcacgctgtcgggtgtcgcgggttcgacggtgaacctcggcggcaacaacctgacgctcggcggcacgggcaacggcacgtatggcggcacgatcgccggcgcgggcggcagcctcacgttgtcgggcaccggcaccgagacgttgaccggcaacaacacgtacacgggcggcacgaccctgagcggcggcggcacgttgatcgcgggcagcggctcggcgctcggcaccggtgcgctgaacacgagcggtgcaggcggcacgctggccgcgagcacgccgggcacgacgctcggcaacgcggtgaatctcggcgcggggtcgacgctgacggtcggcggtgcgaacgatctcggcctcggcggcgcgatctcgggcggcggcaacctcgcggtgaacggtccgtcgacgacgacgctgtcgggcgcgaacacctacaccggcagcacgacgatcggcggcggcagcacgctggcggtcggcgcgggcggcagcctgtcggcaggcagcgcgattgacctgtccggcaccggcgcgacgctcgacctgagcgccgccacgtcgccgcagacgagcggcgcgctgtccggcggcacgggcacgaacgtcaacctgggcggcaatacgttgacgctcggcggcgcaggcagcggcacgtatggcggcgtgatcggcggcacgggcgggttgacgctgtcgggcaccggcaccgaaacgctgacggggaccaacacgtacaccggcgcgaccacgatcaacagcggcacgctcgcgatcggcggcaacggcagcctgtcgtcgagcagcccggtcagcctgacggcggccggcgcgacgctcgacctgagcggcgccgcctcgccgcaatcgaccggcgcgatctctggcgtggccggctcgacggtgaacctgggcaacaacaacctgacgctcggcgggtcggccagcggcacctacgcgggcaacatcgccggcaccggtggcgtgacgatgtcgggtaccggcaccgaaacgctgacgggcagcaatacgtacaccggcgcgaccacgatcaacagcggcacgctggcgatcggcgcgggcggcagcctgtcggggacgacgccggtgagcctgacgggtgcgggcgcaaccttcgacctgagcggcgcgaccacgccgcagacgacgggcacgctgtcgggtgtcgccggttcgacggtgaacctcggcggcaacaacctgacgctcggcgggttcggtagtggtacttacgacggcgcgatcgcgggggcgggcgggtctccgacggtgggcggggccggcgcgcgccacgctgccggggctccccgcgccccgccctcccgccctcgtcgccccgcgccccgcgccgggggggcgcccggccggacgggccgcaacccccttagcccaacaagattgcggggacagag

SEQ ID NO: 11129 - DNA, 933 bp, Burkholderia cepacia
atgatgaagcgcatccagatcatcgattcgcacacgggcggcgaacccactcggctcgtcgtgtccggctttccgtcgctcggcgacggcacgatggccgagcggcgcgacgtgctcgcgcgcgagcacgatcgttaccgcaccgcgtgcatcctcgagccgcgcggcagcgacgtgctggtcggcgcgctgctgtgcgacccggtagcgcccgacgcggcagccggcgtgatcttcttcaacaatagcggctatctcgggatgtgcgggcacggcacgatcggcgtcgtgcgcacgctgcatcacatgggacgcatcgcgccgggcgtgcacaggatcgagacgccggtcggcaccgtcgaggcgacgctgcacgacgacctgtcggtcagcgtgcgcaacgtgcccgcgtatcgccacgcgcagggcgtcgcgctcgacgtgccgggatacggccccgtgaagggcgacatcgcgtggggcggcaactggttcttcctgatcagcgaccacgggcagcgcgtcgccggcgacaacgtcgcggcgctcaccgcgtatgcgtcggccgtgcgcgaagggctggaacgcgcgggcatcaccggcgcgaacggcggcgagatcgatcacatcgagctgttcgccgacgatcccgagcacgacagccgcagcttcgtgctgtgcccgggcctcgcgtacgaccgttcgccgtgcggcaccggcacgagcgcgaagctcgcgtgcctcgcggccgacggcaagctcgcgccgggcgccgtgtggcggcaggcgagcgtgatcggcagcgtgtttcacgcgagctacgagcgggccgacggcggcatcgtgccgacgattcgcggcagcgcgcacctgagcgcggaagcgacgctactgatcgaggaagacgatccgttcggctggggcatcgggtcg

SEQ ID NO: 11130 - DNA, 1359 bp, Burkholderia cepacia
atgaatatcgtgattttggcggcaggcaccggcaagcgcatgcgttccgcgctgccgaaagtgcttcaccccctggccggcaggccgctcctctcccacgtcatcgacaccgcgcgcacgctgcagccgtcccggctcgtcgtcgtcgtcggccacggcgccgagcaggtccaggccgcggtcgccgcgcccgacgtccagttcgcggtgcaggccgagcagctcggcacctttcatgcggtccgccaggcgctgccgctgctcgatcccgcgcaaccgacgctcgtgctgtacggcgacgtgccgctcacgcgcgcgtcgacgctgcagcgtctcgtcgatgccgcacgcgagggccgctacgggatcctgaccgtcacgctcgacgacccgaccggctacggccgcatcgtgcgcgacgcgtccggcttcgtcacgcgcatcgtcgagcagaaggatgcgtcgccggaagagctgaagatcgccgagatcaacaccggcatcatcgtcacgccgacggcgcagctgtcgatgtggctcggcgcgctgaagaacgaaaacgcgcagggcgagtactacctgaccgacgtcgtcgaactcgcgatcgaggccggcttcgaggtcgtcacgtcgcagcccgacgaggaatgggaaacgctcggcgtgaacagcaaggcgcaactcgcggagctcgaacgcattcaccagcgcaacgtggcggacgcgctgctcgtcgacggcgtcacgctcgccgatccggcgcgcatcgacgtgcgcggcacgctgcgctgcgggcgcgacgtgtcgatcgacgtgaactgcgtgttcgaaggcaacgtgacgctcgccgacaacgtgacgatcggcgcgaactgcgtgatccgcaatgcgtcggtcggcgccggcacgcgcatcgacgcgttcacgcacatcgacggcgccgcgctcggcgcgaacaccgtgatcggcccgtacgcgcggctgcgccccggcgcgcagctcgcggacgaagcgcacgtcggcaacttcgtcgaggtgaagaacgcggtgatcggccacggttcgaaggcgaaccacctcacgtacatcggcgacgccgacatcggcgcgcgcgtgaacatcggcgcgggcacgatcacctgcaactacgacggcgcgaacaagttccgcaccgtgatcgaggacgacgtgttcgtcggctccgacacgcagctcgtcgcgcccgtgcgggtcggccgcggcgtgacgatcgccgccggcacgacgatctggaaggacgtcgccgaaggcgtcctcgcgttgaacgagaagacgcagaccgcgaagagcggctatgtccggccggtcaagaagaaaagt

SEQ ID NO: 11131 - DNA, 1008 bp, Burkholderia cepacia
atgcattcgatacaactcgccctatggatggtcgcgacgctggtgctcgtcgcgctcgtattcgacttcatgaacggctttcacgacgcggcgaactcgatcgccaccgtcgtgtcgaccggggtgctgaagccccagcaggccgtggtgttcgcggccgcgttcaacgtgatcgcgtacttcatcttccacctgaaagtcgcgcagaccgtcggtaaaggcacgatcgatcccgaaatcgtcgaccactacgtcgtgttcggcgcgctggtcggcgcgatcggctggaacgtgatcacgtggtactacgggattccgtcgagctcgtcgcacgcgctgatcggcggtctcgtcggcgcggcgctcgcgaaatcgggctggagttcgctgaacgtcgacgggctgctgaagacgatcgcgttcatcttcatttcgccgctgctcggtttcatcctcggttcgctgttcatgctcggcgtgtcgtggctgtatttccgtaccgcgcccagcaaggtcgaccggcgcttccgccggctgcaactgctgtccgccggcctgtacagcctgggccacggcggcaacgatgcacagaagacgatcggcatcatctggatgctgctgatcgcgagcggctacgcgtcggccaccgccgatgcgccgccggcatgggtgatcggcgcgtgctacctgtcgatgggcctcggcacgctgttcggcggctggcgcatcgtgcgcacgatgggccagaagatcacgaagctcaagccggtcggcggcttctgcgcggaaagcggcggtgcgatcacgctgttcgtcgcgtcgttcctcggcattcccgtgtcgaccacgcacacgattaccggcgcgatcgtcggtgtcggcgcgacgcagaagttgtcggccgtgcgctggggcgtcgccggcaatatcgtgtgggcgtgggtgctgacgctgccggcggccgcgctgttcgcggccggcgggtggtggctcgggcaccagatcttc

SEQ ID NO: 11132 - DNA, 1779 bp, Burkholderia cepacia
atgctgccagcacacaaacagaccctcgaagccctgctcgcggatagcgtcaagcaggtcgcacacgcgctgaaaggcgccgacgcagcattcgtcgccccggccatcacgctggagcgcccgaaggtcgccgcgcacggcgacgtcgcgtgcaacgtcgcgatgcagctcgcgaagccgctcggcacgaacccgcgccagctcgccgagcagatcgtcgccgccctcaccgcgcagccggccgcgcaaggcctcgtcgaagccgccgagatcgccggccccggcttcatcaacctgcgcctgtcggccgccgcgaagcaggccgtgatcgccgccgtgttcgaccagggccgcgcgttcggcacgtcggatcgcgagaagggcaagcaggtgttgctcgaattcgtgtcggccaacccgaccggcccgctgcacgtcggccacggccgtcaggccgcgctcggcgacgtgctcgcgaacgtgatcgcgagccagggctacgcggtgcaccgcgagttctactacaacgacgcgggcgtgcagatcggcaacctggcgatctcgacgcaggcgcgcgcgcgcggcctgaagccgggcgacgcgggctggccggaagccgcgtacaacggcgagtacatcgccgacatcgcgcgcgactacctgaacggcgaaacggtcgccgcctcggacggcgagccggtcaagggcacgggcgacgtcgaggatctcgacgcgatccgcaagttcgcggtcacctacctgcgtcgcgagcaggacatggacctgcaggcgttcggcgtgaaattcgaccagtactacctcgaatcgtcgctgtacagcgaaggtcgcgtcgagaagacggtcgacgcgctggtcaaggccggcatgacctacgagcaggacggcgcgctgtggctgcgcacgaccgacgaaggcgacgacaaggatcgcgtgatgcgcaagtcggacggcacgtatacgtacttcgtgccggacgtcgcgtaccacgtgacgaagtgggagcgcggcttcacgaaggtgatcaacatccagggttcggaccaccacggcacgatcgcgcgcgtgcgcgccggcctgcaggggctgcacatcgggatcccgaagggctatcccgactacgtgctgcacaagatggtcacggtgatgcgcgacggccaggaagtgaagatctcgaagcgcgcgggcagctacgtgacggtgcgcgacctgatcgaatggtcgggcggcgcagcggcgggccaggaagcggcccccgacctgatcgacgaggcgaccatcacgcgcggccgcgacgcggtgcgtttcttcctgatctcgcgcaaggccgataccgagttcgtgttcgacatcgacctcgcgctgaaacagaacgacgaaaacccggtctattacgtccagtacgcgcatgcgcggatctgctcggtgctcaacgaactgaagtcgcgctacaacgtcgacgtcgcgcaactgccgggcgccgacctgtcgcaactgacgagcgcgcaggcgacatcgctgatgcagaagctggccgagtatccggacatgctcacgcacgcggcgaacgagctggcgccgcacgcggtcgcgttctacctgcgcgatctcgctggcgaattccactcgttctacaatgcggagcgcgtgctggtcgacgacgcagcgccgcgcaatgcgcgcgccgcgctgctcgccgcgacccggcaggtgctcgagaacggcctggcgatgctcggcgtgtccgcacccgccaagatg

SEQ ID NO: 11133 - DNA, 684 bp, Burkholderia cepacia
ttgactcgccgccatgacgtcctgttcgccgacagtatcgatgtcacgcggcttgccaatcgtgcaggttccacaccctttttcatctatgcgcgcgccgcaatcgacgcccgcgtgtgccagttgcgtgcaaaactgccggcgtcgatacagttgcattactcgatcaaggccaacccaatgcctgctgtcgtacaccatctggccacgcgaatcgacggctttgacgtggcctccggcgccgagttggcattggcgctcaacgcaggcatgccgcctgatcagatcggctttgcaggtccgggcaaaacacgtgaggagctacggtgtgcagtggccagcggcgtgaacgtgcatatcgaatcgctcactcaactgcatctggtggcagcccttggctgggagctgggcctgcgcccaaacgtgacaattcgcgtgaacccggattttcagactacgcatgccggcatgcgcatgggtgggggagcaactcagttcggcatcgacgccgaacaagtccgtaagcgcccgagcagtaccgtagtgcaggttgttgaccgcggagctccgcgacgctatcggatgggctcgacgcgagcagtaggcggcagcgatggtgcgacgttccacgggagcagttcgtcgacccggttggccggatggtcggcgatgcgctcgagcacg

SEQ ID NO: 11134 - DNA, 2751 bp, Burkholderia cepacia
atgcctgaagaacgaaatctggaaggtaagaccctgctattggttgacggttcgagctatctgtatcgggcttaccatgcgatgcctgatttgcgtggccctggcggggagccgaccggagcgctctacggaatcatcaacatgctgcgccgtatgcgcaaggaagtcagtgcagagtatagcgcttgcgtgttcgatgcaaagggcaagacgttccgcgacgacctttatgccgactataaggcaaaccgtccgtcgatgccgcccgatctcgcattgcaggtcgagccgatccacggcgccgtgcgcgcgctcggctggccgctgctgatggtcgaaggcgtggaggccgacgacgtgatcggcacgctcgcgcgcgaagccgaacggcacgggatgaacgtgatcgtgtcgaccggcgacaaggatctcgcgcagctcgtgaccgagcgcgtcacgctcgtcaacacgatgaccaacgagacgctcgaccgcgatggcgtgatcgcgaagttcggcgtgccgcctgagcgcatcatcgactatctcgcgctgatcggcgacaccgtcgacaacgtgccgggcgtcgagaagtgcgggccgaagacggccgtgaagtggctgtcgcaatacgaaagcctcgacggcgtcatcgcgcacgcggccgacatcaagggcgtggtcggcgacaaccttcgccgtgcgctcgatttcctgccgctcggccgcaagctcgtgaccgtcgacacgtcatgcgatctcgcgccgcatctcgaatcgatcgaagcgtcgctgaagaccgacggcgaggcgcgcgagctgctgcgcgacatcttcgcgcgttacggcttcaagacctggctgcgcgaagtcgagaacgcacccgcggaaggcggtggcgccgatgcgccggaaggcgagccggccccggtgatcgcggccgacgtcgtgcgcgaatacgacacgatccagacctgggaacagttcgacgcgtggttcgcgaagatcgacgcggccgcgctgaccgcgttcgacaccgagacgaccgcgctcgatccgatgctcgcgcggctcgtcggcctgtcgttctcggtcgagccgggcaaggcggcctacctgccggtcgcgcaccgcgggcccgacatgcccgagcagcttccgctcgacgaagtgctcacgcgcctgaagccgtggctcgaatcggccgatcgcaagaaggtcggccagcacctgaagtacgacgcacaggtgctcgcgaactacgacatcgaactgaacggcatcgagcacgacacgctgctcgaatcgtacgtggtcgaatcgcaccgcacgcacgacatggacagcctcgcactgcgtcatctgggcgtcaagacgatcaagtacgaagacgtggccggcaagggcgcgaagcagatcggtttcgacgaagtggcgctcgcgcaggccgccgaatacgcagccgaagatgcggacatcacgctgcagctccatcacgcgctgtatccgcaggtcgcccgcgagccgggcctcgagcgcgtgtaccgcgagatcgagatgccggtgtcgctcgtgctgcgcaaaatggagcgcacgggcgtgctgatcgacgatgcgcggctgcacgcgcagagcaccgaaatcgcgacgcgcctgatcgaactcgaggggcaggcgtacgaactggcgggcggcgaattcaacctcggctcgccgaagcagatcgggcagatattcttcgagaagctgcagttgccggtcgtgaaaaagacgccgagcggcgcgccgtcgaccgacgaggaagtgctgcagaagctggccgaggactacccgctgccgaagctgctgctcgagcatcgcgggctgtcgaagctgaagtcgacctataccgacaagctcccgcgcatggtgaatcccaccaccggccgcgtgcatacgaactatgcgcaggccgtcgcggtcacgggccgcctggcgtcgaacgatcccaatcttcagaacattccggtgcgcacggccgaaggccggcgcatccgcgaggcgttcattgcagcgccgggccaccggatcgtatcggccgactattcgcagatcgagctgcggatcatggcgcacatctccggcgacgcgtcgctgttgcgcgcgttctcgcagggcgaggacattcaccgcgcgacggccgccgaggtgttcggcgtgacgccgctggaggtcaattccgaccagcgccggatcgcgaaggtgatcaacttcgggctcatctacgggatgagcgcgttcgggctcgcatcgaacctcggcatcacgcgcgacgcggcgaagctctatatcgaccgctatttcgcccgctatccgggcgtcgcgcagtacatggaagacacgcgcgcaaccgcgaaggagaagggctacgtcgaaaccgttttcggtcgccgcctgtggctgcccgagatcaacggcggcaatggcccgcgccgtcaggcggccgagcgcgcggccatcaatgcaccgatgcagggcacggcggccgacctgatcaagctgtcgatgatcgcggtggacgactggctcacgcgtgaccggcttgcatcgcggatgatcatgcaggtgcacgacgaactggtgctcgaggtgccggaaggcgagctgtcgctcgtgcgcgagaaactgccggaaatgatgtgcggcgtcgcgaagctgaaggtgccgctggtcgccgaagtgggcgccggcgcgaactgggaagaggcacac

SEQ ID NO: 11135 - DNA, 1197 bp, Burkholderia cepacia
atgatcatcacttcgctgctggacacggatctctacaagttcacgatgatgcaggtcgtcctgcatcactttcccgctgcaaacgtcgaataccgcttccggtgccgcacgcccggcgtcgatctcgtgccgtacatcgacgagattcgcgacgaggtgcgcggcctgtgctcgctgcgcttttccgacgtcgaactcgattacctgcggcggatgcgcttcatcaagagcgacttcgtcgatttcctcgcgctgttccacctgaacgagaagtacatctcggtcacgccgtcgccgaagggcaacggcgagatcgacatcgtgatcgaggggccgtggctgcatacgatcctgttcgagatcccggtgctcgcgatcgtcaacgaagtctatttccgcaacacgcagcgcgagcccgactatcgcgaaggccgcgaacggctgcgcgagaagatcaagctgctcggcgcgaagcccgagttcgccgactgcaagatcgccgattacggcacgcgccggcgcttctcgaaggtctggcacgaggaagtcgcgctcacgctgcgtgacgggctcggcccgcagttcgcgggcacgagcaacgtgctgtacgcgatgaagcacgacatcacgccgctcggcacgatggcgcacgagtatctgcaggcgtgccaggcgctcggcccgcggctgcgcgattcgcagatctacggcttcgagatgtgggcgaaggaatatcgcggcgacctcgggatcgcgctgtcggacgtctacggcatggacgcgttcctgaacgacttcgacatgtacttctgcaagctgttcgacggcgcgcgccacgattcgggcgatccgttcgagtggggcgagcggatgctgcgccactacgaagcgaaccggtgcgacccgcgcaccaaggtgctggtgttctcggacgcgctcgacattccgaaggtcatgcagctgtacgaacggttccgcggccgctgcaagctcgcgttcggcgtcggcaccaacctcaccaacgatcttggctacgtgccgctgcagatcgtgatcaagatggttcgctgcaacgggcagccggtcgcgaagctgtccgattcgccgggcaagagcatgtgcgacgacaaggcgtatctcgcgtacctgcggcaggtgttcggcatcgcgcagccggtcgaggaagacgcgtcgaag

SEQ ID NO: 11136 - DNA, 906 bp, Burkholderia cepacia
gtgcagaaggcggccgaaagcctgtcgatcacgcaaccggccgtgtcgaagacgatcgccgagctggaggcgatcctcggcgtgaagctgttcgagcgcggccggcacggcgcgcagccgacccgcgaagcgcaactgttcatgccgcacgcgaatgcgtgcgtgctggcgctgcgtcagggcgtcgggctgctggcgcgcgagggcggggccgccgccgcgacgctggaaatcggcatactgccgaccgtcgcggcctcgcttgcgccggccttgatgaaggcgttgaccgcgcgctggccgcgtatcgtcgtgcggatcgcgacggccgcgaacgccgagttgctcgagcgtctgaaatccggcgcgatcgaatgcgcgatcggccggctgtcggagccggagcgaatgatcgggctcgcgttcgagcagttgtacaacgagccgctcgtcgcggtcgtgcgcgccgggcatccgctgctcgcgagcgtggcgccggccgccgagctggcgcgctatccggtcgtgctgccgccgttcggcacgttgatccgccagtcggccgagcaactgctcggcgcatgcggcgcgccgccgctggattcgttcatcgaggtgctgtcggtatcggttgcgcgcgcgctggcgctcgagaacgatgcggtctggttcgtgccgctctatgccgccgaatacgatctgtcggccggtgcgctggcgcgcctgccgctgccgtcggcgggcaccgacgagccggtcgggctcgtgctgcgtaccgatgcgcagccgtcgccggtcgcgcggacgctgatcgacgcggtgcgcgacatcgcccggtcgcggttcggcgatgcgcgcccgcaccgggcaccacgcacggcgcgcaagcctgctcgcggcaagcgt

SEQ ID NO: 11137 - DNA, 1473 bp, Burkholderia cepacia
atgccgttccgcttcacgctgcagccggcgccgcaggcggacggcaaacgcctcgaacatgccgacctgacgctcggccccgtgtccgcgacctacctgctcgacgcgacgcgcggccagccgctgcgcgcggtgcgcggcgcgatgggcatccaccggatgcccgacatgccgcaggacggcgtgagcgcggccgtcgacgtcaccgagctggacgccgacgcgtggctcgccctcgcccacacgctgcagcccgacacgccgcgggcgccggaaccgcaagccgcgccgcgcgtcgatttcgcgagcttcgcgccgaagcgcttcgcgttccacttcggcacgctgaagctgctcaagcgcaactgggagaacgtgatcgtcggcgcgtcgcacgtcgacgacctgtggcaggccaacatcgcgtcgaaccaggtgtcgggctacctgtcgtgggcgccgggcggcggtcacaacggcgcgggcgtgctgaacgcgcggctcgcgaagctggtcgtgccgcagagctcgcagcacgacctcgtcggccgcgcgatgaacctgccgacgccgaccgaccggccgatgccgtcgatcgacctgatcgtcgaccaggtcgtcgcgcgcgatcacgacatcggccggctcgtcgtcaacgcacgcaacatcgacgaagacggtacgccggtgtggcagctcgacaagctggaactgtcgaacccggccgcgaagctcacggcgaccggcaactggcgcacctcgcgccgcgcactggcccgcggcgtcgacgaaaacgacgcgccgcgccggaccgtgttcgacttcaagctcgacatcgacaacgcgggcgcgctgctcgaccgcgtcggcctgccgcgcacgctcgcggacggtcacggctcggtcacgggcaaggtcggctggcgcggcggcccgaccgcgctcgacttcccgtcgctcggcgggcaggtcgcgctcgacctcgaacacgggcagatcctgaaggtcgatccgggcgcggcgaaactcctcggcgtgctgagcctgcagagcctcgcgcgcttcctgacgctgaacttccgcgacgtggtcggcaaggggctgccgttcgacaagatcaccggcaccggccgaatctcgaacgggatcgcgcgcaccgacgatttctcgatgatgacggggcccgcgaacgtcaccgtgcgcggcgcggtcgatctcggcaccgagacacaggacctgcatgcgcacgtcgcgccgaaaatcagcgcgggcgcggccgcgatcggcgcggccatcatcaacccgctgctcggcgtcggcgtgctggccgcgaactacgcgctgtccgagacgctgtcgcgcgcgttcgcgctcgactacgcgatcaccggctcgtgggcgtacccgcacatcgagcgggtgcggagcgatcagggtaagatgaatcacggtccggccgatgcggcgaaccat

SEQ ID NO: 11138 - DNA, 468 bp, Burkholderia cepacia
atggccgggatcctgatcatcgcgcacgccccgctcgccaccgcgctgcgggactgtatcgcgcacatctacggcggcgtacctgcccgcatcggctgcatcgacgtgatggcggacagcgatccgacccaggtgatggcgtttgcgcacgcggaactcgcgcggctgcgggaagaaaacggcgtggtcgtactgaccgacatgtacggcgcgacgcccgcgaacatcgcgggccagctcgcgaagctcgacaacgtgcgcgtgctggccggcgtgaacctgccgatgctcgtgcgagccgtctgctaccgcaccgtgccgctcgacaagctggtcgacaaggcgctgtccggcggcgcgaagggcgtccacgaggtgtcgtccggcacgccgccgccgccgacggaaaccggctgcggccagtgcgcgccgattccgccggagccgcaaccgcgcaccgaatcgcac

SEQ ID NO: 11139 - DNA, 1073 bp, Burkholderia cepacia
atgccgtatcagcacatcaaggttccggagggcggtgacaagatcaccgtcaacaaggacttctcgctcaacgtttccgatcagccgatcattccctatatcgaaggcgacggtacgggcttcgatatcacgccggtcatgatcaaggtcgtcgacgcggcggtcgcgcacgcgtacaagggcaagcgcaagatccactggatggagatcttcgcgggcgagaaggcgaccaaggtgtacggtccggacgtgtggctgccggacgaaacgctgcaggtcctgaaggaatacgtggtgtcgatcaaggggccgctcacgaccccggtcggcggcggcatccgttcgctgaacgtcgcgctgcgccaggagctcgatctctacgtgtgcctgcgccccgtccagtacttcaagggcgtgccgtcgccggtgcgcgagccgcagaagatcgacatggtgatcttccgcgagaactcggaagacatctacgcgggcatcgaatgggccgcgggctccgagcaggcgaagaaggtgatcaagttcctgcaggacgagatgggcgtgaagaagatccgcttcccggaaacctccgggatcggcgtgaagcccgtgtcgacggaaggcaccgagcggctcgtgcgcaaggcgatccagtacgcgatcgacaacgatcgcaagtcggtcacgctggtgcacaagggcaacatcatgaagttcacggaaggcctgttccgtgacgccggctacgcgctcgcgcagaaggaattcggcggcgagctgatcgatggcggcccgtggatgcgcgtgaagaacccgaagacgggtaacgagatcgtgatcaaggattcgatcgccgacgcgttcctgcagcagatcctgctgcgcccggccgaatacgacgtgatcgcgacgctgaacctgaacggtgactacatctccgacgcgctggccgcgcaggtcggcggcatcgggatcgcgccgggcgcgaacctgtcggattcggtcgcgatgttcgaggcgacgcacggcacggcgccgaagtacgcgggcaaggattacgtaacccgggttccgag

SEQ ID NO: 11140 - DNA, 1002 bp, Burkholderia cepacia
atgaattccgagacccccgcggccgggccgcaacaggcacagccgcccgcgacgttgacgattgcttcgcgcgagagccgcctggcgatgtggcaagccgaacatgtgcgtgatgcgctgcgcaaattatatccagcttgtgacgtgaaaatcctcgggatgacgacgcgcggcgatcagattctcgatcgcacgctgtcgaaggtcggcggcaagggcctgttcgtgaaggaactcgaggccgcgctggccgacggtcgggccgatctcgccgtgcattcgctgaaggacgtgccgatggcgctgcccgacggcttcgcgctcgccgcgatcatggagcgcgaagacccgcgcgatgcgttcgtgtcgaacgactacgcgtcgctcgacgcgctgccggccggcgcggtcgtcggcacgtcgagcctgcgccgcgaagcgatgctgcgttcgcgttacccgcatctcgaggtgctgccgctgcgcggcaacctcgatacgcggctcgccaagctcgaccgcggcgactacgcggcgatcatcctcgcggccgctggcctgaaacgcctcggcctcgaagcgcggatccgcgcgctgctcgacgtcgaagccagtccgccggcagcgggccagggcgcgctcggcatcgagatcgccgcgcaccgtgacgacgtcgccgcgtggctcgcgccgctgcacgacccgcggaccgcgctcgcggtcgaagccgagcggatggtgtcgcgcgcgctcggcggcagctgcgaggtgccgcttgccgcgcatgcggtgtggcgcgcgggcgagctgtacctgacgggccgtgtgtcgaccaccgacggcaagcgcgtgctgacggccgaggaatgcggggcggtcatgaccgtcgccgacgcgctcgcgctcggccgcgcggtgtccgacgagctcgaggcgcaaggcgcgctcgacatcgtccaggcgctgctcgcgggctcgcaggccgccggcaagggcgacgcc

SEQ ID NO: 11141 - DNA, 1284 bp, Burkholderia cepacia
atgtcttcgcaacagcagtccatcccgtcctacctgcacgccgacgatctcggcccgtggggcaactaccttcagcaggtcgatcgcgtcgcgccgtacctcggttcgctgtcgcgctggctcgaaacgctgaagcgcccgaagcgcatcctgatcgtcgactgcccgatcgagctcgacaacggcaccgtcgcgcacttcgaaggctatcgcgtgcagcacaacgtgtcgcgcggcccgggcaagggcggcgtgcgctaccaccaggacgtgacgctgtcggaagtgatggcgctgtcggcatggatgtcggtgaagaacgcggccgtgaacgtgccgtacggcggtgcgaagggcggcatccgcgtcgacccgcgcaagctgtcgcgtggtgagctcgagcgcgtgacgcgccgctacaccagcgaaatcggcatcatcatcgggccgaacaccgacattccggcaccggacgtcaacaccaacgaacaggtgatggcgtggatgatggacacgtactcgatgaaccagggccagacgtcgaccggcgtcgtgaccggcaagccgatctcgctcggcggttcgctcggccgcaaggaagccacgggccgcggcgtgttcgtcgtcggctcggaagcggcgaagaagaagggcctcgagatcgaaggcgcgcgcatcgcggtgcagggcttcggcaacgtcggcggcatcgcggcgaagctgttccaggaagcgggtgcgaaggtgatcgcggtgcaggatcacacgggcacgatctaccagccggccggcctcgattcgaacaagctgctcgaccacgtcgcacgcacgggcggcgtcgcgggcttcgaaggcgccgagccgatgccgaacgacgagttctggacggtcgagaccgacatcctgatcccggcggcactggaaaaccagatcaccgagaagaacgcagcgaagatccgcacgaagatcatcgtcgaaggcgcgaacggcccgacgacgacggcggcggacgacatcctgagcgcgaacggcgtgctggtgatccccgacgtgatcgcgaacgcgggcggcgtgaccgtgtcgtacttcgagtgggtgcaggatttctcgagcttcttctggacggaagacgagatcaaccatcgtctcgagcgcgtgatgcgcgaagcgttcgccggcgtgtgggcggtcgcggaagagcacaaggtgacggtgcgtacggcggcgttcatcgtcgcgtgcaagcgcatcctgatggcgcgcgaaatgcgcggcctctacccc

SEQ ID NO: 11142 - DNA, 429 bp, Burkholderia cepacia
atggcaaagaagattatcggctttatcaagctgcagatccctgcaggtaaagccaacccgtcgccgccggtcggtccggcactgggccagcgcggcctgaacatcatggagttctgcaaggcgttcaacgcgcagactcaaggcatggagccgggtctgccggtgccggtggtcatcacggcattcgctgacaagagcttcacgttcgtgatgaagacgccgccggcgaccgtcctgatcaagaaggcggcgaaggtggacaagggctcgagcaagccgcacaccgacaaggtcggttcgatcacgcgcgctcaagccgaagaaatcgcgaagaccaagatgccggaccttacggcagctgatctggacgcagccgttcgcaccatcgctggtagcgcacgctcgatgggtatcactgtggagggcgtg

SEQ ID NO: 11143 - DNA, 312 bp, Burkholderia cepacia
atgagcgagattcgcaagaacgatcatcgtttgatgcaggtcctgctcgcaccggtgatctcggaaaaggcgacgctggttgccgacaagaacgagcaagtcgtgttcgaagtcgcaccggatgccacgaagcaggaagtgaaggcggctgtcgagctgctgttcaaggttgaagttgattccgtcaacgtgctggttcagaagggcaagcaaaagcgctttggccgttcgatgggccgccgcaaggacgtgaagaaggcgtacgtctgcctgaagcccggccaggaaatcaactttgaagcggaggccaag

SEQ ID NO: 11144 - DNA, 372 bp, Burkholderia cepacia
acgtccgcgccgcgctatgcggcctgctgcggccgcttcatcgacggcggcgaggccgcgccgaccgcactcgaattgatgcgttcgcggtacagcgcgtacgtgctcggcgcgaccgattacctgcgcgcgacgtgggccgcgcgcacctgcccgcccgatctcgacaccgaccccagcgcgccggacgcgccgcgctggctgggcctcgcggtcaaacgccacgcgccgctcgacgaccggcacgcggaggtcgaattcgtggcccgctacaaggtcggcggacgcgcctaccggctgcacgagacgagccgtttcgagcgcgacgagcacggtttctggcgctatgtcgacggcgaagtaagtgaacgc

SEQ ID NO: 11145 - DNA, 1323 bp, Burkholderia cepacia
ccgtttctgaaaatacagggcctgggccgggcactgatgctgccgatcgcggtattgccggtcgccggcatcctgctgcgactcggccagccggacgtgttcaacatcaagatgatcgccgacgccggcggcgcgatcttcgacaacctgccgctcttgttcgcgatcggcgtggcggtcggcttcgcgaaggacaacaacggcgtggcggcgctcgcgggcgcgatcggttacctgatcgaaaccgcgatcatgaaggacatcgatcccaagctgaacatgggcgtgctgtccgggatcatcgcgggggtcgtcgcgggcctgctgtacaaccgctacaaggacatcaagctgccggactacctcgcgttcttcggcggcaagcggttcgtgccgatcatcaccgggctggtctgcgtgatactgggcatcgcgttcgggtacgtgtggcagccgatccagcatgcgatcgacgcggccggccagtggctgacgacggcgggcgcgatcggtgcgttcgtgttcggcttcctgaaccgtctgctgctcgtcaccggcctgcaccacatcatcaactcgctcgcgtggttcgtgttcggcaacttcacgccgcccgccggcggcgagatcgtgcacggcgacctgcaccgcttcttcgcgggcgacccgaccgcgggcaccttcatggccggcttcttcccgatcatgatgttcggcctgccggcggcgtgtctcgcgatgctgcacgaggcgccgaaggagcgccgcgcgatggtcggcggcctgctgttctcgatggcgctgacgtcgttcctgaccggcgtgaccgagccgatcgagttcagcttcatgttcctcgcgccggtgctgtacgtgatccacgcggtgctgacgggcttgtcgctcgcgatctgccagattctcggcgtgaagctcggcttcacgttctccgccggcgcgatcgactacgtgctgaactacgggctgtcgactaagggctggatccagattccgctcggcatcgcgtacggcgcagcgtactacgggctgttccgcttcttcatccgcaagttcaacatggccaagccggtcctcgagccggcatccaccgattcgtccacggaatggtacgcatcgggcgggttcgtcgcaccggccgcgggcacgactgcaaccggctgccgcaaccgctgcgcagcaacgactacatcacgcgcgcctcgccgggcgcgtgccaaacctgtcgcgtggtcgaggcgtgcacgacgcgcttgcgcctcaccgtcgtcgatccgaagcaggtaacggagccgcaactgaagt

SEQ ID NO: 11146 - DNA, 951 bp, Burkholderia cepacia
atggcgagcatctcgatgcgacgcgtgcagaaagcctatggcgagcacgcgccggtcattcgcgacgtcgatctggagatcggcgcgcacgagttctgcgtgtttctcgggccgtccggatgcgggaagtcgaccctgttgcgcatgatcgccgggctcgaggatctgagcgcgggcgagttgtcgatcgacggccgccgcgtcgacgacgtgccggccgccgaacgcggcgtcgcgatggtgttccagagctacgcgctgtttccgcacatgacggtgtacgagaacatggcgttcgggctgaagctcgcgcgcgtgccgaaagccgagatcgaccggaaggtgcgcgacgccgcgcgcatcctgcagctcgacacgctgctcgaacgcaagccgaaggcgctgtcgggcggccagcggcagcgcgtcgcgatcggccgcgcgatcgtgcgcgagcccggcgtgttcctgttcgacgaaccgctgtccaatctcgacgcggcgctgcgcggccagacccgcatcgagatcgcgcggctgcaccggcagttcgaacgcgcgagcgtcgtctacgtgacgcacgaccagaccgaggcgatgacgctcgccgacaagatcgtgctgctgcacgccggcgcggttgccgggcagctcggcctcctcgcgcaggttggcgcgccggttcgccttttgtctgtgcttgggccttttttcctccgtgtgtccgtcgttcgcttctgtgtttcttcgccccgcgcgttcggtctgttccggctccgtgggccggttccttggggcggctggtcgcgccgccgccgcgtcgcctcgtccgggggtcttgtgtgttctttttcgccgcggtgtcccttctgcttctcccctctgccgtccctctccgctcgcccggggttggggcggttgggcgctgtttgtgcgccgctctccaataca

SEQ ID NO: 11147 - DNA, 795 bp, Burkholderia cepacia
atgaactcaaggccgtaccccaccgcccccgcgcacgtctatctgttcgcgacctgcctggtcgacctgttcgtccccgaagcggggctcgacgcggtccgcctgctggaacgcgagggcctgacggtccactatccacgcggccagagctgctgcgggcaaccggcctacagcagcggcaaccccgacgaagcgcgccgcgtcgcggccgcgcagctcgacctgttcgcgcaaccgtggccggtgatcgtgccgtccggctcgtgcgcgggcatgatccggcaccactggccggcgctgttcgccgacgatcccgttcacggcccgaaggcgcgcgcgatcgcggagcggacctacgaactcgccgaattcctcgtccacgtgctcgacgtacggctcgacgcgatcgcggccggcgccgggcccgacgaacgcgtcgtgctgcacacgtcgtgcgcggcgcggcgcgagatgggcacgcgcgtgcacggcgtcgcgctcgtcgacgcgctgccgggtgtgacgcgcatcgaacacgaacgcgaatccgaatgctgcggcttcggcggcacgttctcgctgaagcatccggacatctccggcgcgatggtgcgcgacaaggtcgcgtcggcctgcgcgaccggctgcgaccggctcgtgtccgcggactgcggctgcctgctgaacatcggccacgccgcggccaaggccggcgcgccgctgccggtcgagcatctcgcgagcttcctgtggcgccgcacggccggcgccggctcgctgcgcggagagtcgcaa

SEQ ID NO: 11148 - DNA, 2445 bp, Burkholderia cepacia
atggcaaaatgccccgcttcattcatccgcggcctctggcccgtcgggcccgccgggcagcccgccgctccgggcctgccggcccgcgccgcgatttcagcaggcagacagaccatccacgacatgacggaaaccgtagcactcaagatcgtacagcgcatcgccaccgaactgtccgtccagccgcgccaggtcgcggcggccgtgcaactcctcgacgaaggctcgaccgttccgttcattgcccggtaccgcaaggaagtgaccggcaacctggacgacacgcagctgcgccagctcgaggaacgcctcctgtacctgcgcgagctcgaggatcgccgcgccacgatcctgtcgagcatcgacgaacaaggcaagctgaccgacgagctgcgtgccgcgatcgacgcggccgacagcaagcaggtgctcgaagacctttatctgccgtacaagccgaagcgccgcacgcgtgcgcagatcgcccgcgaagccggcctcgaaccgctcgcgcaggcgctgctcgcgaacccgctgctcgacccgcaggccgaggcggccgcgtacgtcgacgccgacaagggcgtcgccgacgtgaaggccgcgctcgacggcgcgcgcgacattctgtccgaacagttcggcgagacggcggagctgctcggcaagctgcgcgactacctgcacaaccagggcgtcgtgtcgtcggccgtcgtcgagggcaaggaaaacgaggaaggcgagaaattccgcgactattacgactacgcggaaaccatcaagaccgtgccgtcgcaccgcgcgctcgcgctgttccgcggccgcaacgccggcgtgctgacgatcaagctcggtctgggcgaagagctcgacgcgcaagtgccgcatcccggcgaggcgatgatcgcgcgccatttcggcatcgcgaaccagaatcgcccggccgacaaatggctgtccgacgtctgccgctggtgctggcgcgtgaaggtgcagccgcatatcgaaaacgaactgctcacgcagttgcgcgaaacggccgaaaccgaagcgatccgcgtgttcgcgcgcaacctgaacgacctgctgctggccgcgccggccggcccgaaggccgtgatcggcctcgaccccggcctgcgcaccggcgtgaaggtcgcggtcgtcgaccgcaccggcaaggtgctcgcgaccgacacgatctacccgcacgagccgcgccgcgactgggacggttcgatcgcgaaactcgcgcgcatcgccgcgcagacgcaggccgaactgatcagcatcggcaacggcaccgcgtcgcgtgaaaccgacaagctcgcgagcgaactgatcgcgaaacatccggagctgcgcctgcagaagatcgtcgtgtcggaagccggcgcgtcggtctactcggcgtccgagctcgccgcgaaggaattcccggaactcgacgtatcgctgcgcggcgccgtgtcgatcgcccgccgcctgcaggacccgcttgccgaactcgtgaagatcgagccgaaggcgatcggcgtcggtcagtaccagcacgacgtgaaccagcgcgaactcgcccgctcgctcgacgcggtcgtcgaggattgcgtgaacgcggtcggcgtcgacgcgaacaccgcgtcggccccgctgctcgcccgtgtgtcgggcctgaacgcgacgctcgcgcgcaacatcgtcgactatcgcgatgcgaacggcccgttcccgtcgcgcgagcacctgcgcaaggtgccgcgcctcggcgacaagaccttcgagcaggccgccggcttcctgcgcatcaacggcggcgagaacccgctcgaccgctcgtcggtgcacccggaagcgtatccggtcgtcgaacggatactcgcgaagatcaacaagcgcatcgacgacgtgctcggaaaccgcgaagcgctgtccggcctgtcgccgatggaatttgttgacgaacgtttcggcctgccgaccgtacgcgacatcctggccgaactggaaaagccgggtcgcgatccgcgtccggaattcaagacggccacgttccgcgaaggcgtcgagaaggtctcggatctcgtaccgggcatgacgctggaaggcgtcgtgacgaacgtcgccgcgttcggcgcgttcgtggatatcggcgtgcaccaggacggcctcgtccacgtgtccgcgatgtcgacgaaattcatcaaggacccgcacgaggtcgtgaaggccggccaggtcgtcaaggtgaaggtgctcgacgtcgacgtgaagcgccagcgcattgcgctgacgatgcgcctcgacgacgacgcggcagcgcccggcatgtcgtcgcgcggcggccaggatcgcggcaacgcagggcgcggcgccgcccgcccgcagcgttcgcgcgagccggagccggccggcgcgatggccgcggcgttcgcgaagctcaagcgc

SEQ ID NO: 11149 - DNA, 786 bp, Burkholderia cepacia
atgcgatcggcccgccgatcgcaccccggcccttcgggcaggttccccttgctgcgccaccgggcccgcgcccgctcctcgctcatcacccaaggaatgcccatgacaggctacgatcgtcagtcgatctcggatacgaccgccaaaatcctgctcgaagtgcaggcggtgcacttcaatgccgaaaaaccgttcatcttcacgtccggctgggcaagccccgtctatatcgactgccgcaagctgatctcgtatccgcgcgtgcgccgtgcgctgatggaaatggcggaaacgacgatcacgcgcgacatcggcttcgagcagatcgacgcggtggcgggcggcgagacggccggcatcccgttcgcggcatggatcgcggaccggatgatggtgccgatgcagtacgtgcgcaaaaagccgaagggtttcggccgcaatgcgcagatcgaaggccatctcgaggaaggctcgcgcgtgctgctggtggaagacctgaccaccgacagccgcagcaagatcaacttcgtcaacgcgctgcgcaccgcgggcgcgacggtgaaccactgcttcgtgctgttccactacaacatcttcaaggaaagcgtgtcggtcctgaaggacatcgacgtcgacctgcacgcgctcgcgacgtggtgggacgtgctgcgcgtcgcgaaggcgtcgggctacttcgagacgaagacgctcgacgaagtcgagaaattcctgcacgcaccggccgaatggtcggccgcgcacggcggcgcgacggccccgaaggaa

SEQ ID NO: 11150 - DNA, 1584 bp, Burkholderia cepacia
atgacgatggacaacgaaatcctgaccacgcccgcgctgatcgcgcgggcagccgcgcgccacggcgcgcatccggcgatcgagtcggagcacggccggctgacctacgcggaactcgacgccgcgcgtatcgatgcggcccgcgcgctgctcgcgagcggcatcgatcccggcgaccgcatcgcggtctgggcgccgaacctgccgcaatggatcgtcgcggcgctcgcgatccataccgtcggcgcggtcctcgtgccggtcaatacgcggatgaaggggatggaggtcggcggcgtcctgcacgacggcggtgcgcggctgctgttctgctgcggcaccttcctcggcgaatcctatccggcgatgctcgcgccgcatcggccggcgacgctcgagcgcgtcgtcgtgttcgacggcgaaccgccttcgggggcgcacgacgagacctggaacgcgtttctcgcgcgcggcgcggcggtgccgcttgccgcggtgcgcgaacgcgaggcgcaggtcacgcccgacaccgtgatggacctgatgttcacctccggcacgacggggcgcccgaaaggcgtgatgaccgcgcacggccagaacctgcgtgccgcgcaggcgtgggcggcgatcgccggcgtgcgcccggacgaccgttacctaatcgtcaatccgttcttccatacgttcggctacaaggccggctggctcgccgcgctgtcgagcggcgcgaccgtgctgccgcatctggtgttccagccggacgacgtgctgcggcgcgtcgccgcggaccgcgtgtcggtgctgcccggcccgccgacgctgtactacgcgctgctcgacgcgcccgatcgcgcgacgcgcgatctgtcgtcgctgcggatcgcggtgacgggggcggctgcgatcgcgccgagcctgatcgagcggatgcgcgcggagctcggtttcgagacggtgctgaccggctacgggctcaccgagtcgtgcggcttcgcgacgctgtgccgcccgggcgacgatgccgagacggtcgcccgtacgtcgggccggccgatgccggacgtcgagctgcgcatcgcggggccgggcggcgagccgctcgggccggacgagaccggcgagatctgggtgcgcggctacaacgtgatgcgcggctacttcaaccagccggacgccacgcgcgagaccgtcgatgcggcgggctggctgcatacgggcgatctcggctgcgtcgacgcgaacggcaatctgaagatcaccgaccgtatcaaggacatgttcatcgtcggcggtttcaactgctatccggcggagatcgagcggctgctcgccgcgcatccggcgatcgcgcaggtcgcgctggtcggcgtgcccgacacgcggctcggcgaagtcgggcacgcctatgtcgtgctgcggcccggcgcgcacgccgatgccgacgaactgaacgactgggcgcgccgcaacatggcgaactacaaggtgccgaggtatttcacgttcgtcgcgcaattgccgacgagcgcggccggcaaggtgctgaagtaccggctgcgcgcggcgaccgaggcggcggcc

SEQ ID NO: 11151 - DNA, 906 bp, Burkholderia cepacia
atgagtatcaccaccacgccggccgccgcacccgccgccaccggatcggcacccgcgccgcgcatgggccggctgcgtaccgcggacgggctcgaattggcgtcgtaccgctggccggccggcgacggcaccgcgccgccgcgcgcgacgatcgcgctggtgcatggcctcgccgaacacgcgggccgctatgccgcgctcgccggccggctgaatgcagccggcatcgacgtgctggcgatcgatctgcgcgggcatggccaatcgcccggcaaacgcgtgtgggtcgagcgcttcgacggctacctgaacgatgcggatgcgctggtcgccgaagccgcgcgtggcgatgcgccgctgttcctgatgggacacagcatgggtggcgcggtcgcggcgctctatgcgatcgaacgcgcaccggcccgtggccatgggctgacaggcctcgtgctgtcgagtccggcgctcgcgccggggcgcgacgtgccgcgctggatgcttgcggtcagccgcgtcatcagccgggtgtggcccacgttccccgcgatcaggatcgatgcggcgctgctgtcgcgcgatccggccgtcgtcgccgccaatcgcgccgatccgctcgtgcatcacggcgcggtgcccgcccgcaccggcgcggagattctcgacgcgatggcgcgcatcgagaatggccgcggcgcgctgcgggtaccggtgctcgtctatcacggcaccgaggacaagctgaccgaacccgacggcagtcgcgcgttcggcgcgcgcgtcggctcgcccgaccgtacgctgacgctgtacgaaggcggtttccacgaaacgatgaacgatctcgaacgcgatcgcgtgatcgacgcgctgatcgcgtggattcatgcgcgcgtgccggcgcac

SEQ ID NO: 11152 - DNA, 468 bp, Burkholderia cepacia
atgttcaacgtcgtcctcgtcgcccccgaaattccgccgaacaccggcaacgtgatccgcctgtgcgcgaacaccggcgcgcacctgcacctgatcgagccgctcggctttccgctcgacgacgcgcgcatgcgtcgcgccggcctcgactatcacgagtatgcgcaaatgcgcgtgcaccgcaactgggacgcattcgtcgcctccgaagcgcccgatcccgcgcggatgttcgcgttcacgacgcgcggctcgggccgcttccacgatcgtgcgttcctgcccggcgactggttcgtgttcggctcggaaacgcgcggcctgccggccgagctgctcgaacgcttcccgaacgaacagcgcgtgcgcctgccgatgcgacccgacaaccgcagcctgaacctgtcgaacacggtcgcggtggtcgtgttcgaggcgtggcgccaggccggcttcgaaggcggcgcc

SEQ ID NO: 11153 - DNA, 1332 bp, Burkholderia cepacia
atgaagaagaagcctgcggggacactggttcgttcgatcgcgctcggcggcgcgctgatgttcggggcgcagcacgtcgcgctcgccgcgacggaaattcagttctggcatgcgatggaggctgcgctcggcgagcgggtcaacgcgatcgccgaccagttcaacgcgtcgcaaagcgactacaagatcgtgccggtcttcaagggcacttacgaccaggcactcgcggcgggcatcgcggcctatcgcagcggcaacgcgccggcgatcctccaggtctacgaagtcggcacggcgacgatgatgcaggcgaagaaggcggtcgtgccggtctacgacgtgttcaagcaggcgggcgtgacgctcgacgagaaggcgttcgtgccgaccatcgcgagctactacagcgatgcgaagacgggccacctcgtgtcgatgccgttcaacagctcgacgccggtgctgtactacaacaaggatgcgttcaagaaggcgggcctcgatccgaaccagccgccgaagacgtgggccgacgtgaaggccgatgccgagaagctgcgcaaggcggggatggcgtgcggcttcacgaccggctggcagggctggatccagctcgaaaactacagcgcgtggcacgggctgccgttcgcgagccgcaacaacggcttcgatggcaccgacgccgtgctcgagttcaacaagccgcagcagatcgcgcacctctcgttcctccagcagatggcgaaggacggcacgttcacgtacgcgggccgcaaggacgaagcgtcggcgaagttctacagcggcgactgcgggatcctgacgacgtcgtccggcgcgctcgcgaacgtgcagaagttcgcgaagttcagctacggcacggggatgatgccgtacgacgcgaacgtgaagggcgcgccgcagaacgcgatcatcggcggcgcgagcctgtgggtgctggccggcaaggatccggcgacctacaagggcgtcgcgaaattcctcgcgtacctggcttcgcccgccgtcgccgcgaagtggcatcaggacaccggctacctgccggtcacgaccgccgcgtacgacctgacgcgccagcagggcttctatgcgaagaacccgagcgccgaaaccgcgatcaagcagatgctgaacaagccgccgctgccgtacacgaaggggctgcgcctgggcaacatgccgcagatccgcacggtcgtcgacgaggagttcgaacaggtctgggcgcagaagaaggcgccgaaggacgcgctcgattcggccgcgtcgcgcggcgacgaactgctgcgccgcttcgagaagtcgggcggc

SEQ ID NO: 11154 - DNA, 450 bp, Burkholderia cepacia
ttgacgaaggagggcgcgatgttccggcacatcctcgttccaaccgacggttccgaactgtcgcagaaggcgatcgacggtgcgatcgacctggctcgtgcggtcagcgcgcgcgtgacggcctacgcgtgcctgccgcaatatccgtactcgccgttttcggaagtgatcatcgagccgcccgccgatttccgcgcgcgcagcgagcgcgaggcgcgtgcgcatctcgacgaggtggaagcggccgcgcaggcggccggggtcgagtgcgacacgtggacgagcgtgcacccgtcgccctatctcggcatcatcgaggcggccgaacgcggggggtgcgacgtgatcttcatggcgtcccacggacgccgcgggctcggcagcctgttgatcggcagcgagacgcagcgcgtgctgacccatacgaaaattccggtgatcgtctatcgg

SEQ ID NO: 11155 - DNA, 675 bp, Burkholderia cepacia
atggcgggtcacgattccggtaatgcaaggcgcgggcgtgcgtcattcggcgcattcgtccgcaaaccggtcgagcgcgacatggtcgcgaacgccggtcaggctgccgaaccaggcggccccgacgcgacgcaaacctggcccgacgatgccgtcgaggtcggggcggtggtcgacgcctacggcctgaaaggctgggtcaaggtggcggcgcatgccgatgccggtcgcggtggcgacgcgctgctcaatgcgcgtcgctggtggctggaacgcggtgcggagcggctttccgtccgcatcatgcagtcgaagacgcacagcgacactgtcgttgcgcaacccgcgggcgtcagcgaccgcgatgctgcgctgtccatgcgcggctttcgcgtgttcgtgcgccgggaagatttcccggcactggccgcggacgaattctattgggtcgacctgatcggtctcgaggtcgtcaacgagcaatcggtggcgctcgggaaggtgagcgggatgatcgacaacggcgtgcattcgatcatgcgtgtcgagtatccggcgaccggcaaagacggtcggccgaccaccgacgagcggttgattccgttcgtcggcgtctacgtcaaaacggtggatcaggcggcgcgtcgcatcgtcgtcgactgggaagccgattac

SEQ ID NO: 11156 - DNA, 1359 bp, Burkholderia cepacia
  misc_feature (154)..(154): n=g, a, t or c
atgtaccgggtcactgcccttgttgggcgccccaattgggtaaatcgctccgttcacccggctcacgcggttgcgcgatgcgctgatcccgacttgccggacctgacgcgcgatcgccattacggcgaagggcgcgtcggcgaacgtccttacntggtcgtcgatacgggcggcttcgaacccgtcgcgaaggacggcatcctgcacgaaatggcgcgccagacgcggcaggccgtcgaggaggccgacgtcgtcgtgttcatcgtcgacggccgtaacggactcgcgccgcaggacaagtcgatcgccgactacctgcgcaagaccggccggccgatcttcctggtcgtcaacaaggccgaggggatgaagtacacggcggtcgcgaccgacttctacgagctcgggctcggcgatccgcgcgcgatctcggccgcgcatggcgacggcgtgaccgacatgatcaacgaggcgctcgaagtcgcgtacgccggccagcccgaggaagcggaggaggatgatccgtcgcgcggcatcaagatcgcgatcgtcggccgtccgaacgtcggcaagtcgacgctcgtcaacgcgctgatcggcgaagaccgtgtgatcgcgttcgacatgccgggcacgacgcgcgattcgatctacgtcgacttcgagcgtaacggcaagaaatacacgctgatcgacacggccggcctgcggcgccgcggcaaggtgttcgaggcgatcgagaagttctcggtcgtgaagacgctgcagtcgatctccgacgcgaacgtcgtcattcttctgctggatgcgcagcaggacatttccgaccaggacgcgcacatcgccggcttcgtcgtcgagcagggccgcgcgctcgtgatcggcgtgaacaagtgggacggcttcgacgaccacgcgcgcgaccgcgcgaaagcggatttgacccgcaagctgaaattcctcgacttcgcgaaatcgcatttcatttcggccgcgaagaagacgggcatcggcgcgctgatgcgctcggtcgacgatgcctacgcggccgcgatgtcgaagctgccgacgccgaagctcacccgcgcgctgatcgaggcggtcgaattccagcagccgcgccgtcgcggcccggtgcgtccgaaactgcgctacgcgcaccagggcggccagaatccgccgatcatcgtgatccacggcaacgcgctcgacgcggtgacggaaacctacaagcgctacctcgaaaaccggttccgcgaaactttctcgctgaccgggactccattgcgcatagagttccgttcgtcgaacaacccgtacgcggacaagggctgaagcacgtcccgcaagggctaggcc

SEQ ID NO: 11157 - DNA, 270 bp, Burkholderia cepacia
atgaacgatagcgtgaaaacctcgctgaagcggacgctggtcggtcgggtcgtcagcaacaagatggacaagaccgtcaccgtgctgatcgagcaccgcgtcaagcacccgatctacggcaagtatgtcgtgcgttcgaagaagtaccacgcgcacgatgaagcgaacacctacaacgaaggcgatctcgtcgaaattcaggaaacgcgtcctgtttcgaagacgaaggcctggacggtgtcgcgcctcgtcgaagccgctcgcgtcatc

SEQ ID NO: 11158 - DNA, 951 bp, Burkholderia cepacia
gtgctagcgtggcggcagccgccgctgatgacgtcgacgctgcgcagcgcgagcgccgaaggcgcgatgcggcgcgcggtggaagccgcatgcgcggccgaggcggacggcatgctcgcggtctcggtgctgcccggtttctcgctcgcggatattcccgcgccgtgcatcagcgtggtcgtagtagccgacggcgatcgcgccgcggccgacgccgtcgccgaacgcatcgcgcggcagatctgggatgcgcgcgacgaattcgtctatcgcagcgcgccgctcgccgaatcggtcgcccaggccgcggcgctcgccgacggtgcggaccgcccggtgctgatgctcgatcacggcgacaactgcatgtcgggcggcccgtgcgacacgatggacctgctcgaagccgcgctcgcgcacgggctcgacggaatcgtcagcgggccgttgtgcgaccccgaagccgtcgcggcgctgatcgacgcgggcgtcggcgctaccgtcacggtgccggtcggcaaccgtctgccgtcgcacggcggcgtgcggcgcgaaccgttccgcgcgacgggcatcgtgcgcgcgatcaccgacggcgagtacgtgatcacggggccgacgtacaccgggcagcgtgcgtacatgggccgcgcggcggtgcttgacatcggcacggccacgctcgtcgtcaccgagcgcacgcaggagccgtgggatctcggcgtgttcgagagcgtgggtgtcgatccgcggcgcgcgcgcttcctgctgctgaagtcgcggatgtattgccggccggtgttcgtgccgatttcgtccgcgctggtcgaatgcgacagccgcggcgtgacgggctcggacttcgggctgtttcgctacgcgcggctcgcgcggccggtgtatccgctcgacgacgtcgtcgagtggtcatcggggatgcgacgcacggat

SEQ ID NO: 11159 - DNA, 792 bp, Burkholderia cepacia
atggacgtcgacatgatcgtgacgcccgccgcgcgtccgctcggcatcctggccgcgctgcccgaggagctcggcgacctgatcgccgcgatgcgcgccgacggcgcgatgaagacggtcacgctcggccgccgcgattatcacgtcggcaccgtgcacggcgcggcctgcgtcgtcacgctcgcgcgggtcggcaaggtcgcggccgccgcgacggtcagcgcgctgatccatgtgttcggcgtgtcgggcgtggtgttcaccggcgtcgcgggcggtgtgtcgcgcacggtgcgggtgggcgacgtcgtcgtggccgatacgctgctgcagcacgatctcgatgcgtcgccgctctttccgcgttacgaggtgccgctgctcggcatcacgcgtttcgcgaccgacgcggcgctgacggcccgcttgcgggccgcgtgcacgctgttcgtcgaggaggagggcgcgcagttcgccgagcgcttcgggctcgccggtgcggcgctgcacgcggggctcgtcatcagtggcgaccgcttcgtgtcgagcgagcgcgaagtcgtcgcgctgcgcgacgcgctgccggatgcgctcgcggtcgaaatggaaggcgcggcgatcgcgcaggtgtgcgcggaacacgacgtgccgttcgcgctcgtgcgcacgatctccgatacggccgacgatcacgcgacgcagtcgttctcgcacttcctgtcggcgatcgcgagcagctattcgtccggcatcctcaagcgtttcctgacgctgcatgcgacgacggcggcc

SEQ ID NO: 11160 - DNA, 2937 bp, Burkholderia cepacia
gtgcaaggaatcaatccaagcctgccgcactcagtcagcgcggaggtcgcgttggaagctagccgaccgccccacccgacgctcgtagagaacaatcgctggttccacgatttgctcatcaatggtgcgcccgttgagtacaaggacgcagccaccggagagacgcgtggcgggcgggcgcggttaatcgactttgacaacccggcaaacaacgactttctcgttgtacggcagctcacagtcgcgggagcgaacggcaagaccattcggccggatctggttctctacgtcaacggtctgccattggtcgtgatcgagctgaaggacccggccaacacgtcggcgacgttggaagtcgcaatcgaccagctcgggcgatataagaccgtcgcgcccgacttgttcgtgccgagtctgctgctggtcgctagtgacgggctgctgacgcgagttggcagtatcaccagcggcctgcagcgcttcacgccatggcggcccgcccatggcggcgagccaacgttggaggcgttgattcgcgaactgctgaacccctcggcgcttctggactatctactatcttgcgttgcttttgaggaggacgagagagggaatatcgtcaagaaggtggcgggatatcaccagttccgggcggtgcgcaaggcgagggccagtgtaatcagcgcgatcaagacgtcggcgcgtagcgacgatgtgactgcgggcaagggcggtgtggtttggcacacacagggcagcggcaagagcctgacgatgctgatgcttgccggcacactggtgcgcgcggcggagatggccaacccgactatcgtgatcgtgaccgaccgcaacgacctcgatgaccagcttttcgagacttttgccatgggccgggcgctgctgcggcaagatcccatgcaggcagaaggccgcgaacacctgcggcaattgcttgaccgggctagcggcggtgttgtgttcacgacgatccataagttcaccgaggcgcacggcatgatcagcgagcgtgcgaacattgtcgtgatggcagacgaggcgcatcgtagccagtacggctttgtcgaaggcggggcgcggtggatgcgtgaggcgctgccaaatgcgacgttcgtcggcttcaccggcacgccgctgatggcgggcgatcgcgtcactcagaatgtgtttggcgagtacgccgacgtatacgacgttcgtcaagccgtggctgatggcgcgaccgtgccaatctactacgaaccgcggatcgtgaagctcacgatagacgaaacaggggctaaggaagcagaggcaaagatcgcgcagtacgcgacccgcgatgagtatggacaggagacgccggagaatgttcgcatttcactagaggagttgtatggcgcacccgagcggctgcagcgcgtagcgaagtttgtggtcgagcattgggaagagcgccgagccgcgatggagggaaaggcgatgcttgtgaccatgagccgtgacatcgcagcgcggctatatgacgagatttgcaagctacggccggcatggcatgacgaggacgacgcacagggcgcaattaaggttgtcatgaccggcggcccgaacgactctgaacacatgatgcggcattcgcggagcaaggcgcagcgaaagtcattggcagatcggttcaaagacccgaccgacgacttccggctggcggttgtcgtggacatgtggctcacaggattcgatgtgccctgcgcgcacacgatgtacttggacaagccgctagctggacacaacctgatgcaggccatcgcgcgcgtgaaccgcgtgtatggcgaaaagcccggtgggttgatcgtcgacatgatcggactggcggacccgttggccgacgcactggcgacgtatgcgagcgctacgggtgaaacagacaagccggtcaaagaattgcaggatgaagcgattccagccatgcaatcagcgttcgagcaactgcgcagcttcttccacgacttcaactacgcggaggcgctggacgcaattccgtcgagggtgttgcgtgtgtacttgggtgcgatcgatcacgtgctggacgtgaaacacaccgtgggcgatgaaacaggctggcagcgcttcggcggcatggtgaagcggctggcaacagcatttgcgcttgccgtgccacgggaggaaacgcgagacatcaccccgcacctggccttcttccaacgtgtagccgcaatgatccgcaagcggctcaccgacgagcgcggaccgacggagagtcgaagcgatggttcccccgacattgacgccgcggtgcggcaggtgatcggtggtgcggtggatgcgggcgaggtgatcgacctgtttgccgcggcagggctcgatgcggcacgactggacatcctcagcgacgactttctggaacgtgtgtccgccctggagcagaagaatctggctttggagacgctacgaaagctgctggccgaccagatcaagctcagtgagcggtccaatctcgtgcaagcacagaagttccgcgaggcgctggaaagggcgatgctcggctacacgaacaagcagatcacgacggcccagatgatcacgcaattgctggcactagcgaagtgggtgcgcgaggcaaaattgcatggacaagaccttggactgagtgacgaagaagcggcgttctacgacgccttgaccgagaatggttcggcaaaggaggccatgaagtccgaccagcttcggttgatggctcgcgagctggcggaaatggtcaagaagatgccccgactcgactggacccagcgggaaagtgtgcgggcagacctgcgacgtaaggtgcgtcggttgttggcaatgtatggatacccgccagacctatccgaagaggcaacacagctcgtcttgcgccaagctgagttgtcgactgagaactcggag

SEQ ID NO: 11161 - DNA, 603 bp, Burkholderia cepacia
atgaaagtcgtcgctttcgagcgccaacagcaaggtacgggtgcgagccgccgcctgcgcaacgccggtaagaccacgggtatcgtttacggtggcgaagcagccccgcaaaagatcgaactcgatcacaacgccctgtggcacgccctgaagaaggaagctttccactcgtcgatcctcgacctcgaagtggccggccagtcgcaacaggttctgctgcgcgacgtgcaataccacccgttcaagcaactggtgctgcacgtggacttccagcgcgtcgacgcgaagaagaagctgcacacgaaggtgccgctgcacttcctgaacgctgaagtcagcccggccgtgaagctgtcgagcgcgatcgtttcgcacgtcgcgacggaaatcgaagtcgagtgcctgccggctgccctgccggagttcctcgaagtcgacctgtcgaagatcgaagccggtcagtcgctgcacgcgaaggacatcgcactgccgaagggcgtgacgctggtcgcgcacgtcgacgcggaaaacccggttgtcgcctcggcgacggtcccggctggcgccgtgtcggacgcagcagaaggcgaaacgccggctgcc

SEQ ID NO: 11162 - DNA, 2107 bp, Burkholderia cepacia
atgcgtccgcgcgctcgcatcccgctcgcaccctatttcaacgctccgatggacgtcacagctacccgccctgccgcccgtgcgctcgacgtgttccacccggccgtcgccgcgtggttcacgcgcacgtttgccgcgccgaccggcgcgcaggcactcgcgtggccgcacatcaaggccggccgctcgacgctcgtcgccgcgccgaccggctccggcaagacgctcaccgcgttcctgtgcgcgctcgacgatctggtgcgcgatgcgctcgcgcacgacggcacgctgcccgacgcgacgctggtcgtctacgtgtcgccgctgaaggcgctgtcgaacgacatccacgtgaacctcgacgcgccgctcgccggcatcgccgaatcgctcgcgcaactcggcctgccggtgccggcgatccgcaccgcggtgcgcaccggcgacacgacgcaggccgaacgcgccgcgctgcgcaagcgcgcgccgcatatcctcgtcacgactcccgaatcgctgtacgtgctgctgtcgtccacgtcgggtcgccagatgctgtcgaacgtgcgctcggtcatcgtcgacgaaatccatgcgctggcgtcgtccaagcgcggcagccatctcgcgctgtcgctcgaacgcctcgacgcattgaccgggcgcgcgctgccgcgcatcgggctgtccgccacgcaaaagccgatcgacgcggtcgcgcgcttcctggtcggcgggccggccgacgcgccgcgcgactgcgcgatcgtcgacaccggccacacacgcgagcgcgacctcgcgctggagctgccgaacgtgccgctcgaaccggtgatggcgaccgatgtgtgggaacaggtgtacgaccgcatcgccgggctcgcggccgcgcatcgcacgacgctggtgttcgtcaacacgcgccgcaccgccgagcgcatggcgcgccatctcgccgaccggctcggcaaggacgcgatcgccgcgcatcacggcagcctggcgaaggagcaccgcttcgacgccgagcagcgcctgaagcgcggcgaactgaagctgctcgtcgcgaccgcgtcgctcgaactcggcatcgacatcggcgacgtcgatctcgtctgccaggtcggctcgccgcgcggcatcgcgccgttcctgcagcgcgtcggccgctcggggcaccacgtcggcggcgtgccgaaggggcgactgtttccgctgtcgcgcgacgagctggtcgaatgcgcggcgctgctcgattgcgtgcagcgtggcgaactcgatgcgctgcggattcccgaagcgccgctcgacgtgctcgcgcagcagatcgtcgccgaagtcgcgtgcacggaatggcaggaggacgcgctgtatgcaagcttcacgcgggccgcgccgtacgcccggctgacgcgcgagcgcttcgacgaagtgatgaagatgctcgccgaggggttcacgagccgtcgcggcgtgcgcggcgcgtacctgcaccgcgacgtggtcggcggcacggtgcgcggccgccgcaacgcgatgatgaccgccaccacgtccggcggcacgatccccgacatggccgactacgcggtgctgctcgaaccgcagggtatccaggtcggcaccgtcaacgaggatttcgcgatcgagagcctggccggcgacgtgttccagctcggcaaccagtcgtaccggatcattcgtgtcgaaacgggccgcgtgcgggtcgaggatgcgcaggggcaatcgccgagcattccgttctggctcggcgaggggctcgggcgcagcgacgagctgtcggcggcggtcggccggctgcgcgcgcggctcgacgcgctgttcgcggaaggcgaccggcaggtcgacagcggcgggcgcaagcgtggcggcggcaacgcggtaagcaatgcggcaacggaagccgacgcaccagccgcaacgggtaccgcgctcgcccccgccgacagccgcctcgcgcccgcgttgcgctggctcgtcgacgatctccacctgtcgcccgacgccgcgcgccagatcgccgactacctcgcgcgcacccgcgctgcgctcggcgcgttgccgacgcaggacacgctcgtag

SEQ ID NO: 11163 - DNA, 1020 bp, Burkholderia cepacia
atgccccgtcccatcgtcgcccatatccgccccgacgccgtccgccacaacctcgacttcatccgccgcaccgtcgccccatcgcgcgtgtgggccgtggtcaaggccaatgcgtacgggcacggcatcgaacggatctatccgggcctcgcggccgccgacggcatcgcgctgctcgatctcgacgaagccgtgcgcgtacgcgagctcggctgggacaagcccgtgctgctgctcgaaggcgtcttcgagccggccgacgtcgaactcgccgatcgctaccggctgacggtcgccgttcactgcgacgaacagctcgacctgctgatcgccgcgaagccgcggcagccgatcgacatccagctcaagatgaattccggcatgaaccggctcggctatcggccggccgcgttccgcgccgcgtgggaacgcgcggcgagtgcaccgtcgatcggcaagatcacgttgatgatgcatttcgcgaacgccgacgaaggcgaagtcgactggcagttggagcagttcgacgcgaccacggccgggattccgggcgagcgctcggtgtcgaattcggcggccgtgctgtggcatccgcgcgcgcatcgcgactgggtgcggcccggcacgatcctgtacggcgcgtcgccgacgggtgctgcgcggcatatcgccgacacgccgctggtggccgcgatgacgctgaccagcaagatcatcggcgtgcagacgctcgcgccggaagagaccgtcggctacggccgccgcttcacggccgaccggccgatgcggatcggcgtcgtcgcgtgcggctacgcggacggctatccgcgccacgcgccgaccggcacgccgatcgcggtggacggcgtgatgacgcgcgtcgtcggccgcgtgtcgatggacatgctgaccgtcgacctgacgccttgcccgaacgcgggcatcggctcgagcgtcgagctgtggggcgaccaggtgaaggtggacgacgtcgcggaagccagcggcacgatcggctac

SEQ ID NO: 11164 - DNA, 987 bp, Burkholderia cepacia
gtgcgctggcagaccggggccggcgcgcgcatcgattacacttgcgcgtccgcggcgcgcgacgaggcggcccgtacagattcacttcgaaccattcccgaggaaacgatgagcgacgttcagcaaggcatcctggctccgatcgatacggcagcgcgatacctcactttcacgatgtcgaacgacggcaatgtcgcggcggcgctggccgcgctgcgcgagatcgtcgacggacgcgacacggtcgtcggtttcgggcacgcgctggctgcatacctcggccatccggtgccgggcctgaccgactacccggcgttcgcggtgaacgaccgcacgctgccgatgacgccggccgacgtatgggtctggctgcgctcggacgatcgcggcgagatcgtgctgcgcgcgcgggcgatcgagcgcgcattggcgccggcgttcgtgctgcaggaggccgtcgacggcttccgctattcgaacgatcgcgacctgtccggctacgaggacggtaccgagaacccggaaggcgacgacgcggtggccgcggcgatcgtgacggggcatggcgcggggctcgacggcgcgagcttcgtcgcggtgcagcagtggctgcacgacttcgaccagatggagcgcattgcgtcgggcgacatggaccacatcatcgggcgccgccggtcggacaacgaggaactcgacgacgcccccgaattcgcgcatgtgaagcgcaccgcgcaggaaagcttcgagcccgaggcgttcatgctgcgccgttcgtcgccgtggtcggacgcgcgtcgcgcgggcctctacttcgtcgcgttcggctgctcgttccgcgcgttcgacgtgcagatgcgccggatgagcggcgcggaagacgggatcgtcgacggcctgttccgcttcacgcggccgctgacgggcgcgtatttctggtgcccgccgatgaaggacggcaagctggacctgtccgcgctcggactg

SEQ ID NO: 11165 - DNA, 273 bp, Burkholderia cepacia
gcgccggccgccggcgccgccgccgcaccggccgctccgcagggccacgtcgtgacgtcgccgatggtcggcacgttctatcgcgcgccgtcgccgggcgccgacccgttcgtgcaggccggcgacacggtcaaggaaggccagacgatctgcatcatcgaagcgatgaagctgctcaacgagatcgagtcggacaaggccggcgtgatcaaggaaatcctcgtcgagaacggccaggccgtcgaatacggccagccgcttttcgtgatcggc

SEQ ID NO: 11166 - DNA, 375 bp, Burkholderia cepacia
atggtaacaaggcacccgattcttgcagttttgttcgtggccgccgcgttgtcggcgccgacgttatccagcgcgcaacaggacgaccacgggcatgggcatgccaatggccatgcgtatggtcacggcaagcacgacatgcgcaaagggcccggccgcgttgaagacgtaccgccgcgctgggccgaccagccgcgccgcgagtggcacaagggtgaccggcttcctcccgagttccgcgaccgccaatacgtgatcgacgactggcgcggctatcacctgagtccgcccccgcgcggctatcaatgggtcggcgtcggcggggatcacctgctggtgcagatcggttccggcatcgtgctgagaatcggcgac

SEQ ID NO: 11167 - DNA, 1548 bp, Burkholderia cepacia
atgtcgagctcggaacaccccctgcacggccggcgctacaactgggcgtacgagaccgatcccgagccgcacatggacaaccgccggatggaatgcggccgcggcaaggggctcggcggctcgtcgctgatcaacgggatgtgctacatccgcggcaatgcgctcgactacgacaactggtcgacgcacaagggcctcgagaactggacgtatctcgactgcctgccgtacttcaagaaagccgagacgcgcgacgtcggcccgaacgactatcacggcggcagcggccccgtgtcggtcacgaccagcaagccgggcgtgaacccgctgttcgaagcgatggtcgacgcgggcgtgcaggccggctatccgcgcaccgacgacctgaacggttaccagcaggaaggcttcggaccgatggaccgcaccgtcacgccgaagggccgccgcgcgagcaccgcgcgcggctacctcgaccaggcgaaggcgcggccgaacctcgagatcgtcacgcacgcgctcgccgaccgcatcctgttcgacggcaagcgcgcgtcgggcgtcacctacctgcgcggcagcgagcgcgcgaccgcgcatgcgcgtcgcgaagtgctcgtgtgcagcggcgcgatcgcatcgccgcaactgctgcagcgctcgggcgtcggccccggcgcatggctgaaggcactcgacattcccgtcgtgctcgacctgcccggcgtcggccagaacctgcaggaccacctggagatgtacatccagtacgagtgcaaggagcccgtctcgctgtacccggcgctcaagtggtggaaccagccgaagatcggcctcgaatggatgctgaacggcacgggcctcggcgcgagcaaccacttcgaggcgggcggcttcatccgcacgcgcgacgacgatccgtggcccaacatccagtaccacttcctgccggtggcgatcaactacaacggctcgaacgcgatcgagatgcacggtttccaggcgcacgtcggctcgatgcgttcgccgagccgcggccgcgtgaagctgcgctcgcgcgatccgaacgaccatccgagcatcctgttcaactacatggccgaagcgctcgactggcgcgagttccgcgatgcgatccgcgcgacgcgcgagatcatgcgacagcctgcgctcgaccgctatcgcggccgcgagctgaatccgggcgccgactgcaagaccgacaaggaactcgacgcattcgtgcgcgcccgcgccgaaaccgcattccatccgtcgtgctcgtgcaagatgggttacgacgacatggcggtggtcgatgaagaaggccgcgtgcacgggctcgacgggctgcgcgtcgtcgacgcgtcgatcatgccgatcatcacgaccggcaacctgaacgcgccgacgatcatgatcgccgagaagatcgccgacaagatccgcggccgcacgccgctcgcgcgggtcgacgtgccgtacttcgtcgcgaacggcgcaccggcgaggaatgtcgcgaaagccgtgcggcaacccgagacggtc

SEQ ID NO: 11168 - DNA, 1653 bp, Burkholderia cepacia
tgcccgccgcccgccggctacaacatcctgttcatcctgaccgaccaggaacgccatttcgaccgctggccgttccccgtgcccggccgcgaagcgctgcgccgcgacggcatcaccttcatgcaccaccagatcgccgcatgcgtgtgctcgccgtcgcgttcgacggtctacacgggccagcacatccagcacaccggcgtgctcgacaacgcgggcctgccctggcaaaaggacatgtcgccggacattcgcacggtcggccacatgctgcgcgacgccggctactacgccgcgtatctcggcaagtggcacctgagcgcgtcgatgcacgaaaccgcgagcccgtacacggcgcccgtggccgactacaaccgcacgatccgcgcgtacggcttcgacgactatttcggcgtgggtgacctgatcggcatggttcgcggcggctaccagtacgacgggctcacggcggaggccgcggtgagctggatgcgcaaccatgcgccgcgcctcgcgcaggacggcaagccgtggttcctcgcggtgaatctcgtgaacccgcacgacgcgatgttcgtgaacaccgacacgcacggctcgacggtgcaggacgccaaccacccgatgctcggcaacgcgccgccgccgaacgatgcgctgtatcgcacgtcatggcgcgacgtgccgctcgccgcgtcccggcggcagccgtacgacgagcccgggcggccgcccgcgcacggcatgttcaacgccgcgcatgcgaacctcgtcggacgctacccgttcaccgacgaacgcgtacgcctctatcaggacaactacttcaactgcatccgcgattgcgacacgcacgtcgtacgcctgctgcagacgctgcaatcgctcggcctcgacgaacgcacgatcgtcgtgatgacggccgaccacggcgaccacgtcggcgcgcaccagctcgtcggcaagggcgcggcggcctaccagccgcagaatcacgtgccgctcgtgatccgccatcccgcgtatccgggcggcatgcagtgcgatgcgctgacgtcgcacatcgacatcgcgccgacgctgctcggactcaccggcctcgacgatgcgcggcgcgcgacgatccgcggcagcgcgctgaaggggcacgacctcacgcgctggctcgcgaaaccggcggacgcgcaacggcacgcggcgcgcgacgcgacgctgttcaactacgcgatgctgctgtactacgacagcgaatggatgctgaaggaactcggcacgctgcggcagaaaggcgtgccggaggacgaactgctgcgccgcgcgctcgcgcagcagccggatttccggttgcgcggcacgatccgcagcgtgttcgacggccgctaccgcttcacgcgctatttctcgccgctcgaattcaaccggcccacgacgctcgacgcgctgttcgcgcgcaacgacgtcgagctgttcgacgtcgcgcgcgacccgggcgagatgcgcaatctcgcgatcgaccgcaagcggcacggcgagctgctgctcgcgatgaacggccgcctgaacgacctgatcgacagcgaggtcggcgacgacagcccggacgtgatgccgatccgcgacgggaaggtccaggtgcagatccgcaagtggcac

SEQ ID NO: 11169 - DNA, 2307 bp, Burkholderia cepacia
atggcaaaagctccttattccgcccaggcacaggcgttgccgcaccggatgtcgaagctcctcacggagatccgctggattctccaggtcgcgctctgcgcctttcttgtgatggccctgctgagctacagccggcgcgatccgagctggacgcacgccgcccaggtcgatcacatctcgaactgggccggccgcgtcggcgcgtggacggccgacatcatcctgctgctgttcggcctgtcggcctactggctgatcgtgccgctcgggcggcgcatcgccgtcaactaccgccgcatcacgcgccacgaggcgattcccgacgaaccggagcggccgatcggctggctcaccgaaatctttgcgttcgtgctggtcgtgctcgcgtgcgacggcatcgaggcgctgcgcatgtggtcgctgaaggtgcagttgccgcgtgcaccgggcggcgtcgtcggcgaagccgtcgcgggcgcgatgtcgcatgcgttcggcttcacgggcggcacgctgttgttgctgatcgcgctcgcgatcggcctgtcgctgtatttccgcttctcgtggctgtcggtcgccgagcgcgtcggcggtgcgatcctgtccgccgtcaacgtcgcgaagctgcgccgcgaggccgagcgcgaccgcaagctcggcgaggccgcggcggtgcgccgcgaaggcaaggtcgaagaggagcgcgtgcgcatcgaggaccacgagccggtgacgatcgtgccgccggtcgtcacgccggcgaagtccgagcgcgtcgagcgcgagcgccaggtgccgctgtttaccgacctgccgggcgattcgacgctgccgccggtgtcgctgctcgaccccgcgccgaagacgcaggaagcgatttccgccgatacgctcgaattcacgtcgcgcctgattgagaagaagctgaaggacttcggcgtcgaggcgagcgtcgtcgccgcgtatccgggcccggtcgtcacgcgctacgagatcgagccggccaccggcgtgaagggcagccagatcgtcaacctcgcgaaggatctcgcgcgttcgctgtcgctcgtgtcgatccgcgtcgtcgagacgattcccggcaagaactacatggcgctcgagctgccgaaccagcgccgccagacggtgcacctgtccgagatcatcggctccgaggtgtatgcggccgcgtcgtcggcgctgacgctgagcctcggcaaggacatcggcggcaagccggtgtgcgcggatctcgcgaagatgccgcacctgctggtggccggtacgaccggctcgggcaagtcggtcgggatcaacgcgatgatcctgtcgctgctgtacaaggccaccgccgaacaggtgcgcctgatcctgatcgatccgaagatgctcgaaatgagcgtctacgaaggcattccgcacctgctgtgcccggtcgtcaccgacatgcgccaggccggccatgcgctgaactggaccgtcgcggagatggagcgccgctacaagctgatgagcaagctcggcgtgcgcaacctcgcgggctacaacaacaagatcgacgacgcggcgaagcgcgaggagaagatcccgaacccgttcagcctgacgccggaagatcccgagccgctcggccgcctgccgaacatcgtcgtcgtgatcgacgagctggccgacctgatgatggtcgtcggcaagaaagtcgaggaactgatcgcgcggatcgcgcagaaggcacgtgcggccggcatccacctgatcctcgcgacccagcgtccgtcggtcgacgtgattaccggcctgatcaaggcgaacgtgccgacgcggatcgcgttccaggtgtcgtcgaagatcgactcgcgcacgattctcgaccagatgggcgccgaatcgctgctcgggatgggcgacatgctgtacctgccgccgggcaccgggctgccggtgcgcgtgcatggcgcgttcgtcgccgacgacgaagtgcatcgcgtcgtcgagaagctcaaggagcagggcgagccgaactacgtcgagggcctgctcgaaggcggcaccgccgacggcgacgagggctcggccggcgcgggaaccggcgaaggcggcggcgagtctgatccgctatacgaccaggcggtcgagatcgtcatcaagaaccgccgcgcgtcgatctcgctcgtgcagcgtcacctgcggatcggctacaaccgcgcggcgcggctgctcgagcagatggagcagtcggggctcgtgtcggcgatgtcgtcgagcggcaaccgcgaaattcttgtgccggcgcgcgacgcggaa

SEQ ID NO: 11170 - DNA, 1335 bp, Burkholderia cepacia
atggtctttcgcttttatcgaacaaattccttggaagattatcgctttttaagcgcctcgcgcgaccctaaaattcccgcatcgattcgacaacaggccgcagaaatgaccccgtccgcctcatcccgtcccgcagccagccgtccgctggccgatacgcgcccgccgcgcgtgctgcgaaacatgctgagcctccacgatttcgaggcggcggcgcggcgcgtgctgccgcgcccgatcttcggctatgtcagcggcgcggcggaggacaaccgcacgcgcgacgacaaccgcgccgtgttcgacgagtacggattcgcgacgcgtgtgctgcgcaacgtttcgcaacggcaacagacggtcgagctgttcggacggcgctatgcgtcgccgttcggcatcgcgccgatgggtatccatgcgctgtcgacctatcgcggcgacatcgtcttggcgcgggccgcgcagcgcgcgggcatcgcgtcgatcatgagcggctcgtcgctgatcccgctggaagaggtggcggccgccgcgccgggtacctggttccaggcgtacctgcccggcgatcccgatcgtattgccgcgttgctcgaacgcgtcgcgcgcgccggctaccggacgctggtgatcacggtcgacattcccgtgtccgccaatcgcgagaacaacgtgcggaccggcttcaccacgccgctgcgccccgggccgcgcctgttctgggacggcatcacgcggccgcgctggctcgcgggcaccttcgcccggacgctgctcgcgcacggcatgccgcatttcgaaaactcgtttgcgacacgcggcgcgccgatcctgtcgtcgaccgtgctgcgggatttctccgcgcgcgaccatctcgactggggccacctgaaacggatccggcaggaatggaagggcgaactggtgatcaaggggattctcagcgtggacgatgccgtgatcgcgcgcgacatcggcgccgacggcatcatcctgtcgaaccacggcggccgccagctggacggcgcggtgtcgccgatgcggatcctgcctgacgtggtccgggcgctcggagcggattatccggtgatgatcgacagcgggtttcgtcgcgggtcggatgtgctgaaagcggttgcgatgggcgcgcgcatggtgttcgtcgggcggccgttcaattacgcggcggccgtggccgggcaagccggtgtgctgcatgcgatcggcctgctgcgcgacgaagtggaccggaacatggcgatgctgggcgtcgggcaatgcagcgcgttgacgcccgacgtgctgattcggaaaagtggatcgtcggcggcg

SEQ ID NO: 11171 - DNA, 246 bp, Burkholderia cepacia
ctgctgttgaagcagcatgcgctcacccagagcatgtcgcgcagaggcaactgccttgataacgcagccatggagagcttcttcggcacgctgaaatccgagtgctatcggctgacgcgctttgcgagcgtggagcagttgcgagatgcgttgagccgctacatccactactacaaccacgaacgcatcaagctgaaattaaatgggctgagtcccgtgcaatacaggactcagcccttggccgct

SEQ ID NO: 11172 - DNA, 1995 bp, Burkholderia cepacia
atgtccgatatcaccgaaacggccgcgggcgccgcgcccgcccctgctccgcgcccgctgcgcgcaatccagcctctgcccgaccagctgatcagccagatcgccgccggcgaggtcgtcgaacgcccggcgtcggtcgtcaaggagctgctcgagaacgcgatggacgccggcgccagcacactgcgcatcgtgctggaagaaggcggcgtcaagcgcatctcgatcaccgacgatggctgcgggatcccgcccgacgagctggcgctcgcgctgatgcgccatgccaccagcaagatccgctcgctcgaggagctcgaagcggtcgcgacgctcgggttccgcggcgaagcgctcgcgtcgatcgcgtcggtcgccgagatgtcgatcacgagccggacggccgatgccgcgcatgcgatgaagatcgacgcgcagacgggcgtgctgtcgcccgccgccggcgcgaccggcacgacgatcgaggtgcgcgagctgtacttcaacacgcccgcgcggcgcaagttcctgaagagcgagcagaccgagttcggccactgcctggaaatgatccgccgcgcggcgctcgcgcggccggacgtcgcgatctcggtgctgcacaacggcaaggcggtcgagcactggaatgcgaccgagccggcgcagcgcgtcgcgaagatcctcggcgacagcttcgcgaccgcgcacctgccgctcgacgagcaggccggcccgctcgcggtctacggctgcgccggcctgccgaccgcaagccgcggtcgcgccgaccagcaatacttcttcgtcaacggccgcttcgtacgcgacaagctgctgacgcacgcggtacgcgcggcctacgaggacgtgctgcacggcgaccgctacccgtcgtatgtgctgttcctcgatctgccgcccgaagccgtcgacgtgaacgtgcacccgtcgaagatcgaagttcgcttccgcgattcgcgttcgatccaccagtacgtgttccatgcggttcagcgcgcgctggcgcgccacgcgggcgcgtcgccggaaaccaccgcgggcggccatgccgcgcaactctcaccggtaccgcgcgggcccgcttcgttcctggacacaccgctcggccagagccaaggccacgcaaccggcagcggcggtagcggcttctcatcgccgtcgtcgtcctcgtcctcgtcgtcgggcaacacgtggatgcgccaggcgcggatgacccagggcacgctgcccgtcgcgcagccgctcgcgctctatgacgcgctgttcggccgcaaggacaccggcgcgggcacgccggacggcacgacgaccctcgcacgcgattcggccgacgcgccaatcgcaccgctgtcgggcttcaccgcgtcgccgatcgcaacgaccacgcacgacgagcagccgctcggcttcgcgctgggtcagatccacggcatctacgtgctcgcgcagaatgcacacggcctggttatcgttgacatgcacgcggcgcacgagcggatcctgtacgaacagttcaagaacgcgctcgccgaccgctcggtcgccgtgcaggcgctgctgctgccgatctcgatgacggccacgccggtcgagatcggcacggtcgaggaagaacgcgacacgctcgaatcgctcggcttcgacctggcggtgctgtcaccgacgacgctcgcgatccgcgcggtcccggcgctgctgaaggatgccgacctgcagtcgctcgcgcgcgcggtgctcgccgacctgcacgcgttcggcggctcgcgcgtgctcaccgagcgtcagcacgaactgctcggcacgctcgcgtgccaccacgcggtgcgcgcgaaccggcgcctgacgctcgacgagatgaacgcgctgctgcggcagatggaagcgaccgaacgcgcggaccaatgcaatcacggccggccgacgtggtatcagctcacgctgaacgatctcgaccgcctcttcatgcgcggacaa

SEQ ID NO: 11173 - DNA, 696 bp, Burkholderia cepacia
gtgaacgacgccccgccgcccctcgtcgagctcagccacgtcgcgaagtcgtaccggcgcggcaaccagatcgtgccggtgctgaccgacatcacgctcgacatcggcgaaggcgatttcgtcgcgctgatggggccgtcgggctccggcaagagcacgctgctgaacctcgtggccggcatcgaccggccggacagcggcgagctgcgcgtcggcggcctcgacatctcgcatctcgccgaggcgcaactggccgaatggcgcgcggcgaacgtcggcttcatcttccagttctacaacctgatgcccgtgctcaccgcgttcgagaacgtcgagctgccgctgatgctcacgcacctgtcgcgccgcgagcggcgcgaacgcgtcgagctggtgctcgacatggtgaatctcggcgaccgcacgagccattacccgtccgagctgtcgggcggccaacagcagcgcgtcgcgatcgcgcgcgcgctgatcacggatccggtgctgatcgtcgccgacgagccgaccggcgacctcgaccgcgcgtcggccaccgacgtcctcgcgatgctgcagcggatgaacgccgaactcggcaagacgatcatcatggtgacgcacgacgcgcatgcggccggcgccgcgcgctcgctcgtccatctggaaaaaggggagctgatcgatgggcacgccggc

SEQ ID NO: 11174 - DNA, 522 bp, Burkholderia cepacia
atgacgaagtacgacgagcaattcaagcaacaggtggtcagcgcatatttgcgtggcgatagtggttttgacgcactggcagcccgtcacggcatccattccggaatgttgcagcgttgggttgcggcgtatcgcgcgcatggccgtgcgggactgcagagcaaatacagtagttacgacgcaccattcaagctgcgggtgttgcagcacatgcagcgcgatgagttgtcgctgcgtgaagtctcggcgctgtatgacattcgtgatgcgggtagtgtggcccgttgggcgtgtctgtatgatgaaggcggtataaacgctttgacgccccggccgcgagggcgctcccgacagatggtcacatcacctccacccaaacccaccgaagccggcacaccggatgaacgctcgcgcgaggaattgctcaaggaaaacgagtatctgcgtgcggaggtggcgtacctaaaaaagctcgatgcgctgctggccaagaagcaggcagcgcaaaagaaaaaacgcaaa

SEQ ID NO: 11175 - DNA, 696 bp, Burkholderia cepacia
atggctaagatctccaagcgccgtcaggcatttgccgccaaggtcgaccgtcagaagctgtacgcgatcgaagacgcactgagcctcgtgaaggaatgcgcgagcgcgaagttcgacgagtcgatcgacgtcgcagtccagctcggcatcgatgcgaagaagtcggaccaggtcgttcgtggttcggtcgttctgccggcaggtacgggcaagtcggttcgcgttgccgtgttcgcgcaaggcgaaaaggccgagcaggctcgtgcagcaggcgcggaaatcgtcggtatggaagacctggctgagcagatcaaggctggccagatggacttcgacatcgtgatcgcttcgccggacacgatgcgtatcgtcggtacgctcggccagatcctcggcccgcgcggcctgatgccgaacccgaaggtcggtacggtcacgccggacgtcgccaccgccgtcaagaacgcgaaggctggtcaggtgcaattccgtgtcgacaaggccggtatcatccacgcgaccatcggccgtgcatcgttcgagccgaccgcgctgcgttcgaacctgtcggcgctgatcgaagcgctgcagaaggcaaagccggcaacgagcaagggcgtgtacctgcgcaagatcgcactgtcgagcacgatgggcgtcggcgtgcgtgtcgaccaggctacgctggcagcacag

SEQ ID NO: 11176 - DNA, 780 bp, Burkholderia cepacia
atgaaaagcatcacttcccgcgacaacccgctgtacaagcgcctgaaggcgctcgcgggttcgacgccccagcagcgccgcagcggccaggcgctgctcgaaggtttccatctcgcgagcgcgtatctcgacacgggcgcgacgcccgagctgtgcgtcacgaccgaaggtgcgcttggccatgccgaggcgcaggcgatcgtcgcgcgtatcgacgcgcagcggatcgtcacgctgccggacgcgttgttcggacagttgtcgaacgtcgtcaacggcgtcggcttcctgctgctggtcgatcggccggcgcacccgctgcccgcgcgcgtgacggagacgtcggtcgtgctcgacggcgtgcaggacgccggcaatgtcggctcgatcctgcgcagtgcggcggcggccggcgtgcgtcacgttttctgcgcgccggggacggcctacgcgtggtcgtcgaaggtgctgcgctcgggcatgggcgcgcatttcctgctgtcgatccatgaagacgtcgatgccggcgagctctccggacgcctcgccgtaccgattgcgctgaccgactcgcacggcgcgcaggccgtctacgactgcgacctgtcggcgcccgtcgcatgggtgttcggcaacgaaggcgccggcgtgtcagccttctggtgcgatgcggccacgcatcgcgtgacgattccgcagccgggcggaatggagtcgctgaacgttgccgcggcagcagcggtgtgtctgttcgagcaggtgcggcagcagcggccggcg

SEQ ID NO: 11177 - DNA, 738 bp, Burkholderia cepacia
atggcagttacgatgcgccaaatgctggaagcgggtgtccacttcggtcaccagacgcgcttctggaacccgaagatggctccgttcattttcggtcaccgcaacaagattcacatcatcaacctcgaaaagacgctgccgatgttcacggacgcacagaagtacgtgcgccagctggcagcgaaccgcggcacgatcctgttcgtcggcacgaagcgccagtcgcgtgacacgatcgcccaggaagcgcaacgtgcgggcatgccgtacgtcaacgcacgctggctcggcggcatgatgaccaacttcaagacgctgaaggtgtcgatcaagcgcctgaaggacatggaagcggcagtcgaggcgggcgagctcgagaagatgagcaagaaggaagcgctgctgttcgaacgcgaaatcgccaagctgcagaagtcgatcggcggcgtgaaggacatgggcggcattccggacgcgatcttcgttgtcgacgtcggctaccacaagatcgccgtcacggaagcgaacaagctgggcgtgccggtcatcgccgtggtcgatacgaaccactcgccggaaggtgtggattacgtgatcccgggtaacgacgactcgagcaaggcagtcgcgctgtacgccgaaggcgtggccgacgcgatcctcgaaggccgtgcgaacgcggtcaacgaagtggtccaggccgcacgcggcgacgacgagtacgtcgaggaaaacgcg

SEQ ID NO: 11178 - DNA, 1072 bp, Burkholderia cepacia
cgcccgagcggccgccgcgccgacgaactgcgcaaggtcgccctcacgcgccactacacgaaacacgccgaaggctccgtgctggtcgaattcggcgacaccaaggtgctctgcaccgcgagcgtcgccgagcgcgtgcccgaattcctgcgcgagcgcgggcaaggctggctgaccgccgaatacgggatgctgccgcgcgcgacccacacgcgcagcgaccgtgaagccgcgcgcggcaagcagacgggccgcacccaggaaattcagcgcctgatcggccgcgcgctgcgcgcggtgttcgatctcgaggcgctcggcccgcgcaccctccacatcgactgcgacgtgatccaggccgacggcggcacgcgcacggccagcatcaccggcgcgttcgtcgccgcgcacgacgccgtgtcgacgctgatcgcggccggcaagctcacgcgctcgccgatcaccgatcacgtcgccgcgatttcggtcggcgtgtacgaaggcgcaccggtgctcgacctcgactacgcggaagattcgcgctgcgacaccgacatgaacgtcgtgatgacgggcgcgggcggcttcgtcgaagtccagggcacggccgaaggcgtgccgttctcgcgcgccgagatgaatgcgctgctcgacctcgcgcagggcgggatcgccgagctcgtgcagttgcagaaagacgtcctgggtgcgagccatgcctgacgaccgcaccgtcgcgccgctgtcgcgcatcgttctcgcgtcgaacaacccgggcaagctgcgcgaattcaccgcgctgttctcgacggtcggcatcgagatcgtcccgcagggcgacctcgcggtgcccgaggcggaagagccgttcggcacgttcatcgagaacgcgctgaccaaggcgcgtcacgcgtcgcggctcaccgggctgccggcgatcgccgacgattcgggcctgtgcgtgcgcgtgctgcgcggcgcgccgggcgtctattcggcccgctacgcgcagcgcgcgggccgcgacaagggcgacgcggcgaacaacgcgtatctcgtcgagcaactgcgc

SEQ ID NO: 11179 - DNA, 939 bp, Burkholderia cepacia
atgaatcgccaattactcaccaagaagctcgtcagtcttatcgcttccgcagccatcatatttgcggcgttcctcatgggacacaccctttggtcacgctacgtggactcgccgtggacgcgggatggccgcgtgcgtgcggaaatcgttaacgtcgcgcccgatgtgtccggcgcggtggtagacctgcgggtccatgacaaccagcatgtgaagaagggggacctcatcatggagatcgacccttctcattaccgcattgccgtggaccaggctcgagccgtcgtgagcgagcgtctcgccgagcttcagatgcggcaatcggaagcggcgcgccgcgcggacttgaacgccgaggtcgtatcgaatgaagcgcggcaaaatgcggccaaggctgtttcgattgccgaggctcagtatcgtcaggcagcggcgcaactggagtcagcgaaactcaatcttgcgcgaaccctcgtgatcgcgcccgtcgacggctacgtcaccaatctgaataccttcgtcgggaattacgccattgccggcatcgcgaaacttgcaattgtcgacaccaactcgttttgggtatatggatactttgaggaaaccaaaattccgcgtatcgaggtaggcagtcgggccgaaattcagctcatgagcggcggcgtactgcgcggatacgtcgagggcatttcccgtggaatttacgaccgcgacaatccccaaagtcacgagctcgtagccgacgtgaatcccaccttcaactgggtgcggctcgcccagcgcgtgccagttcgcattcgtatagatgctgtaccgaaaggcgtattgcttgccgccgggctcacctgcacggtagtcgtcgatgacaatagccggcgccagtcgacgatcacgcaaaaaacgaacgcttggctcgacggcatcctgcgctggtggtct

SEQ ID NO: 11180 - DNA, 2385 bp, Burkholderia cepacia
atgcaatccacgactcctacgtccccgcctcccgccccggagccgaagaagcggccctggtggcaaaaagtcctgctcggcttcgccgcgatgtgcgtggccctcgtcgtggccggcggcctcgtgctcggctatgcgctcgtcgtggcctggccgaacatgccgtcgctcgacgcgctgaccgactatcggccgaaggtaccgctgcgcatctatacgtccgatcacgtgctgatcggcgaattcggcgaggagcgccgcgacgtcgttcatttcaaggacgtgcccgactcgctgaagaaggcgatcctcgcgatcgaggacgcgcgcttctacgatcacggcggcgtcgacctcaccggcatcatccgcgccggcttcgtcgcgctgacgaacggccacgcgtcgcagggcgcgagcacgatcacgatgcaggtcgcgcgcaacttcttcctgtcgagcgagaagacctacacgcgcaagatctacgaaatgctgctcgcgtaccggatcgagcgcgcgctgacgaaggatcagattctcgaggtctacatgaatcagatctatctcggccagcgtgcgtacggcttcgcgagcgcggcgcgcgtctatttcggcaaggatctgaaggacatcacgctcgcggaagccgcgatgctcgcggggctgccgaaggcgccgtccgcgtataacccggtcgtgaatccgaagcgcgcgaaggtgcgccaggaatacatcctgcagcggatgctcgagctgaacttcatcacgcgcgaacagtacgacgaagccgccgcgcagccgctcgtcgtcaagggtccgggccgcgatttcagcgtgcacgccgagtacgtcgcggaaatggtcagacagatgatgtatgcgcagtatcgcgaggaaacctacacgcgcggcttcaacgtcgtcacgacgatcgactccgcggaccagcaggtcgcgtacaccgcgctgcgcaagggcatcatggattacgagcgccgccacggctatcgcgggccggaaggcttcatcgaactgccggccggcgccgacgatcgcgaacaggcgatcgacgacgcgctgctcgagcatcccgacaacggcgagctgatcgccgcggtcgtgacggccgcgagcccgcgccagatcacggtggcgttcatcgacggcagcacggcgacgatcgagggcgacaacctgcgcttcgcgtcgggcgcgctgtcggccaacgcgcagccgagccggcgcatccgccccggcgcgatcatccgggtcgtgaagaacgacgccggcaaatggtcgatcacgcagttgccgcaggtcgaaggcgcgttcctgtcgatcgtcccgcaggacggggcgatccgctcgctcgtcggcggcttcgactacaacaagaacaagttcaaccacgtcacgcaggcgtggcggcagcccggttcgtcgttcaagccgttcatctactcggcgtcgctcgacaagggcctcgggcccgccaccgtgatcaacgacggcccgctgtatttcagcgccgcggaaaccggcggccagccgtgggagccgaagaactacggcggcggcttcgaaggcccgatgtcgatgcgcaccgcgctgcagcgctcgcgcaacctcgtgtcgatccggatcctgaatcacatcggcacgaaatacgcgcagcaatacatcacgcgcttcggcttcgacgccgagcgccatccggcctacctgccgatggcactcggcgccggccaggtcacgccgctgcagatggccggcgcgtattcggtcttcgcgaacggcggctatcgcgtcaatccgtacctgatcgccgaagtcaccgatccgaacggcgcggtcgtcgcgcgcgcgcagccgctcgtcgccgagcagaacgcgccgcgcgcgatcgacgcgcgcaacgcctacgtgatgaacagcctgctgcagagcgtcgcgcagcgcggcacgggcgcgcggaccaacgtgctgaagcgcaccgatctcgcgggcaagaccggcacgacgaacgactcgcacgacgcgtggttcgccggctaccagcacacgctcgccgcgatcgcatggatcggctatgacaatccgcgcagcctcggcgatcgcgaaaccggcggcggcctgtcgctgccggtctggatcgactacatgggcgctgcgctgaagggcgtgccggaattcaagccgacggtgccggaaggcgtcgaatcgctcggcggcgagttgtacttcaccgagttcacgccgggccacggcttcgtgtcgacggtcggcgtgccgcaggcgcccgctgcgcagaacgtcgacgaggccgtgccgcacgtcgacgagcaggagaagcaggacatcatgaacctgttccgcggccac

SEQ ID NO: 11181 - DNA, 654 bp, Burkholderia cepacia
atgagtccgcgcatgttccgtcggctcgcgccggccgcgctgctgaccgcgctcgttcatgcgccgctcgtccacgccgacgtctcgacgcgcgacgacgccggcaatacggtcacgttgcccgcgcctgcccaacgcgtgatcagcctcgcgccgcacgcgaccgaactcgtctacgcggccggcggcggtgcgaagctcgtcggcaccgtcacgtacagcgactatccgcccgccgcgcaagcggtgccgcgcgtcggcgacaacaaggcgctcgacctcgaacgcatcgccgcgctgaagcccgacctgatcgtcgtctggcggcacggcaacgccgagcggcagaccgacgcgctgcgcgcgctgcacattccgctgttcttcagtgaaccgaagcatctcgacgacgtgtcgtcgtcgctgcgccggctcggcacgctgctcggcacgcaaccaaccgccgatgccgccgcggccgccttcatgcgcgacatcgcggccctgcgcgcacgctacgcggcacgcccgcccgtctcgatgttcttccaggtgtgggaccgcccgctgacgacgctcaacggcacgcacctgatcaacgaagtgttcgaactttgcggcggccgcaacgtgttcgcgtcgctcaagccgctc

SEQ ID NO: 11182 - DNA, 849 bp, Burkholderia cepacia
atggcagctagcgaaggcacgcgcggtccggatccgtccgagtacattgcgcaccacttgcagaatttctccacctcgcatcagacgtcgattttcgacattcacgtctggaatctcgacacgctgttctggtcgatcgtatgcggcatcgtgacgatcgtcctgctgcgtctggccgcccgcaaggcgacgtcgggcgtgccgggccgtttccagtgcgcgatcgagatgctcgtcgaaatggtcgaggaccagtcgaaggccatcgtccacggcaatcgcaccttcatcgcgccgctcgccctcacggtgttcgtgtgggttgcgctgatgaactccctcgacttcctcccggtcgacctgccgggccgcgtgatcggcctgctcggtctgtcggacgtgatttcccaccatcgcatcgttccgacggccgacctgaacggcacgctcggcatcgcgctcggcgtgttcgtcctgatgatctactacagcatcaagatcaagggcgcgggcggcttcgtgcacgagctgctgtcggcaccgttcggcgcgcacccgctgctgtggatcccgaacctcgcgctcaacattgtcgaatatctcgcgaagaccgtctcgctcggtatgcggctgttcggcaacatgtacgcgggtgagctgttgttcctgttgatcgccctgctcggcagcatgtggagcttcggtggcgacgcaacgttcctcggcttcgttggtcatgtgatcgcgggtagcgtctgggcaatcttccacatcctgattgttctgttgcaggcattcattttcatgatgctgacgctggtgtatctcggccaggcgcacgacaagcac

SEQ ID NO: 11183 - DNA, 791 bp, Burkholderia cepacia
cacgtggtacggtgcttgaggacgagaacgtcattcacgtcgccggcaaggtcagcccgatcgacgccatcgaagtgatcaacaccgaactcgcgctcgccgacctcggcaccatcgagaaggcgctcacgcgctattcgaaggcggcgaagtcgggcaacgacaaggaagcggcgaagctcgtcgcggtgctcgaaaaggtgcgcgcgcagctcgaccagggcaaggccgtgcgcggcctcgcgctgtcggacgacgaacaggcgctgatcaagccgttctgcctgatcaccgcgaagccggcgatgtacgtcgccaacgtgaaggacgacggcttcgagaacaacccgcacctcgaggcggtgcgcaagtacgcggaaagcgaaaacgcgccggtggtcgccgtatgcgcggcgatcgaggcggaaatcgccgatctcgacgacgcggacaaggaagccttccttgccgacatgggcatggaagagccgggcctcgaccgcgtgatccgcgcaggcttcaagctgctcggcctgcagacctacttcaccgcgggcgtgaaggaagtgcgcgcgtggacgatccacatcggcgataccgcgccgcaagcggcgggcgtgatccacaccgacttcgagcgcggcttcatccgcgcgcagacgatcgcgttcgacgacttcgtcacgtacaagggcgagcaaggcgcgaaggaagccggcaagatgcgcgcggaagggaaggaatatgtcgtgcacgacggcgacgtgatgaacttcctgttcaacgtctga

SEQ ID NO: 11184 - DNA, 726 bp, Burkholderia cepacia
gtgcggctgcgcctgccatgctcgcgccatgtccactcgcgcgaggttcgtatggtcgtcgacaccggccgccagccgcttctgatccgttcgcccggcgcgcgccggcggctccttttcgccggcgctcccgactcgcttgccgagccgttgccggccgaaccggaaatcggcgacatcgtcttcatccgcgtcaccgtgcggccgtttctcgaagtggcgagcgcgacgcgttcatggacgaatcacgtcggcatcgtcgtcggcgagcgtggcggcgagacgctgatcgccgaaagcacgtttccgctgtcgcgcgtcacgacgatgtcgcggtttctcgcgcgctccgatcgcggcgcatgcgtgatcgcgcggctcaggcagccgctcgacgccgcgcagcgtcgcgaactcgtcgccgcggcgatgcgccggatcggtgtggtctacgacacgggtttcaatctcgcgtcgcgccggcagttttgctcacgtttcgtgcgcgaggtcgtgtgcgaggcgacgcggatcgtgctcggcgacgtcgagaccttctacacgctgctgcaccggaatcccgatcatccgctcggcttctggaggatctggtatttcggccggattccgtggcaccgccgcacggtgacgccggcaagcatcctcgatagcggtgcgttgcgcgtggtgatggacacgcgtgattcgggtaccggtcgcgacgac

SEQ ID NO: 11185 - DNA, 273 bp, Burkholderia cepacia
atggaaaagatgaggctaagggggggatgcggagaggaggagaggagggaagaaagagcgaaagaggagagcaagaaaagagggaggagggggattaacgaaacagaggagaaggcagaagaggagggaagggacaagggaggagaagaaggaaagggaagagaagaagagggagagaaaaaaaatagagaagaacgcggggagggggagaaggagaaaaagaaaaggaagaggaaaggaaaaagaaaaagggggggggaaagcggaaggagg

SEQ ID NO: 11186 - DNA, 1305 bp, Burkholderia cepacia
ttgcagcgccatctcagcgcgcggcacatccgctttctcgcgctgggctcggcgatcggcacgggcctgttctacggttcggcgtccgcgatccagctcgcgggcccggccgtgatcctcgcgtacgtcctcggcggcgcggccgtctacatggtgatgcgcgcgctcggcgaaatggccgtgcgcgagcccgtcgcgggttcgttcggccactacgcgaccgagaacctcggcccgttcgcgggcttcgtcacgggctggacctatacgctcgaaatggtgatcgtcgcgatcgccgacatcaccgcgttcggcatctacatgggcttctggtttccggatgtcccgcaatggatctgggtgctcggcgtcgtcgcgatcatctgcgggctgaacctgtgccacgtgaaggtgttcggcgagctcgaattctggctgtcgatcatcaaggtcggcgcgatcgtcgcgatgatcggcggcggcgtcgcgatcctgctcaccggcatgcacttcggccattcggccgacatgccgacgttcgcgaacctgtggaatcacggcggcttcttgccgaacggcgtcggcgggctgatcgcgtcgctgtcggtcgtgatcttcgcgtacggcggcatcgaggtgatcgggatgagcgccggcgaggcgaaggacccggaacgcgtgattccgcgcgcgatcaacgcggtgcccgcccgcatcctgctgttctacgtgctgacgatggtcgtgctgatgtcgatcagcccgtggaccggcgtcggcagcgacggcagcccgttcgtccagatcttctcggcgctcggcgtgaagtcggccgcgacgatcctgaacctcgtcgtgatcagcgcggcgatctcggcgatcaacagcgacatcttcggcgcgggccggatgatgttcgggatggcgcggcagggtcaggcgccgcgcgtgctgatgacgacgtcgcgccacggcgtgccgtgggtcacggtgctcgtgatggccggcgcgctgctggtgggcgtgctgctcaactacctgatgccgaaggacgtgttcctggtggtcgccgcgatcgcgacgttcgcgaccgtgtgggtctggctgatgatcctgctgtcgcaggtggcgatgcgtcgccgtctgtcgagcgccgaagtcgccgcgctgaagttcaaggtgccgctgtggccggtcgcgccggcgctgacgatcgcattcatgggcttcgtgatcgtgatgctcggctggttcgacgatacgcgcgtggcgctgtatgtcggcgcggcgtggctcgcgctgctc

SEQ ID NO: 11187 - DNA, 537 bp, Burkholderia cepacia
atgagactcaccaccaaaggccgtttcgccgtcacggcgatgattgacttggcactgcgccaggagcagggcccggtgacgcttgcaggcatcagccagcgccagcggatttcgctctcgtatctcgaacagctgttcggcaagctgcgcaggcatgaaatcgtcgaatccgtgcgcggcccgggcggcggctacaacctcgcgcgtcgcgcgcaggacgtcaccgttgccgacatcatcatcgcggtcgatgaaccgctcgacgccacgcagtgcggcggcaaaggcacgtgcgacggctcgaagcagcccgacggccattgcatgacgcacgagctgtggtcgacgctgaaccagaagatggtcgaatacctcgattcggtgtcgctgcaggatctcgtcgatcagcagcgcgcacgcgagggcgcccccgcggtgctgcgcgatcgtcgcgcgcccgagcccgtcgccgcaccggccgagcccgcgcgcacgatgccgctcggccccaattcggtgttcaacatcgcgagttcg

SEQ ID NO: 11188 - DNA, 2937 bp, Burkholderia cepacia
atgcgtatgcgcatgggctcgaacaaaaagcgcgcggaagcacgtccgaaactcctcgtgccgaccggcatgctggtcgcgctggtcggcgccgggatcgttcccgccgatgcactggccgcctgcgtcggaaccacgaccgtcagttgtaccggagccaccaccacctattcgaacggcgcgaacaatctcaacctgaccgtcgggtccggcgcgaccgtctccgtggtgccgctgatcggcggcaccgcgctgtcgctgacgggcagcggcgtcacgctgaccaacaacggcaggatcgaccccgcgttgtccggcttgagcctcgtgtcgaacggcacggtcgtcggcaatatcgcgtcggcgagcacggtcaacgtcacgaacgccagcacgggcgtgatgatgggctcgacgagctcgctgctcaacgggcccgcgctgacggtctacaacggtatcggtgggacgacgaacatcacgaacgccggcacgatcggaacgaccggcctgctcggcttcagcgcggggcccaccgcgcaggtcgtgaccacgtcgggcggtgcacaggtcaacttcaccaacgcgagcggcggcgcgatcaacggttcggtggtgctcgcacccagcgggacaccgggcgcggggaacacgttcaccaacgccggcaccgtcacgggcaacgtgtcgctgggcgcggcgctcggcacgtcgaacacgttcaatgcgcagaccgggtcgtcggtcgggctcggcgtcgatgccgggctgggcggcaacaacacgctcaacctgcaactgaacccggccgccggcagctccgcgagcggcaccctggcggtcgatacgtacggcaatttcacgcatctcgcggtgcagggcgggacgtggaacatcaccggcgcgtcgagcgcggccgacgcgtcgcttgcgggcggcaccgcgatcatcaacaacagcgcggggctgggtctcgggacgatcgcggccggcggcggcacgctggaagccggcacggccggtctcaacctgctcaacaacgtgacgctcggcgcggacctgacggtggatggcgcgacagggctcgcgttgtcgggcacgatcgcgggcggcggtgcgctgaaagcgagcggcaccggcacgctgacgctgaacggcgccaattcgttcacgggcggaacgaacctgacgggcggcggcgggctcgtggtcggcaccgacacggcgctcggcggcggcgcgctgaacgtgtcgggcgcgggcggcacgcttggcacgagcgtcggcggcacgctgctcggcaacgcgatcaatatcgataccggcgtcacgctgggcctgaacggctcggccggtctcgggctgagcggcgcgatcgccggcaacggcgggctggcgcaaaccggcccgggcatcacgacgctgctcggcccgaacacgttcgcgggcggcacgacgctgagcggcggcgggatcgtcgccggcacgggcgcggcgctcggcacgggcgcgctgcatgtgaccggcacgggcggctcgctcgcgacgaacgccggcggcacgctgctcggcaatgcggtcaatctcgatgcaggcgccacgctcggcctgaacggggcgaacggcctgagcctcggcggcacgatcgccggtaacggcggccttgcgcaaagcggcacgggcacgacgacgctgctcggcgcgaacacgttctcgggcggcacggcgctgagcggcggcgggttgatcgccggcaatggcgcggcgctcggcacaggcgcgctgaacgtatccgggacgggcggcacgctcgccacgaacgtcggcggcaccgtgctcggcaatgcggtgaatcttggcgcgggcgcgacgctcggcgtgaacggcgcggtcgacctgagcctcggcggcgcgatcggcgggagtggccaactggcgcaaaccggtgccggcacgaccacgctgctcgggacgaacaccttcacgggcggcacgacgctgagcggcggcggcctcgtcgccggcaacggcgcggcgctcggcacgggcgcgctgaacgtatccggcacaggcggcacgctcgcgacgaacgtcggcggcaccgtgctcggcaatgtggtcaacctgggcgcgggcgcgacgctcggcctgaacggcgcagccgatctcggcctgagcggcgcgatctcgggcgcgggcggcctggcgctcggcggcaccggcgccacgacgctgtccggcgcgaacacgttcacgggcggcgcgagcctgacgggcggcggcagcctgatcgtcgaaggcggcagtgcgctcggtatcggcggcgcgttgaacgtgagcggcctcggcggttcgctaagcgcggatctggccgccggcgcggcactcgcgaacggcatcaacctgaacggcgcatcgctgacgctgaacggcgcgaacgacctcggcctgagcggcgcgatcggcggcaccggcggtctcgtgctgagcggcacggggacgacgacgctgtccggcgcgaacaccttcggcggcggcacgacgctgagcgccggcacgctgctcgccggcagcaatacggcgctcggcagcggcgcgctgaacgtcgccggtacgggcggtgcgctcggcgcgagcgtgaacggcaccgcgctgggcaacgcggtgaatctcggcgcaggcgcgacgctcgcgttgaccggcgcgaacgatctgggcctgaacggcgtgatcgccgggagtggcggtctcgcgcaaatcggctcgggcatcacgacgttgagcggcgcgaacacgttctcgggcggcacgacgctgagcggcggcggactcctcgccggcaacggcgccgcactgggcacgggagcgttgaacgtgacgggcacgggcggctcgctcggcacgaccgtcggcggcaccgtgctcggcaacgcgatc

SEQ ID NO: 11189 - DNA, 879 bp, Burkholderia cepacia
atgacttccgacacgacgcaggtggaccgcacgcccgcccccgacccggcggagaacaacgcgtatttcccgtcgccgtattcgctgtcgcagtacacgtcgtcgaaaaccgacttcgacggcgccgattacccgaatccgtacaccggcggcaagtggaaggtcctgatgatcgcgaccgacgagcgctacatcctgatgacgaacggcaagatgttctcgaccggcaaccatccggtggagatgctgctgccgatgcaccacatggacaaggccggcttcgagatcgacatcgcgacgctgtcgggtaacccggccaaactcgaactctgggcgatgccgcaggatgacgaggccgtgcagagtacttaccggaaatacctgccgaagctgaagacgccgctcaagctgtccgacgtgctcgaccggcattccggcgccgattcgccgtatatcgcagtgttcattcccggcggccacggcgtgctcgccggcattccgcacagcaaggacgtcaagcgcacgctgcgctgggcgctcgaccacgaccggcacatcatcacgctgtgtcacgggcccgcatgcctgctgtcggccgccgtcgacgaagatcctcaggactacccgttcaaagactacgagatctgcgtgtttccggatgcgctcgacacggggccgaacctcgacatcggctacatgccgggcccgctgccatggctcgttgcgcaaagcctcgaaaagctcggcgcgcgcgtgctgaacaaggacatgaccggccgctgccatcaggaccgcaaactgatcacgggcgacagcccgctcgcatcgaacggcgtcggcaagctcgcggccgccgcgctgctgaaggaggtcgggcac

SEQ ID NO: 11190 - DNA, 1857 bp, Burkholderia cepacia
gtgtcggctgaggggcacgacccatggatccgacagctggtagttcagcgccaggccgatgcccgtcccgccgaagcggcgcgcgatcgactcgtcggcctgcgcgaacggctcgaatacgtgcgcgagctgatcggccgtcatgccgatgccggaatcgctgacgcggatcgtcacgggcgtcgcgccgccgcccgatgccgacaccgacaacgccaccgcgccgcggtcggtgaacttgatcgcgttgctgaccaggttgacggcgatctgccgcacgcgcatcggatcgccgagatacgtatgcgtgaccgccggatcgacgtcgatgcgcagcgcgatacccctcgcgccggccactggctcgaacaggtccgcgacgtcgcgcatcagttcatcgatccggaaaccggtcgcttcgagcgtcatccggtcggcctcgatcttcgtcatgtcgagcacgttgttcagcatgtccagcagcatccgggcagccgacgtgaccgcatgcaggcgcggcttctgccggctcgggtcgggcgccttgtcgagcagttcgagattgccgagcatcgcgttcaacggcgtgcggatttcatggctgatcgtcgcgaggaacgtcgacttagcgcggttcgcgctgtcgagcgcgcgctgggcgtcggcgcgcgtcgtgatgtcggagaagctgcacagcagcgcgtccttgcccttgtagcgcacgcggacgaagttgacgagcaggtcgcgcgtgcgcccatcgtcgagcgtcaccggcagctcgacgtcgagctgggccggcgacgcgtccgcgtgctcgcggtagcgtgccagcagccgctcgtgcagcggcggggcaccggcctcgcggtcgtacagctcgagcatccggttgcgcagcagtacctgatgcgtgtcgggcgacacgagaccgatgccgaacggcgcggtcgcgacgatcgtgcggctcatccgctcgctttcgaacacgcggcgcgagcgacggaacagcggcgcgaacacccgcagatcgaacgcgatcacgagcgtccacagcacgatcaggatggttgcgatcgtgccgaattcgcgcagcatcgttgcccagatcgcataggcgatcgtgtgccacgaatacgcatagacgatcgcgtagccggtgtccgagatccggtcggtgatcgtgaacacgccgtgccggtagctttcgtcgaaattcacgaggccgcggcgccacgtgccttcggcgagcgcgtgcttcatcagcgcggcgccgtcctccgagttgtcggtgcgatcgacgtcgagcaccacgcggccgtgttggtcgaccagcatcgcaacggcatcttcgggcgcgtgcctgagccggtcggcgatcacgtcgacgtcgaaatcgctgacgaaagtcatgaaatgcttctgcccgtcgaaggcgggttcgacgagacggaacaccgtcttgccggtcaatgggtcgatcgccggtgcttgccacgcgatccggcgcgacaggcgccagtagcgcgcgatcgccggattggaccagtcggccacgtcgaacgcgaggtgctggatcagcgcatgcgtgtcgggcacgccgatgtgcgcaagcaggtccggatacggcatcgacggcggcggcgtgatcgcgatcacgttgcggtcggggctgtacgcgtagccgcgcaccgcgcgcccggtctggcgctcggcggccgcgacggaaatcgtctggcgctccatcaattggacgtagcgatcggtttcgtcgttggccagcgcgtcgggcgacgcggccaggaagatctcgctcacgccgcgcatcggcgcgagcagcacgtggccgtccttgcg

SEQ ID NO: 11191 - DNA, 348 bp, Burkholderia cepacia
gtgggcggcgcggcggtcgcagccgctttcaaccagcttgcggcgcgcggcggccggtacgcggtcatttcgactcaacccaaggagaggaccaccatgactcatggcttgattatgtggctcatcatcggcgcgatcgccggctggcttgccggcttgctcgtgaagggcggcggcttcgggctgatcgtcgacatcatcgtcgggattgtcggcgcggtgatcggcggctggcttgccgggttgctcggcatcagcatcggcagcggcttcatcggttcggtgatcgtcgcggtcatcggcgcggtgatcctgctgttcgtgatccggctattcaagcgagcggcc

SEQ ID NO: 11192 - DNA, 252 bp, Burkholderia cepacia
atggttatcatccgtctggctcgtggcggctcgaagaagcgcccgttctacaacatcgttgctaccgattcgcgcaaccgtcgtgacggccgcttcatcgagcgcgtcggcttctacaacccggtcgccacgaagggcgaatcgctgcgtatcgctcaggatcgcctgacgtactggcaaggcgttggcgcgcaactgtcgccgaccgtccagcgtctcgtgaaggaagcgcaaaaggcgcaaccggctgcc

SEQ ID NO: 11193 - DNA, 2916 bp, Burkholderia cepacia
atgaatccatcccgcctcttcattctccggccggtcggcaccgccctcctgatggcggcgatcatgctggccggcctcgtcgcgctgcgctttctgccgctcgccgcgctgcccgaggtcgactacccgacgatccaggtccagaccttctacccgggcgcgagcccggaggtgatgacgtcgtcggtcaccgcgccgctcgaacgccagttcgggcagatgccgtcgctgaaccagatgtcgtcgcaaagctcggccggtgcgtcggtgatcacgctgcagttctcgctcgacctgccgctcgacatcgccgaacaggaagtgcaggccgcgatcaacgcggccggcaacctgctgccgtccgacctgccggctccgccgatctacgcgaaggtgaacccggccgatgcaccggtgctgacgctcgccgtcaagtccaagacgctgccgctcacgcaggtgcaggacctggccgacacgcgcctcgcgatgaagatctcgcagatcgccggcgtcggcctcgtcagcctgtcgggcggcaaccgcccggccgtgcggatccaggcgaacccgaccgcgctcgcgcagtacgggatgaacctcgacgacctgcgcacgacgatctcgaacctgaacgtcaacacgccgaagggcaacttcgacggcccgacgcgcgcgtacacgatcaacgcgaacgaccagctgacgagcgccgaccagtacaacagcgcggtggtcgcgtacaagaacggccgcccggtgatgctgaccgacgtcgcgacggtcgtcgccggctcggagaacaccaagctcggcgcgtgggtgaatgcggacccggcgatcatcctgaacgtgcagcgccagccgggcgcgaacgtgatcgcgaccgtcgacgcgatcaaggcgcagttgccgaagctgcaggaaacgctgccggccgcgctcgacgtcgagatcgtcaccgatcgcacgacgatgatccgcgcggccgtgcgcgacgtgcagttcgagctgctgctcgcggtcgcgctggtcgtgctggtgatgtacctgttcctcgcgaacgtctacgcgacgatcatcccgagcctgtcggtgccgctgtcgctgatcggcacgctcgcggtgatgtacatggccggcttctcgctgaacaacctgtcgctgatggcgctcaccatcgcgaccggcttcgtcgtcgacgatgcgatcgtgatgatcgagaacatcgcgcgctacgtcgaggaaggcgaatcgggactcgaggccgcgctgaagggctcgcggcagatcggcttcacgatcatctcgctgacggtctcgctgatcgcggtgctgatcccgctgctgttcatgggcgacgtggtcgggcgcctcttccacgaattcgcgatcacgctcgcggtgacgatcgtgatctcggcgatcgtgtcgctcacgctcgtgccgatgatgtgcgcgaagctgctgcgccattcgccgccgccggagagccaccgcttcgaggcgcgcgtgcaccaggcaatcgactgggtgatcgcgcgctacgcggtcgcgctcgaatgggtgctgaaccgccagcgctcgacgctcgtcgtcgcgctgctgacgctcgggctgaccgccctgctctatgtgttcgtgccgaagggcttcttccccgcgcaagacaccggcgtgatccaggcgatcacgcaggcgccgcagtcgatctcgtacggcgcgatggccgaacgccagcaggcgctcgcggccgagatcctgaaggatccgaacgtcgacagcctcacgtcgttcatcggcgtcgacggcagcaacatcacgctgaacagcggccggatgctgatcaacctgaaggcccgcgacgaacgcaccgaaaccgccgcgcagatcatccgcgacctgcagcagcgcgtgtcgaacatcaccggcatctcgctgttcatgcagccggtgcaggacctgacgatcgactcgacggtcagcccgacgcagtaccagttcatgctgacgagccccaactcggaagaattcgcgacctgggtgccgaagctcgtcgcgcggctgcagcaggagccgtcgctcgccgacgtcgcgaccgacctgcagagcaacggccagtcggtatacatcgagatcgaccgcgcgagcgccgcgcgcttcggcatcacgccggcgaccgtcgacaacgcgctgtacgacgcgttcggccagcgcatcgtgtcgacgatcttcacgcagtcgaaccagtaccgagtgattctcgaatcggagccgaaggagcagcactacgcgcaatcgctgaacgacatctacctgccgtcggccggcggcggccaggtgccgctgtcgtcgatcgcgtcgttccacgagcggccgtcgccgctgctggtcgcgcacctgtcgcagttcccgtcgacgacgatctcgttcaacctcgcaccgggcgcgtcgctcggcgaagcggtcaaggcgatcgaggccgccgagaaggacatcggcctgcccggctcgttccagacgcgcttccagggtgcggcgctcgcgttccaggcgtcgctgtcgaaccagctgttcctgatcctcgcggcggtcgtcacgatgtacatcgtgctcggcgtgctgtacgagagctacatccacccgatcacgatcctgtcgacgctgccgtcggccggcgtcggcgcgctgctcgcgctgatgatcaccgggcacgacctcgacatcatcgggatcatcggcatcgtgctgctgatcggcatcgtgaagaagaacgcgatcatgatgatcgacttcgcgctcgaggccgaacgcgtcgaaggcaagccgccgcgcgaggcgatctaccaggcctgcctgctgcgcttccggccgatcctgatgacgacgctcgccgcgctgctcggcgcggtgccg

SEQ ID NO: 11194 - DNA, 690 bp, Burkholderia cepacia
atggatctgattcaaagcatgcaggcgttcgtcacgctcgcggacgcgggcaccttcaccgagaccggcaaacggctcggcatcacgaccgcgcacgtcagccggctggtcgcgtcgctcgagcatcgtctcggcatccggttgctgaaccgcacgacgcgttcgatgtgcctgaccgaagcgggcgagcgctatctggcgcgcgcccgcgacatcacgctcgccgtcgatgcgagcgagcgcgaggcgcgcgacgcgcgcgtgcatccgcacggccgactgcgcgcgcattgcagcgccagcatcgcgaaccatttcgtgattccgctgatcgggcaattccaggcgcgttacccggacgtcagcgtcgacctgacgctcgcgccgcacctgccgaaactggtgcgcgacagctacgacgtcgcggtgatcgcgatgccgagcctgccgagttccgagcaggtcgcgatcgacgtcggccggatccgcagcgtgctgtgcgcgtcgcccgcgtatctcgatgcgcacggcatgcccgattcgccgggcgcgctggttcaccatcgctgcgtgcaactggtcgcgcccgcgtatcacgagcgcatctggacgctgtggaacggtgcggaagcgcagaccgtggacgtcgatccgtcgatgacggccgacgtcgccgcgtcgctcgcgatc

SEQ ID NO: 11195 - DNA, 339 bp, Burkholderia cepacia
atgttgaagaaggcgttggccaagctcgatgatgaaggacggccgttactgcattcggatcaaggctggcagtatcagatgcccgcctaccgtcggctgttgaagcagcatgcgctcacccagagcatgtcgcgcagaggcaactgccttgataacgcagccatggagagcttcttcggcacgctgaaatccgagtgctatcggctgacgcgctttgcgagcgtggagcagttgcgagatgcgttgagccgttacatccactactacaaccacgaacgcatcaagctgaaattaaatgggctgagtcccgtgcaatacaggactcagcccttggccgct

SEQ ID NO: 11196 - DNA, 783 bp, Burkholderia cepacia
gtgcggggaagcgccgcggtcgcacggccgagaagggacaaggacaagccggcgccatcgctggcgccgcgcgcgaacatagacgtcgggctcggcaacaacttccgcttcaaggggcacggcgcggatctgggactgcgcggcacgatcaccgtgatgagcgcgccgggcgtgccgctgcgcgcggtcggcaacgtgcgtgtgaccgaaggttcgacgtacacgacgaaaaaccgcaagctcgcgatcgagaacggcttcttcacgttcaacggcccggtatcgaacccgggcgtcaacatcctcgcgatgcggcgcaaccaggaggtcgaggccggcgtgcaggtgacgggcacgatccagtcgccgaccgtcaagctcgtgtcggagccgaacgtcaccgacaatgaaaagctgtcgtggctgctgttcgggcacggcaccgaccagggcaacaacgtcggccagcagggcgcgatgacggcggcgctcgggctgctcggcagcgtgaccggcaagcgcgtcgcgcagaccttcggcctcgacgaggtgtcggtcggccgtagcgaagtcggcctgaccgatccgcaggtcgtgctggtgtcgaaggcgatcaacgagcggttcgtgctcggcttcgagcaggggctgcaatcggcgagcaacgcgttcaaggcgacgatcaacctgacgcgcttctggtcggtgtccgcgtacggcggcacgttccagggcgtcgacctgaactacacgcggcgcttcgatcgctggttcgggcagcgg

SEQ ID NO: 11197 - DNA, 996 bp, Burkholderia cepacia
atgagcttccatccgcttcatcgtccgcgccggatgcgccgcgacgacttctcccgccgcctgatgcgcgaaaaccgcctgaccaccgacgacctgatctacccggtgttcgtcgtcgaaggcacccagcaacgccagcccatcccgtcgatgcccggcgtcgagcgcgtgtcggtcgacctgctgatgcaggtcgccgagcagtgcgtcgaactcggcgtgcccgtgctgtcgctgttcccggccatcgagccatcgctgaagacgcccgacggccgcgaggcggccaatccggaaggcctgattccgcgcgccgtgcgcgagctgaagaagcgcttccccgagctcggcgtgctgaccgacgtcgcgctcgatccgtacacgagccacggccaggacggcgtgctcgacgagaacggctacgtgatcaacgacgacacgatcgagatcctgatcgaacaggcgcgcgcgcaggcggaagccggcgtcgacatcgtcgcgccgtcggacatgatggacggccgcatcggcgcgatccgcgagatgctggaaagcgacggtcatatccatacgcggatcatggcctattcggcgaagttcgcgtcggcgttctacggcccgttccgcgatgcggtcggttcggcatccaatctgggcaagggcaacaagatgacctaccagatggatccggcgaacagcgacgaagcgctgcgcgaagtacgcctcgacatcgacgaaggcgccgacatggtgatggtcaagccaggcatgccgtatctcgacatcgtgcgccgcgtgaaggacgagttccgcttcccgacctatgtgtaccaggtgagcggtgaatacgcgatgctgaaggccgccgcgatgaacggctggctcgaccacgacaaggtcgtgctcgaatcgctgctcgcgttcaagcgcgcgggcgccgacggcgtgctcacgtacttcgcgctcgatgccgcgcgtctgctgaaagcgcagcgc

SEQ ID NO: 11198 - DNA, 561 bp, Burkholderia cepacia
atgatggcggaccatgaatccacacatcctcgtctgaaacagcatcgagccttcgtggtgtggctgaccggaatctccggcgcaggcaaatcgacactggcgaatctgctaaaggaacagctcgatgcgcgcgggcttcgcacgtatctactggacgccgatcgtctgcgtgagggactgaaccgggatctcggattcagtgacgccgaccgccatgaaaatatccgacgaaccgccgaagtggccaaattgctggtggatgccgaattcatcgtcatcgccgcgctgatctcaccgtttcaggaagcacgcgagaaggcccgtgcttgcttcgacgctggcacgtttgtcgaggtctttgtcgacgttgcactggacatcgccgaggcacgcgaccccaagggactttacgcgctggcccgacaaggcaccattcgccagtttaccggcatcgattccacctatgaacggccgcgatcacctgacgtgcacgtccgaacggccgaggccagtccttcggagtgcgtggacgcgatcctccggaaactgccgctcgacaac

SEQ ID NO: 11199 - DNA, 609 bp, Burkholderia cepacia
gtgcgcatcgttttccaaggaacccgtatggacagtcacatcgcgccggtggcgctgaacaaggcctaccgtctcctcaatcacggcccgaccgtgctcgtgtcggcccgccacgacggcgtcgacaacgtgatggccgccgcgtgggcgtgcgcgctcgacttcctgccgccgaagctgacggtcgtgctcgacaaatccgcgaagacgcgcgagctcgtcgagcgcagcggcacgttcgtgatccaggtaccgacggccgcgcaattgcagctcacgcacgcggtcggcagccacagcctcgcggagcgccccgacaagctgcgcgaagcgggcgtcacgctgttcgacgtcgacggccacgacctgccgttcgtcgccggctgctcgggctggctcgcatgcaggctgattccggagccgcacaaccagcagacctacgacctgttcatcggcgaggtggtggctgcgtggtccgacacgcgcgtgtttcgcgacggccactggtatttcgaatcggccgatcccgcgctgcgcagcctgcactacatcgcgggcggcaatttctatgcgatcggcgaatcgctgcacgtcgatccggacgcgcag

SEQ ID NO: 11200 - DNA, 971 bp, Burkholderia cepacia
gtggcagacgagagcgatctcgacaagaccgaagccgccactcccaggcgccgcgagaaggcgcgcgaggaggggcaggtcgcgcgttcgcgcgaactggcttcgttcgcactgctcgcggcggggttctacggcgcatggctgctcgcgggcccgtcgggcgcgcatctgcaggcgatgctgcgcggcgcgttcacgttcgatcgcgcgaccgcgttcgacacccaccggatgctgtcggcggccggcagcgcgagcctcgagggcttcgccgcgctgctgccgcttctcgcgctcaccggcgtcgccgcgctgctcgcgccgatggcgctcggcggctggctgatttcgcaaaagacgttcgagctgaagttcgaccggctgaacccgatttcgggcctcggccggatcttctcgatccaggggccgatccagctcgggatgtcgatcgcgaagacgctggtggtcggcgggatcggcggcatcgcgatctggcgcagcaaggacgaactgctcggcctcgcgacccagccgctcggcgcggcgctgcccgatgcgctgcatctggtcgccgtgtgctgcggcacgacggtcgccgggatgttggtcgtcgccgggctcgacgtgccttaccaactctggcagtacaacaagaagttgcgcatgacgaaggaagaagtgaagcgcgagcatcgcgagaacgaaggcgatccgcacgtgaaggggcgcattcgccagcagcagcgcgcgatcgcccgccgccggatgatggcggccgtgccgaaggccgacgtggtcgtcacgaacccgacccacttcgcggtcgcgctgcaatacacggatggcgagatgcccgcgccgaacgccgtcgcgacaggcttgaaccccccccgcgcccgcccccctctactttctttccaccccacttgcccctgctcgaatccccgtccctcgcgcgcgcccctttcccc

SEQ ID NO: 11201 - DNA, 1656 bp, Burkholderia cepacia
atgaccaaatatgttttcgtcaccggcggcgtagtttcttcccttggcaagggtattgccgccgcttccctcgccgcgatcctcgaatcgcgcggtctgaaagtcaccctcctcaaactcgatccctacatcaacgtcgaccccggcacgatgagcccgttccagcacggcgaagtgttcgtgacggaagacggagcggagaccgacctcgacctcggccactatgagcgcttcatcagcacgaagatgcgcaaggccaacaacttcacgaccggccagatctacgaatcggtgatccgcaaggaacgccgcggcgactatctcggcaagaccgtgcaggtgattccgcacatcacgaacgaaatccaggcgttcatcgagcgcggggcggcatcggccacctgcggcgagccggacgtcgcgatcgtcgagatcggcggcacggtcggcgacatcgagtcgctgccgttcctcgaggccgcgcgccagatgagcctgcgcctcggccgcaacagcgcgtgcttcgtgcacctgacgctcgtgccgtacgtcgcgacggccggcgagctgaagacgaagccgacccagcacagcgtgcagaagctgcgcgagatcggcatcctgccgcacgtgctgctgtgccgtgcggatcgccgcatccccgacgacgaatcgaagaagatctcgatgttctcgaacgtgcccgaagacgccgtgatctcggtgtgggacgccgacagcatctacaagattccgcagatgctgcacgaccagggcctcgaccggatcatctgcgaagagctgaagctgtcgccgaaggacgccgacctgagcatgtggtcggcgctcgtcgagaagctcgagaacccgaagcaggaagtgacgatcggcatggtcggcaagtacgtcgacctgaccgagtcgtacaagtcgctgatcgaggcgctgcgtcatgcgtcgatccacacgtcgaccaaggtcaacatcgaatacatcgactcggaagagctcgagacgaacggcgtcgacagcctgaagcatctcgacgccgtgttggtgccgggcggtttcggccgtcgcggcacggaaggcaagatcgccgcggttcgctacgcgcgcgagtcgaaggtgccgtacctcggcatctgcctcggcatgcagctcgcggtgatcgaattcgcgcgcgatgtcgtcggcctgaagcaggcgaacagcacggaattcgatccggacacgccggagcgcgtggtcgcgctgatcaccgaatggtacgaccgcgaaggcaaggtcgagacgcgcaccgaggaatccgacctcggcggcacgatgcgcctcggttcgcagcgctgcccgatcaagccgggcacgatggcggaagaaatctacggcaaggacgtgaacgagcgccatcgccaccgttatgaagtcaataaccgcttcgtgccccagctcgaagccggcggccttatcatcagcgcccgtaccccgagcgaggatctgccggaaatgatggagctgccgcgttcgatgcacccgtggttcgtcggcgtccagttccacccggaattcacgtccacgccgcgtgacggtcatcctctgttcaagtcgttcgtcgaagcggcgcttgccaacaagcaagcgcgcggagtccaagca

SEQ ID NO: 11202 - DNA, 723 bp, Burkholderia cepacia
atgaaacgaatcagtgcaggagccgtcgtattggtcgcggccatttctggcgcgcatgcgcaatcagccggtcagtgggtggtcagtgccggttggtcccactttgccccgcagggggcggcggatccgctgaccctcaatgcactcggccagtcgcaagtgatgaccggcagcggcggggacatcgcaagcggcgatacgttcggactgaccgcaacgtacttcctgaccgaccatatcgcggcgacgacggtcatgggctttccgccgacctggcacttgaacggcgcaggcacgctcagcggtttcggcgagctggggaccgcgcgggcctggagtccggcgatcatcttcaactactacttcggccagccgaatgcacggttcaggccgtatctgggcgccggcgtcacctacacgtggttcagcaacatcaagctcagcaatcccgtttccaccggccagatctatttctcgccgaccgtcgggaccgcgctcgagggaccgacatccgtgtcgctcagtcattccttcgcgcccgtcgtcaacggcggcctgacgtacaacatcgattcgcactggtcgatcaacgcgtcggtcgcgtattcgtgggtatcgacacgcgccacgctcaccacccggtcctccgtcggcacggtcacgagcaccagcaaattccgggtcaatccgatcgtgacgttcctgtcggtcggataccgcttc

SEQ ID NO: 11203 - DNA, 404 bp, Burkholderia cepacia
atgccgctgccgcagttcggcgtgatcgacgtggccggcgacgacgccgcgacgttcctgcacagccagctcaccaacgacatcgagcatctcgatgccggcagcgcgcggctgtccgggtactgctcgccgaagggccgcctgctcgcgtcgttcctcacgtggcgcgccggccacggtgtgcgcctgctcgtgtcgaaggacgtgcagcctgccgtgcagaagcggctgtcgatgttcgtgctgcgcgcgaaggcgaagctgacggatgcgaacgacacgctcgcggtggccggtttcgctggcgacgtgcgcgacgcgctgtcgggcatcttcgatgcgctgcccgatggcgtacacgtgaaggtcgacggcccggccggcacgctgatccgcgtgccgga

SEQ ID NO: 11204 - DNA, 684 bp, Burkholderia cepacia
ttgaatcgccgccccatcatcgatcccgaagtcttgccggtcgaaggcaccggcgccggcctgcccgtcatcgactcccggctgatgacgccgtccggcctgcgcgaacgttttgcgcgcacgctcgaatggagcgtcgagcccggcgaggcgaggctgcaggagggcgtcgatccgcgcagcgcggccgtcctcgtgccgctcgtcgtccgcgagtcaggcctcaccgtgctgctgacgcagcgcgccgatcacctgaacgaccacgccggacagatcagctttcccggcggccgtcgcgagccgttcgaccgcgatgcgaccgccaccgcgttgcgcgaggcgaaggaagagatcgggctggccgccgaacgcgtcgagattctcggcgcgctgcccgactacctgaccggcacgggtttctgcgtgacgccggtcgtcggcctcgtgcatccgccgtttaccgtgcaggccgatacgttcgaagtcgccgagattttcgaagtgccgctcgcgttcgtgatgaatcccgcgaaccatcaggtccgcgtgttccggtgggaaggcggcgagcgtcgtttttttgccatgccctatccgaatggcgaaccgggcgggcattacttcatctggggcgcaactgccggcatgtttcgcaatctgtatcgcttcttggccgccggc

SEQ ID NO: 11205 - DNA, 609 bp, Burkholderia cepacia
atgatggttctgtattccggcacaacttgcccgttctcccagcgttgccggctggtgctgttcgagaagggcatggacttcgaaatccgcgacgtcgacctgttcaacaagccggaagacatttcggtgatgaacccgtacggtcaggtgccgatcctggtcgagcgcgacctgatcctgtacgaatcgaacatcatcaacgagtacatcgacgagcgcttcccgcatccgcaactgatgccggccgacccggtgcagcgcgcccgtgcgcgcctgttcctgctcaacttcgagaaggaactgttcgtccacgtcagcacgctcgagaacgagaagggcaaggcggcggagaagaatcacgagaaggcccgcctcgcgatccgcgatcgcctgacgcaactcgcgccgatcttcgtgaagaacaagtacatgctcggcgaagagttctcgatgctcgacgtcgcgatcgcaccgctgctgtggcgcctggatcactacggcatcgagctgtcgaagaacgccgcgccgctgatgaagtacgccgaacggatcttcagccgtccggcctacatcgaagcactgacgccgtccgaaaaggtcatgcgtcgt

SEQ ID NO: 11206 - DNA, 537 bp, Burkholderia cepacia
atggctcgttttcaagagttttacaaagaaaaggttgtgcccggcctgatcgagaagttcggttacaagtcggtcatggaagtgccgcgcatcaccaagatcacgctgaacatgggtcttggcgaagcgatcgctgacaagaagatcatcgagaacgccgttggcgacctcacgaagatcgccggccagaagccggtcgtcacgaaggcccgcaaggcaatcgcaggcttcaagatccgccagggttacccgatcggcgcgatggtgacgctgcgtggccgcgcgatgtacgaattcctcgaccgtttcgtgacggttgccctgccccgcgtgcgtgacttccgcggcgtgtcgggtcgtgctttcgatggccgtggcaactacaacatcggtgtgaaagagcagatcattttccccgaaatcgattacgacaagatcgacgcactgcgtgggctgaacatcagcatcacgacgactgcgaagaccgacgacgaagcaaaggctctgctcgccagcttcaagttcccgttcagaaac

SEQ ID NO: 11207 - DNA, 1026 bp, Burkholderia cepacia
atgaaaacgactcccggcccggtcatgctcgacgtcgtcggcacgaccctgtcgcgcgacgatgcgcggcgcctcgcgcatccgaataccggcggcgtgatcctgttcgcgcggcacttccagaatcgtgcgcaactgaccgcgctgaccgattcgatccgcgcggtgcgcgaagacatcctgatcgccgtcgatcacgaaggcgggcgcgtgcagcggttccgcaccgacggcttcacggtgctgcccgcgatgcgtcgcctcggcgagctgtgggatcgcgacgtgctgctcgcgacgaaggtcgcgaccgccgtcggttacatcctggccgccgagctgcgcgcgtgcgggatcgacatgagcttcacgcccgtcctcgatctcgactacgggcactcgaaggtgatcggcgatcgtgcgttccatcgcgatccgcgcgtcgtcacgctgctggcgaagagcctgaaccatgggctgtcgcttgccggcatggcaaactgcggcaagcattttcccgggcacggcttcgcggaggccgattcgcacgtcgcgctgccgaccgacgaccgcacgctcgacgcgatcctcgagcaggacgtcgcgccgtacgactggctcgggctatcgctggccgcggtgatcccggcgcacgtgatctacacgcaggtcgacaagcggccggcgggcttttcgcgcgtgtggctgcaggacatcctgcgcggcaagctcggcttcacgggtgcgatcttcagcgacgacctgtcgatggaggctgcccgcgaaggcggcacgctcacgcaggccgccgacgccgcgctcgccgccggttgcgacatggtgctcgtctgcaatcagccggatgcagccgaagtcgtgctgaacggactgaaggcgcgggcctcggccgagtcggtgcggcgcatcaagcggatgcgtgcgcgcggcaaggcgctcaagtgggacaagctgatcgcgcagcccgagtatctgcaggcacaggcgctgttgagcagcgcgctggcg

SEQ ID NO: 11208 - DNA, 1410 bp, Burkholderia cepacia
atgggcaaacaagcaatcggtgtgatcgggctcgcggtgatgggccgcaatctcgcactcaatatcgagagccgcggttacgcggtgtcggtgttcaaccgcagtcgcgagaaaaccgacgaactgatcgccgaattccccggccgcaatctggtgccgacctatacgctcgaagaattcgtcgcgtcgctcgaaacgccgcgccggatcctgatgatggtgaaggccggggaagcgaccgatgcgacgatcgcctcgctcaagccgctgctcgagaagggcgacgtgctgatcgacggtggcaacacgcatttcaccgacacgatccgccgcaaccaggaactcgcgcagtcgggcctgcatttcatcggcaccggcgtgtcgggcggcgaagagggcgcgctgcgcggcccgtcgatcatgcccggcggccagcgcgacgcgtacgacctcgtcgagccgatcctcaagcagatcgccgcgaaggcgccgtcggacggcgagccgtgcgtcgcgtacatgggcccggacggtgcgggccactacgtgaagatggtccacaacggcatcgaatacggcgacatgcaactgatcgccgaaagctactcggtgctgaaggacgtcgcgggcctgaccaacgacgaactcggcgcggtgtacaccgaatggaaccagggcgagctcgacagctacctgatcgagatcacgtcgaagatcttcggcaagaaggatgaagaaaccggcaagcatctcgtcgacgtgatcctcgatcgcgccgcgcagaagggcaccggcaagtggacgagccagaacgcgctggatctgggcgtgccgctgccgctcatcaccgagtcggtgttcgcgcgcgtgctgtcgtcgctgaagaccgagcgcgtcgcggccagcaagatcctgtcgggcccggccgccgcgccgttcgacggcgatcgcgctgcattcgtcgaagcggtgcgccgcgcgctgtatctgagcaaggtgatctcgtacgcgcagggcttcgcgcagctgcgcacggcgtcggaagaatacggctggaacctcgatctcgggacgatcgcgaagatcttccgcgcgggctgcatcatccgcgcgcgcttcctgcagaagatcaccgacgcgtatgcgaaggatccggcgctcgcgaacctgctgctcgacccgtacttcaaggacatcgccgcgaactaccagaccgcgctgcgcgacgtcgtggtggccgcggtgaaggccggcgtgccggtcccggcgttcgcgtcggcggtcgcgtacttcgacagctaccggtccgagcggctgcccgcgaacctcgtgcaggcgcagcgcgacttcttcggcgcgcacacgttcgagcgcacggacaagccgggcagcttccacgcgaactggtcg

SEQ ID NO: 11209 - DNA, 1219 bp, Burkholderia cepacia
ctgattccctgtgccggcacgggcagccgttccggctcggccgtgccgaagcaataccggacgctggccggccgcgcgctgctgcactacacgctcgccgcgttcgacgcgtgcaccgagttcgcgcagacgctcgtcgtgctcgcgcccgacgattcccatttcgacgcccgccgtttcgctggcctgcgtttcgcggtgcgccgctgcggcggcggctcgcggcaggcgtcggtgctgaacgggttgctggaactggccgaattcggcgcgaccgaccacgactgggtgctggtgcacgacgccgcgcgcccgggcatcacgccggagttgatccgcacgctcgtcgcgacgctgaaggacgacccggtcggcggcatcgtcgcgctgccggtggccgacacgctcaagcgcgtgccggccggcggcgacgcgatcgcgcgcacggaatcgcgcgacgcgctgtggcaggcgcagacgccgcagatgttccgcatcggcatgttgcgcgaggcgatcctgcgcgcgcagcgcgaagggcacgacctgaccgacgaagcgagcgcgatcgaatgggccggccatacgccgcgcgtcgtgcagggcagcctgcgcaacttcaaggtcacgtacccggaagatttcgcgctcgcggaggcgatcctcgcgcgtcccgcgaacgcttcctgactttcaccccatctcaatcggaacacgcatggatttcagaatcggacaaggctacgacgtgcaccagctcgtcgaagggcgccctctcatcatcggcggcgtgacgattccgtacgagcgcggcctgctcggccactcggacgcggacgtgctgctgcatgcgatcaccgacgcgctgttcggcgcggcggcgctcggcgacatcggccgccatttctccgacacggacgcggcgttcaagggtgcggacagccgcgtgctgctgcgcgcgtgcgcggagcgcgtcaaggcggccggtttcacgatccagaacgtcgacagcaccgtgatcgcgcaggcgccgaagctcgcgccgcatatcgacgggatgcgcgcgaacatcgcggcggatctcgggttgccgctcgagcgcgtgaacgtgaaggcgaagaccaacgagaagctcggctatctcggccgcggcgaggggatcgaggcgcaggccgccgcgctgctggtgaagcagggcggctgacgtccggccgttgcg

SEQ ID NO: 11210 - DNA, 393 bp, Burkholderia cepacia
atgagcatgagtgatcctatcgccgatatgctgactcgcatccgcaacgcgcagatggtcgagaaggtatcggtcgcgatgccctcgtcgaaggtcaaggttgcaatcgcgcaagtcctgaaggacgaaggttatatcgacgatttcgccgtgaaggcggaaggtgcgaagtccgaactgaatatcgcgctgaagtactacgcaggtcgcccggtcatcgaacgcctcgagcgcgtgtcgaagcctggtctgcgcgtgtaccgcggccgtaacgacattccgcaggtcatgaatggcctcggtgtggcaatcgtgtcgacgccgaagggcgtgatgaccgaccgcaaggcgcgcgctaccggcgtcggcggcgaagtcatctgctacgtcgct

SEQ ID NO: 11211 - DNA, 259 bp, Burkholderia cepacia
atgggggccgtccaaggcagcatgctgctcgtattcacgctgatcgcgattgccgcgctgatcctgatgatcgcgcgctacaagatctacccgttcctggtgctgatcatcgtctcgctcggcctcggtctcgtcgtcggcatgccgatggacaagatcgtcaagtcgttcgaaacgggcaccggcggcacgctcggccacattgcgatcgtcgtcggcctcggcacgatgctcggcaagatgatggccgaaatcggcg

SEQ ID NO: 11212 - DNA, 837 bp, Burkholderia cepacia
gtggaaggcgatgcgtcccaggacgaactgttcgcgtacgtgacgtcgcccgccttcgacgcggacaactccgcgggcggtagcggcgtgcgtgcgccgatgctgcgtcgcggccgcaaccagccggcgaacaagcgcgtgctgtcgccggacgacgacgcgccgaagctccacaaggtgctggcggaagcgggcatgggctcgcgccgcgaaatggaagaactgatcgttgccggccgcgtgtcggtgaacggcgagcccgcgcacatcggccagcggatcatgccgaccgaccaggtgcggatcaacggcaagccggtcaagcgcaagctgccgaacaagccgccgcgcgtgctgctgtatcacaagccgaccggcgagatcgtcagccacgcggatccggaaggtcgtccgtcggtgttcgaccgcctgccgccgatgaagacggcgaaatggctggcggtgggccgcctcgacttcaataccgaaggcctgctgatgctgacgacctccggcgacctcgcgaaccgcttcatgcatccgcgttacagcgtcgagcgcgagtacgcggtgcgtgtggtcggcgagctggccgaaggcatgcggcagaagctgctgcacggggtcgagctcgaagacggtccggcgaatttcatgcgcatccatgatggcgacgcacgaaggcatcatcgctggggtatagctacgtgttgtcctaagacacgcagctgcacattgacgcggaggtccgcacggttcgccttgacagtcaccagcgcaaccgcatggtgtcagatcccgacttcgtctacgcagcgccctaacatgtcgtcatcg

SEQ ID NO: 11213 - DNA, 1338 bp, Burkholderia cepacia
atgagctacaacgaagcgaaattctggcacccgatgctgcacccgaacgagatgaaacagcgcaagccgatccgcatcgtgcgcggcgacggctgctacgtgttcgacgaggcggggcgcaagctcgtcgacggcgtcgcgggcctgtggaacgtgaacgtcggtcacaaccgccaggaagtgaaggacgcgatcgtgcgccagctcgacgaactcgaatacttccagctgttcgacggcatttcgcatccgcgcgccgaggagttgtcgaagaaggtgatcgacctgctcgaaccggaagggatgcgccgcgtgctgtacagctcgggcggctccgatgcgatcgagaccgcgctgaagatcgcgcgccagtactggaaggtgcgcggccaggccgatcgcacgaagttcatctcgctgaaacagggttatcacggcacgcacttcggcggcgcgtcggtgaacggcaacacggtgttccgccgcaactacgagccgaacctgcccggctgcttccacgtcgagacgccgtggctgtaccgcaacccgttcacgcaggacccggaggaactcggccggatctgcgcggaaatgctggagcgcgagattcagttccagagccccgatacggtcgccgcgttcatcgcggagccgattcagggcgcgggcggcgtgatcgtgccgccggccaactactggccgctggtgcgcgaggtgtgcgaccgctacggcgtgctgctgatcgccgacgaagtggtgaccggcttcggccgcagcggctgcctgttcggcagtcgcggctggggcgtgcgcccggacatcatgtgtctggcgaagggcatttcgtcgggctacgtgccgctcggcgcgacggtcgtgaacgcgcggatcgaggatgcgttcgccgcgaatgccgatttcggcggggcgatcatgcacggctacacgtacgccggccatccggtcgcatgcgcggccgcgatcgcgagcctcgacatcgtcgtgaaggaggacctgccggcaaatgcggcgaagcagggtgcgtatctgctcgaagcgctgcagccgttcgcggagcgcttcgcggcggtcggcgaggtgcgcggcaaggggctgatgctcgcgctcgacctcgtcgcgaacaaggacacgcgcgagccgatcgatccgctgtcgggctatgcgaacgcggtcgcggaagtcgcgcgcgagaacggcgtgctggtgcgcccggtcggcacgaagatcatcctgtcgccgccgctcgtgatccagcgcgaacagctcgaccggatcgtcgacgcgctcgcggccggcttcgaggccgtgccgttcgcg

SEQ ID NO: 11214 - DNA, 1566 bp, Burkholderia cepacia
gtgcgcctcaccggagacatcatggaatacgtcataggcgtcgacatcggcacgcagagcaccaaggcgctgctggtcgaccggcacggcacgatcgtcgcgcggcgctcggccggctaccagcccgatacgccgcgcccgctgtgggccgagcagtggccgcacgtgtggttcgacgcggtgctcgactgcatcggcggctgcgtgagcgacgcgcgcgcgcagggcgtgccggccgacgcgatccgggcggtgtgcgtgagcagcctgtacggcggctcgggcatcccggtcgacagcgacatgcggccgctgcatccgtgcctgatctggatggaccggcgcgcgaccgcgcaagtcgactgggtcgacgaacacgtgaacgtcgagcggctgcgcgtgatcaccggcaacggcgtcgacagctactacggcttcaccaagatgctgtggctgcgcgaccagcggccggacgtgtgggcgaacgtgcgctatttcctgccgccgaacgcgtatgtgatctacctgctgaccggtgaagtcgcggtcgatcacagttcggccggcaatatcggcggcgtgtacgacgtcgcgcgccgcgagtggtccgacgacgcgctcgacatgctcggcattccggcgacgatgatgcccgagcggctggtcgattcgacggacgtcgtcggcggcctgctgtcgcaatggaccgcgcaactcgggctgccggccggcacgccggtcgtcgcgggcggcgtcgatgcggccgtggcgaccttcgccgccggcgcgacgcgcaccgggcagcacgtcgcgatgatcggcaccagcatgtgctggggctacgtgaaccggcacgtcgatgcgcggcacggcctcgtcagcatgccgcacgtgttcaacgggcagcgcgacctgtacgtgttcggcggtgcgatcgcggccggcgcatccgtcgcgtggtttcgcgaccagttctgccacgcggaaaccgacgcggcgcgcctgctgccgcacggcgatccgcacgtgctgctcgaggaggcggccgagcgtgtgccggccggcgccgacggcgtgctgttcctgccgtatctgatgggcgagcgcagcccggtgtgggatgcgaaggcgagcggcgcgttcgtcgggctgagtctcgcgcacacgcgtgcgcatctttatcgagcggtgctcgaaggcgtcgcgttcgcgttgcgtcacaacatcgaggccggccgccggggcgcggcggcgctggacgatcggttgatcgtcgtcggcggcgccgcgcattcggcgctgtggatgcagatcatcgcggacatgacgggttttccggtgtggacgatcgagcaggacgtcgaagccgcgatgggcgccgcgctgcttgcgggcgtcggcgcagggctcgtgtcggacgatgacgcgcagggcggctgggtcacgctcgtcgagcgcgcacggcccgatgccgagcgtgcgaacacgtacgacgcgcgtttttcgctctatacggcgttgtatccggcactcaagccgatcatgcacaggctgggcacctcatca

SEQ ID NO: 11215 - DNA, 2287 bp, Burkholderia cepacia
gacaccgacatgatcgtgttctcggccggtatccggccccgcgacgaactggcccgcgcgtgcgggctcgacatcggcccgcgcggcggcgtcgcgatcgacgacgcgtgccgcacgagcgacgccgacatctacgcgatcggcgaatgcgcggcctggaacggcatcgtgtacggcctcgtcgcgcccggctacgacatggcgcgcgtggtcgcgaagcaactcgcgggcggcgccgacgaagcggcggccgcgttcgcgggcgccgacatgagcaccaagctgaagctgatgggcgtggacgtcgcgagcatcggcgacgcgcacggcacgacggccggcagccgcacctaccagtacgcggacgagcgccgccaggtctacaagaagctggtggtgtccgactgcggcaagttcctgcacggcgcggtgatggttggcgatgcggccgagtacggcacgctgctgcagatgatgctgaaccgcatcgagttgcccgaatcgccggaattcctgatcctgccgtcgtcggacggcgccgcgaagccggcgatcggcgtcgatgcgctgccggaaggcgcgcaaatctgctcgtgcaacaacgtgtcgaagtcgcagatctgcgcggcggtggccgacggcgcgacgagcctcggcgcgctgaagacgtgcacgggcgccggcacgtcgtgcggcggctgcgtgccgctcgtcacgcagatcatgaaggccgagatgaagaagcagggcctcgcggtcaacaaccatctgtgcgagcactttccgtattcgcgccaggagctgttccacctgattcgcgtcgagcgcatcacgacgttcgacgcactgctgcacaagcacggccgcgggctcggctgcgacgtgtgcaagccggccgtcgcgggcatcctcgcgtcgtgcttcaacgagttcgtgctgaagaaggagcacgcggggctgcaggattcgaacgactactacctcgcgaacatccagcgcgacggcacgtattcggtcgtgccgcgcatgccgggcggcgaagtcacgccggaagggctgatcgcggtcggccaggtcgcgaagaaatacggcctgtacacgaagatcaccggcggccagcgcgtcgacttgttcggcgcgcgcgtcgagcaactgccgtcgatctgggaggagctgatcgcggccggtttcgaatcgggtcacgcgtacggcaaggcgctgcgcaccgtgaaatcgtgcgtcgggtcgacgtggtgccgctacggcgtcgacgattcggtcggcctcgcgatcgatctggagaaccgctacaaggggctgcgcgcgccgcacaagatcaagttcggcgtgtccggctgcacgcgcgagtgcgcggaagcgcagggcaaggacgtcggcgtcatcgcgaccgagaaaggctggaacctgtacgtgtgcggcaacggcgggatgaagccgcgccacgcggagctgctcgcgtccgacctcgatcgtgcgacgctggtccgctacatcgaccgcttcctgatgttctacgtgcgcacggcggatcgcctgcaacgcaccagtgtctggcgcgacaacctcgaaggcggcctcgactacctggtcgacgtcgtcgtgcacgacaagctcgcgatcgccgacgaactcgaagccgacatgcagcacgtgatcgatacctacgagtgcgagtggaagaaggccgtcaccgatcccgacacgcgcaagcgcttccgccacttcgtgaacagcgacgcgccggatacgaccatcgagttcgtcgagacgcgcggccagatccggcccgcgacgcccggcgagcgcgcgggcggcaagcccgtgccgatccccgtcgtcgccgcggcggcgacccgagccgcgaccgaaaccgccaccgcgtgaccgacatccgccaccttgcaaggagcccatcatgaacgatcgccttccgctgtcctggacccgtgtatgcccgctcgacgacatcgtgccgaacaccggcgtgtgcgcgctcgtcaacggcgagcagatcgcggtgtttcacgtcgcgcatgccgacggcggcgtgttcgcgatcgacaacgtcgatcccgtatcgcaggccgccgtgatgtcgcgcggactgatcggcagcctcggcgagcgcgtcgtggtcgcgtcgccgctgtacaagcagcacttcgacctgcgtaccggcgaatgcctggaagcgcccgagcagtcggtgaacgcgtatccgtcgcgggtcgaggacggcttcgtgtgggtcgcggcctgaccgtcc

SEQ ID NO: 11216 - DNA, 921 bp, Burkholderia cepacia
atgaccatgcacacgatccgcatcaggcacgccgcgctggcggtagcggcagtcgccgcgttgagcggctgcgcgaccgtgcagacgccgaccaagggcgatccgctcgaaggcttcaaccggacgatgtacaagttcaacgacacggtcgacacgtacgcgctgaaaccggtcgcgaagggctaccagtacgtggtgccgcagccggtgcgcgacagcgtgacgaacttcttctcgaacatcggcgacgtctacatcgcggcgaacaacatcgtgcagctgcgcatcgcggacggcgtcggcgacatcatgcgcgtcgtgatcaacacggtgttcggcgtcggcggtctgttcgacgtcgcgacgatcgcgaagctgccgaagcacacggccgacttcgggatcacgatgggccgctacggcatgccgtcgggcccgtatctcgtgctgccgctgctcggcccgagcacgctgcgtgacacggccggcctcggcgtcgactacgtcggcaacccgcttacctacgtgaagccggatggcctgagctggggcctgttcggcgtgaacctcgtcaacacgcgtgcgaacctgctcggcgcgggcgacgtgctggacgccgcggcgctcgacaagtattcgttcgtgcgcaacgcgtacctgcagcgccgtcaggcgctgatcagcaacgcccgcggcgaggccgccgtaacgtcgaacaacgacgcgctgccgaagtacgacctgccggaagacggcgcggcaccggcggcagccggcgcggccggtaccgcgggtgcggcggcggtgggcggtgcggcgccggcgggcgcatcgggcgcggcggttgctgcgccggcgtcgggcacggccgaatcgccgaacccggccagcgagacgaacgtgccggcgatgcaggtggcg

SEQ ID NO: 11217 - DNA, 1257 bp, Burkholderia cepacia
atgacacatcgcccccttcgcgccgccgcccggctcaccacggccgccgcggtcgccttcgcgtcgctcggcacgacggcgcccgccgatgccggcacgctgaccctcaacatcgcgttcaagggcgcgagccagcgcgcggtctggcagtcgacgatcgaagcgttccacaaggcgcatcccgacatcgacgtgaagccgaccttcgtcgacgaggaagcgtacaaggtgcagctcccggcgtggctcaccaccgtcgcgccggacgtcgtgaactggcacgcgggcgaacggatggcgtactacgcgaagcgcgggctgttcgaggacctgagcggcgactggacgaagaacggctgggatgcgatgtatgcgtcgacgcgcagcgcgtcgtcctataacggcaagcagtacgcggcgccgaccgtctactactcgtgggggctgttctaccgcaaggacctgttccgcaaggtcggcatcgccgacgagccgaagacgtgggaccagtttctcgatgcgtgcaagaaactgaaggcggccggcatcacgccgatcgcgatcggcggccgcgacgcgtggacgctcgccggctggttcgactatctcgacctgcgcctgaacggcaacgcgttccatcagcaactgatggccggcgacgtgccgtacaccgacccgcgcgtgaagaaggtctacacgacgtggaaatcgctgatcgactcgggctacttcatcgacaacgcgctgtcctacgatctcgacggcgcgcagccgttcctgttccagggcaaggccgcgatgatgctgatgggcaccttcatcgcggccggtttcccgccgaacgtgaagccggaaatgggttactaccgctttccgatcatcgacccgaaggtgccgaccgccgaggacggcccggtcgaatcgctgcacatcccgaccaaggcgaagaacaaggccgacgcgcacacgttcctcgcgttcgtcgaaacgcccgagatgggcgcgaagctcgccgaagggctcggctcgctgtcggccaacagcaagtcgcccgagccggccgatccgatctcgcgcatcggcttccggattctcgccgacacgaagggcggcgtcgcgcagttctacgaccgcgacatgaccaaggaaatggccgacgaagggatgaagggcatgcagcagttcctcgcgaatcccgcgcagctcgatacggtgctcgcgcaactcgaacagacccgcaagcggatctacaagaag

SEQ ID NO: 11218 - DNA, 2109 bp, Burkholderia cepacia
gtgccccgcaaaacccccatcgagcgctatcgaaatatcgggatcagcgctcacatcgatgccggcaagaccacgacgaccgagcgcatcttgttttacaccggcgtgagccacaagatcggtgaagtgcacgacggcgcggccacgatggactggatggagcaggagcaggaacgcggcatcacgatcacgtcggccgcgaccacggccttctggaagggcatggccggcaactatccggagcaccggatcaacatcatcgatacgcccgggcacgtcgacttcacgatcgaggtcgagcgctcgatgcgcgtgctcgatggcgcgtgcatggtctacgactcggtcggcggcgtgcagccgcaatcggaaaccgtgtggcgccaggcgaacaagtacaaggtgccgcgcatcgcgttcgtcaacaagatggaccggatcggcgccgacttcttccgcgtgcagaagcagatcggcgagcggctgaaaggcgtcgccgtgccgatccagattccgatcggcgcggaagatcatttccagggcgtcgtcgatctcgtgaagatgaaggcgatcgtgtgggacgacgaaagccagggcgtgaagttcacctacgaggacatccccgcgaacctcgtcgagctcgcgcacgaatggcgcgagaagatggtcgaggccgcggccgaagcgagcgaggaactgctcgagaagtatctgcacgaccatgaatcgctgaccgaggacgagatcaaggccgcgctgcgccagcgcacgatcgcgaacgagatcgtgccgatgctgtgcggcagcgcgttcaagaacaagggcgtgcaggcgatgctcgacgcggtgatcgactacctgccgtcgccggtcgacgtgcctgcgatcctcggccacgacttcgccgatccggaaaagccggcggaacgtcatccgagcgacgacgaaccgttctcgtcgctcgcgttcaagatcatgaccgacccgttcgtcggccagctgatcttcttccgcgtgtattcgggcgtcgtcgagtcgggcgacacggtgctcaacgcgacgaaggacaagaaggagcggctcggccggatcctgcagatgcacgcgaacgagcgcaaggaaatcaaggaagtgcgcgcgggcgacatcgcggcggccgtcggtctgaaggaagcgaccaccggcgacacgctgtgcgatccggccaagccgatcatcctggaaaagatggaattcccggaaccggtgatctcgcaggccgtcgagccgaagacgaaggccgaccaggaaaagatgggcctcgcgctgaaccgtctcgcgcaggaggatccgtcgttccgcgtgcagaccgacgaagagtccggccagacgatcatttcggggatgggcgagctccacctcgaaatcctggtcgaccggatgaagcgcgagttcggcgtcgaggcgacggtcggcaagccgcaggtcgcgtatcgcgaaacggtgcgcacgacggcggccgacgtcgaaggcaagttcgtcaagcagtcgggcgggcgcggccagtacggtcatgcggtgatcacgctcgagccgaacccgggcaagggctacgagttcctcgacgagatcaagggcggcgtgattccgcgcgagttcatcccggccgtcgacaagggcatcaccgagacgctgaagagcggcgtgctcgcgggctacccggtcgtcgacgtgaaggtgcacctgacgttcggttcgtaccacgacgtcgactcgaacgaaaatgcgttccggatggccggctcgatggcgttcaaggaagcgatgcgcaaggcgaagccggtgctgctcgagccgatgatggccgtcgaggtcgagacgcccgaggagttcatgggcaacgtgatgggcgacctgtccagccggcgcggcatcgtgcaggggatggaggacatcgcgggcggcggcggcaagctcgtgcgcgccgaagtgccgctcgcggagatgttcggctattcgacgtcgctgcgctcggccacgcagggccgcgcgacgtacacgatggagttcaagcagtacgcggaaacgccggccaacgtgtcggaagccgtgatcaacgcgaaagtgaag

SEQ ID NO: 11219 - DNA, 1344 bp, Burkholderia cepacia
atgtctgccagcgcagtgaacgtgactcccgggcgcaatgtcgtcgtcgtgggaacgcaatggggtgatgaaggcaagggcaagatcgtcgactggctgacggaccacgctcaaggcgtcgtgcgtttccagggcggtcacaacgccggccacaccctcatcatcggcggcaagaaaacgatcttgcgcctcattccgtcgggcatcatgcgtgaaggcgtcgcctgctacatcggcaacggcgtcgttctgtcccccgaagcactgttcaaggaaatcggcgagctcgaagaggccggcgtgaacgtacgcgaccgtctgttcatctccgaagccacgacgctgatcctgccgtaccacatcgcgatcgaccaggcgcgcgaagcgcgcaagggcgtgggcaagatcggcacgacgggccgcggcatcggccccgcgtacgaagacaaggtcggccgccgcgcgctgcgcgtgcaggacctgttcgacgcgaagaccttcgccgatcgcctgcgcgaaaatctcgattaccacaacttcgtgctgacccagtatctgggcggtgcggccgtcgacttccaggccacgctcgacacgatgctcggctatgccgaccgcctgaagccgatggtggccgacgtgtcgcgccgcctgtacgacgcgaacaacgcgggccagaacctgctgttcgaaggcgcgcaaggcacgctgctcgacatcgaccacggcacctatccgttcgtcacgtcgagcaactgcgtcgcgggtgcggcgtcggcaggcgcgggcgtcggtccgcagaagctcaactacatcctcggcatcacgaaggcgtattgcacacgcgtcggctcgggcccgttcccgagcgagctgtacgatgcggacaacccgcagcgccaggaccaggtcggcgtcacgctcgcgaacgtcggcaaggaattcggttcggtcacgggccgtccgcgccgcaccggctggctcgacgcggctgcgctgcgccgttcgatccagatcaacggcgtgtcgggcctgtgcatgacgaagctcgacgtgctcgacggcctcgacgaagtcaagctgtgcgtcggctacaaggtcgacggcaaggacgtggacatcctgccgcgtggcgcggtcgacgtcgcgcgttgcgagcccgtgtacgaaacgttctccggctggaaggaaagcacggtcggcatcaagacgtgggacgcgctgccggtgaatgcacaggcatacctgtcccgtgtccaggaagtggctggcgtgccggtcgacatggtgtcgacgggcccggaccgcgacgaaacgatcctgctccgccatccgttcaaggtg

SEQ ID NO: 11220 - DNA, 483 bp, Burkholderia cepacia
ttgcgcggcgcccgcgatctggccggccatcgcctgcccgatcgccgcgcccgcggcgagccccgcgccgaccccggcgatgccgcccggcctttgcgcggcgagcggaatcccctgacccgcgccggtattggctggcgcgagccacccccctgcacatccccgcacccgcacccgaaaggtcgagcgcctctctgccccgccccggcccacccgcccctttcgcccgtccccccgccgcccccccccccccccgcccccccccgcccccccctcaccccccgcgccgcccccccgccgcgcgccctgtcgcccccccccacgccgcggggccccccgccggcccgccaggccgcccagccccgcgccccgcgcgccccctggcgtccctcccgcccggcgccgtggcacccgcccaccccgccccccgcgccgtcccccccccgcgcccgccgccgaccgcgccggaccacgccaccgtcc

SEQ ID NO: 11221 - DNA, 888 bp, Burkholderia cepacia
ttgccgcgataccgcggggcgaatcgcaggagaggacggaaacgcccggttcatccggactccgatgcgtgtccgcgcaacgatcggcgcgtcgatcgtcgcgaacgtgacaagcctacacgtcgctttcactcgaactcgccctcgaccaccggccgcgattggtcgatatactatgcgcctcccatttccccgcactcgaccatgcgacgacggttcttctggctgatcgtgctttcgctcggcattgcgcaacccgccgcggcgcagcaggcgcccgccttgcctgcctctgcgcccgaagcagccgcatccgcgccaggcgacgcatccgcaccgctcgccaacgatcagcccaacgaagcaaaccgccgcatcacgtcctacctgacgaagaaattcggcgtcgcgaaggaacgcgccgcgaagctcgccgatatcgtgagcgtcactgcgacgaaatattcgctgccgccggcactcgtttacgcgattatttcgatcgaatcgcgcttccaggaaaaggcgcgcggccagcatggcgcgaccgggttgatgcaggtcgtaccgtccgcgcaccgcggcatgctgcgcaacgtgaaggatctcaccgagccgaatgcgaacgtcgaggtcggctcgcgcattctgtcgggctacgtgaaggcggccggcggcaacgtgcaggccgggttgaagagctacagcggcggatcgagtgcgtatgcggcgaaagtgatgcagcgcgtcgatgcgttccggttcgtgctcgaacccgaggacgatgcgaaaagcgcgaataccgggagcgatgcgaacaacgcgaaggcacacatggtgccggtcagcgatccgtcagcggcgcccgccgcgaaccgcaacgcgaag

SEQ ID NO: 11222 - DNA, 1167 bp, Burkholderia cepacia
atgccgctcccgactaatcagctccggctcgcgatggtggctggcgagccgtcgggcgacctgctcgcggcgtcgctgctcggcgggctgcgcgagcggctgcccgaatcggcccagtattacgggatcggcgggcagcgcatgatcgcgcagggcttcgactcgcactggcagatggacaagctgaccgtgcgcggctatgtcgaggcgctgggccagattcccgagatcctgcggattcgcggcgaactcaagcgccagctgctcgccgagcggccggacgcgttcatcggcgtcgacgcccccgatttcaacttcagcgtcgaacaggccgcgcgcgacgcgggcatcccgtcgatccacttcgtgtgcccgtcgatctgggcgtggcgcggcggccggatcaagaagatcgcgaagtccgtcgatcacatgctgtgcctgtttccgttcgaaccggcgattctcgacaaggccggcgtcgcctcgacctacgtcggccacccgctggccgacgacatcccgctcgaacccgacacgcacggcgcgcgcatcgcgctgggtctgccggccgacggccccgtgatcgcggtgctgccgggcagccggcgctcggagatcgcgctgatcggcccgacgttcttcgcggcgatggcgctgatgcagcagcgcgagcccggcgtgcggttcgtgatgccggcggcgacgcccgcgctgcgcgagctgctgcagccgctcgtcgacgcccatccgcaactcgcattgacgatcaccgacggccgctcacaggtcgcgatgacggccgccgacgcgatcctcgtgaagagtggcaccgtcacgctggaagccgcgctgctgaagaagccgatggtgatctcgtacaaggtgccctggctgaccgggcagatcatgcgccggcagggctacctgccgtatgtcggcttgccgaacatcctggcggggcgcttcgtcgtgcccgagctgctgcagcatttcgcgacgcccgaggcgctcgccgatgcgacgctcacgcagctgcgcgacgacgcgaatcgccgtacgctgaccgaagtgtttaccgaaatgcatctttcgctgcggcagaacacggccgcgaaggcggccgaggccgtcgtgcgcgtgctcgagcaacgcaaggggcgcgca

SEQ ID NO: 11223 - DNA, 1491 bp, Burkholderia cepacia
atgaaaaaacgaattgaacccgtgacgggcaaggagatcgagatgaaagagctgatggacgtgcagcgcggcgacgcgccggcggcggaccgcgaacgcgtgctggaacggatggccgcgggcatggcgcgctggtcggagaagtggtttccggacgcctatatcttcgccgcgctcgcggtgatcatcgtggcggcgggcgcgctggcggccggggcgccggtcgcgcggatcggcgtggcgttcggcgacggcttctggagcctcatcccgttcacgatgcagatggcgatcgtcgcgatctcgggttatgtcgtcgcggtgtcgccgcccgcgtcgaggctcatcgatgcgctcgcgcgcgtgcccgcgtccgggcgcgccgcggtgacgttcgtcgcgctcgtcagcatcgtcgcgtcgttgttcaactgggcgatcagcctgatcttcagcggcctgctggtgcgtgcgctcgcgcgccgcgccgatctgcggatggattaccgcgcggccggcgcggccgcttatctcggcatgggtgcgacgtgggcgctgggtttgagttcatccgcgtcgcaattgcaggcgaatccggacagcctgcccaaggcgctgctcgcgatctccggcgtcatcccgttcaccgagacgatctttctcccgcagtcgatgctgatggccgcggtgctgaccgtcgcgtcgctgctgatcgcgtatctgtccgcgccgaacgacgcgcgggcgaagaccgcgacggaactcggcattgcgctcgacgagagccatgccgcgctcgcccgccccagccgcccgggcgactggctcgaatacagtccgctcgtcaccatcgtgatcgtggcgatcggtgcgatctgggcgtggcacgagttcacgacgaaaaatccgctgatcgcgatctcgaacctgaacacgtacaacttcctgttcctgctgctgggcatgctgctcaactggcgaccgcggcgcttcctcaatgccgtcgcgcgttcggtgccgtcggtcgcgggcgtgctgatccagtttccgctgtacggcgggatcgcgtacatcctgaccaaggcggccgcgcccaccggactgccgctgtccgatcacctcgcccacttcttcgtcgcgctgtcgtcgcatgcgtcgttccccgcggtgatgggcgtgtattcggccgtgctcgggttcttcgtgccgtccggcggcggcaagtggatcatcgaggcgccgtacgtgatcgaggcggccaaactgctgcaggttcatctgggctgggccgtgacggtctacaacgcggccgaggcattgccgaacctgatcaatccgttctggatgctgccgctgctcggcgtgctcgggttgcgtgcccgcgacatcgtcggcttcacgttcacgcaactggtcgttcacctgccgctcgtgatcttcatgctgtgggcgctcgcgagcacactcacctaccatccgcccgtcatgccg

SEQ ID NO: 11224 - DNA, 1896 bp, Burkholderia cepacia
atggcacacgaaacgatgagctttcaggcagaggtcaagcaactcctccacctgatgatccattcgctctacagcaacaaggaaatcttcctgcgcgaactggtgtcgaacgcgtccgacgcgaccgacaagctgcgtttcgaggggctcgcggacaacgcgttgtacgagaacgatccgaacctgcgcatccgcatcggctacgacaaggccgcgcgcacgatcacgatcgacgacaacggcatcggcatgagccgcgacgaggcgatcgcgaacctcggcacgatcgcgcggtcgggcaccaaggaattcttcacgaagctgtcgggcgaccagcagaaggatgcggcgctgatcggccagttcggcgtgggcttctactcgggcttcatcgtcgccgacaagatcaccgtcgagacgcgccgcgcgggcctgccggcgaaccaggccgtgcgctgggaaagcgccggcgagggcgatttcacgatcgacgcgatcgagcgcgcgcagcgcggcacgacgatcacgctgcacctgcgcgaaggcgaggacgacctgctgtcgtcgcaccgcctgaagtcgatcatccagaagtactccgaccacatcgcgctgccgatcctgatgcgcaaggaagagtgggatcaggaaaagggcgagatggtcctgaaggacgaggacgaaaccgtcaaccaggcgagcgcgctgtggacgcgttcgaagagcgacgtcaccgacgagcagtacacgcagttctaccagcacatcgcgcacgatcaccaggatccgctcacgtggacgcacaaccgcgtcgagggccgcagcgaatacacgcagctgctgttcgtgccggcgcacgcgccgttcgacctgtggaaccgcgattatcgcggcggcctgaagctgtacgtgaagcgcgtgttcatcatggacgacgccgagcaactgctgccgcaatacctgcgcttcgtgaagggcgtggtcgattcggccgacctgccgctgaacgtgtcgcgtgaaatcctgcaggaaagccgcgacgtgaaggcgatccgcgagggcgtgaccaagcgcgcgctgtcgatgctcgaggaactcgcgaacgcggaagaggatgccggcaaggagaagtacaagacgttctggggcgcgttcggccaagtgctgaaggagggcctcggcgaggatcacgcgaaccgcgagcgcatcgcgaagctgctgcgcttcgcgtcgacgcacggcgacaccgacgcgcaggacgtgtcgctcgccgactacgtgtcgcgcatgaagcccgagcagagcaagatctactacgtgaccgccgatacctggcaggccgcgaagaacagcccgcatctcgaagtgttccgcaagaagggtgtcgaggtgctgctgctgaccgaccgcgtcgacgaatggatgctgtcgtttctgcacgaattcgacggcaagccgctcgcgagcgtggcccgcggcgatctcgatctcggcgagctgaacgacgaggagaagaaggcgcaggagcaggccggcgaggcgatcaagccggtcgtcgagaagatgaaggaagcgctcggcgacaaggtgaaggaagtgcgcgtcacgttccgcctgaccgattcgccgtcgtgcctcgtcgcggacgacaacgacatgagcggctatctgcagcggatgctgaaggcggccggccagaacgcgccggcgatgcagccgatcctcgagatcaatcccgagcacgcgctcgtgaagcagctgaacgccgacagcgccgatttcggcgactggtgccatctgctgttcgatcaggcgctgctggccgaaggcggcatgctcgacgacccggcgagcttcgtgaagcggaccaacgcgctgctgctgtcgcgcgccgcg

SEQ ID NO: 11225 - DNA, 720 bp, Burkholderia cepacia
atcggcgcgggcgaaatgatcgagctgtgcgcgacgcatttcgccgcgcagggcccgcgcgaactcgtcgtcgcgaaccgcacggccgaacgcggccagcggctcgccgaacgcttcaacggccgcgcgatgccgctggccgacctgcccacccgcatgcacgaattcgacatcatcgtgtcgtgcaccgcgtcgacgctgccgatcatcggcctcggcgcggtcgagcgtgcggtgaaggcgcgtcgtcaccggccgatcttcatggtcgacctcgcggtgccgcgcgacatcgagcccgaagtcggcaagctgaaggacgtgttcctgtacaccgtcgacgatctcggcgcgatcgtgcgcgaaggcaacgcgtcgcgtcaggccgcggtcgcgcaggccgaagcgatcatcgaaacccgcgtgcagaatttcatgcaatggctcgacacgcgcagcgtcgtgccggtgatccgtcacatgcatacgcaggccgacgcgctgcgccgcgccgaagtcgagaaggcacagaagctgctcgcacgcggtgacgatccggccgccgtgctcgaagccctgtcgcaggcgctgaccaacaagctgatccacggcccgacgagcgcgctcaaccgcgtcaacggcgccgatcgcgattcgctgatcgacctgatgcgcggcttctaccagcacgcgccgcgctcgaacgaccagtccggccac

SEQ ID NO: 11226 - DNA, 975 bp, Burkholderia cepacia
gtgaatcttgccaacctgatgagcgaacccgatgaagcccgccgcccgtcgcgccgctcgctgttcgcgcaggcgcgcgaccacagcgtgtatctcgcgttcgtcgcgctcgccgtcttcaacctgatcgtcacgcccggcttctcgaatccgctcgccgcgcgcagcctgctgttccaggccgcgccgatcgtgctgatcgcgctcgggcagaacctcgcgatcgccacgcgcgggatcgacctgtcggtcggctcggtgatggcgctgtccagcgcgatcatcgcggtgtgcctgccgtacggcaccggcgcggcgttcgcggcggccattgcgatcgggctcgcggtcggcctgttcaacggcgggctcgtcgcgcggctcggcatcgatccgctgatttccgggctcgcgttgctcgtcgccgcgcgcgggctggcgcaggcgttgctcggcggctcgcgcgtgagcctgcctccgtccgatgcgttcgacttcgtcggcatcggcacgtggttcgggctgccggtcgtgatgctgatcgcgctcgtgtgcgcggccgtcgtgttcttcgtcgtgcgcaacacgaccttcgggcgctacacgattctcgtcggcgcgagccgcgacgccgcgcatctggccggcgtgccggtgcggcgcacgctgctggcggtctatgcggcgagcggggcgctggccgggctggcgggcctgttcgccaccgcgcggctcggcgcaggcgatccgaactatgtcggcgtgaacttcgaactcgatgcgatcgccgcgtcggtgatcggcggcacgccgctgtccggcgggcgcgtgtcgatcgtcggcaccgtgttcggcgtgctgctcctgcaactgctcgatgccagcttcatcatgaacaacatcagctacacgtatgcgcagatcctgaaggccgcgttcatcctcggcgcgctgtacctgcaacgctcgggagcc

SEQ ID NO: 11227 - DNA, 1014 bp, Burkholderia cepacia
atgaacgttttctacgacaaagacgctgacctctccctcatcaagggcaagcaagtcacgatcatcggctacggctcgcaaggccatgcacacgcgctgaacctgaaggacagcggcgtgaacgtgacggtcggcctgcgcaagggcggcgcgtcgtggagcaaggccgagaacgccggcctgtcggtcaaggaagtcgcggaagcggtgaagggcgcggacgtcgtcatgatgctgctgccggacgagcagatcgccgacgtgtacgcgaaggaagtccacgcgaacatcaagcagggcgcggcgctcgcgttcgcgcacggcttcaacgtccactacggcgcggtgatcccgcgcgccgacctcgacgtgatcatgatcgcgccgaaggcaccgggccacaccgtgcgcggcacgtactcgcaaggtggcggcgtgccgcacctgatcgcggttgcgcagaacaagtcgggcgcggcgcgcgacatcgcgctgtcgtacgcggcagcgaacggcggcggccgtgccggcatcatcgagacgaacttccgtgaagaaaccgaaaccgacctgttcggcgagcaggccgtgctgtgcggtggcacggtcgagctgatcaaggcaggtttcgagacgctggtcgaagccggctacgcgccggaaatggcgtacttcgagtgcctgcacgaactgaagctgatcgtcgacctgatctacgaaggcggcatcgcgaacatgaactactcgatctcgaacaacgccgagtacggcgagtacgtgacgggcccgcgcatcgtcacggaagagacgaagaaggcgatgaagcagtgcctgaccgacatccagacgggcgagtacgcgaagagcttcattctcgagaacaaggcaggcgccccgacgctccagtcgcgtcgccgcctgacggccgagcaccagatcgagcaggtcggtgcgaagctgcgtgcgatgatgccgtggatcgcgaagaacaagctcgtcgaccagacgaagaac

SEQ ID NO: 11228 - DNA, 498 bp, Burkholderia cepacia
atgacgacgttgaccctgatcgtcgcgcgtgcccgcaacggcatcatcggccgcgacaaccagttgccctggaaacttcccgaggatctcgcgttcttcaagcgcacgacgatgggcgcgccgatcgtgatgggccgcaagacccacgagtcgatcgggcggccgctgccgggccgccgcaatatcgtcgtcacgcgcgacgcgacgcgccgtttcgaaggctgcgacacagtcacgtcgctggccgatgcgctggcgctcgccgcgcgcgacggcgcacccgaggcattcctgctcggcggcgcgcaactctatgcggaaggtctcacgctcgccgacaagctggtcgtcaccgagatcgatgcggacttcgacggcgacgcatcgttcccggcgcccgacgccgcgcactggcaggaaatctcgcgcgacgcacatcaggcagccgcgccgaacacgttcggctatgcgttcgtcgtctacgcacgcaagcgcggc

SEQ ID NO: 11229 - DNA, 1038 bp, Burkholderia cepacia
atggcgcaacacgagacagggacggcgacgcagccgatgacgatgatccaggcgctgcgctccgcgatggacgtgatgctcgggcgcgacagcgacgtggtcgtgttcgggcaggacgtcggctatttcggcggcgtgttccgctgtaccgaaggactgcagaacaagtacggcaagtcgcgcgtgttcgatgcgccgatctcggaaggcgggatcgtcggcgcggcggtcgggatgggcgcgtacggcttgcgccccgtctgcgaaatccagttcgccgactatttctatccggcatccgaccagatcgtgtcggaaggcgcgcggctgcgctaccgttcggccggccagtttaccgcgccgatgacgatccggatgccgtgcggcggcgggatctacggcgggcagacgcacagccagagcccggaggcgatgttcacgcaggtgtgcgggctgcgcaccgtgatgccgtcgaatccgtacgacgcgaaagggctgctgatcgcgtcgatcgagaacgacgatccggtgatcttcctcgaaccgaaacggctgtacaacggcccgttcgacggccatcacgaacggcccgtcacgtcgtggctcaagcatccggcgagcgcggtgcccgaaggctactacacggtgccgctcgatacggccgccgtcgtgcggcccggcaacgacgtgacggtgctcacgtacggcacgacggtgcacgtatcgctcgccgccgccgaggagaccggcatcgacgcggaagtgatcgatctgcgcacgctgtggccgctcgacctcgacacgatcgtcgcgtcggtgcgcaagaccgggcgctgcgtcgtggtgcacgaggcgacgcgcacctgcggctatggcgcggagctcgtgtcgctggtccaggaacactgcttctaccacctcgaggcgccggtcgagcgcacgacgggctgggacacgccgtatccgcatgcgcaggaatgggcgtattttccggggccgacccgggtcggtgaagcgttgcgacgcgtgatggaggcg

SEQ ID NO: 11230 - DNA, 1032 bp, Burkholderia cepacia
atgaaggtcgtggtcgtcgcctgcgacgcgcagggcaacgtcgacatcgccgacctgaaggcgaaggccgagcagcactcgaaggacctcgcggcgatcatgatcacgtacccgtcgacgcacggcgtgttcgagcagaacgtccgcgagatctgcgagatcgtccatgcgcacggcggccaggtgtacgtcgacggcgcgaacatgaacgcgatggtcggcctgaccgcgccgggccagttcggcggcgacgtgtcgcacctgaacctgcacaagaccttctgcatcccgcacggcggcggcggcccgggcgtcggcccggtcgcggtcggcgcgcaccttgcgaagttcctgccgaaccagcgctcgaccggctacgcacgcacggaagacggcatcggcgcggtgtcggccgcgccgtacggctcggcgtcgatcctgccgatctcgtggatgtacatcgcgatgatgggcgcgaagaacctgaccgccgcgacggaaaccgcgatcctcaacgcgaactacatcgcgaagcgcctcgcgccgcattacccggtgctgtattcgggcccgggcgggctcgtcgcgcacgagtgcattctcgacctgcgtccgatcaaggaaacgagcggcatcagcgtcgacgacgtcgcgaagcgcctgatggactatggcttccacgcgccgacgatgagcttcccggtgccgggcacgctgatggtcgagccgaccgaatcggaatcgcaggaagagctcgaccgcttcatcgccgcgatgatcgcgatccgcgaggaaatccgcgcggtcgaggaaggccgcgccgatcgcgaggacaacccgctgcgtcacgcaccgcacacggcggccgtcgtcaccgcgaacgaatggccgcacgcgtactcgcgcgagcaggccgcgtacccggtcgcatcgctcggcacgaacaagtactggccgccggtcggccgtgcggacaacgcgtacggcgaccgcaatctgttctgctcgtgcgtgccgatgtcggactacgca

SEQ ID NO: 11231 - DNA, 909 bp, Burkholderia cepacia
atgatcacgacgggcgcgctgctgttcggcgatgcccagcggcatcttgcgttcacgccgagcgaatcgccgatcgcgctgcaactgggcggcagcgagcgggacgatctcgcgcgcgccgcaaagctcggcgagcagtggggctacgacgaaatcaacctgaactgcgggtgcccgtccgagcgcgtgcagcgcggtgcgttcggtgcatgcctgatgaacgagccgcaactcgtggccgactgcgtgaaggcgatgcgcgatgcggtggcggtgccggtgacggtcaagcaccggatcggggtcgatgcggtcgaggactacgcgttcgtgcgcgacttcgtcggcacggtggccgaggctggttgcgaaacgttcgtcgtgcatgcgcgcaacgcgatcctgaagggactgtcgccgaaggagaatcgcgagatcccgccgctcaagtacgactatgcgtatcggttgaagcgcgattttccgtcgctggagatcgtgatcaacggtggtatcacgacgctcgatgaagtcgcgcagcatctcgagcacgtcgacggcgtgatgctcggccgcgaggcgtatcacaacccgtacgtgctggcggaagtcgatgcgcgcttctacggatccaccgcagcggtaccgacgcgcgaagaggctgaagcgcaactgatcgcgtattgcgcggccgagctgaagcgtggcacctacctcggtgcgatcgtgcgacacgcgctcgggctgtatcgcggcatgccgggcgcgcgtggctggcgtcgcgtgctgtccgacaacaagaagctggcgcgcggcgatctggccgtgttcgacgaggcgcgcgcgcatctgaacgaagccgaagaaatttttgaaaaaaaggctttgcaagattcaaaagtgttcgta

SEQ ID NO: 11232 - DNA, 630 bp, Burkholderia cepacia
atgcgggctcccactgaaaataatggtgacgaagctcacatattaggtgaacccgacgaggaaacgaccatgagcgcgaacgcactcctgtcccgcatgctgcgctaccaggcatgggccaatgacgaaatgctgaaggcgatgtcggggctcgacgcggagcggcatgcgcaagcacgtcatctcgcgctgcggctgatgaaccattgcctcgtggtgaaccggatattcgccgcgcatctgagcggcgagcgtcacggcttcgtgtccgacaacacgcctgacacgccggagccggaagcgctgcgcgcggcattcgccacgctcgatcgctggtatctcgactatgtggcaaccgccacacccgacatgctgtcggaatcgattccctttctgtttaccgatggcgacaacggatacatgacgcgcgaagagatgctgacccatgtcgtcacgcacggcggctatcatcgtggcgaagcgggcagactgatggttcaggcggctgcgctctcggcacaggatatcgagctcccgtgggacacgtacgcggttcacttgcatcggacagagcccgagcgcaggcttcaaggcaagctcggcgacgcgcactcagcgaatgccgggcga

SEQ ID NO: 11233 - DNA, 561 bp, Burkholderia cepacia
atgccgatcatcaacacccaaatcaagccgttcaaggcaaccgcttaccacaacggcgatttcgtgccggtctcggaagagaacttcaagggcaaatggtccgtcgtcgtgttctacccggccgacttcacgttcgtgtgcccgaccgaactgggcgacctcgccgaccgttacgcggaattccagaagctgggtgtcgaaatctacggtgtgtcgaccgacacgcacttcacgcacaaggcctggcacgacacgtcggacacgatcggcaagatcaagtacccgatgatcggcgacccgacgctcacgctgtcgcgcaacttcgacgtgctgatcgaggaagaagggatggcgctgcgcggcacgttcgtgatcaacccggaaggcgagatcaagctgtgcgaaatccacgacaacggcatcggccgcgacgcaggcgaactgctgcgcaaggtccaggcggcgcagtacatcgcggcgcacccgggtgaagtgtgcccggccaagtggacgccgggtgcggaaacgctgaccccgtcgctcgacctgatcggcaagatc

SEQ ID NO: 11234 - DNA, 3252 bp, Burkholderia cepacia
atgccaaaacgcacagacatcaagagcatcctcatcatcggcgccggcccgatcatcatcggccaggcgtgcgagttcgactattcgggcgcgcaggcttgcaaggcgttgcgtgaggagggctacaaggtcgttctcgtcaacagcaacccggcgacgatcatgaccgacccgaacacggccgacgtgacctacatcgagccgatcacgtgggaagtcgtcgcacgcatcatcgagaaggagcgcccggacgcgatcctgccgacgatgggcggccagaccgcgctgaactgcgcgctcgacctgcaccaccacggcgtgctcgagaagttcggcgtcgaactgatcggcgcgtctccggaagcgatcgacaaggctgaagaccgccagaagttcaaggacgcgatgaccaagatcggtctcggctccgcgaagtcgggcatcgcgcactcgatggaagaagcgaccaaggtgcacgccgagatcatggcggccaccggcggcagcggctacccggtcgtgatccgtccgtcgttcacgctcggcggctcgggcggcggcatcgcgtacaaccgcgaagagttcgaggagatctgcaagcgcggtctcgacctgtcgcccacgcgcgagctgctgatcgaagagtcgctgctcggctggaaggaatacgagatggaagtcgtgcgcgaccgcgccgacaactgcatcatcgtctgctcgatcgaaaacctcgacccgatgggcgtgcacaccggcgactcgatcacggtcgcgccggcgcagacgctcaccgacaaggaataccagatcctgcgtaacgcatcgctcgcggtgctgcgcgagatcggcgtcgacacgggcggctcgaacgtgcagttctcgatcaacccgaaggacggccgcatggtcgtcatcgagatgaacccgcgcgtgtcgcgttcgtcggcgctcgcgtcgaaggccaccggcttcccgatcgcgaaggtcgccgcgaagctggcggtcggctacacgctcgacgagctgaagaacgaaatcaccggcggccagacgccggcgtcgttcgaaccgacgatcgactacgtcgtcacgaagatcccgcgtttcgcgttcgagaagttccgcgaagccgattcgcgcctgaccacgcagatgaagtcggtcggcgaagtgatggcgatcggccgcacgttccaggaatcgttccagaaggcgctgcgcggcctcgaggtcggggtcgacggcctcgacgagaagtcgaccaaccgcgacgagatcgcgatcgagatccacgagccgggcccggaccgcatctggtacgtcggcgatgcgttccgcatcggcatgacggccgaggaaatcttcgcggaaaccgcgatcgacccgtggttcctcgagcagatcgagcagatcatcctgaaggaaaaggcgctgtcgggccgcacgctcgcgtcgctgacgttcgacgagctgcgctacctgaagcagagcggcttctccgaccgccgcctcgcgaagctgctcggcgcgacgccggaagacgtccgcaagcgtcgcgtcgaactgaacgtgcgcccggtctacaagcgtgtcgacacgtgcgcggccgagttcgcgacgaaaaccgcctacatgtactcgacctacgaggaagagtgcgaggcgcagccgaccacgaacaagaagatcatggtgctgggcggcggcccgaaccggatcggccagggcatcgagttcgactactgctgcgtgcacgcggcgctcgcgatgcgcgaggacggctacgaaacgatcatggtcaactgcaacccggaaaccgtgtcgaccgactacgacacgtccgaccgcctgtacttcgagccgctgacgctcgaggacgtgctcgagatcgtcgacaaggaaaagccggtcggcgtgatcgtccagtacggcggccagacgccgctgaagctcgcgctcgacctcgaggcgcacggcgtgccgatcgtcggcacgtcgccggacatgatcgacgcggccgaagaccgcgagcgcttccagaagctgctgcaggatctcggcctgcgccagccgccgaaccgcaccgcccgcgccgaagacgaagcgctcgcgctggccgacgaaatcggctatccgctggtcgtgcgcccgtcgtacgtgctcggcggccgcgcgatggaaatcgtccacgagccgcgcgacctcgagcgctacatgcgcgaggccgtgaaggtgtcgaacgattcgccggtgctgctcgaccgcttcctgaacgatgcgatcgagtgcgacgtcgactgcatctgcgacggcgaagcggtgttcatcggcggcgtgatggagcacatcgagcaggcgggcgttcactcgggcgactcggcatgctcgctgccgccgtactcgctgtcgaaggaaaccgtggccgagctgaagcgccagacgggcgcgatggcgaaggcgctgaacgtggtcggcctgatgaacgtgcagttcgcgatccagcaggtgccgcaggcggacggctcgaagcaggacatcatctacgtgctggaagtgaacccgcgcgcgtcgcgcacggtgccgtacgtgtcgaaggcgaccagcctgccgctcgcgaagatcgcggcgcgcgcgatggtcggccagaagctcgcgcagcagggcgtgacgaaggaagtcgagccgccgtacttcagcgtgaaggaagcggtgttcccgttcgtcaagttcccgaccgtcgatccggtcctcgggcccgaaatgcgctcgaccggcgaggtgatgggcgtcggccagacgttcggtgaagcgctgttcaagtcgcagctcgcggccggttcgcgcctgccggagtcgggcacggtgctgctgaccgtgatggacgcggacaagccgaaggccgtcgaagtcgcgcgcatgctgcacgacctcggctacccgatcgtcgcgaccaaggggacggcagccgcgatcgaagcggccggcgtgccggtgaaggtcgtgaacaaggtgaaggacggccgtccgcacatcgtcgacatgatcaagaacggcgagatcgcactcgtgttcacgacggtcgacgagacgcgccaggcgatcgccgattcgcgctcgatccgcatgagcgcgcaggcgcacaaggtcacgtactacacgacgatgtcgggcgcgcgcgcggcggtcgaaggcctgcgctacctgaaggatctggaagtctatgatttacaaggtcttcacgctcgcctaaac

SEQ ID NO: 11235 - DNA, 1395 bp, Burkholderia cepacia
atggggcgaaccctacggggacacacagggccgccgggtggtgcgggggcggagcggaactggcggcatccgggaaggcacggcccaggggggactggcggggggccgggggggcgggaaaaaacgcgcggtaaggggaacggggggtgggggggggggggaagagaaaaagaagggggaggagggaaacgggcccgggggcaaggggccccccgcgccacccgaggagatggaccgagggaggcggggaaggggggggacccggaggaaccgaaccgcgtcggcagagtggaccagagtaagaggctcgcaagtggacgctccgacgtggtgcgcatcacggtcagctcgccaaaagccgaggccgccgtgcctgagattcgggagctgctggaccggatgggcgtgaccgtgccgctcgtacgcgattttcactacaacggccacctgctgctgcgcgactacccgggctgcgcggaatcgctgtcgaagtaccggatcaaccccggcaacgtcggtcagggcgcgaagcgcgacacgcagttcgcgcagatgatcgaggccgcggcgaagtacgacaagccggtgcggatcggcgtgaactggggcagtctcgaccaggacctgctcgcgcgcatgatggacgagaacggcgcgcgggcgcagccgtgggacgcgcagagcgtgatgtacgaggcgctgatccagtcggcgatcggctcggccgaacgcgcggtggagctcggcctgggccgtgaccgcatcgtgctgtcgtgcaaggtcagcggcgtgcaggacctgatcgccgtgtaccgcgaactcggccgccgctgcggcttcgcgctgcacctcggactgaccgaggccggcatgggttcgaagggcatcgtcgcgtcgacggcggcgctcggcgtgctgctgcaggaagggatcggcgacacgatccgcatctcgctgacgccggaaccgggcgcgtcgcgcacgggcgaagtgatcgtcggccaggaaatcctccagacgatgggcctgcgctcgttcgcgccgatggtgatcgcgtgcccgggctgcggccgtacgacgagcacgctgttccaggaactcgcgatgcagatccagacctacctgcgcgagcagatgccggtctggcgcaaggaatatccgggcgtcgagaagatgaacgtcgcggtgatgggctgcatcgtcaacggcccgggcgaatcgaagcacgcgaacatcggcatcagcctgccgggttcgggcgagaacccggccgcacccgtcttcatcgacggcgagaaggtcaagacgctgcgcggcgagcggatcgccgaggaattccagcagatcgtcagcgactacgtcgcacgcaattacggccgcaccgaggccctgaac

SEQ ID NO: 11236 - DNA, 2193 bp, Burkholderia cepacia
aaggcgcgcgccgagcaggaagagatcagcaagcgtcgcgcggcggcggaagccgaagcgcgtgcgatccgcgaaatgatgaacacgccgcgcaaggccgtggtcaaggcagccgagccgccgaagccggcggaaccggcgaagccggccgaagcgaagggcacgctgcacaagccggcgaagccggaaggtgcgcaggcgcgtccggccgtgaagaagccggccggcgccgcggcaccggccacgacgcaagcgccggcaggcgcgggcgaccgcaacaagaagccgggcgcaggcaagggcggctggcaggacgacgcgtcgaagcgtcgcggcatcaagacgcgcggcgactcgagcggcggcgtcgaccgcggctggcgcggcggcccgaagggtcgcggccgtcaccaggacagcgcatcgtcgttccaggcgccgaccgaaccgatcgtccgtgaagtgcacgtgccggaaaccgtgtcggttgccgatctcgcgcacaagatgtcgatcaaggcctccgaagtcatcaaggtgatgatgaagatgggccagatggtcacgatcaaccaggtgctggaccaggaaacggcgatgatcatcgtcgaggaactgggccaccgcgcggtcgccgcgaagctggacgatccggaagcgctgctcgtcgaaggcgaaaccggtaccgatgcggagcaactgccgcgtccgccggtcgtcacggtgatgggtcacgtcgaccacggcaagacctcgctgctcgaccacatccgccgcgcgaaggttgccgcgggcgaagcgggcggcatcacgcagcacatcggcgcttatcacgtcgacacgccgcgtggcgtcatcacgttcctcgatacgccgggtcacgaagcgttcacggcaatgcgtgcacgcggcgcgaaggcgaccgacatcgtggtgctggtggtggcggccgacgacggcgtgatgccgcagacgaaggaagcgatcgcccacgcgaaggcgggtggcgtgccgatcgtcgtcgcgatcaacaagatcgacaagccggaagcgaacccggatcgcgtcaagcaggagctggtcgcggaaggcgtcgtgccggaagaatacggtggcgattcgccgttcgtgccggtgtcggcgaagacgggcgcagggatcgacgatctgctcgagaacgtgctgctgcaggccgaagtgctggagctgaaggcaccggtcgaagcgccggccaagggcatcgtgatcgaagcgaagctcgacaagggtaaaggcccggtcgcgacgatcctggtgcagtccggtacgctgaaccgcggcgacatcgtgctggccggtacggcttacggccgcgtccgtgcgatgctcgacgagaacggcaagccgacgaaggaagccggtccgtcgatcccggtcgaaatccagggtctgtcggaagtgccgggtgcgggcgaggaagtgatcgtgctgccggacgagcgcaaggcgcgcgaaatcgcgctgttccgtcaaggcaagttccgcgacgtgaagctcgcgaagcagcaggccgcgaagctggaaagcatgctcgagcagatgggcgaaggcgaagtgcagaacctgccgctcatcatcaaggcagacgtgcagggttcgcaggaagcgctcgtgcagtcgctgctcaagctgtcgaccgacgaagtgcgcgtgcagatcgtgcacagcgcggtcggtggtatcagcgaaaacgacgtcaacctcgcgacggcatcgaaggcggtcatcatcggcttcaacacgcgtgcggatgctcaggcacgcaagctggccgaagcgaacggcatcgatatccgctactacaacatcatctacgacgcagtggatgaggtgaaggcggcgatgtcgggcatgctggcgccggagaagcgcgaagtcatcaccggcatggtcgaggtgcgccaggtcttcaaggtaccgaaggtcggcacggtcgcaggctgtatggtcacggacggtatcgtcaagcgctcgtcgtcggtgcgcgtgctgcgcaacaacgtcgtgatcttcacgggcgaactcgaatcgctgaagcgtttcaaggacgacgtgaaggaagtgaagcaaggcttcgagtgcggtatgtcggtgaagaacttcaacgacatcatcgaaggcgaccagttcgaagtcttcgaagtgaccgaagtc

SEQ ID NO: 11237 - DNA, 2427 bp, Burkholderia cepacia
atgcaattccctgaatcctggttgagaacctttgtcgacccgcagctgacgaccgacgagctgtcgcacgcgctgacgatggcggggctcgaagtcgaatcgctgagcaaggctgcgccgccgacgtcgaagatcgtcgtgggccgcgtgctcgaagtcgtcaagcatccggatgcggacaagctcaatgtctgccaggtcgacgccggcaccggcgcgacgctgaacatcgtgtgcggcgcgccgaacgtggcgcccggcatcaaggtgccggtcgcgctggtcggtgcggaactgccgccggcggaagagggcggcaagccgttcgcgatcaagctgtcgaagctgcgcggcgtggagagccaggggatgctgtgctcggcgcgcgagctgaagttgtccgaggatcacagcgggctgctgatcctgccggaagacacgccggtcggtcaggacatccgcgagaccctcaatctcgacgacacgatcttcgaaatcaagctgacgccgaacaaggccgactgcctgtcggtgttcggtatcgcccgcgagacggccgcgatcaccggcgcaccgctgacgccggtcgacatccgcccggtgaacgtcgagctcgacgaaacactgcccgtgcgcatcgccgcgcccgatctgtgcggccgcttctcgggccgcgtgatccgcggcgtgaacgcgcatgcgaagacgccgcagtggatggtcgagcgcctcgagcgttcgggccagcgcagcgtgtccgcgctcgtcgacatctcgaactacgtgatgttcgaactcggccgcccgtcgcacgtgttcgatctcgacaagatccacggcggcatcgaagtgcgctggggcaagcgcggcgaatcgctgaagctgctcaacggcaatacggtcgaactcgacgaaacggtcggcgtgatcgcggacgaccgtcaggtcgaaagcctggccggcatcatgggcggcgacagcacggccgtcacgctcgatacgaccaatatctatctggaagccgcgttctggtggccggacagcatccgcggccgcgcgcgcaagtacaacttctcgaccgatgcggcgcatcgcttcgagcgcggcgtcgattacgcgacgaccgtcgagcacgtcgagcgcatcacgcagctgattctcgagatctgcggcggcaaggccggcccggtcgacgatcaggcggtgaacctgccgcagcgcgcgccggtgaagatgcgtgtgtcgcgcgcgaaccgcatcatcggcgtgaagatcgacgccgacgagatcgcggatatcttcacgcgcctcggcctgccgttcgagcgtgaagacgacgcgttcctcgtcacgccgccgtcgcatcgcttcgacatcgagatcgaggaagacctgatcgaggaagtggcgcgcatctacggcttcgagaagatcccggcccggccgccggtcgcgaccagcgaaatgcgcgcgacccacgagacgcggcggtcgatccacgacatccgtcacgcgctggccgcgcgcgactacgcggaaaccgtcaacttcagcttcgtcgatgcggagtgggagcacgatttcgcgggcaacgacaacccgatccgcctgctgaacccgatcgcgagccagctctcggtgatgcgtacgacgctgttcggcagcctgatcgccgtgctgcgccacaacctgaaccgccgtgccgatcgcgtgcgcgtgttcgaatcggggcgcgtgttcgtcgccgatccgtcggtgaaggccggcgagctggcggttgaaggccatgcgcagcccaagcgcgtcggcgcgctggcgtacggtccggcactcgacgagcagtggggcgtgacgacccgcgcggtcgatttcttcgacgtgaagggcgatctcgaagcgctgctcgcgccggcggttgcgcgtttcgtgaaggccgagcatccggcccttcatccgggccgcagcgcacgcatcgaaatcgatggccgcgcggtcggctggatcggcgaactgcatccgcgcctgatgcagaaatacgagctgccgcacccgccggtgatgttcgagatcgacgcggacgcgctgatcgcccgtgcgctgcccgcgccgaccgacgtgtcgaaattcccgccggtccgtcgcgatatcgccgttgtcgtcgatcaggcggtcgaggttcaggcacttttcgacgaaatgaagaaggcgcttgccgaagaggcctgccgattcgttcagaaggttgtactcttcgacgaatttcgtgcaaaatcaaatacttccggtggtcttgccgcgaacgagaagagccttgccttccgcgtgacgctgcaggatgcggctggcacgctgcaggacgaggtcgtcgaccaggcgattcagacgctggtcgagcggatggctcgcgccggggcgcgcctgcgcggc

SEQ ID NO: 11238 - DNA, 345 bp, Burkholderia cepacia
gtggcgttcaggctcaaagttgttcagcacatgcgcgagcatggcgtgtcgagcaaggaagcggcggcgcggttcaatattcgcaatccgagcgcggtgctcgaatgggctcgccgctatgatgatggtggtttgactgccctcgcgccgaggcccaaaggccgccgcccaaccgcaatgccaaaaacaccgcctgctcagcctctgaaccctaccgatggcacggatacccgtacccgcgaggacctgcttcaggaactgaactacctgcgcatggagaacgcgtatctaaaaaagctgagggccttggttcaggcgcaggctgtaccgcgcaaaaagcgcaaa

SEQ ID NO: 11239 - DNA, 696 bp, Burkholderia cepacia
atgtccgatctcgccgcccgtctcgactccgttcaccgccgcatcgccgacgccgcccgcgcggccggccgcgatcccgccaccgtcgcgctgctcgccgtgtcgaagacgtttccggccgacgacgtgcgcgccgcgcatgcggccggccagcgcgccttcggcgaaaactacgtgcaggaatcgatcgacaagatcgacgcgctcgccgacctgcgcgcgagcctcgaatggcatttcatcggcccgctgcaatcgaacaagacgcgccccgtcgccgagcgcttcgactgggtccattcggtcgaccggctgaagatcgcgcagcgcctgtcggaacagcgccccgcgcacctgccgccgctcaacgtgtgcgtgcaggtgaacatcagcggcgaggcgtcgaagagcggcgtcgcgccggccgacgtggccgaagtcgcgcgggcggtcgccgcgctgccgtcgctgcggctgcgcggcctgatggcgattcccgaaccggccgacgaccccgacgcgcaacgcgcgccgcatcgcgcgctgcgcgcgttgttcgacacgttgcgcgccggcggcctgccgctcgacacgctgtcgatgggcatgtccgccgatctcgatgccgccgtgctcgaaggcgcgacgatcgtgcgcgtcggcaccgcgatcttcggcgcgcgcgattactcgcac

SEQ ID NO: 11240 - DNA, 339 bp, Burkholderia cepacia
atgttgcgcaaggctttgcgtcgcctgcaacccgacgaaagacccatgttgcactctgatcaaggctggcattatcaaatgcccggctggcggctcatgctcgagcaacgctcgttggcgcaaagcatgtcgcgtaaaggcaattgcctggacaacgctgccatggaaagcttcttcggcacgctgaaatccgagttcttctacttgaaccacttcagcagcattgaacagctacgcatcggcttgaagcgctacatccggtactacaatcacgagcgcatcaagctcaaactgaaagggctgagtcctgtgcaatacaggactcagcctcatccggcc

SEQ ID NO: 11241 - DNA, 406 bp, Burkholderia cepacia
atgcccccacccaacgtcgtgccgctgtccgcggccccgctctacgtgcagatcaaggacacgctgcgcgcgcgcatcctcgacggcacctacgcgccgcacagccggatgccgtccgagcacgagctctgcgcgatgttcgacgtcagccgcatcacggtgcgccaggcgctcggcgacctgcagaaggaaggcctgctgttcaagctgcacggcaagggcacgttcgtgtcgaagccggatgcgttccagaacgtgacgtcgctgcaggggttcgccgaggcgatgtcgtcgatgggttacgagatcgtcaaccagttgcgcagcctgcgcacggtgaaggccgatccgcatctcgcgacgaagctgaacgtgcccgaaagcgcgccgctcggtcagatccatc

SEQ ID NO: 11242 - DNA, 1647 bp, Burkholderia cepacia
cgccagatcctcgttacgtccgcactgccctatgccaacgggcagatccacatcggccacctggtcgagtacatccagaccgacatctgggtgcgggcgctgcgaatgcatggccatgaggtctactacatcggcgccgacgatacgcacggcacgccgatcatgctgcgcgcggagaaggaaggcctgaccccgaagcagctgatcgaccgcgtgtggaccgagcacaagcgcgacttcgacagcttcggcgtgtcgttcgacaacttctactcgaccgattcggacgagaaccgcgtgctgagcgagaagatctatctcgcgctgcaggaagccggcctgatcgccgagcgcgaaatcgaacaggcgtacgatccggtcaaggaaatgttcctgccggaccgcttcatcaagggcgagtgtccgaagtgccacgcgaaggaccagtacggcgacaactgcgaagtgtgcggctcgacctacctgccgaccgaactgctgaacccgtattcggtcgtgtccggcgcgacgccggtgcgcaagacctcgaagcactacttcttccgcctgtccgacccgcgctgcgaatcgttcctgcgcgaatgggtgagcggcctcgcacagcccgaagcgaccaacaagatgcgcgaatggctcggcgacgcgggcgaagccaagctcgccgactgggacatctcgcgtgacgcgccgtacttcggcttcgagattccgggcgcgcccggcaagtatttctacgtgtggctcgatgcgccggtcggctactacgcgagcttcaagaacctgtgcgagcgcaacggcatcgatttcgatgcgtggatccgtcccggctcgaaggccgagcagtaccacttcatcggcaaggacatcctgtacttccacacgctgttctggcccgcgatgctcgagttctcgggccaccgcacgccgaccaacgtgttcgcgcacggcttcctgaccgtcgacggcgcgaagatgtcgaaatcgcgcggcacgttcatcaccgcgcagagctacatcgacaccggcctgaacccggagtggctgcgctactacttcgccgcgaagctgaacgcgacgatggaagacatcgacctgaacctcgacgacttccaggcgcgcgtgaacagcgatctcgtcggcaagtatgtgaacatcgcgagccgcgcggccggcttcctgatcaagcgtttcgacggccgcgtgcaggacagcgcgatgaatcatccgctcgtcgcgaagctgcgcgatgcgattccgcagatcgccgcgagctacgaagcgcgcgaatacggccgcgcgctgcgccacacgatggagctcgcggacgaagtgaacgcatacgtcgacggcgcgaagccgtgggatctcgcgaaggatccggccaacgcggtcgcgctgcacgaaacctgcagcgtgagcctcgaggccttccgcctgctgtcgctcgcgctgaagccggtgatgccgcgcgtcgccgcagcggtcgaggcgttcttcgggatcgcgccgctcgcgtgggccgatgccgcgaagccgctgtcgtcggcgcagccgatcaaggcgtaccagcacctgatgacgcgcgtcgatgcgaagcagatcgaagcgctgctcgccgcgaaccgc

SEQ ID NO: 11243 - DNA, 513 bp, Burkholderia cepacia
atgatcaatccggccgcggcgaacgcggcaaccagccgccgcgacgcggaacagggcgacgcgacgggccaggaattcctcgtgttcacgctcggcgacgaggaatacgggatcgacatcctgaaagtgcaggaaatccgcggctacgacagcgtcacgcgcatcgcgaacgcgccggagttcatcaagggcgtgatcaacctgcgcgggatcatcgtgccgatcgtcgacatgcggatcaagttccacctcggccgggtcgagtacgaccaccagaccgtcgtgatcatcctgaacgtgtcgaaccgcgtggtcgggatggtggtcgacggcgtgtcggacgtgctgacgctgcagaccgaccagatcatgccggcgccggaattcggcgcgacgctgacgaccgagtacctgacgggcctcggcacggtcgacggccggatgctgatcctgatggacatcgagaagctgatgtcgagccgtgaaatggcgctgatcgagacgctcggcggg

SEQ ID NO: 11244 - DNA, 993 bp, Burkholderia cepacia
atgaacgctgaaggcttgaccaagagcgcgctgctgctgatgtcgatcggcgaggaagaggccgcgcaggtattcaagttcctcgcgccgcgcgaggtccagaagatcggcgccgcgatggccgcgctgaagaacgtcacgcgcgagcaggtcgaggacgtgctgcaggacttcgtgaaggaagccgagcagcacaccgcgctgtcgctcgattcaagcgagtacatccgctcggtgctgacgaaggcgctcggcgaggacaaggccggcgtgctgatcgaccgcatcctgcagggcagcgacacgagcggcatcgagggcctgaagtggatggattcgggcgcggtggccgagctgatcaagaacgagcatccgcagatcatcgcgacgatcctcgtgcacctcgaccgcgaccaggcctcggagatcgcgtcgtgcttcaccgaacggctgcgtaacgacgtgctgctgcggatcgcgacgctcgacggcatccagccggccgcgctgcgcgaactcgacgacgtgctgacgggcctgctgtccggcagcgacaacctgaagcgcagcccgatgggcggcatccgcaccgcggccgagatcctgaacttcatgacgagcgtgcacgaggaaggcgtgctcgaaagcgtgcgccagtacgacgccgatctcgcgcaaaagatcatcgaccagatgttcgtgttcgagaacctgctcgacctcgaggaccgcgcgatccagatggtgctcaaggaagtcgagtcggaaacactgatcgtcgcgctgaagggcgcgccgcccgcgttgcgccagaagttcctcgcgaacatgtcgcagcgcgcggccgaactgctcgccgaggatctcgacgcgcgcggcccggtgcgcgtgtccgaagtcgagacgcagcagcgccgcatcctgcagatcgtgcgcaacctcgccgagagcggccagatcgcgatcggcggcaaggcggaagacgcgtatgtc

SEQ ID NO: 11245 - DNA, 987 bp, Burkholderia cepacia
atgcgcactttcctttccctcggccgcacgctcgcgctggccgccgccgtactggcgcccgccgcccacgcgaataacgtgatcgttctcaactcggccgaagcgacgctttccctgatcgaccagcagacccgcgaagtcgtttccacgatgccgaccggcaaggaaccgcaccatttgatggcgacgcccgacaatgcgtcgctgatcgttgcaaattcggtctcgaacagcctgatgttcctcgatccgaagacgggcaagctgcagcgcaccgtcgaagggatcgacgatccctaccagctcggcttctcgcccgatcgcaagtggttcgcggcggccggcctgcggctcgaccgcgtcgacatctacggctacgacggccgcgacctgaagctcgtgaagcgcgtgccgctcgcggtgatgccgagccacctcgcgttcacgaaggacagcaagacgctgctcgtgtcgctgcaggtgtccggcgagatcgcggcgatcgacctgcctacgcagacggtcaaatggaagatgaaggtcggcaaggtgccggccggcctgtggctcacgccggacgacaagttcctgctcgtcgggatgaccggcgcggattacgtcgcggtcgtcgactggcgcaaccagaaggtcgtcaagcagatctacacgggcaagggcgcgcacaacttccgttcgctcgccgacggcacgcacgtcgcggtgaccaaccgcgtcgcgaacacgatcagcatcatcgacgagaacacgctcaccaacgtcggcgacatcaccggcctgctgccgggcccggacgacatggagctgtccgccgacaagaagacgctgtgggtgacgttccgtttcgcgaagaaggtcgggatcatcgacctggcgtcgcgcaagctggtgcagacgatcgccgtcggccgctcgccgcacggcatctacttctacgaccgcgcgccgtggaaggccgcgaacggcgcg

SEQ ID NO: 11246 - DNA, 409 bp, Burkholderia cepacia
atggcaaagatgcaagcgaaagttcaggctgacgagcgcgacgacggccttcgcgaaaagatgatttcggtcaaccgcgtgaccaaggtcgtgaagggtggccgtattctcggcttcgccgcactgaccgtggttggcgacggtgatggccgcatcggtatgggcaagggcaaggcgaaggaagtgccggtcgctgtccagaaggcaatggaacaagctcgccgcaacatgttcaaggtgccgctcaagaacggcacgctgcaacacgaagtgcacggcaagcacggcgcatccgctgtcctcctcgctccggcgaaggcaggtacgggcgtgatcgccggcggcccgatgcgcgcagtgttcgacgtgatgggcgttcagaacgtcgtggcgaagagccacggttcgc

SEQ ID NO: 11247 - DNA, 1648 bp, Burkholderia cepacia
atgccgatcatcgaatcgaaactgaacccgcgttcggaagacttccgcgcgaatgccgccgcgctcgaggcggtcgtcgccgacctgcgcgcgaagatcgaacagctcgcgcagggcggcggccaggccgcacgcgacaagcacctgtcgcgcggcaagctgctgccgcgcgaccgcatcgcgcaactgctcgatccgggtgcgccgttcctcgagttctcgcagctcgccgcgaacggcatgtacaacgacgacgcgccgggcgcgggcgtgatcaccgggatcggccgcatcgccggccgcgaatgcgtgatcgtgtgcaacgacgcgacggtcaagggcggcacctactacccgatcaccgtgaagaagcacgtgcgcgcgcaggagatcgccgcggaaaaccggctgccgtgcgtgtatctcgtcgattcgggcggcgcgaacctgcccaaccaggacgacgtgtttcccgatcgcgatcacttcgggcgcattttcttcaaccaggcgacgatgtcggccgcgggggtcgcgcagatcgccgtcgtgatgggctcgtgcacggccggcggcgcctacgtgccggcgatgagcgacgaatcgatcatcgtgaaggaccagggcacgattttcctcggcgggccgccgctcgtgaaggccgcgaccggcgaggaagtgagcgccgaggatcttggcggtggcgacgtgcatacgcgcctgtcgggcgtggccgaccatctcgcgcagaacgacgcgcatgcgctgtcgatcgcgcgcaacatcgtcagtcacctcgcgccgaagatcgcgccgccggtcgcgctgcgcgagccgaagccgccgcgttacgacgcgaagagcctgtacggcgtgattccggtcgatacgcgcaagccgttcgacgtgcgcgaggtgatcgcgcgcatcgtcgacgattcggagttcgacgaattcaaggcgcgctacggcacgacgctcgtcaccggtttcgcgcacatctggggccatccggtcgggatcgtcgcgaacaacggcatcctgttctccgaatcggccgtgaagggcgcgcatttcatcgagctgtgctgccagcgcaagattccgctcgtgttcctgcagaacatcacgggcttcatggtcgggcgcaagtacgagaacgaaggcatcgcgcggcatggcgcgaagatggtgaccgccgtgtcgaacgcgaaggtgccgaagttcacggtgatcatcggcggctcgttcggcgccggcaactacgggatgtgcggtcgcgcgttttttttttggaacggtctcgtgggagtcaccggtcgtgctgccacgtcccaagcgtcacgtttaaatcgagcgggtggcgccggcgtcacgctatggagcgcaccagttttcgttgcgattgcctgcccggccttcttttcttgccgatcgcttctccttcttgtacccattcactcctctctatctaatcccctatttcttttttgttcccgtcaatctttttttcacccttcccccccttctttttttttttgcgccctttttgcccccgcccccctttttttcgtttccccctctttttattatcccttcactttagttccttacttttcccccttcaccccgcctaaaacttacatct

SEQ ID NO: 11248 - DNA, 843 bp, Burkholderia cepacia
atgctcagttatcgtcacggttttcacgcaggcaaccacgcggacgtgctcaagcacgccgtcgtcgtccaactgctgcgctacctgaacaagaaagacaaatcgtactggtacatcgatacgcacgcgggcgccggcgtgtactcgctgcgcgacggttatgcagcgaagacgtcggaattcgataccggcatcggccaactgtggaacgaaaagaacctgccggaggcgctcggcgactatgtggatgaagtccgcgcgctgaacgacgacggcgaactgcacttctacccgggttcaccgtacatcgcatggcgatcgatgcgcgagcaggatcgtatgcgcctgttcgaaatgcacacgacggaaatcgatgtgctgcgccacaatttccgcgatgcggggcgacgcgcgatgatcttcgccggtgacggcttcgaaggtatcaaggcgctgctgccgccgccgccgcgacgtgcactcgtgctgatcgatccgtcctacgaggacaagaaggactacgcgcgcacggtgagctgcgtgacggaatgcctgaagcgtttcgcgaccggctgctatgccatctggtatccgcaggtcacgcggacggaatcgcaacgctttcccgagcagttgaagcgcctgcagccgaacaactggctgcacctgacgctgacggtgtcgaatccgccgaccgacgggctgggcctctacggcagcgggatgttcatcctcaatccgccgtatacgctcgcccagagcatgaacgaggttctgccctacctggtcgagatgctgggacaggatagcggcgctcgctgccagatcgagcaccgcggcaac

SEQ ID NO: 11249 - DNA, 768 bp, Burkholderia cepacia
atgactcaagagctgattctgcgcgcgccggaaacattcatcaccgactcgcccgctgcactggatacggcccggccgccattgccgacgcatctcgccgtcatcctcgacggcaaccggcgctgggcggaccgcctcggcctgccggccgccgacggctatcgggccggcgggcgcaacgtgcacgcgctgctgtcgtggtgcgaggaaaccggaatcccgttcgtgacgctgtggccgctgtccaccgagaatctccagcgcgacgccggggaattgcgcgacctgctcgcggtgatcggcgacgtcttcgacgagcttgccgcctgcggccgctggcgcctgcacgtgattggcgacctgacgcagttgccgcccgccaccgccgagcgcatccgcgccgcgcagcaacgcacggcccacgcgcgcgggctcgacgtgaacatcgcggtcgcgtacagcggccgcctcgacctgctgcacgcggtccgctcgctgatcgcggagcatgtcgccgccggcaccgtcgagcagttgctcgcgcaactcagcccggagctgatcgcgagccggctctacacggccggccagccggagccggacctcgtgatccgcacgtcgggcgagcagcgcctgtcgaatttcatgctgtggcaaaccgctttctcggagttctatttcacgccgacgtgctggcccgattttggacgcgacgatttcgaacaggccatcgatgcgtacggcaagcgcgcgcgccggttcggcaag

SEQ ID NO: 11250 - DNA, 627 bp, Burkholderia cepacia
atgtttaccggaattgtcgcggccgtcggccgcatcgaatcgatcgccccgctcggcacgtcggccgacgccggtgtgcgcctgaccgtgcaggccggcgggctggacctggccgatgtcgcgctcggcgacagcatcgcgatccagggcgcatgcatgacggtgatcgagaagaccgacaccacgttcgacgtcgatgtgtcgcgcgaaagcctgaaccggacggtcggcctcgcgcaacccggcgaggtgaacctcgagaaggcgctgcgcgcgcacgaccgccttggcgggcatatcgtatcgggccatgtggacggactcggtaccgtgtcgcgcttcgcgccggtcggcgagtcgcacgaactgcgaatcgtcgcgccgcgcgaactcggccgctatctcgcgtacaagggctcgatcacggtgaacggcgtgagcctgacagtgaatgcggtcgacgatcgcgcggacggctgcgaattctcgatcaacctgattccgcatacggtcgacgtcacgacgctgcgccacgtgaaggccggcgacaaggtcaacctcgaagtcgacatgatcgcgcgctatgtggagcggatgctgtcggcgtcgcagggcgtgcatcaggac

SEQ ID NO: 11251 - DNA, 1314 bp, Burkholderia cepacia
  misc_feature (126)..(126): n=g, a, t or c
  misc_feature (136)..(136): n=g, a, t or c
  misc_feature (177)..(177): n=g, a, t or c
  misc_feature (181)..(182): n=g, a, t or c
gtgccccccggcggggccggccgccgcgcgccgccacacagcgaggacacgagcgggggaccaacacgaccaacccccgaccggggcggagggggggcaacacacgcccgcggcacgccccccagnaggacgaaanaagcccccgcccccggaagcacagacgcggaccgggaggangaannggaaaggccccccccccgcacgccgccgggactggcacgaacagacgcggccggcgccggatgcagcgtggcgtggccgcgctgggacgcgttcaagcgcgatttcatctcggccgacggccgcgtgatcgacgtcggctcggccgattcgcgcacggtatcggaggggcaggcgtatggactgttcttcgcgctggtcgcgaacgaccggcgcatgttcgacacgatcctcgcatggaccgagaacaacctcgcgcagggcgacctgagcgcgcacctgcctgcgtggctgtggggccgcgcgcccgacggcgcgtggcgcgtgctcgacgcgaaccctgcgtcggacgccgacctgtggatcgcgtatgcactcgtcgaggccggacggctgtggcgcgagcgcagctatacggcccgcggcgcgctgctcgcgaagcgcgtgctcgacgccgagacggcgaccgtgccgggcctcggcctcacgctgctgccggggccgaccgggttcaagctggccgacggccaatggcgcgtgaacccgagctattcgccgccgcaggtgattcgcgcgctcggcgcgcggctgcccgacgaccgtcgctgggccgcgctggcgtccagtaccgggcgcgtgctgctcgacaccgcgccgaaggggttctcgccggactgggcgctgtatcgcgcgggcaagggtttcgggcccgatccggacacgcatgcgcagagcgcgtacaacgcgatccgcgtgtacctgtgggccggcatgctcgaccgtgccgatccgctcgccgcgccgctgctcgcgaagttcgcgccgttcgccgatgccatcgccgcgcacggcgcgccgcccgagcgggtcgatacgacgacgggcgtcgcggggccgaacgacggcaacggcggcttctccgcggcggccgtgccgtttctcgacgcgcgcggccagcacgcgctcgcggatgcacaggcggcccgcgtcgatacgctcgcgcgccagtcggcgcccggctactacaccagcgtgctgacgctgttcggcctcggttggcgcgacggccgctaccggttcggggcggacggcacgctcgacacccgctggggagaccgttcgtgcgccgcccgc

SEQ ID NO: 11252 - DNA, 2010 bp, Burkholderia cepacia
acgaacgtgaatctcggcgcgaatgcgctggcgctgaacggcaccggcagcagtacgttcggcggcaccatcgatggctcgggcagcgtgacggtggcgagcggcacgcaggtgctgaccggcggcaacacgtacacgggcggcaccacgatcgccgccggcggcacgctgcaactcggcaacggcggcacgtcgggcagcgtggccggcaacgtcgtcgacaacggtgcgctgatcgtcaatcaatccggcaatgtgacgatcgcgagcgtgctgtccggcaccggctccctcacccaggccggcagcggacaactgaccctgaccggcgcgagcacactgagcgggccgaccacggtcagtgcgggcacccttgccgtcaacggttcgctcggccagtcgaccgtcaccgtgcagagcggcgcgacgctgaccggcaccggcacggtcggcggcctcgtcgtgcagaacggcgcgacggcggctgccacgcaaccgggcgcggcgctgaacgtgggcggcaacgtcacgttccagccgggttcgacgttccaggtcgccgccacgccgcagcaaagcggcagcctcgcggcgagcggcacggcgatgctgaacggcggcaccgtgcaggtgctggcgaaccagagcgcttaccagccgagcacgacgtacacgatcctcagcgcgtcgtcgggcgtgcagggcgcgttcacccaggtgagcgcgaactacgcgttcctgacgccgaccctcagctacgacccgggccacgtgtacctgcgactggttcagaacggcacgtcgctgcccgacgtcgcgacgacgccgaaccagcgctcggtcgcgaccgcgctgggcgggctcggcgccggcaatccgctgtacgacgcggtgctgacgaccgacgcgcccaccgcgcgccgcgcgtacgggctgctcgacggcgaactgcaggcgagcctgaagagcatgctgctgctcgacagccgctatgtacgcgacgcggtgaccgatcgtgtccgccagggtctcgcgcccggatcgggcccgctcgcggccctgtcgtcgggcggcgccgcgctgtgcggcgacaacacggccggcgtggccgacccgacgctgccgccggaacgccggatcggctcgcgcgacgggtgctacggcgggacgccgtatcagccggtcgtctgggggcaggcgttcggcggccgcagccggcttgccggcgacggcaacgcgtcgacgatcaaccgcagcatgacgggcttcatcgccggcgccgacatggcgctcaacgacaagtggcgcgcgggtctggcggccggtgtcacgcacagctcgctcgacaacgaccagagttcgtcggcggcggtgaacagctactacctgtcgctgtacggcggcgcgcagtacggcgcgctcggcgtgcgcggcggcgcgtcgtacacgtggtaccgcatcaacagcgaccgctatccgggcttcgcgggcttctccgatcacgactcggccggctacaacgcgaattcggcgcaggtgttcggcgaagtcggctacgcgctgccggtcgggccggtcgcgatcgagccgttcgcgggcctcgcgtacgtgaacctgcataccgacggctatacggaaaccggcggcgcggccgcgctgcgcgccggcggcgagacgacccacgtcggcttctcgacgctcggcctgcgtgcggcgtcgcagctcggctcgatcgcgagcggcacgttcaccgcgcgcgggacggtcggctggcgacatgcgttcggcaacgtgcggccgtcgtcggcgttcacgttcgcgaatggcggcacgtcgttccaggtgtcgggcgtgccgattgctcgcgacagcgcggtactcgaagccggcatcgacgcgaacgtcacgaagcgcctgacgctcggcctcacgtacagcggccagtatggcagcggcgtgcgcgacaacgcgatcctccccatactctgtgcaacttttgcctggcaattc

SEQ ID NO: 11253 - DNA, 372 bp, Burkholderia cepacia
cgtcgtaagctcgacacgacgctgtcggctcgcgagctgctcgcgctctgccagaagatcgaacatcacttcggccgcgagcgcccgtatcgcaatgcgccgcgcacgctcgacctcgacatcctgctgttcggcgccgattcgatcgacgagcccgacctgatcgtcccgcacccgcgccttaccgaccgcgcgttcgcgctcgtgccgctcgtcgagatcgagccggcgctcgacatccccgcgcgcggccgggccgacgcctttctcgccgccgtcgcggatcagcgcgtcgaaaaggtgcagacctgccagtgcctgatgcaaaaggcgctcgctgccggcgaagacgccgacaagacccgctgccga

SEQ ID NO: 11254 - DNA, 1092 bp, Burkholderia cepacia
atggccaaatcgatgcgttccagggtaatggcaggggcagtggcatgcgcgatgagcgtcgcgccgttcgcggggacgaccgcgctgacgacgctcgcgacgacgcacgcggcgatggcggcaaccgcgcccgccgacgactatgcgacgacgcgctatccgatcattctcgtgcacgggttgaccggcaccgacaagtacgcgggcgtactcgattactggtacggcatccaggaagacctgcaacagcatggcgcgaccgtctacgtcgcgaacctgtcgggcttccagagcgacgacggcccgaacgggcgcggcgaacagctgctggcttacgtgaagacggtgctcgccgcgaccggcgcgaccaaggtcaatctcgtcggtcacagccagggcgggctgacgtcgcgctatgtcgcggccgtcgcgcccgatctcgtcgcgtcggtgacgacgatcggcacgccgcatcgcggctccgagttcgccgacttcgtgcaggacgtgctcgcgtacgatccgaccggactgtcgtcgacggtgatcgccgcgttcgtcaatgtattcggaatcctgacgagcagcagccacaacacgaaccaggacgcactcgcgtcgctgaagacgctgacgaccgcgcaggccgccacctacaaccagaactatccgagcgcgggcctcggcgctcccggcagttgccagaccggcgcgccgacggaaaccgtcggcggcaacacgcatctgctgtattcgtgggccggcacggcgatccagccgacgctgtcgctgttcggcgtgacgggggcgacggatacgagcaccgttccggtcgtcgatccggcgaacgtgctcgacctgtcgacgctcgcgctgttcggcacgggcacggtgatgatcaaccgcggttcgggcgagaacgacgggctcgtgtcgaagtgcagcgcgctgtacggcaaggtgctgagcacgcgctacaagtggaaccatatcgacgagatcaaccagctgctcggcgtgcgcggcgcgtatgcggaagacccggtcgcggtgatccgcacgcatgcgaaccggctgaagctcgcgggcgtg

SEQ ID NO: 11255 - DNA, 1215 bp, Burkholderia cepacia
gtgagcacgccggcacgcgtcgccgacgcatggcggcgcgagcgcttcaccggcggcttcatgctgctcgcgctcgcgagcggcacgacgatcagcatggcgcagctcgcgacgacgctgtatgcgctggcgctcggcgtcgacgacgcacggctcggcatcatcgccgcgatggagccgctcggcatcgcgctgatgacattgccggccgggctgctggtcgcgcgctacggtgcacggcgcgtgtacttcgccgcgagcatggggccgatgctgctcaatctcgtcgtgccgttcaccggcgcatggccgctgatcgcactcacgcaggggctgatcgggctgtgcattccgttccggatcgtgtcgatcaacggggtgtttctcgcgcgtctcgcgcagatcggcctggcccgcgcgggctggtatcgcgcggcgatgtcggtcggaacggggatggcggggccgtggctggcgagctggctgatcggcacacacggtgcggtcgcgacgttctgcgcggcatcggcgagtttcgccggcatggcgttgttcagccgcgcgttgctcggcgatgcaccgccgccgccgcgtggtgatcgaaccggaaccggcagcctgcgtacgttgctcgcgctcgcatggcgccgcgacatccgcgagcaactcgtcgcggaagcggtgaacagcgcgacgcgcgcactcgtcggcacctatacggtcgtgctcgcgatccagtcgctcggcctcgcgcagacgcatgccgtcgcgctgctgacgttgcagggcgtcgtcgcggtgctcgcgctgttcgggctcgggcacgtcgcgcagcgaatgacggaacgtcgttgccatgcactgagcgtcgcgggcggcgtggccgggctgctcgcgctcggcctcgggcgcgacgcatggaccgtcggcgcgggtctcgccgcgctgtgcgccgggtcgtcgctgctgcatctcgtgaacatgcagcatctcggccgtcatccggccgacaagagccaggtgtcgagcctctacaacctcgcgtcgatgaccggcgcgttctgcggtccgctgatcggcggcgcgctcgcgccactcgtcgggctgcgggcggtgtttctgtgctggctgcctgtcgtcgtgctgggcgcgcttgcactgttgttcgcgcatggacgtcgcgacgcaacgcagccggcacctgcgaagctgtcc

SEQ ID NO: 11256 - DNA, 1311 bp, Burkholderia cepacia
atgaccaccaccaccgaactgaccgtcgtcgaacgcgctgccgttgcgctcggtgccagcgagcgcgagacgtcgctgcgcgagctcgtcgcgaagtcgacagacatggtcgagattaagaacgcggcagcgcgcgaccaggtgcacggcgctgctatggtgctgcgcacggcacgcaccgacattcagaaggccgggaaggctgcacgcgacgatgcaaacgcgttctcgaaagcggtcatcgccgaggagaaccgcctgatcgcgatcaccgagccggaagaaaagcgcctgctcggcatgcgcgacgagtgggatgaggcgcgcgaagccgagaagcgcgcgaagctcgaagccgagcagcggcgcgtcgctgcgattcgcgagcacatcgacgatatccgcgcgatcgccgtgcgcgctgccgggctgccggccgctcgcattcagggcgaaatcgaagatctggaagcgctcggcatcacgctcgaccgcttcgccgagctgaccggcgaggccgaggccgtgcgcggcacgacgctcgacaagctgcgcgaactgcacgcgtcgactgtcgcgcaggaagcggaagccgcgcggctcgccgccgaacgcgaggaactcgaacgccagcgcgccgaactggccgcgcaacgcgagcgcgaagaagccgagcgcgcggaacgcgaacgcgtcgaggctgcggcgcgcgccgagcaggaacgcgtcgaccgcgagcgccgtgaagccgaagaagcggcacgccgcgcgcagcaggagcgcgaggatgccgcgcgccgcgccgagatcgaagccgcggaagcgcgcctcgccgagcagcgtgccgagcaggagcgccggcaggccgaactcgaccgcgccgagcgcgagcagcgggaacgcgaggaagctgcgctgcgcgaagccgccgaagccgcagcacaggcagcgcgcgatcgcgccgcgcgtgagcacgcagagaaccgcgcggcgatgctcgcgcccgaaccgaccggcggcaactggacggcaaagagcggctgcgtagtgaccgacgtgccgcttccgggatgcgtcggcggcggcttcgacgacgtcgagcactacggcggctacctgatcgccgagagcatcttccgcccggcggatggtcacatgctcgccgcctcgcgcgaaatgttcgacgcgctgcgccagtggcagcacgccgagcgcgtcggcgacgccgaggaactcgcgaatgcgcgagcagctcgcgatgccgccatcgagcgcgcgatatacgtccccaccgaagaaactgcagcagcc

SEQ ID NO: 11257 - DNA, 1194 bp, Burkholderia cepacia
atgagccaagtcaagcgtcttaccgacctgatcgccgccggccagctcgccggcaagcgggtgttcatccgcgccgacctgaacgtcccgcaggacgatcacggcaacatcaccgaggacacccgcgtgcgtgcgtccgtgccggccatccaggccgcgctcgacgccggcgcggccgtgatggtcacgtcgcacctcggccgtccgaccgaaggcgaattcaagccggaagactcgctcgcgccggtcgcgaagcgtctcgccgagctgctcggccgcgacgtgccgctggtgtcgaactgggtcgagaacggcgtgaacgtcgcaccgggccaggtcgtgctgctcgagaactgccgcgtgaacaagggcgagaagaagaattcggacgagctcgcccagaagatggcgaagctctgcgacgtgtacgtgaacgacgcgttcggcaccgcgcaccgcgcggaagcgaccacgcacgggatcgcgaagtacgcgcccgtcgcgtgcgcgggcccgctgctggccgccgaactcgacgcgctcggcaaggcgctcggcaacccggcgcgcccgctggtggcgatcgtcgccggctcgaaggtgtcgaccaagctgaccatcctgaagtcgctggccggcaaggtcgaccagctgatcgtcggtggcggcatcgcgaacacgttcatgctcgcggccggcctgtcgatcggcaagtcgctcgcggaagccgatctcgtcgccgaggcgaaggcgatcatcgacgaagcgcgcgagcgcggcgcgtcggtgccgatcccgaccgacgtcgtcaccgccaaggaattctcgccgacggccgcggccacggtgaagcaggtcgccgacatcgaagcggacgacatgatcctcgacatcggccccgatacggccaaggcactcgcgagccagctcgagaaggccggcacgatcgtgtggaacggcccggtcggcgtgttcgagttcgaccagttcggcaacggcaccaagacgctcgccgaagcgatcgccaaatcgtccgcgttctcgatcgcgggcggcggcgacacgctcgcggccatcgcgaagtacggcattcacgaccaggtcagctacatctcgacgggcggcggcgccttcctcgagttcctcgaggggaagaagctgccggcggtggaagtgctcgaaacgcgggcggcc

SEQ ID NO: 11258 - DNA, 1500 bp, Burkholderia cepacia
atgaatgcacccgagccgcggccgcgcggcacgctgatgatccagggcacgacgtccgacgcgggcaagagcacgctcgtcgcgggcctgtgccgcctcgcgcgccgcggcggcgcgcgcgtggccccgttcaagccgcagaacatggcgctcaacagcgcggtgacggccgatggcggcgagatcggccgtgcgcaagcgctgcaggcgatggccgccggcgtcgcgccgcatacggatttcaatccggtgctgctgaaaccgacgagcgaccgcggcgcgcaggtgatcattcacggcaaggcgcgcatgaacctcgacgcgcgggcgtatcacgactacaagccggtcgcattcgatgcggtgctcgaatcgtacgcgcgcctgcgcgccggttacgacacggtgatcgtcgaaggcgccggcagtccggccgagatcaacctgcgcgatggcgacatcgcgaacatggggtttgccgagcgggtcgactgcccggtcgtgctcgtcgccgacatcgatcgcggcggcgtgttcgcgcatctggtcggtacgctcgcatgcctgtcggacagcgagcgcgcacgtgtgcgcggcttcgtgatcaaccgctttcgcggcgacctcaagctgctcgaaccagggctcgactggctgcgcgcgcggacgggcaagccggtgttcggcgtgctgccgtatctgcacgggctgctgctcgacgcggaggacatgctgcccgcgcaggcgcgcagcgccgccgcacggggcgatgccggcgtgctgcgcgtggtggtgcccgcgctgccgcgcatcagcaaccacactgatttcgatccgctgcgcgcgcatccgcaggtcgaattcacgtactggaagagcggcccggtgccggacgccgacctgctgatcctgcccggttcgaagagcgtgcagcgcgacctcgcgtggttgcgcgacgcgggctgggacgcgctgatccggcgccatctgcgctacggcggcaaggtgatcggcatctgcggcggcatgcagatgctcggccgtacgctcgacgatccgctcggcctcgaaggcgcgcccggcagcgtgccggggctcgggctgctcgatttcgacacgatgctgcagcccgacaagacgctgaagaacgtgaccgggcacgtcgcgctgccgggcgaggctgccgtgcgcggctacgagatccatatgggcgacacgcgcgggccggcgctcgcgacgcccgcgctgatgctggccgccgataccgcgcagggcggcgcacgtcccgacggcgcgagatcggccgacggccagatcctcgcgacctacgtgcacgggctgttcgacgcccccgacgcctgcgcggcgctgcttgcatgggcagggctcgacgggacggcccgcatcgactacccggcgctgcgcgaggcgtcgctcgagcggctggccgacacgttcgccgagcacctcgacctcgacgcgctgtacgccgagtttcgt

SEQ ID NO: 11259 - DNA, 324 bp, Burkholderia cepacia
atgactgaagcaacgctcgcccaatggcatccgctgggcgctttcgacgaattctccgaaggcgaaccggcggcgcgcgtcgccggccagaagccgatcgcggtgttccggatcggcgacgaactgttcgcgatgcatgacctgtgcacgcacggccatgcgcggctgtccgaaggctatgtggaggacggctgcgtcgagtgcccgctgcatcaggggctgatcgacattcgcaccggcgcgccgaaatgcgcgccgatcaccgagccggtgcagacctatccgatccggatcgtcgacgggcaggtggaagtcaatgtcggc

SEQ ID NO: 11260 - DNA, 1545 bp, Burkholderia cepacia
atgacgatgcagacgatcacggccgcgcccggccacgacgccgaagcgggcatgcggccggacggcccgctgctcgcgctcgacggcatcacggtgacgtttccgggcgtgcgggcgctcgacgcggtgtcgctgtcggtgcgcgcgggtgaggtgcacgggctgatgggcgagaacggcgcggggaaatcgacgctgctgaaggtgctgtccggcgtgaaccagccgcaggccggcacgctgacgctgaacggcacggcgcagcgcttcgcgtcgacgcgcgcggcgctcgaggccggcatcgcgatcatctaccaggaactgcatctggtgcccgagctgacggtcgcggaaaacctgatgctcgggcaattgccgagccggctcggcgtggtcgacgagcgcacgctcgccgcgcgcgcgctcgatgcgctggagcggctcggcgagcacatcgatccgggcatcctggtgaagtatctgtcgatcggccagcgccagatgatcgagatcggcaaggcgctgatgcgcgacgcgcgcgtgatcgcattcgacgaaccgacgagttcgctgtccgcgcgcgaaaccacgcagctgtttcggatcatccgcgcgctgcgcgcggaaggccgcgcgatcatctacgtcacgcaccggatggaggaggtctatgaactgtgcgaccgcgtgacggtgtttcgcgacggtcgccgcatcgacacgttcgattccgtcgccgatctcgaccgcgaccggctgatcggctgcatggtcggccgttcgatcgaggacgtgtacggctaccggccgcgtgcggccggcgacgtgctgatcgaagcgaaggggctggcggggcctgggctggccgagcccgtgtcgttcaccgcgcggcgcggcgagatcgtcggcttcttcgggctcgtcggcgcgggccgctccgagctgatgaagctgctgtacggtgcggtgcgaccgagcgccgggcacgtcgagctgaacggcaagagggtggcgttcggcagcccgcgcgacgcggtgcgcgccggcatcgcgctgtgcccggaagaccgcaagcaggaaggcatcgtcgcgatcgcgtcggtggccgacaacctgaacatcagcgcgcgccgtcatttcagcccggcgcgcgtgctgctcgacgggcggcgcgaacgcgagctcgcgcagcaatacatcgagcgcctcgcgatcaagacccgcgacggcgacacgccgatcggcgcgctgtcgggcggcaaccagcagaaggtcgtgctcgcgcgctggctggccgagcgcatcgacgtgttcctgatggacgagccgacgcgcggcatcgacgtcggcgcgcgcgcggaaatctacaacctgttctacgaactcgcggaagcgggccgcaccgtgatcctcgtgtcgagcgatctggccgaggtgatcggcgtgtcggaccgcatcgtcgtgatgaaggaaggacggatcgcgggcgaggtcgcgaaggcgcacgcgacgcccgatgcgctgatcaagctcgcgctgccgcgc

SEQ ID NO: 11261 - DNA, 468 bp, Burkholderia cepacia
ttgcgcgctgtgtccgccgtccgcagtcctgcggaaggtgccgtcgagccgggtgcgaatccgtcgcagacgaaagccgccttcccgaaagctgcgcgacttctgaaaacggatgaattttcatccgtttttcgtttgcgcccctggcggcgctccgcgcacttcgtgatttacggcaagccgaccggtcagcccgcacgcctggggctcgtcatcggcaagaagtatgcgccgcgagcggtcacccgtaacctcgtgaagcggctggcgcgcgatcagtttcgcctgcgccgcgccgaattcgccggttacgacctgctgctgcggcagcacacgcgcttcgacaagaaagcgctgccgagcgcggcttccgccccgctcgcggcgatgtgcgcggccgagatccgcgagctgctcgacagggcagtccgggaaatcgcccgccgtgcgtcgaagcccgcgtccgag

SEQ ID NO: 11262 - DNA, 2238 bp, Burkholderia cepacia
gcgatcggcagcagcgtgcgcacggtcgcgcagtgcatcgaggaggcgtcgcaggacgtcacggtgcagacctcgctgctggaagcgcgccgcatcgtcggcagcaccgcgctgttcgagcgcttcaccgtgcgctaccacgaagcgctcgacgcccgcgcgttcttcaccgcgaaggtgctggagatgcgccagcgccacgcgaagttccaggacacgccgtacagcctcgaaccgaacgtgaaggaaagcccgggcgggctgcgcgacctgcagacgatcctgtggatcgcacgcgcggccggcttcggcagcagctggcgcgaactcgacacgcgcggcctgatcaccgaccgcgaagcgcgcgagctgcgccgcaacgaagggttcctgaagacgctgcgcgcgcggctgcacgtgatcgccgggcgtcgccaggacatgctcgtgttcgacctgcagacgcaggccgccgaaagcttcggctaccagccgacgcaggccaagcgggcgagcgagcagctgatgcgtcgctactactgggccgcgaaagcggtcacgcagctcgcgacgatcctgatccagaacatcgaggcgcagctgttccccgcgacgagcggcatcacgcgcgtgctgtcggccgatcgcttcgtcgagaaacaggggatgctcgagatcgtcgacgacggcgtgttcgagcgccatcccgacgcgatcctcgaagccttcctgctgtacgaaacgacgcgtggcgtgaaaggcctgtccgcccgcacgctgcgcgcgctgtacaactcgcgcgagatcatgaacaacgcgtggcgccgcgatccgcgcaaccgcgacacgttcatgcggatcctgcagcagcccgaaggcatcacgcacgcgttccggctgatgaaccagacgagcgtgctcggccgctacctgctgaatttccgccgcatcgtcgggcagatgcagcacgacctgtaccacgtgtacacggtcgaccagcacatcctgatggtgctgcgcaacatccgccgcttcgcggtagccgagcatgcgcacgaatacccgttctgcagccagctgatcggcaacttcgagcgcccgtgggtgctgtatgtcgcggcactgttccacgacatcgcgaagggccgcggcggcgaccactcgacgctcgggatggccgacgcgcggcgcttctgccgcgagcacggcatcgccggcgacgatgcggcgctgatcgtgtggctcgtccagcatcacctgacgatgagccaggtcgcgcagaaacaggacacgagcgaccccgaagtcatcaagcgcttcgccgaggtcgtcggcaacgagcgctatctcaccgcgctctacctgctgaccgtcgccgatatccgcggcacgagcccgaaggtgtggaacacgtggaagggcaagctgctcgaggatctgtaccgcatcacgctcgcggtgctcggcggcgcgaaccccgacgcgcattcggagctgaagtcgagacaggagcaggcgctcgcgctgctgcgcctggaaaccgtgccggacgatgcgcaccgcgcgttgtgggatcagctcgacgtcggcttcttcctgcgtcacgacgcggccgacatcgcatggcagacgcgtgtgctgtaccggcacgtgaacgccgaaaccgcgatcgtccgcgcgcggccgtcgccgatcggcgacgcgctgcaggtgctcgtgtacgtgaaggaccgccccgacctgttcgcgggcatctgcgcgtatttcgaccgcaacgggctgtcggtgctcgatgcgcgcgtcagcacgacgcggcacgggtatgcgctcgacaacttcatcgtcacgcagaccgagcgcgacgtgcgctaccgcgacatcgcgaacctcgtcgagcagcagctcgcggcgcggctcgccgaaaccgccccgctgccggaaccgtcgaagggccgcctgtcgaggctgtcccggacgtttccgatcacgccgcgcgtcgacctgcgggccgacgagcgcggtcagtactacatcctgtccgtgtcggccaacgaccggccgggccttctctattcgatcgcgcgcgtcctcgccgaacatcggatcggcgtccatgcggcgcggatcaatacgctcggcgagcgcgtcgaagacatcttcctgctcgcgggcgccggcctgtccgataaccgcctgcagatccagctcgaaaccgaattgctgcgtgcgatcgcagtc

SEQ ID NO: 11263 - DNA, 936 bp, Burkholderia cepacia
atggccgggttcgcgatgtccgcgcaggcgcgcgtgttccgttcggcggacgtgcacggcgacaccttcccgaccaacatggccgtgaagttcatgggcgaggaactgtcgaagcagacgggcggcaaggattcgatcaaggtgttcggcaacagcgcgctcggatccgagaaggacacggtcgaccaggtgcggatcggcgcgatcgacatggcgcgcgtgaacggcgcgtcgttcaacgagatcgtgccggaatcgctgattccgtcgttcccgttcctgttccgcgacgtcgcgcacttccgcaaggcgatgtacgggccggccggccagaagatcctcgatgcgttcaccgcgaaggggatgatcgcactgacgttctacgagagcggcgcgcgctcgatctacgcgaagcgcccggtgcgctcgccggccgacatgaaggggctgaaggtgcgcgtgcaaccgtccgacctgatggtcgacgagatcaaggcgatgggcggcacgccgacgccgatgccgttcgccgaggtgtacacgggcctgaagacgggcctcgtcgatgcggcggaaaacaacctgccgtcgtacgaggaaaccaagcactacgaagtcgcgcccgattactcggagacgcagcacgcgatgacgccggaagtgctggtgttctcgaagaagatctgggacacgctgtcgccgcaggagcaggcggcgatccgcaaggcggcggccgattcggtgccgtactaccagaagctgtggaccgcgcgcgaggcgtccgcgcagcagctggtgacgaagggcggcgcgaagatcctgccggccgcgcagatcgaccgcgcggcgttcgtgaaggcgatgcagccgctgtggaccaagtatgaaaagacgccgcagatgaagcagatcgtcgacgagatcgaggccaccaag

SEQ ID NO: 11264 - DNA, 591 bp, Burkholderia cepacia
gtgtcggacgggagccaccatgcgctgccgtttgtgtccgtcacgtcgtccattccatttgcactccttacgggaaacgtcatgaaaaaatccatcctgaccgctgtcgcactcgcggccctgtccacctcggccttcgcagcgggcaccggcacgatcaacttcacgggcgagatcgtcgcgggcgcatgcggcatcgattcgaactcggtcaaccagaccgtgcagctcggcaaggtgccgaccaacaagttcaagcaggccggcgacaagtcggacccggtgtcgttcgacatcaagctgaccgactgcgacaccagcatcgcgcagaacgcgtacttcacgttcacgggcacgtcgagcgccggccagccgaagctgctcgccacgatcggttcggccaccaacgtcggcatccgcctgcaagccgcgtcgggcgaatacctcgacaacggcgccgagcagaaggcgccgacgctgctgcagaacggcacgaacaccgcacgcttcgcggcgatgtacgaagcgacggcagccggcgtgacgccgggtaccgccgacggcgtcgcgaacttcacggtccgctaccag

SEQ ID NO: 11265 - DNA, 1258 bp, Burkholderia cepacia
atgcgcaaacccattgattcgctgttcgggcggctggcgctgctcgtcgtcggtgtcctgctcctgtcgcacttcgcgtggttcttcgcgatgcggctcgagcgcaaccagatgcagacgcgttacgcggtcgaggaggccgcgttcctcgtcgatgcggtgcgccagcacgtcgagcgcacgcccgaccagccgttgccgtcgcgcgtgcggctcgtggcgcccgacagccccgatgtgccgaagggcggcgattcggggctgccgccgccgctgaagcggttccgcgacgacgtgagcgagcgcaggccgccccggcacgcaggtcgagatcggtacgcccggccatccgccggtgctgtgggtgaaggagccggccgaccgcaactggatcgtggtgccggtgcagccgctgcggccgccgcgctcgctcgaccggatgctgctgtggctcggcacgatcttctcggccggcgtgatcgccgcgctgttcgcggcctggcagttgcagcagccgctgcgctcgctcgcacgtgcggtcgcgcgtttcggccgcgggcagccggtgccgccgctgcgcgaacgcggcccgcgcgagctgcgccagctcacgcacggcttcaaccagatggtggaacaggtgtcgcaggccgaaagcgatcgcgcggtgatgctggccggcgtcgcgcacgacctgcgcacgccgcttgcgcggatgcgcctgcgcgcggaaatgatggacgatgcgcggctgcgcgacggtgtcgtgcgcgacgtcgactcgatgtcgcacatcgtcgaccagttcctggtgtttgcgcatggcggggccgaccgcagcgagccggtgccggtcgaccaggcgtgcgagcggatcgcgcgcagctatcgtgcggtcgcgccgaacgcgccggcggtccagacgcggctggaggccgatcccggcttccggctgccgacggcgacgctcgaccggatcctgtcgaacctgctggacaacgcgcatgcgtacggcgcgccgccggtgctcgtcgagacggcgcgcacgccgacgggctacgtgttgtcggtcagcgacagcggcggcggcatcgcaccgcgcgacctcgcggccgccacgcggccgttcgtgcggctcgacccggcacgcggcgggaacggccacagcgggctcgggctcgcgatcgtcgagcggctggtgctcaggctggggggcgcgtgcgacatcggcaatcgccccgaaggcggcctgcgggag

SEQ ID NO: 11266 - DNA, 1377 bp, Burkholderia cepacia
tacggcgccttcctgcgcaacgacggcacgaacgtgtatctgctgtcgacgaacaagggtgatccggaaggccagtggaacgatttccgcccggttacctggaatctcgagaccggtcgagtcacgatcgatgacaggggatcaggtacggcgatcggcggaaacaccacggtccgcggcgaactttcggtgggtaccggtcaagctcaaggctcgatccgtgtcggcccggtcgacggcttcctctattcgaacggtgacggctatggctggtggacgccgacgaagggcgcattccagtattacatcgccgatcgcacgttccgcatcgacggcaatcccgtgtggcactccggcaacctgtcgccgctcgatcgcacgaagggcggcacgatgtcgggcgatctctggttcgacccgggcaagcggatctacctgtcggaaggcagcgcgcaggcgccgtccctgacgttcaccaacgacggcgcgccggacacgggcctctaccacaccggcgacggcatgttcggcgtcacgtgcaacagcgtctcgcaggtctcgttcacgccgggcggcaccacgttccagacgcccgttcagggccagacgcccccggcgggcgatcgctcgacgcggctcgcgacgacggaatgggtggtcgccgcgattgcgtcggccgcgatcggcacggtcgttttcgagccacgcacgaccgctcgcgccggcttcctgaagctcaacggcgcgctgctgaagcgcgccgactatcccgcactctgggcctatgcacaggccagcggcgcgctctccaccgaaacggactgggccgccggatggtccggcacgttctcgaccggcgatggcacgacgacctttcgcatccccgaattgcgcggcgagttcgtgcgctgctgggatgacacccgcggggtggacccgaatcgcggtctcggcgcatcgcagaacttcgccaatgcgtggcacgcgcacggcgcctccgcggcggcgagcggggaccacgtgcattcggcctggaccgacgtgcaagggtggcacggtcaccacggctggaccgccagcgtgggcgatcaccagcacgtcgcgccatacagcgaatcgggcatcgcgccctttggcacccattcgacgaatcaagtcggctcgcacggcggcgtcgacaacgacaacccgtgggcattcacgtccggagccggcgggcacaaccacgaattcaacacggaaggcgccggcaatcacggccacaacgtcggcatcggcgccgccggcaatcacagccacgcgatcaccgtcaacggcgacggcgccaacgaatcgcggccgcgcaacgtcgccttgctcgccatgatccgcgcctac

SEQ ID NO: 11267 - DNA, 1119 bp, Burkholderia cepacia
gtgatcttcgcgtcgtcgctcggcaccgtgttcgagtggtacgacttttacctggccggctcgctcgcggcctacatcagcaagagcttcttctccggcgtcaatccgaccgccgcgttcatcttcacgctgctcggcttcgcggccggtttcgcggtgcggccgttcggcgcgatcgtgttcggccggctcggcgacctcgtcggccgcaagcacacgttcctcgtgacgatcgtgatcatgggcgtctcgacgttcgtggtcggcttcctgcccggctacgcgtcgatcggcatcgccgctcccgtgatcttcatcgcgatgcggctgctgcagggcctcgcgctcggcggcgaatacggcggcgcggcgacctacgtcgccgagcatgcgcccgccaaccgtcgcggcttctacaccgcgtggatccagacgacggccacgctcggcctgttcctgtcgctgctcgtgatcctcggcgtgcgcacgttcatcggcgaggaagcgttcggcaattggggctggcgcgtgccgttcgtcgcgtcgatcctgctgctcggggtgtcggtgtggatcccgctgcagctgaacgaatcgccggtgttcctgcgcatcaaggcggaaggcaagacgtcgaaggcgccgctgaccgaagcgttcggccagtggaagaacctgaagatcgtgatcctcgcgctgatcggcctgacggccggccaggcggtcgtcccccccacgggccagttctacgcgctgttcttcctcacgcagacgctgaaggtcgacggcgccagcgcgaacatcctgatcgcgatcgcgctcctgatcggcacgccgttcttcctgttcttcggttcgctgtcggacaagatcggccgcaagccgatcatccttgccggctgcctgatcgccgcgctgacctacttcccgctgttcaaggcgctcacgcactacgcgaacccgcagctcgaactcgcgacgcagaaggcgccgatcacggtcgtcgccgatccggctacctgctcgttccagttcaacccggtcggcacgtcgaagttcaccagctcgtgcgacatcgcgaagagcgcgctcgcgaaggccggcctgaactacgagaac

SEQ ID NO: 11268 - DNA, 996 bp, Burkholderia cepacia
gtgggtctgccgtccgcgctggccccccccctggttttcccgcgcgtgttgattgttccccccagtcggttgtgcagcgccgtcggcaaggtcgcggacgcggcggccggggtggcgggccccacggcgcgcatccagcgggtgctgcaacgggccggcgtcgcgtcgatcgatgcggcgctgccgctggccgagcgttgggatcgccagcgccagcttcgtcaggcggtcgatgccgcgcacgaggcgctggtgcgcgacggcgacgggctgtcccggtccgccgtcgaggccgaggtggcggaacaggacattgccgacgtgccggcgcatctggaagcggtgaagcagtcgctggacgatgtcggcaaacggctgaacgcgttgtcgcagcagcaggtcgtggccgatcaggcgttcggcgcgatcgacggccaggcgaacgcggcggtcgccgagtcgaagcggcaggaggcgctcgcggcaatgggcgacgcggccgaacagtatctggaagcggccacggcgagccgcttgctgaagtgggcgacggatcgctaccgtgaccagaagcaggggccgatgctgcggcgcgcgggcgagatcttcgccgggctcacgctgggcgaattcgcgaagctgaccgtcgataccgaacggacgccgcccgcgctgtatgcacggcgtacgaaggggacgtcggtcgaggtcgccgggttgagcgaagggacgcgcgatcagctgttcctcgcgctgcggatcgcggcgctcgagttgcagctcggcagccgcacggcgctgccgttcgtcgccgacgacctgttcatcaatttcgacgacgcgcgtgcgaaggcggggctcgatgcgctgcgcgatctgtcgacgcgtacccaggtgctgttcctgacgcaccacgaccacctgctgccgctcgtgagggacgtattcggcgcgcgggtcaacgtggtcgagttgcagcgcgcgccggtcggcgcg

SEQ ID NO: 11269 - DNA, 7305 bp, Burkholderia cepacia
gtggccaactatgcgcgttcggggaacgacctggtcgtcgaattcaaggacggccgaacagtgcgcgttcaggcgttcttcgagaacggcgcggattatcacaatctcgtcttcgttcaggacgacgggcgatttcttgtgcagttcggccccgcactgcaggcgaccggcgatggcatcgtcgatgcggcgctcacttatgcgccgatcggcgacgggttgtcgaccggtgcgctgctcggaatactcggcggcgtcgccgcggccggcggcattgcggcagccgcggccagcggcggcggtggggatgacggcggtagcggcgccagtggcggaggaacgccgaccgggccggcgcgactggcgatcgattcgatcgatgggcagtcgaccgacggcaacggcaatatcgtcacggggcgggcgtcgccgacgatcgcgggttcgggcgctcagccgaacacgacggtgacgatccaggtcgatggtcagacgatcggtgcggtgactgcggacgcgaacgggcgctggtcgtacacgcccggtacgttgccggagggcgcccatcagatcaccgtgacgcagaccgacagtagcggcaatacgagcgagctgagcacggtggggatcgtggtggatacgatcgtacagaaaacgcctgcgattacggccgtcagcgacgatgcacaacatccggtgacgatcggcggtgcgacgagcgatacgacgccgacgctcggcggtaccgcggaagcgggtagcagggtgagcgtgtatgacggcacgacgctgctgggaacgacgacagcggattcgtccgggaagtggacatttacgccgaccacgggtttgggcgagggcgcgcactcgattacggtgactgcgacggatgcggccggcaacgtgagcaccccgagcgcggccttcgagctgacgatcgatacgacggctcccgcgctgcccacggtgaacgcgacggacggtacgtcgctgtcgggcacggcggaagcgggcgcgacggtcaacatcgatacgaatggcgacggtacgccggacgccaccgtgacggctgacccgagcggcgtctggacgtacacgccgtcgaccccactgccgatcggcacggtgatcggcgtgacggccacggacgcggcgggcaatacgggcccgtctgcttcggtaacggtgacgggcgatacgacggcaccgggtgcgccggtcatcggtacggtgacggacgatgcgggctctgttgttggtgcgattgcctctggcggcagtactgatgatgcgacgccgacattgagcggcacagcggaagcgggcagcacggtcagcgtgtatgacggcacgacgttgttgggtacgacgacagccgacccgtccggaaactggacgttcacgccgaccacgggtttggaagagggcgcgcacagcctgaccgtcaccgccacggacacggccggcaatgtgagtgttccgagcacggccttcgacctgacgatcgatacgacagctccgtcgattccgacagtgaacgcgaccgacggtacgtcgctgtcgggcacggcggaagcgggcgcaacgatcaacatcgatacgaacggcgacggcacgccggatgccaccgtaacagccgaccccggcggcgcgtggacgtacacgccctcgaccccgctgccggctggcacggtgattggcgtgacggctaccgacgcggcgggcaatacgggcccgtctgcttcggtaacggtgacgggcgatacgacggcgccgggtgcgccggtcatcggtacggtgacggacgatgcgggctctgttgttggtgcgattgcctctggcggcagtactgatgatgcgacgccgacattgagcggcacagcggaagcaggcagcacggtgagcgtgtatgacggcacgacgttgctcggcacgacgacagcggacccatccggaaactggacgttcacgccgactactgcactgggtgagggtgcacacagcctgaccgtcaccgcaacggatacggccggcaacgtgagtgttccgagcacggccttcgatctgacgatcgatacgacggctccggcgattccgacagtgaacgcgacggacggtacgtcgttgtcgggcacggccgaagcgggtgcgacggtcaacatcgatacgaatggcgacggcacgccggacgccaccgtaacagccgaccccagcggcgcgtggacgtacacgccctcgaccccgctgccggctggtacggtgatcggcgtgacggccaccgatgcggcaggcaacacgggcccgtctgcctcggtaacggtgacgggtgacacgacggcaccgggtgcgccggtcatcggcaccgtgacggatgacgtgggttctgttgttggtgcgatcatttccggcggcagtactgatgacgcgacgccgacattgagcggtacagcggaggcaggcagcacagtgagcgtgtatgacggcacgacgttgttgggtacgacgacggccgacccgtccggaaattggacgttcacgccgaccacgggtttgggagagggcgcgcacagcctgaccgtcaccgccacggacacggcaggcaatgtgagtgttccgagcacggctttcgagctgacgatcgatacgacggctcctgcattaccgacggtgaacgcgaccgacggtacgtcgctgtcgggtacggccgaagcgggtgcgacggtcaacatcgacacgaacggcgacggcacgccggacgccaccgtaacagccgacccgagcggcgcgtggacgtacacgccctcgaccccgctgccggctggtacggtgatcggcgtgacggccaccgatgcggcgggcaatacgggcccgtctgcttcggtaacggtgacgggggatacgacggcaccgggtgcgccggtcatcggtacggtgacggacgacgtaggctctgttgttggtgcgatcatttccggaggcagtactgatgacgcgacgccgacattgagcggcacagcggaagcgggcagcacggtgagcgtgtatgacggcacgacgttgttgggtacgacgacggcagatccgtccggaaactggacgttcacgccgaccacgggtttgggtgagggcgcacacagcctgaccgtcaccgcaacggatgcggccggcaatgtgagcaccccgagcacggcctttgacctgacgatcgatacgacggctcctgcattaccgactgtgaacgcgaccgacggtacatcgctgtcgggcacggccgaagcgggcgcaacggtcaacatcgatacgaacggcgacggcacgccggacgccaccgtaacagccgaccccagcggcgcgtggacgtacacgccgtcaaccccgctgccggctggtacggtgattggcgtgacggctaccgatgcggcgggcaatacgggcccgtctgcctcggtgacggtgacgggcgacacgacggcgcctgcggcaccgatcgttgttagtgtcacggacgacgttggctcgatcgtcgggctgctgacgactggcgcgacgacggacgacacgaccccgacgcttgccggtacggcggaagcagggagcacagtgaacgtgtatgacagcacgacgttgctgggcacgacgacagcagacccgtccggaaactggacgttcacgccgactaccgcactgggtgagggcgcgcacagcctgaccgtcaccgccacggacacggccggcaatgtgagtgttccgagcacggccttcaacctgacgatcgatacgacggctcctgcattaccgactgtgaacgcgaccgacggtacatcgctgtcgggcacggccgaagcgggcgcaacggtcaacatcgatacgaacggcgacggcacgccggacgccaccgtgacagccgacccgagcggtgcgtggacgtacacgccgtcaaccccgctgccggctggtacggtgattggcgtgacggctaccgatgcggccggcaatacgggcccgtctgcttcggtaacggtgacgggtgacacgacggcgcctgcggcaccgatcatcggcaccgtgacggacgacgtgggctctgttgttggtgcgatcatttccggcggcagtactgacgatgcgacgccgacattgagcggcacagcggaagcaggcagcacggtgagcgtgtatgacggcacgacgttgctcggcacgacgacagcggacccatccggaaactggacgttcacgccgactactgcactgggcgagggtgcacacagcctgaccgtcaccgcaacggatacggcaggcaacgtgagtgttccgagcacggccttcaacgtgacgatcgatacgacggctccggcgattccgacagtgaacgcgacggacggtacgtcgttgtcgggcacggccgaagcgggtgcgacggtcaacatcgatacgaatggcgacggcacgccggacgccaccgtgacagccgacccgagcggcgtgtggacgtacacgccgtcgaccccgctgccgatcgggacggtgatcggcgtgacggctaccgatgcggcgggcaatacgggcccgtctgcttcggtaacggtgacgggtgacacgacggcgccggccgcaccgatcgttgttagcgtcacggacgacgttggttcgaccgtcggcctgctgacgactggcgcaacgacggacgacacgaccccgacgcttgccggtacagcggaagcagggagcacggtgagcgtgtatgacggcacgacgttgctgggtacgacgacggcagatccgtccggaaactggacgttcacgccgaccacgggtttgggagagggcgcgcacagcctgaccgtcaccgcaacggatacggccggcaatgtgagtgttccgagtacggccttcaacctgacgatcgatacgacagctccgtcgattccgacagtgaacgcgaccgacggtacgtcactgtcgggtacggccgaagcgggtgcgacggtcaacatcgatacgaatggcgacggcacgccggacgccaccgtgacacccgacccgagcggcgcgtggacgtacacgccgtcgaccccgctgccggctggtacggtgatcggcgtgactgctaccgatgcggcaggcaacacgggcccgtctgcctcggtaacggtgacgggagacacgacggcgccggccgcaccgatcgttgttagtgtcacggacgacgttggctcgatcgttggcctgctgacgactggcgcgacgacggacgacacgaccccgacgcttgccggtacagcggaagcagggagcacggtgagcgtgtatgacggcacgacgttgctgggtacgacgacggcagacccgtccggaaactggacgttcacgccggccacaggcttgggtgaaggcgcgcattcgatcacggtgactgccacggacacggccggcaacgtgagcaccccgagcacggctttcgagctgacggtcgatacgacggctcctgcattaccgacggtgaatgcgaccgacggtacgtcgttgtcgggcacggcggaagctggcgcgacggtcaatatcgatacgaatggcgacggcacgccggacgccaccgtaacagccgaccccagcggcgcgtggacgtacacaccatcgaccccgctgccgatcggcacggtgatcggcgtgacggctaccgatgcggcaggcaacacgggcccgtctggctcggtaacggtttcagacctgacggcgccggccgcaccgatcgttgttagcgtcacggacgacgttggctcgatcgtcgggctgctgacgactggcgcgacgacggacgacacgaccccgacgcttgccggtacggcggaagcaggcagcacggtgagcgtctatgacggcacgacgttgttgggtacgacgacagcagacccgtccggaaactggacgttcacgccgaccacgggtttgggagagggcgcgcactcgattacggtgactgccacggacacggccggcaacgtgagcaccccgagcacggctttcgagctgacggtcgatacgacggctcctgcattaccgacggtgaatgcgaccgacggtacgtcgttgtcgggcacggcggaagcgggcgcgacggtcaatatcgatacgaatggcgacggcacgccggacgccaccgtaacagccgaccccagcggcgcgtggacgtacacaccatcgaccccgctgccgatcggcacggtgatcggcgtgactgccacggacgcggctggcaacaccggcccgtccgcgtcggtaacggtttcagacctgacggcgccggccgcgccgatcatcggcaccgtgaccgacgacgttggctcgatcgttggcctgctgacgactggcgcgacgacggacgacacgaccccgacgcttgccggtacagcggaagcaggcagcacggtgagcgtctatgacggcacgacgttgttgggtacgacgacagcagacccgtccggaaactggacgttcacgccgaccacgggtttgggagagggcgcgcactcgattacggtgactgccacggacacggccggcaacgtgagccccccgagcacgaccttcgatctgacgatcgatacgacggctcctgcattaccgactgtgaacgcgaccgatggtacgtcgctgtcgggtacggcggaagcgggcgcgacggtcaatatcgatacgaacggcgacggcacgccggacgccatcgtaacagccgacccgggcggcgcgtggacgtacacaccatcgagcccgctgccgatcggcacggtgatcggcgtgaccgccacggacgcggctggcaacaccggcccgtccgcgtcggtaacggtttcagacctgacggcgccggccgcgccgatcatcggcaccgtgaccgacgacgttggctcgatcgttggcctgctgacgactggcgcgacgacggacgacacgaccccgacgcttgccggtacggcggaagcaggcagcacggtgagcgtctatgacggcacgacgttgctgggtacgacgacggcagatccgtccggaaactggacgttcacgccggccacaggcttgggtgaaggcgcgcattcgatcacggtgactgccacggacacggccggcaacgtgagccccccgagcgcggcattcgcgatcacggtcgatacgaccgcaccgactgcgacggccacgctgacgaccctgaccgacaacaccggcgtgcccaacgactggatcaccggcgacacgaccccgaccctgagcggcacgctgaatgctgcgctcggtgccggcgaagtc

SEQ ID NO: 11270 - DNA, 1653 bp, Burkholderia cepacia
gtgctgtgctcgggcaagaccgacgacaagggccgcatggcctgcgacgcgacgctcgaacaggccggcaacgtgcagctgatcgcggtcgcgaaggacggcgacggccgcacgtcgaatgcatcgacgtcggtgtgggtcacgcgcgaggacgaactctggttcggcggcgacaacaccgaccggatcgacgtgatccccgagaaaacgtcgtacgaaccgggcgaaacggcccgcttccaggtgcgcatgccgttccgctacgcgaccgcgctcgtcgcggtcgagcgcggcggcgtgatggaaacgcacatcgtcgagctgaacggcaagaacccgaccgtggacctgaaggtcggcgactcgtgggggccgaacgtctacgtgtcggtgctcgcgctgcgcggccggattcgcgaggtgccgtggtactcgttcttcacgtggggctggaaggcgccggtcgaatgggcgcgcgcgttctggcgcgaaggccgccactatgaagcgccgaccgcgttcgtcgacctgtcgaagcccgcgttccgctacgggctcggcgagatcaaggtcggcacgggcgttcaccgcctcggcgtgaccgtgacgaccgacgcgacgcgctacacggtgcgcggcaaggcgcaggcgcacgtgaaggtcacgctgccgaacggccagccggcaccggccggcacgcagattgccattgcggccgtcgacgaggcgttgctcgaactgatgccgaacaacagctgggatctgctcgacgcgatgctgcgccggcgcgcgtacggtgtcgagacggccaccgcgcagatggaaatcgtcggccgccgccacttcggccgcaaggccgtgccggccggcggcgggggcggcagcgcgccgacccgcgagctgttcgacacgctgctgctgtggaacccgcgcgtgacgctcgacgccaacggcagcgcgaccgtcgaggtgccgctgaacgacgcgctcacgcgcttccggatcgtcgcgatcgcggcggtcggccccgaccgtttcggcacgggcagcacgtcgatccgcagcacgcaggatctgcagctgatctccggcctgccgccgctcgtgcgcgaaggcgacgcgttccgtgcgcaggtcacgctgcgcaacacgaccgaccgcgcgatgcaggtcgtcgtgacgccgcacgtgacgggcctcgacgtcgcaccgcaaaccgtgtcgctggcggcgaatgcggccaccgaagtcgcgtggacgatcaccgtgcccgaacaggcgctcgatgcggccggtgcgctgaactggcgcatcgaggcggccgagcaaggcggcaagcgcgcgtccgacgcgctggcagtcgcgcagaaggtcgtgcccgcgctgccggtcacggtgcagcaggcgacgctcgcgcaggtcgacggcacgctgacggtgcccgtggcggccccggccggcgcggtgagcaatgcccagggcgtaccgcgcggcggcatcgccgtgtcgctgcagtcgaagctcacagacggcctgcccggcgtgcgccgctggttcgagcgctatccgaccgctcctgaacagcagacgtcgcgtgcgatcgggctgcgcgaccccgcgcaatggcaggcgctgatcgcacgcatgcccgtc

SEQ ID NO: 11271 - DNA, 1165 bp, Burkholderia cepacia
atgatcgaactcgaccaactgaccaagaccttcacgcgcaaggacggccaggccgtgcgcgcggtcgactccgtgagcctgtcggtgcccgaaggggaaatctgcgtgttcctcggcccgtcgggttgcggcaagaccaccacgctcaagatgatcaaccggctcatcgccgccacgtcgggccgcgtgctcatcaacggcgaggacacggcgcagctgaacgaagtcgacctgcggcgccacatcggctacgtgatccagcagatcggcctgttcccgaacatgacgatcgaggagaacatcaccgtcgtgccgcgcctgctcggctgggacaagaagcgctgcgccgaacgcgcgcgcgacctgatgtcgatggtcgcgctcgatccgaagctgtacctgaagcgctatccgcgcgagctgtcgggcgggcagcagcagcgcatcggcgtgattcgcgcgctggccgccgatccgcccgtgctgctgatggacgagccgttcggcgcggtcgatccgatcaatcgcgaatcgatccagaacgagttcttccagatgcagcggcaactgaacaagaccgtgatcatggtgagccacgacatcgacgaagcgatcaagctcggcgatcgcatcgccgtgttccggcgcggccagctcgttcagtacgatcaccccgacacgctgctcgcccgcccgcgcgacgaattcgtcgcgcagttcgtcggccaggacagcacgctcaagcgcctgctgctcgtgaaggccggcgacgccgccacgcaacccgaaaccgcgcgcgtcgattctgccgctcgcacacgcactggcggtgatggacgaaaccgactgccgctacctgaccgtgctcgacgacgcgggccgggcgctcggctacgtgacgcgccgcgcggcacgcaccgacggcggcgtgtgcggcgaacgcgtgacgccgttcccggccggcgtcgcggcggacgacaacctgcgcatcgtgctgtcgaagatgtaccagtacagcgcgtcgtggatgccggtgctcgaccccgacggtgcgtggctcggcgagatcacgcaggactcgatcgccgcgtacctcagctcgggccgctcgcgccggcaaaccggccagccgccgggcagcccggccgagacggtcgcctcggtc

SEQ ID NO: 11272 - DNA, 1293 bp, Burkholderia cepacia
ttgacaggcgatgcactgtccattttcagtcaagaaagcacgatgaccgccgttcgaaaaaacttcgccatgttgtttgcgttgcagatctcgacgtacgtcgtgccgctcgtcacgctgccgctcttgacccgtgtgctcggccctcaacagtacggtcggctgtcgttcgtgctcgcggtgaccacgtatttcatcaatctggtgaattacagcttcgacctgacggcaacgccgcgtgtcgcgcttgcgcgcgacaaggtcgagcgatcgagcattttctggacgaccatcagcgcgcagtggctgataaccgtcgcgggcttcgcagtactcgttgcgatgacgtcattgattccgtacttcgaggccgagcgcacggcgctgctgctcgaattcgggatggcaatcggcgccgcgctcacgccaggctggtactttcagggcattcagaaactgagcgtgttcagcatgacggtggtcggatatcgcgcactcagcgtcgccgccttcttcctctggattcgcaccccggacgatatcctgtacgcggtcgccatcaacgcggccgtgccattgctctgcggagctaccttgcttgcttacctgtttttttgccgtgagatcgcgcgtgtccgcgtgcggttcgccgatattaccgaagcgttgaaaggcggcacgcaggtgttcctcgcgtcgacgtcgatctcgttctacgcatcgaccaacaccgtcctgctgagtatcgtttccggtcacgtcgccgcaggctattttgccgccggcgacaagctgatccgtgccgctgtcggcatgctgcagccgctgagggcaacgacatacccgcatatcacttacctgatgcataacgcacgtgacgaagcgtttgcgttcctgcgcaagctgattgtcgtgcagggcgcgctcgtgctcgcaatgtcggcaacgatctacgagttcgcgccgctcgccgtccggatcctgtacggaaccacgttcgagccgacagtcgccgtactgcgttgtctcgccctggtaccgttcatggcatgcatgaccgatctctttggcgttcaaacgatgctgccgctgggcatgaagcgtgtcttcagcaccattctgatctcgtccggcttgctgaacgtcacgatactgccgccgcttgcgtcgctgtttgcggagcgtggggcggcgattgccgtcttgatggtcgaaacgacggtggccgtcgtactcatgtacgtgcttttccgcgaacgggttggcctgatcaacatgccggcgagatcgagg

SEQ ID NO: 11273 - DNA, 1041 bp, Burkholderia cepacia
atgtgtgtggtgatccacgggccgaacgacctgcgggtcgaggagcaggacgcgggcgagatcggcccgggccaggtgcgtgtcgacgtcgcgatgggcggcatctgcggctcggacctgcattacttccggcatggcggcttcggcgcgatccggttgcagcagccgatggtgctcggccacgaagtcgcgggcacggtcgcggcagtggcgccggacgtgacgtcggtgaaggtcggcgatcgcgtcgcggtcaatccgagccggccgtgcggtgtgtgccgctactgtctcgaagggctgccgaaccagtgtctcgacatgcgcttctacggcagcgcgatgcggatgccgcacgtgcagggcgcgtttcgcaacgcgctcgtgtgcgacgcggtgcagtgcgtgaaggtcgccgatcacgtgccgctgtcgctcgcggcgctcgccgagccgttcgcggtcgggctgcatgcggtgtcgcgggcaggcccgctgatcggcaagcgcgtgctcgtatcggggtgcgggccgatcggcgtgctggcggtcgcggcggcgcgcgtgcacggcgcggcggagatcgtcgcgaccgacgtcgtcgacgcgccgctggaaatcgcgagcgcgctcggcgcggaccgcacgatcaatgcggcagccgatgccggctgggtcgagcgctacggcgccggcaagggcacgttcgacgtgatgatcgagtgttcgggcaatgcgcgcgcgctgcgcgacgggctggacgtgatgcgcccgcgcggcatcgtcgtgcagctcgggctcggcggcgacgtgagcctgccgcagaacgtcgtggtcgcgaaggagctgtcgatctgcggctcgttccgcttccacgcggaattcgcgctggcggtgcagttgatcaacgcggggcgcgtcgacctgcggccggccgtcacgcgcgtgttcccgatgcgcgacgcgaacctcgaattcgaactggcaggcgaccgccagcgggcgatgaaggtgctgatcgatttcgcgaacgaggccgcg

SEQ ID NO: 11274 - DNA, 879 bp, Burkholderia cepacia
gtgtcgaacgcggaatacctgctgtgcatcgacggcgacgcgctgctcgcgcacgatgcgatcggctggatgctcgagcatttcctgaccgatccgggcgtgggcgcggtgaccggcaacccgcgcatccgcacgcgcacgtcgctgctcggccgcatgcaggtcggtgaattctcgtcgatcgtcgggctgatcaagcgcacgcagcaggtgtacggccgcatcttcacggtgtcgggcgtgatcacgatgttccgcaagaccgcgctcgccgatgtcggctactggagctcggacatgctcaccgaggacatcgacatcagctggaagctgcagtgccgcgactggcgcgtcgtgtacgagccgcacgcgctcagctggatcctgatgccggagacgatcaaggggctctaccggcagcggctgcgctggtccaagggcggcatccaggtgctgctcaagtacgcgggcacgctgatgcggccgacccagatgatgatgtggccgctgttcgccgaatacctgatcggcatcgcgtgggcgtattcgatgtcgttcatcctgctgctcgcgctgatcgacgtcgtctacccgcttccgccgaactggcatgtgtccgtggtgccgcactggcacgggatgctgctggtcgcgacctgcatcctgcagctgatcatcggcagcatgatcgatcgtcgttacgacgaaaaactcctgatgtacttccttgacaccatctggtaccccgtcgcgttctggctgatcagcatgatcaccaccgtcatcgccctgcccgccgtcgtgctgcggggccgtggcaagcgcgccgtatgggtcagtcccgaccgaggcattcaacatgaagaacgcgccgattat

SEQ ID NO: 11275 - DNA, 885 bp, Burkholderia cepacia
atgaacgattcgtatcccagtcgtaagtcaaccgacaaaccgcaagaaaagcgctcgctgctcgagcgcctgaccgacttcatctcgcccgagcccgaatcccgcggcgagctgctggaaatcctccaggacgcccacgaacgcaacctgatcgacgccgattcgctgtcgatgatcgaaggcgtgttccaggtatccgatctgtgcgcccgcgacatcatggtgccgcgcgcgcagatggacgcgatcaacatcgccgacaagcccgaggatttcatcccgttcgtcctcgaaaaggcgcactcgcgctaccccgtgtacgaggagaaccgcgacaacgtgatcggcgtgctgctcgcgaaggacctgctgcgcttctacgccgaggaagagttcgacgtgcgcgggatgctgcgcccggccgtgttcattccggaatcgaagcgcctgaacgtgctgctgcacgacttccgcgtgaaccgcaaccacctggcgatcgtcgtcgacgaatacggcggcgtcgcgggcctgatcacgatcgaggacgtgctcgaacagatcgtcggcgacatcgaggacgaatacgacttcgacgaggaagccggcaacatcatcgcggggccggacggccgctaccgcgtgcgtgcgctcaccgagattgaacagttcaacgaggtgttcggcaccgatttccccgacgacgaagtcgacacgatcggcgggctgatcacccatcatttcggacgcgtgccgcaccgcggcgagaagctgcagctcggcaacctcgcgttcgaaatccagcgcggcgatgcgcgccaggttcatgtgctgctggtgcgccgcaacccgctcgccagccgtcgcgccgaaacctcgcacgaagac

SEQ ID NO: 11276 - DNA, 1248 bp, Burkholderia cepacia
atgcgcgcacaccccgcttttttgtgcggtgcggcaccgatcgggcgccgcggccgccgtcttccggagaacgtcatgcccattccgttactggcgctcgcgatcagcgccttcgccatcggcaccaccgaattcatcatcatgggcttgctgcccgaagttgcgcacgacctggccgtgtcgctgccgtcggccggcctgctcgtcaccggctacgcgctcggcgtcgcggtcggcgcgccgctgctcgcggtgctgacgagccgcatgccgcgcaaggctgcgctgcagttgctgatggcgatcttcatcgtcggcaacgtgctgtgcgcgaccgcgtccggctacgcgatgctgatggtcgcgcgcgtcgtcacgtcgttcgcgcacggttcgttcttcggcatcggtgcggtggtcgccgcgtcgctcgtgccggccgacaagcgcgcgagcgcgatcgcgctgatgtttaccggactcacgctgtcgaacgtgctcggcgtgccgttcggcacgttcgtcggccagttgctcggctggcgcgcgtcgttctggatcgtcgccgcgctcggcgtgctggcgctcggcggcgtggccgcgctggtgccgaaccgccacgacagcgggccggtcggcctcggccacgaagtgcgcgtgctgaaggagccgcaggtgtggctcgcgctgctgatgaccgtgctcggcttcggcggcgtgttcgtggtgttcacgtacatcgcgccgattctcgagaccgtgtcgggctactcgccgcgcgcggtcgcgctgatcctcgtgctgttcggcgcggggctgacgatcggcaatacgatcggcggcaagctcgccgaccgcgcgctgatgccgtcgctgatcgcgatcctcgtcgcgctgatggccgtgatggccgtgttcgcgaagacgagccacctgccggtcgcggcggccgtcaccgtattcgtctgggggatcgccgcgttcgcgacggtgccgccgctgcaggcgcgcgtggtcgagaaggccgcgagcgcgccgcatctcgcgtcgacgctgaacatcggcgcgttcaacgtcggcaatgcgggcggtgcgtggctcggcggcctcgcgctggaacacggcttcgcgctcgatgcgctgccgtgggtcgcggtcgcggtgacgttcgcggcgctgatcgtcacgtggctcgcgatgcggctcgacgcgcgcggcccggcccgcggcgccgcgccggcggcgcag

SEQ ID NO: 11277 - DNA, 165 bp, Burkholderia cepacia
atggcaaaaggcgcccgcgacaagatcaagctcgagtcgaccgctggtacgggtcacttctacacgaccacgaagaacaagcgcaacatgccggaaaagatggcgatcaagaagttcgatcccgtcgtccgcaagcgcgttgaatacaaagaaaccaagatcaag

SEQ ID NO: 11278 - DNA, 636 bp, Burkholderia cepacia
atgacgcccccgaattcaatcatgcaaaccgtcgcggtactggacttcgaaaccaccggcctgtcgccgaatctgggcgaccgtgcgaccgaaattgccgtcatcctgctgcgcgacggggaagtcgtcgaccgtttccagagtttgatgaatgccggccgacgcatcccgtccgatgtcgttgcgctcaccggcatcacgaacgacatgatcgcggcggcgccacccgcgtccgaagtcatgaaggaagcggccgcgttcgtcggcaagcatgcggtcgtggcccacaacgccggtttcgacaagcgcttctggcagtcggaactggggctgctcggcatgtcggccgaccatgcgtttgcgtgcacgatgctggtggcgagacggatctacccggacgcccggagtcaccgcctgtcgagcctgatcgagatgctgcggctgccgcaatcgggccgtgcgcaccgtgcgatggtcgatgccgagatggctgggcatctgtggtgccggttgcagcaggatatttcccggacttatgggctggatcggatcgatcacgcgctgatgtcgcgggttcaggcgacgaccaaggcgaaggtgccgatgtacttgcggtcgctcgggcgggcgtgtgcg

SEQ ID NO: 11279 - DNA, 1110 bp, Burkholderia cepacia
atgtcccgacgcatcattcctctcgccgacgtcagcgggatgccggacgtctccggcgtcgcgcatgcccccgacggcacgctggccgacacgttcgccaggccgctgcgcgacctgcgcatttcggtgacggaccgctgcaatttccgttgcgtgtactgcatgccgcgcgcggtcttcgacaaggactacccgttcctgccgcacagcgcgctgctcacgcacgaggaaatcgagcgcgtggcgcgactcttcgtcgcacacggcgtcgagaagatccgtatcacgggcggcgaaccgttgctgcgcaagaacctcgaattcctgatcgagcgcctcgcgcgcctgacgacgcatgccggccgcccgctcgacctgacgctgacgaccaacggctcgctgctcgcacgcaaggcgcgcgcgctgaaggacgccgggctcacgcgcgtcacggtcagcctcgatgcgctcgacgacacgctgttcaagcgcatgaacgatgcggagttcgcgagcgccgacgtgctcgacggcatcttcgccgcgcaggccgcgggcctcgcgccggtcaaggtcaacatggtcgtgaagcgcggcaccaacgacagcgagatcctgccgatggccgagcggttccgcggcaccggcgtgatcctgcgtttcatcgaatacatggacgtcggcacgtcgaacggctggaacatgaccgaggtgctgccgtcggcggacgtcgtcgcgcgcatcgccgaacatttcccgctggtgccgctcgagccgcacacagcggccgaaaccgcgcagcgctggggctatgcggacggcagcggcgagatcggcgtgatctcgagcgtcacgcaggccttctgcggcgattgcacgcgtgcccggctgtcgaccgaaggcaagctgtacctgtgcctgttcgcgtcggccggccacgacctgcgtgcgctcgtgcggggcggcgcaagcgatgcagagatcgcgactgcgatcgcgcgcatctggcaggcgcgcaccgatcgctattcgcagctgcgcggcagcgcctcggccgacgccacgcccgacggcgccggcaagcgcgtcgaaatgtcgtatatcggcggc

SEQ ID NO: 11280 - DNA, 1830 bp, Burkholderia cepacia
atgcgcgccaggttcatgtgctgctggtgcgccgcaacccgctcgccagccgtcgcgccgaaacctcgcacgaagactgaccgttccgcgccagccgcgcctccttcaaccgctcgcccacttccgcttcacatggacgatccgatcccgtcccgcccggctggcggccttctcgcgccggcccccggccgcgcgctgccgcgctggcattatccggccgcgctgctcgccggcgccgccaatacgctcagcttcgcgcccacgccgcacggcggctggctgcagctcgtcgtattcgtctggtttttcgcacagctgacgcgcacgtcgagctggcgcggtgccgcgctcaccggcggcgcgttcggcttcggcaacttcatcagcggcgtctggtggctctacatcagcatgcacgtgtacggcgagatggccgcgccgctcgcgggcggcgcgctcgtgctgttctcgctgtacctgtcgctgtacccggcgttctcggccgggctgtggtcgttctgcgcgggccatgcgtggcatcgccgcgcgcccgacccgcggccgttctcgccgacctggcacggcgcgtttgcgttcgcgagcgcgtgggcgctcggcgaatggctgcgcggcaccgtgttcaccggctttccgtggctcggcagcggctacccgcaggtcgacggcccgttcgccggctttgcgccggtggtcggcgtgtacgggatcgcgtgggtgctcgcgctgttcgccgcactggtcgtgcaggcgctcgtcgccgcgcgtccgtcgcccgtgcgtgacaacggagccggtgcatccggcggcaacgcccgcgtgcgcgtcgccgcgccggccggcatcgccgtcgcgctcgtcgcggccggcctcggactgtcgcaggtcacctggatcgtgcccgcgaacgcgccgctcaccgtgcggctgctgcagggcaacgtgaagcaggacatcaagttcgagcaggaaggcatcgacgcagcgatcaagatgtatcagcagatgatcgtcgagaagccggccgacctgatcgtcacgcccgagaccgcgatcgcggtgatgatccaggagctgcccgagccgttcgcggtcgcgatccgcaagttcagcgacacgaccggctcggccgtgctgttcggcgcggtcggcgcgtcggtgaccgaggacggccactacgtcgactacacgaacagcctgtacggcgtgacgccgaactcgcgcgacatctatcactacgacaagcaccacctcgtgcccttcggcgagttcattccgtggggcttccggtggttcgtcgacctgatgaagatgccgctcggcgacttcgcgcgcggcgcgcccgtgcagaagccgttcctcgtgcacaaccagccggtgatggccgacatctgctacgaggacttgttcggcgaggaaatcgccgcgacgatccgcgacaacccgcagccgccgggcgtgctcgtcaacgtgacgaacctcgcgtggttcggcgacacgatcgcgctcgaccagcacctgcagatcgcccggatgcgctcgctcgaaacgggccggccgatgctgcgctcgaccaacaccgggatgacggccgcgatcgacgcgcacggccgcgtgctcggccagttgaagccgttcacgatcggctcgctcgacgtgcggatcgaaggcacgagcggcttcacgccgtacgtgacgagcggcaacaatatcgtgctcgcggtgtcgctcgtgctgctcgcgttcggcttcacgttcgggcccgggctgcggcggcgcaacggccgcaagcccggcgacgacgaagcggca

SEQ ID NO: 11281 - DNA, 1383 bp, Burkholderia cepacia
gtgttgccccgtcaaaccgaatcactacggagtcctgtcatgtcctattcggaatcgcgcttctggcatccccggcaacatccgctcgccgcgtcgcgcccgccggtccgcatcacgcgcggcgaaggctgctatctgtacgacgacaccggccggccgtatctcgacgcagtcgcgtcgctgttcaacgtgtacgtcggccacggccggcgggaaatcaaggaagcgatcatccggcagctcgacgagctcgaatatcacccggtgtttgccgggttcagccatccgcgcgcggaagaactgtcggcgcggctggtcggcatgctgcagccggaagacatgagccgcgtgatcttcggctccggtggctcggacgcggtcgaggccgcgctgatgatcgcgcggcagtactggaaggtgtccgggcagcccgagcgcaccaagttcatcgcgctgcgccaggcctatcacggctcgcacttcggcggcagctccgtcacgggcaacaccgtctaccgccgcaactacgagccgacgctcgccggctgcttccacgtcgagacgccgtggatctatcgcaacccgttcacgcacgacccggaagagctcggccgcctgtgcgcgtcgctcgtcgagcgcgagatcctgttccagggccccgataccgtggccgccttcatcgccgaaccggtgcaggcgacgggcggcatcatcgtgccgcccgcgaactactggccgctggtgcgcgaagtgtgcgaccgccacggcgtgctgctgatcgccgacgaggtggtgaccggcttcggccggaccggcgcggcgttcggcagccgcggctggggcgtcgcgcccgacatcatgtgcttggcgaagggcgtgtcgtcagggtatctgccgctcggcgcgaccgtcgtcaaccgtcgcatcgagaacgcgttcgcgtccaacccgggcggcatcggcacgctgatgcacggctacacctactcgggccacccgatcgtctgcgcggccgcgctcgcgaacctgcagatcatcgtcgacgaggatctcgccggcaatgcggcgcgcgaaggcgcgtacctgctggaacggctgcagccgctggtcgaccgctatccggtcgtcggcgacgtgcgcggcaagggcctgctggtcggcatcgacctcgtgaaggacaaggtcacgcgcgaatcgatcgatccgtcggacggctatgcggccgcactggccgacgcggcgcgcgatgccggcgtgctgatccgctcgctcggcaaccggctcgcgatcgcgccgccgctcgtgatcggtcgcgaggacgtcgaccggatcgtgcatgcgatcgagcatgcgttcgaagcggtgccgcgctggaccgcccgc

SEQ ID NO: 11282 - DNA, 357 bp, Burkholderia cepacia
atgcctcgagtcaaacgtggggtaaccgcacgggcccgccacaagaagatcatcaacctggccaagggttatcgcggccgccgcaataacgtctaccgcatcgccaagcaggcggtgatgcgcgctggtcagtacgcgtaccgcgatcgccgcaacaagaagcgtgtgttccgcgcactgtggatcacgcgtatcaacgcggcagttcgccagcacgacatgacatacagcgtgttcatcaacggcctgaagaaggcgtcgatcgaactcgaccgtaaggtgctggccgacatggcggtgttcgacaaggctgcttttgctgcgatcgtcaagcaggtgaaagccgccgttgcagcc

SEQ ID NO: 11283 - DNA, 750 bp, Burkholderia cepacia
atgtggaacaacgttcgccaactcaaccttgccgccagcgcgctgtacgcgctgctgctgctcgtgttggcggcggccggctgctactggctgatccagcgcccgacgttcgcgctgcgggaaatccggatcgacggcgataccgagcacatcaactcgccgacggtgcgcgcgggcgtggtcggccggctgaagggcaatttcttcacggtcgatctcgatacggcgcgcgcggcgttcgagcagatgccgtgggtgcgtcacgcgagcgtgcgccgggtgtggccgaatgcgctggctgtcacgctcgaggagtacaaaccgctcgggacctggggcagcgatcagctggtgagcgtcgacggcgagctgttcaccgcgaaccagggcgagctggagcaggaactgccggcgttcgacggcccggaaggcagcgcgaaggaagtcgtcacgcggtatcgcgacttcgggaaatggtttgcgccgctgaaggcggcgccggaagaagtgacgctgtcggcgcggtacgcgtggacggtgaagctgtcgaacggcatgcaggtggaactgggcaaggaacgcaacagcgacacgctgcatgaccggagccagcgcctggtcgccgcgtggccggccgtcacggagcgttggggcaacgacatcgagtacgcggacctgcgttatccgaacggattcgcgattcgcgcggcaggcatgcggttcctgaccgataccgacaagcgcaagaag

SEQ ID NO: 11284 - DNA, 1041 bp, Burkholderia cepacia
atgacgcggttacgcacgctgtttcgtcatccgctcgcgtggccggtgctgacgctcgcgctgctgttcgcgctggacgtcgcgcatcgcccgggcttcctgtcgatcgcattgctcgacggccacctgttcggcgcgccgatcgacatcctcaatcgcgcggcgccgctcgtgatcgtgtcgctcgggatgacgctcgtgatcgcgacgcgcgggatcgacatctcggtgggcgcgatcgtcgcgatcgccggcgcggcggccgcgatcgtgctcgaagcggatccgtcgcgggtcggcatggcgctggccgccgcgctcggcgtcgggctgctggccggcgcgtggaacgggctgctggtcgcattcgtcgggatgcagccgatcatcgcgacgctgatcctgatggtcgcggggcgcggcgtcgcgcaactgctgacgggcggccagatcatcccgatcggcgcgcccggctatctcgcgctcggcggcggctatctcgcgaccgtgccgtgcgcggtgtggatcgcgctcgcgacgatcggggcgagcgcgctgctggtgaaccgcacggcgctcgggctgttcattcgcgcgatcggcgtgaacccggtcgcgacgcggctcgtcgggctgcgttcgggcgcggtcgtgttcggcgtgtatctgtgctcgggcgtgatgtcggcgctcgcgggcatcctcgccagttcgaacgtgcgcagcgccgacggcaacaacgcggggctgctgctcgaactcgacgcgatcctcgcggtgacgctcggcggcacgtcgctgctcggcggccgcttcagtctcgcgggctcggtgctcggcgcgctgatcatccagacgctcacctacacgacctactcgatcggcgtgccgccggaggcgacgctcgtcgtcaaggcggtcgtcgtgatcgtcgtgacgctgatccagtcggacgcggcgcgcgcgctgctggtccggcacgcgtcgcggctgctgccttccgcgcgatcgcgcgccaccaccaccggagcgacgccgcga

SEQ ID NO: 11285 - DNA, 1107 bp, Burkholderia cepacia
gtggtgcgtgtgctggtcgaaatgctggaaccttacgagggccgcatctacgaccctgcctgcggcagcggtggcatgttcgttcaatctgaaaagttcgtcgaggcacacggcggccggcgtaccgacgtctcgatcttcggtcaggagagcaatcccacgacatggcgcctcgcgcacatgaaccttgccatccacggcatcgaagccaagctcggcgagcaacctgcggacacttttctgcgcgaccagcatcctgatctcaaggccgacttcgtgcttgccaacccgccgttcaacgtaagtgactggtccggccagctgctgcgcggcgacaaacgctgggcctacggtgatccaccggtcggcaacgccaactatgcgtggattcaacacttcatccatcaccttgcctatccgaacggcaaaggcggcggggtggccggattcgtgatggcgaacggcagcatgtcgagcaatactggcggcgagggcgacatccgccgcaagatcgttgaagcagacctcgtagactgcatcgtcgccctgcccgcgcaactcttcttcaccactggcattcctgtttgcctgtggttcctcacgcgcgacaagaccggccgcaacatccgtcgcggaacgccaaaccgccccggcggccgtgcgggcgaaacgcttttcatcgacgcccgcaagctcggcacgatgcagacacgcgttttacgggtcctcaccggcactgaagatgccgaatgcgttcccggtacgagcgatcctttgccgaactccgacgttggccgaatcatctacgcttaccggcgctggcgtggcgagcccgcccctgactggtggaacgaaggcgagcacggtccgtgggcatttacgcccatcccgggcttcgccaagcccgcgacgatcgatgagatcgctaaacacggacacgtcctcacccccggccgctatgttggagctgaggagcaggtcgacgacgccgagccgttcgccgagaggtatccgcgattgatggcggagttggaggagcagttggcggaaggggagcggctgagcacactagttcgcgagcgcctaagcttcatcacggagggcgag

SEQ ID NO: 11286 - DNA, 405 bp, Burkholderia cepacia
atgaactacaagatttccaccgagccgggcgcgaagctgcgcatcgacaaatggctgtgggcggcccggttcttcaagacgcgctcgctcgcgaccgacgcggtcgacaagggccacgtgaagatcggcggcgcggcggtcaagccggcgaaggacgtgcgggtgggcgacgaggtcgagattgcgatcgacggcatcgtctggcacattgccgtgctgggcgtatgcgacgtgcgcgggcccgcgagcgtcgcgcagacgctctacgaggaaacggaagcggggcgggccgcgcggctcgccgaactggagcggcgccgcacgtatcgcgagccggcggccgaactgcacggccggccgacgaagcgcgaccggcgcatcatcgacagattttctggtgggagc

SEQ ID NO: 11287 - DNA, 1488 bp, Burkholderia cepacia
atgaaccagcaaacggctgcggcccaagcgagcggcgcggaatacgccgccgggacttcgttgctcgacgacatcgtcgagaagagcaaggtcgcgaaatccgattccgagcatgcgcgcgcgaaggacctgatcggcgaactcgtgcaccaggtgctcgacggcacggtgatcgtgtcggacaacctgtcggccacgatcgatgcgcgcgtcgcggaactcgaccgcctgatttccacgcagctttccgcggtgatgcacgcgccggaattccagcgcctcgaaagcacgtggcgcgggctggactatctggtcaaggaaagcaacacgggccagacgatcaagatcaaggcgctgcacgcaccgaagcgcgacctcgtgcgcgatttcaagggcgcgagcgagttcgaccagagcgcgctgttcaagaaggtctacgaagaggaattcggcacgttcggcggttcgccgttcggtgcgctgatcggcgattacgagatctcgcgccagccggaagacatgtatttcatcgagcagatgtcgcacgtcgcggcggccgcgcatgcgccgttcatcgcgtcggcgtcgccggagctgctcggcctcgagtcgttctccgacctcggcaagccgcgcgacctcggcaaggtgttcgacaccgtcgaatacgcgaagtggaaatcgttccgcgacgccgaggattcccgctacgtcggcctgacgctgccgcgcttcctcggccgcctgccgttcaatccgaaggacggccagaccgcggagaacttcaacttcgtcgaggacgtcgacggcaccgaccacgacaagtacctgtggtgcaacgcggcatgggccttcgcggcacgcctgacggccgcgttcgacgacttcggctggtgcgcggcgatccgcggcgtcgaaggcggtggcctcgtcgaggatctgccgacccacacgttcaagaccgacgacggtgaagtcgcgctgaagtgcccgaccgaaatcgcgatcaccgatcgccgcgagaaggagctgagcgacctcggcttcatcccgctcgtccattgcaagaactcagattacgccgcgttcttcgctgcgcagtcggtgcagaagccgaaaaagtacagcaccgacagcgcgaatgcgaacgccgtcctgtccgcccagcttcagtacatcttctcggtatcgcgcgtcgcgcactacctgaaggcgatgatgcgggacaagatcggcagcttcgcatcggcgcagaacgtggagactttcctcaaccggtggatttcgcagtacgtcctgctcgacgacaacgcctcgcaggaacagaaagcgcaattcccgctgcgcgaggcatccatacaagtgtcggagattccgggcaagccgggctcgtatcgttcggtcgcgttcctgcgtccgcactttcagctcgacgaactctcgatttctctgcgacttgtcgctgatctgcccaaaccggcaaattca

SEQ ID NO: 11288 - DNA, 1380 bp, Burkholderia cepacia
atgaacgcgccgcaagatccccaaatcgaatcgctgaaagtcccgccgcattcggtcgaagccgaacagtcggtgctcggcggcctgttgctcgacaacgcggcatgggaccggattgccgatttcctgtcgcagggcgacttctaccgctacgaccaccggatcatctacgagcacatcggccgcctgatcgcgtcgacgcgcccggccgacgtcgtgaccgtgtacgaagcgctgaccacgtccggcaaggccgacgacgtcggcgggctcgcatacctgaacgcgctcgcgcagaacacgccgagcgcggcgaacatccgccgctatgcggaaatcgtgcgtgaccgcgcggtgctgcgccggctcgtgtcggtcgctgacgagatctcggccgacgcgttcaatccgcagggcaaggaagtccgccaactgctcgacgaagccgaatcgaaggtgttctcgatcgccgaggagggcgcgcgcggcaaccagggcttcctcgagatcggcccgctgctcacgcaggtggtcgagcgcatcgacacgctgtaccacaccgcgaacccgagcgacgtcaccggcacgccgaccggcttcgtcgacctcgaccggatgacgtccgggatgcacggcggcgagctgatcatcgtcgcggggcgcccgtcgatgggtaagaccgcgttctcgatgaacatcggcgaatacgtcgcggtcgagtacgggttgccggtcgcggtgttctcgatggaaatgccgggcacccagctcgtgatgcgtatgctcggctcgatcggccggctcgaccagcaccggatgcgtacgggccgcctgacggacgaggactggccgaaactgacgcacgcggtgcagaagatgagcgaggcgcagctcttcatcgacgagacgggcggcctgaatccgatggaattgcgctcgcgcgcgcggcgtctggcgcggcaatgcggcaagctcggcctgatcatcgtcgactacctgcagctgatgtcgggttcgtcgcagggcgagaaccgggcaaccgaaatttcggaaatttcgcgatcgctgaagagcctcgcgaaggagctcgacgtgccggtgatcgcgctgtcgcagctgaaccgcggcctcgaacagcgccccaacaagcgtccggtgatgtcggatttgcgcgaatcgggcgcaatcgaacaggatgcggacgtgatcctgttcatttaccgcgatgaggtctacaatcccgacagccctgacaaggggacggccgaaatcatcatcggcaagcagcgtaatggcccgatcgggcccgttcggctcacgttcctggggcaatacacgaagttcgacaattttgccggggcgcagaccttctacggcgag

SEQ ID NO: 11289 - DNA, 1413 bp, Burkholderia cepacia
atgagtaaaaccgtcgccgacgtcatgcagctcgtgaaggacgaggacgtcaagtttgtcgatttccgcttcacggatacgcgcggcaaggaacagcacgtgtcggtgccggtttcggcgtttgacgaagacaagttcgaaagcggccatgcattcgacggttcgtcgatcgcgggctggaagggcatcgaggcgtcggacatgctgctcatgccggacccgaacgctgccttcatcgacccgttctatgaagagtcgaccctcgtgctgacctgcgacgtggtcgagccggccgacggcaagggctacgagcgcgatccgcgttcgctcgcgaagcgcgcggaagcgtacctgaagagcacgggcatcggcgacacggcctacttcggtccggaaccggaattcttcattttcgactcggtccagtggaacacggacatgtcgggctgcttcgtgaagatcaactcggaagaagcaccgtggtcggccggcaaggaattcgaaggcggcaacacgggccaccgtccgggcacgaagggcggctacttcccggtcgcaccggtcgacacgttccaggacatgcgttcggaaatgtgcctgctgctcgaacagctcggcatcccggtcgaagtgcaccaccacgaagtggcgggccagggccagaacgaaatcggcacgaagttctcgacgctggtcgagcgcgccgactggacgcagtggtcgaagtacatcatccacaacgtcgcgcactcgtacggcaagacggcgacgttcatgccgaagccggtcgtcggcgacaacggttcgggcatgcacgttcaccagtcgatctggaaggacggccagaacctgttcgcgggcaacggctacgccggcctgtcggaactggcgctgttctacatcggcggcatcatcaagcacgctcgcgcgctgaacgcgatcacgaacccgacgacgaactcgtacaagcgtctggtcccgcacttcgaagcgccggtcaagctcgcctactcggcgcgcaaccgttcggcatcgatccgcattccgcacgtgtcgaacccgaagggccgccgcatcgaaacgcgcttcccggatccgatggcgaacccgtacctgttgttctcggcgctgatgatggccggcctcgacgggatccagaacaagatccatccgggcgaagcagcggacaagaacctgtacgacctgccgccggaagaagatgcaaagatcccgaccgtgtgcgcgggcctcgaccaggcgctcgaagcactcgacaaggatcgcgagttcctgacccgtggcggcgtgttcacggacagcatgctcgacgcatacctcgcgctgaaggagcaggagctggcgaagttccgcatgacgacgcacccgatcgagttcgagatgtactactcgctc

SEQ ID NO: 11290 - DNA, 975 bp, Burkholderia cepacia
gtggggggcagcagcccggcgttagctgtcgcacgccgcccgatgcacgacgcgcgcgaaatccggataatgtctgccccgaacattcgcccgacaatggatccgctcatgactcccggtgtcctcgtgaccggccgcacgctggatcgcgccgaattgatgcagctcatcgaaggctcacctgcgcccctccacctggaggattgcgacctcgaaagcgccgatctgtcgcgcctggatctgcgcggcgcgcgattcgagcgctgcgcgctcgcggaagcgtcgttcgtcggcgccacgctcgcgcacaccacgtggattcgctgccgggcccgccaaaccgactttgcgtcgtcggatctcgaggacgccgcgttccggtcgtgcgacctcaacaatacgagctggcggcgcagcaagctcggatcggtccgcttcaacgaatgccggctgaccggtgccgattttgaggaatgcaaatcgcttggactcgaattcgccagcacgctgctggtcggtgcgagcctgcggcgcttttcgttccgtaaaacccggctcgtggcgctcgatttctcggacgccgatctcgccggcgcggacttccgcgatgccgtgttcgaaggcggcagcctgcgcaacgcacatctgaacgacgcccgcttcgagggtgccgacctgcgcgacgtggatctggccgcgctgccatttctgcccccgcccgcgtccctcctccgtccctgctgcccccgcgggcgccggcgcgcgcccccccgccccccgccgtgcggcggcctctgctgcgccgtctccctcccgcaccggtgtggcccctttgccccaccactctccaccccatgccacaccttcccagccgcgccggctccccggcctttggacccgcgctcgactcttcctccgctttcctctcgtcgcgcggcgcccccggcgaccgccagacaccgcacaacaaccatg

SEQ ID NO: 11291 - DNA, 1581 bp, Burkholderia cepacia
atgtcccaatatcaagacgacatcaaggcagtggctggtttgaaggaaaaccacggcagcgcgtggaatgccatcagccccgaatatgccgcccgcatgcgtgcccagaacaagttcaagaccggcctggacatcgcgaagtacacggcgaagatcatgcgcgccgacatggccgcgtacgatgccgatccgtccaagtacacgcagtcgctgggttgctggcacggtttcatcggccagcagaagatgatctccatcaagaagcacttcaacagcaccgaacgccgctacctgtatctgtcgggctggatggtcgccgcgctgcgctcggagttcggcccgctgccggaccagtcgatgcacgaaaagacttcggtcagcgcgctgatccgcgagctgtacacgttcctgcgccaggccgacgcccgtgagctgggtggcctgttccgcgagctggatgccgcgaaggacgctgccgccaaggccgcgatccagcaaaagatcgacaaccacgtcacgcacgtcgtgccgatcatcgccgacatcgacgccggcttcggcaacgcggaagcgacctacctgctggccaagcagttcatcgaagcgggcgcgtgctgcatccagatcgaaaaccaggtgtcggacgagaagcagtgcggccaccaggacggcaaggtcacggtgccgcacgaggacttcctcgcgaagatccgcgcgatccgctacgcattcctggagctgggcgtggacgacggcatcatcgtcgcgcgtaccgattcgctgggcgccggcctgaccaagcagatcgccgtgacgaaccagccgggcgacctgggcgatcaatacaactcgttcctcgattgcgaggaactgtcggccgaccagctgggcaacggtgacgtcgtcatcaagcgcgacggcaagctgctgcgtccgaagcgcctgccgagcaacctgttccagttccgcgccggcacgggcgaagcgcgttgcgtgctcgactgcatcacgtcgctgcagaacggcgccgacctgctgtggatcgaaaccgaaaaaccgcatatcgcacagatcggcggcatggtcagcgagatccgcaaggtgatcccgaacgcgaagctggtgtacaacaacagcccgtcgttcaactggacgctgaacttccgtcagcaggcgtacgacgcgatgaaggcagcgggcaaggacgtgtcggcttacgaccgcgcgcagctgatgagcgtggaatacgacgagaccgaactggcgcaactggccgacgagaagatccgtacgttccaggccgatgcatcgcgtgaagcaggcatcttccatcacctgatcacgctgccgacgtaccacacggccgcgctgtcgaccgacaacctggccaaggaatacttcggcgaccagggcatgctcggctacgtggccggcgtgcagcgcaaggaaatccgtcagggcatcgcctgcgtgaagcaccagaacatgtccggttcggacatcggtgacgatcacaaggaatacttcagcggcgaagcggcgctgaaggccgcgggcaaggacaacacgatgaaccagttc

SEQ ID NO: 11292 - DNA, 513 bp, Burkholderia cepacia
atggaaatcggacaataccaaccgaatctcgaaggcgacggcctgcgtatcggcatcgtgcaatcgcgcttcaacgaacccgtgtgcaacggcctcgccgacgcgtgcgtcgaagaactggagcgcctcggcgtcaccggtgaagacgtgctgctcgtatcggtgcccggcgcgctggaaatcccgctcgcgctgcaaaagctcgccgaaagcggccagttcgacgcgctgatcgcgctcggcgcggtaatccgcggcgagacctaccacttcgaactcgtgtcgaacgagagcggcgcgggcatcacccgcatcggcctcgacttcaacctgccgatcgcgaacgcggtcctgaccaccgaaaacgacgagcaggccgtcgcgcgcatgaccgaaaagggtcgtgacgccgcacgcgtggccgtcgagatggccaacctgacgatggcgctcgatcagctcggcgacgacgaggacgaagaggaagacgaagacgacgaagaggagcgcgca

SEQ ID NO: 11293 - DNA, 267 bp, Burkholderia cepacia
atgagcgattcgcatcaatccgacccgcaccgtcgcgcgcgccttcgctggcgtgcgcggcggggtctgctggaaaacgacatcgttttcgaacggttcttcagcagatacgagtatgacctcaccgatgcagacgtaggcgcgttgtcgcgcctgctcgatctgagcgacaacgacctgatggacttgctcctcgcgcgcaaggaaccagagggcgacctagacagcccggacattcaccggctgttggagatgctgcgcaacgtg

SEQ ID NO: 11294 - DNA, 594 bp, Burkholderia cepacia
atggaacatctcaaccaaacattcttcctatggctgaacgcacctgaacacccgaatgctctggtggtgacgctggccaccttctttgtggaatggctcatctgggccgtcccgattctgatcggcatcagctggctgcgcggcaatgtgaacacccgcaaagcgctgctggtcgctaccgcatccggcctgcttgggctgctgaccaaccaaatcatcggcctggcttggtcgcatccccggcctttcatgatagggctgggtcatacgctcattccccatgtggccgattcgtcatttcccagcgatcacctgacgctgtggtggtcggttgccgtcagctttctgctacagcgaggactgcgaagggctggcgtcgctttggcgctgtttggcctccccatcgcctggtcacgcatctatctgggggttcactttccactggacatgcttggtgccatcgcggtcgcatcgctcaatgccgtgttggcgttgcacgcagcacggtggtatctggggccgatctaccggctggcgacccgtatccattgcctgttgttcggcaggctgatcgcgcagggatgggtgcgcgag

SEQ ID NO: 11295 - DNA, 606 bp, Burkholderia cepacia
atgacgacgaagcgtaaccacccggacgaactcgtggtcggcctcgtgtcgatcagcgaccgcgcgagtacgggcgtctacgaagacaagggcattccggcgctgcaggaatggctcgccggcgcgctggtttcgccgtggcgcgccgaaacgcgcctgatccaggacgatgcgccgacgatctcggccacgctgaccgagctcgtcgacgtcgccggctgcgacctcgtgctgacgacgggcggcaccggccccgcgcgccgcgacgtgacgccggaagccacgctggccgtggcgacgaaggaaatgccgggattcggcgaacagatgcggcagatcagcctaaatttcgtgccgaccgcgatcctgtcgcggcaggtcgcggtgatccgagaaacggccgaccatgcggcgctgatcatcaacctgcccggccagcccaagtcgatccgggaaacgctggaagggctgcgcgacgccgacggcaagccgaccgtgcccggcatcttcgccgcggtgccctactgcatcgacctgatcggcggcccgtatgtcgagaccgacgccgcggtggtcgcggcgttccggccgaaaagcgcgcggcgc

SEQ ID NO: 11296 - DNA, 729 bp, Burkholderia cepacia
gtgaacgagccgatccatgcggcgctcgccggcgcggcgatcaacgccgacggccatgccgaaggcgccgattacgcgagcgaccggatcctcgcgcgcatcggccacgtcacgcgcacgctgcgcgattcgatgcgcgagctcgggctcgacaagcacgtcgagcgcgcggcggaagccgtgccggatgcgcgcgaccggctgcgctacgtcgcgacgatgaccgagcaggccgcggtgcgcgtgctgaatgcgatcgagatcgcgaagccgatgcaggagcgcatccagaacgaggccgaggcgctcgacgcgcgctgggcgcagtggtacgcggcgccgatcgagcacgcggacgtgcgcgagctgatggacgatacgcgcacgttcctgcgcacgctgcccgagtcgacgtcggcgactcgcgcgcagctgctcgagatcatgctcgcgcaggatttccaggatctgaccggccaagtgatcaagaagatcatggacatggtctacctgatcgagcagcagctcctcacggtgctcgtcgagaacatcgcgccggagcggcgcgagcagttcgcggccaccgccgccgcgttcgcggccgagcagatgagcgcgaccggcagccccgaatcgctgctgaacggcccgcagatcgcgccggaaggcaaatccgacgtcgtccaggaccaggggcaggtcgacgacctgctcgccagcctcggcttc

SEQ ID NO: 11297 - DNA, 303 bp, Burkholderia cepacia
accgacggcgaactcgaggacgcgtacttcacgccgcagttcgtcggcctgctcgacgaagccgtgtgggggcaagggtttccggccccgcttttctcgggcgaattcgacgtcgtgtcgcagtcgctcgtgaaggaaaagcacctgaagctgcagctggcgcgcggccgtcagcgcttcaacgcgatctggttcaaccacaccgagccgctgccggcgagcgcgctggtcgcgtaccggctcgtcgccgatacgtggaacggcgtcacgcgcgtgcagctgatcgtcgaacacgcggccggc

SEQ ID NO: 11298 - DNA, 414 bp, Burkholderia cepacia
atgacgaagaaactcttgaccgaagccgaaatcctgaagatgagcgacaaggattacatgaatgaggatcagctcgccttcttcaaaaatcggctcgaacagttgcaggcggacatcctcaagaatgcaggccagacgaccgagaacctgcgcgagacggtgatcgtccccgatcccgccgaccgcgcgacgatcgaggaagagcacgcgctcgagctgcgtacgcgcgatcgcgaacgcaagctcctcaagaaggttcagcagtcgctcgcccgcatcgattccggcgattacggctggtgtgaggaaaccggcgagccgatcggcattccgcgcctgctcgcgcgtccgaccgccacgctgtcgctcgaggcgcaggagcgccgcgagctgcgccagaagctgttcggcgac

SEQ ID NO: 11299 - DNA, 1104 bp, Burkholderia cepacia
atgctcagcttcgcgtccggcttcatcgtctccctgctcgtcacgctgttcatcgtgcgctacgcgcaccttcacgagaaattctcgatcgacagcgacctggccggcgtgcagaaattccatgtgcggccggtgccgcgggtgggcggcatcgggatcctcgccggggtcgtcgttgccgcgctggtgctgttccggcgctatccgacgatctccggcagcattctcgggatcgttgcgtgcgggatgccggctttcctgtccggtctcgtcgaggatctgaccaagcgcgtgtcgccgcgcgcgcggctgctctgcacgatgggcgcggccgcgctcgcattctggctgatgcacatcgcggtcacgcgcatcagcgtgccgccgctcgacttcctgctcggctacgtcgccatttcggcgttcgtcaccgtgctcgcggtcgccgcgctcgcgaatgcgatcaacatcatcgacggcttcaacgggctcgcgtcgatggtcagcttcatgatgttcgcgtcactcgcgtatgtcgcgttccacgtcaacgacccggtcgtgatgtccgcgtcgatcatcatgatgggcgcggtgctcggcttcttcctgtggaatttcccggccgggctgatcttcctcggcgacggcggcgcgtatttcatcggcttcatgctcgcggaactcgcgatcatgctcgtgatgcgcaaccgcgaagtgtccgcgtggtacccggtgctgctgttcatgtatccgatcttcgagacctgcttctcgatctaccggaagaagttcattcgcgggatgtcgccagggattccggacggcgtgcacctgcacatgctcgtgtacaagcggctgatgcgctgggccgtcggtacgaagcatgcgcacgacctgacgcggcggaattcgctgacttcaccttatctgtggttgctgtgcctcgtcgcggtgataccggcgacgctgttctggcggcatacggtgcacctgttcgcgttcgtcgtgctgttcgcggtgacttatgtgtggctttatctcagcatcgtgcggttcaaggcgccgaggtggatggtggtgaggaagcatcgacagagccgt

SEQ ID NO: 11300 - DNA, 850 bp, Burkholderia cepacia
atgggcagactgtccctcgccgcgaaaatcacgcacgtgccgtcgatgtacctgtcggaattgcccggcaagcatcacggctgccgtgaagcggcgatccgcggccaccagctgatcggcgagcgttgccgcgcgctcggcgtcgacacgatcgtcgtgtcggacgtgcactgggctcgtcaacgcgggctatcacgtgaactgcaatgcgcggttcgcgggcacctatacgagcaacgagctgccgcatttcatccgcgacatgcagtacgcgtatccgggcaacccggcgcttggccggctgatcgcggaaacggccaccgagcgcggcgtcgcgacgcgcgcacacgagatcgacagcctcgaactcgaatacggcacgctcgtgccgatgcgctacatgaacggcgaccagcatttcaaggtcgtgtcgatcgccggctggtgcatgtggcacacgctcgacgaaagccggcgcttcggcgaggcgctgctcgaagcgatcgagaagagcgattcgaacgtcgcgttcctcgcgagcggctcgctgtcgcaccgcttcaacgacaacggcagccccgaggaatcgatccatcagatcagtcgcgaattcttccggcaggtcgacctgcgcgtggtcgagctgtggaagcagggcgatttcaagaccttctgcgcgatgctgcccgagtacaacacgcattgccacggcgaaggcggcatgcacgacaccgcgatgctgctcgggctgctcggctgggatcgttacgaccggcccgtcgagatcgtcaccgactatttcgcgagctcgggcaccgggcagatcaacgcgatcttcccgctgccctga

SEQ ID NO: 11301 - DNA, 1032 bp, Burkholderia cepacia
atgacagtgcgaatcgatatgcattcccacttttttccgcgtattacgcgggaagaagcaaggacgctcgatcccgagcatgcgccgtggctccgggtcgatccggacggcgccaccgggacgatcatgaccggagagcgtgatttccggcccgtctatcgtgcgttgtgggaccctgccacgcgcattgccgaaatggatcgatgcggcgtggacatccagctgatgtgcgcgacgcccgtgatgttcggctaccggtacgacgcggtcgcggcgcatgaatgggccacgcgaatgaacgatcgcgcgctggaattttgctcgcacgcaccgcagcgcctgatgccgctggctcaagtgccgctgcaggacgtcgaactggcctgtcgggaagcttcgcgtgcgcgccgtgccggtcatcgtggcgtgcagatcggcaatcacctgggcccgcgcgatctcgacgacgatcaactggtgacgtttcttacgcattgcgcacatgacgacataccggttctggtgcatccgtgggacatgatgacggatggccgcatgaaaaagtggatgttgccctggctggtcgccatgccggccgaaacacagttgagcatcgtgtcgctgattctctcgggcgcgttcgagcgcattcccaggacgctcaaactttgcttcgcccatggcggcggcagctttgcgttcctgttggggcgcgtgcagaacgcgtgggagcaacgagacatcgtacgcgagaattgtccgaatccacccgcttcgtatgtcgatcgtttccatgtcgatagcgccgttttcagcgatggtgcgttgcagttgctcgtggagacgatgggcgaagaccgcgtgttgctcggctcggactatccgttcccgctcggagagaaggtcgtgggcgatctggttgcgaatcatccgcaattgagcgacgcggcgaaggagaaaatcctcggcgtgaatgcgcaacgctttttcaatctggcgcccgagcccggttcgggaggtcgtcatgcaaat

SEQ ID NO: 11302 - DNA, 898 bp, Burkholderia cepacia
gcgagcgtcggcgtgctgctcggcctcggcggcacggcgatgtcgctgacgggcaacaacaccacgctgaccaacaacggcacgatcgacccgtcggcgctcggctcggggctcggcgtgctgtctagcggcgcggtgatcggcaacgcggcggcgagctcggtcaacgtcaccaacaacggcgtgatgaacggctcgaccggcgtggcgatcagcggcgtgacgggcatggcgctgtcggtccagaacggcacgggcggcacgtcgaccattacgaacaccggttcgatcggctcttccgcgctggtcggtgcgacgctgatcggcgccgatgcgccggtggtcgccgcctacggcggcggcacggtcaacatgacgaacagcgggacgatcagcggccgcgtgtcgttcggctcgaacaacgcgcccggcggcggcaatacgttcaccaactcgggcgtgatcaacggcagcgtgtcgatgggcgcgaacagcacgaacacgttcaatgcgatcacgggctcgcaggtcaacacggcgggcggcaccgggggcgcgttcaacatcacggtcggggcgaacacgctcaacgtcgcgcagacgggcatcgtcgacggcggctcgggcggcaacaacacgctcaacctgcagcagggcgcttccgcgaacggcacgatcgcggtcaacaactacatcaacttcaatcacctgaacgtccagggcggcaactggacgatcaacggcgcgtccaccgcgcaggacgcgacgctgagcggcggcgtggcgatcatcaacgacaacgcgtcgctcggcaccggcaacatcaccgggaacggcggtgcgttgcaggcgggcacggcggggctgcaacgtctctaacaacgtgtcgctcggcgtg

SEQ ID NO: 11303 - DNA, 1968 bp, Burkholderia cepacia
atgctttttcccacagaatttgacgtcatcgtcgtcggtggcggtcatgccggcacggaagccgcgctggcgtccgcccgcatgggcgcaaagacactgctgctgacccacaacatcgaaacgcttgggcagatgagctgcaatccgtcgatcggcggcattggcaagggccatctggtcaaggaagtcgacgcactgggcggcgcaatggccgccgcgacggacgaaagcggtattcagttccggatcctcaattcatcgaagggcccggccgtacgcgcgacccgcgcacaggcggatcgcatcctgtacaaggccgcaatccgccatcggctcgaaaatcagccgaacctatggctgttccaacaggccgtcgacgacctgatggtcgaaggcgaccgcgtggtcggcgccgtcacgcagatcggcatccgctttcgcgcgcgcgcggtcgtgctgacggccggtacgttcctcgacggcaagatccacgtcggcctgaacaactacacgggcggccgcgcgggtgatccggcggccgtgtcgctgtcgtcgcgcctgaaggagctgaagctgccgcagggccgcctgaagaccggtacgccgccgcgtatcgacgggcgcacgatcgacttctcgaagctcgacgagcagccgggcgacctcgatccgatccccgtgttctcgttcctgggccgcgcggagcagcatccgcagcagctgccgtgctgggtcacgcatacgaacgagcgcacgcacgacatcattcgcggcggtctcgaccgttcgcctatgtatacaggcgtgatcgaaggtgtcgggccgcgctattgcccgtcgatcgaggacaagatccaccggtttgcatcgaaggaatcgcaccagatcttcctggaaccggaagggctgacgaccaacgagttctacccgaacgggatctcgacgagcctgccgttcgatgtccagctcgagctcgtgcattcgatgcgcggcctcgagaacgcgcacatcctgcgtcccggctacgcgatcgagtatgactacttcgacccgcgcgcgctgaaggcgtcgctcgagacgaaggcgatcaacgggctgttttttgcgggccagatcaacggcacgaccggctacgaagaggcggccgcgcagggtctgctggccggcctcaatgcaggccgttacgtgcaggagaaggaggcatggtgcccgcggcgcgaccaggcctatctgggcgtgctggtcgacgatctcgttacgcgcggtgtggccgagccgtaccggatgttcacgagtcgcgccgagtatcgcctgagcctgcgcgaagataatgccgacatgcgcttgaccgaaatcggccgcgaactggggctggtcgacgacgcgcgctgggacgccttcagccggaaacgcgacgctgtttcacgtgaaaccgaacgcctgaagtcgacctgggtcacgccgaagacgctgccggcagaagaggcgaccgcgttgctcggcaaggcgatcgatcacgaatacagcctcgccgagctgctgcgccgcccgggtgtgagctacgacggcgtatgcggactgaagggcggcgagtgcggccccgcggagccgctgacggacgatccggtgctgctcgaacagatcaaggaacaggtcgagatcggcatcaagtatcagggctatatcgagcgccaggcgtccgaaatcgagcgcaacgatgcgaacgagaacacgcgcctgccggacggtatcgattaccgtgaagtccgcggcctgtcgttcgaggtgagccagaagctcaacgagttccggccggaaacgatcgggcaagcgtcgcgtatctcgggcgtcacgccggcggccatctcgctgctgatggtgcacctgaagcggcgcggcctgggccgccgcaacggcacggccgcagaggccgcggagcaggggggcggtaccgtcccgacgcaacaa

SEQ ID NO: 11304 - DNA, 261 bp, Burkholderia cepacia
atggcacacaaaaaggcaggcggctcttcccggaacggccgcgactccgagtcgaaacgtctcggcgtgaaagtgtacggcggccaggcaatcaatgccggcggcatcatcgtgcgtcagcgcggtacgcgcatgcacgctggcgagaacgtcggcatgggcaaggatcacaccctgttcgcgctggtcgacggtcacgtcaagttcgcgacgaagggcgcggacaagaagcatctggtcatcgtcgtcccggcggctgcc

SEQ ID NO: 11305 - DNA, 1308 bp, Burkholderia cepacia
gtgcaggcacagatcgaggccggccgccgcgccggccgacgtcaggatccgcccgttgtcgacgaacagcacgttcggatcgacgtcgacgttcgggtagcggcgcgcgagttcggcggccgcgagccagtgcgtcgtcgcgcgcaggccgtcgagcagcccggcttccgcgagcacgaacgcgccgctgcagatcgacgcgatccggcagccgcgcgcggccgccgcgcgcagcgcgtcgagcacgcggcgcgacgtcggcgcgagcggcacggaggtgccgggaaccatgatcgtgtcggcgtcggccagcgcatcgaggcgaaacggcgggcgcagctcgaacaggtcgccgccgacgcgcggctggtcgctgcacacgcggacacggtacgcctgcgcgacgttgggcgcccgcacgcgcgcgaacgtgtcgcacgcgacacccagatcgaacgggacgacatcgggcaaagcaagcacggcgaccgtgtgcatggcattcgtggccgtggccagaatccgttgaaagatgtcattctagccaatggctcgaacccgcactacacgcgacaatcgccgcggactacctggagccctgccgatgacacaagacgatcgcaacgcgttgcggaacctgcaatacctgtcgctgctggaggcgaccaccctcgtcgcgctggtgtgcgtggccgtgccgctcaagcatctggccggttatccggtcgcggtatcgatcatgggcccgattcacggcatcgcgttcgcgatgtacgtgtgggcggtggtcggcaccgcgtcgagcgggctgtggagcaagggcgaggtcgcgcggctcgtgctgtcggccgtcgtgccgtttgcggggctggcgagcgccggctggatcgcgcgcaggcggcacgcgcgatgatctacctggtgctgaaggccgtgcatctggccgccgtcgtcacgttcgtcggcgggctgctgttgtcgtcggtcgcggtccggatcgcgaacctcgccgtgcatcgcgcggtgcggcgctgggatcgcacggtgacggcgcccgcgctcgcgatcgtgtggatcgccggcatcgcgctcgcgctgagcggtcactggttcggcaccgcatggctgttggtgaagctcgcgatcgtcgtcgcgctgtcggtgctgcacggaatcctggccggcacgctgcggcgcatggcgcgcgacgatctcgtcgtcgtgccggcgccgtggctcgggcagacggcgggcgtggcgctcgtcgcgatggcgctcgtcgtcgggctggccgtgatcaagccgttc

SEQ ID NO: 11306 - DNA, 1068 bp, Burkholderia cepacia
atgccgcgcccgatctccgccaccatccacaccgccgctctcgcgaacaatctctccgtcgtccgccgctttgccggcccgtccaaggtctgggcggtcgtcaaggccaacgcgtacggccacggtctcgcccgcgtgtttccgggcctgcgcggcaccgacggcttcggcctgctcgacctcgacgaggccgtgaagctgcgcgagctcggctgggccggcccgatcctgctgctcgaaggcttcttccgctcgaccgacatcgacgtgatcgaccgctacagcctgaccacgaccgtccacaacgacgagcagatgcggatgctggaaacggcgcggctgtcgaagcccgtcaacgtgcagctcaagatgaacagcgggatgaaccggctcggttacgtgccggagaaataccgcgccgcgtgggagcgcgcccgcgcgtgccccggcatcggccagatcacgttgatgacccatttttcggacgcggacaacgagcgcggcgtcgccgagcagctcgcgacgttcgagcgcggcgcggaaaacatcgccggcgcgcgcagcctcgcgaattcggcggccgtgctgtggcatccggatacgcacttcgactgggtgcggccggggatcgtcctgtatggcgcgtcgccgtccgggctgtcgtccgatatcgcggataccgggctgaagccggcgatgacgctcgcgtccgagctgatcgcggtgcagacgatcgcgaagggccaggcgatcggctatggctcgacgttttccgcgcaggcgccgatgcggatcggcgtggtcgcgtgcggttacgcggacggctatccgcgcgttgcgccggaaggcacgcccgtgatcgtcgatggcatccgtacgcggatcgtcggtcgcgtgtcgatggacatgatcaccgtcgacctgacgccgtgcccgcaggccggcgtcggcgcgcgggtcgaactgtggggcaacgcgctgccgatcgacgacgtcgcgcgccattgcgggacgatcggctacgagctgatgtgcgcggtcgccggccgcgtgccggtgcgagcggaa

SEQ ID NO: 11307 - DNA, 447 bp, Burkholderia cepacia
atgagtggcgcgagcgcgcgcgatgcgacgctcctggcgttcgactacggcgaaaaacggatcggcgtcgcgatcggcaacgcactgacgcgctcggcccgcgcgctcgtcgtgatccagaatttgaaccgcgagcaccgcttcaaggcggtcggcgacctgctggccgaatggcggccggacgcgctcgtcgtgggcctgccgatgcatccggacggcacgccgcacgacatgacgcagcaggcgaagcgcttcggcaaccagctgaacggccgcttcgggctgcccgtcacgtgggtcgacgagcgctattcgtcggtcgaggccgaggccggactgcgcgagcgtaacgtgcgcggccgcgcacgcaccgacatgctcgatgccgaagccgcgcgcgtcatccttcaacagtatctcgatcaattgtccgaccatgagcaccat

SEQ ID NO: 11308 - DNA, 1927 bp, Burkholderia cepacia
atgaccgaccccaccgccaacccatcgccgccgcccgcgccgccatccgcaccgccgcgccgccgccgcgactggcgcacgctcgcgggcgcggtgctcggcctgacgctcgcatgcgcgggcatcggcgcatggacgatcgatcgcatctggacgcagttgccgtccgtcgaacacctggccgtctatcgtcccgcgctgccgctgcggatcttttcgcgcgacggcgacctgctggccgaatacggcgtcgagcggcgcgagttcgtgccgctcgaacgcattccgccgttgatgcggcacgcgctgctcgcggcggaggacgcgaaattctacgagcacggcccggtcgatgtcggcggtcttgcgcgcgcgacgttcgcgaacgtcgtgacgggccagccgggccagggcggcagcacgatcacgatgcaggtcgcgcgcaacttctacctgacgcgcgacaaggtgctgagccgcaagctcgccgagatcctgatggcggccaagctcgaacgcgaatacagcaaggacaagctgctcgagctgtacatgaacgagatctatctgggcgagcgcgcatacggcttcgcggccgccgcgcacgtgtacttcggcaagccgctcgatgcgctgagcgcgggcgaggcggccgtgctcgcggggctgccgaaggcgccgtccgcgttcaacccggtcgtcaatcccgcgcgcgcgaccgcgcggcgcaactacgtgctcggccggatgcacgcgctcgggcaactcgacgatgcgacgtatcgcgcggccgtcgacgcgccgatcgcgctggcgaccacgccgccgcccggcatcgtcgcggcgccgtacgtcgccgagcgcgcgcgccgaatgatggtcgagcggtttcacgacgacgcgtacacgctcggcctcgacgtgacgacgacgatctcgatgcgcgaccagcgcgcggccgaagccgcgctcgagcgcacgctgagccgccaggcgcgcgcgaagcgcgagacgcgcaacgggctcgaaggcgcgctcgtgtcgctcgatgcggccaccggcgacatgctcgcgctggtcggcggcgcggatttcaatcgcaacgtgttcgaccatgcgctgcaggcgtatcgccagccggggtcgagcttcaagccgttcgtctattcggcggcgctggagaagggctacttccccggcgtgctcgtcgacgatacccagcgcacgctcacgcacgcggaaaccggcgcgcggccgtggcgtccgcgcaatttcggcaatcgctacgaaggcttcatcccggtgcggcgcgggctcgtgcgctcgaagaacctggtcgcggtcagcctgatgcaggccaccgacgcgcgctacgtgcagcagcacgcggtgcatttcggcttcgacgcgcagcgcaatccggcgtcgctgccgctcgcgctcggcgcgggcgccgtgacgccgctcgaactcgcgagcgcctacagcgtgttcgcgaatggcgggacgcggatggagccgcgcctgatcctgtcggtgaagcagcgtcacggcggcgcgatgtacgaggcgaccgtgccggcgggcgagcgggtcgtatcggcgcgcaatgcgttcgtgatggacagcatgctgcgcgacgtcgtgcgggccggcaccgcgcgcggcgcgctcgcgctgcggcgtgacgacgcggccggcaagacgggcacgtcgaacgggtcgaaggacgtatggttcgccggctattcgtcgggcatcgtcgcggtcgcgtggctcggctacgacacgccgcgcccaatggggcgcgcgaccggcgcgacgctcgcgctgccggtctggctcgactacatgaagacggccgtcgacgggcgcacgccggtcgcggcgatgccgccccaggacgtcgcgctcgtcgacggcggtt

SEQ ID NO: 11309 - DNA, 618 bp, Burkholderia cepacia
atggaactcaagctcctgaacgaaaatggtcaggaaggtgcagtggtcaacgcatcggacgtcgtgttcggtcgtgactacaacgaagcgctgatccaccaggtcgtcatcgcttaccaggcgaatgctcgccagggtaaccgcgcacagaaggaccgtgagcaagtcaagcacacgaccaagaagccgtggcgccagaagggtacgggccgcgctcgtgccggtatgtcgtcgagcccgctgtggcgtggcggtggtcgtatcttcccgaattcgccggaagaaaacttctcgcacaaggtcaacaagaagatgcatcgcgcaggtctctgctcgatcttctcgcagctggcccgtgaaggccgtctgtcggtcgtcgaggacatcatcctcgaagcgccgaagaccaagctgctggccgacaaattcaagaccatgggtctcgactccgtgctgatcatcaccgacacggtcgacgagaacctgtacctggcttcgcgcaacctgccgcacgtggcgattgtcgagccgcgctacgctgacccgctgtcgctgatctacttcaagaaagtgctggtcacgaaggctgcggtcgcccagatcgaggagttgctgtca

SEQ ID NO: 11310 - DNA, 864 bp, Burkholderia cepacia
gtgatggttgcgcgccgaggtcaggccggcgagccggaggagcacgacacgcccgaaacggcgggtcgctccggccggcgaggcggatcctcgggcgccgaccggcggagcgcaggcggcaacgccgcgaaccgcaccgcgacgagggcatccgacgatgccctcgtttcgtttgagattgccgcaccggacgatccgttcgacgacgatgagtcgttcgacgcgcacgatcggtcccgccgtcgcgtgtccggtgtccgcttcccggtcgatcgcacagccgatgcgccggcgacggaagatgtctatacgcgcagcagccagcatccgcgccgcgcacgccgtgcagccggcgcgtcttccggcgatgcctcgagtgacgcgccgggcgcccgcgagcgcaagtcgtcgaagccgccgcggtcgttgaagggccgcgcgctcggctatctgtcgaggcgcgaatacagccgcgcggagctcgcgcgcaagctcgcaccctacgtcggcgaggacgaatccgtcgagccggtgctcgatgcgctggaaaaggaaggctggttgtccgacgcccgtttcgccgagagcctcgtgcatcgccgcgcgtcgcgtgtcggcgtcgcgcgcatcgtcggcgagctgaagcgccacgcggtcggcgacagtctcgtcgaagcggtgaatgcacaattgcgcgagaccgagttgacgcgcgcgcaggccgtctggcgcaagaaattcggtgcactgccgcaaacgcccgccgagcgcgcgaagcaggcgcgcttcctggccgcgcgcggcttctcgagcgcgaccatcgtgaagttgctgaaggtcggcgacgatttcccgatcgacgac

SEQ ID NO: 11311 - DNA, 129 bp, Burkholderia cepacia
gtgcgtgagctcaggcagtgtcatccggtagctgcgctcctgaaggcggcaggcctggcgcgcagcacgttctattaccagctcaaggcattggctgccggcgatcggtatgcgaatctcaaagcgaag

SEQ ID NO: 11312 - DNA, 2084 bp, Burkholderia cepacia
atgtccaaagcactgatcattgcggaaaagccttctgtcgcgaacgacatcgcacgcgctttgggcggctttaccaagcatgacgagtattacgagagcgacgatttcgtcctttcgtccgctgtcggccacctgctggaaatcgccgccccggaagagtacgaggtcaagcgcgggaaatggagcttcgcgcatcttcccgtcattccgccgcatttcgacctgaacccgatcgcaaaaagcgagtcgcgcctcaaggtgctcacgaagctgatgaagcgcaaggacgtcgaccgcctgatcaacgcatgtgacgcggggcgcgaaggcgagctgattttccgcctgatcgcgcagcacgcgaaggccaagcagccggtccagcgcctgtggctgcaatcgatgacgccgcaggcgatccgcgacggtttcgcgaacctgcgcagcgactccgacatgcagccgcttgccgacgccgcacgctgccgctcggaagccgactggctcgtcgggatcaacggcacccgcgcgatgaccgcgttcaacagcaagggcggcggcttcttcctgaccaccgtcggtcgcgttcagacgccaacgttgtcgatcgtcgtcgaacgcgaagagaaaatccgccgcttcatcccgcgcgactactgggaagtgaaagccgaattcgcgtgcgcgggcggcttctacgaaggcaagtggttcgacccgaaattcaagcgcgacgaattcgatccggaaaagcgcgattcccgcctgtggagcctgccggccgccgaaacgatcgtcgccgcctgccgcgaccaggtcggcacggtgtccgaggaatcgaagccgtcgacgcagctgtcgccgctgctgttcgacctgacgagcctgcagcgcgaggcgaacagccgcttcggcttctccgcgaagaatacgctcggcctcgcccaggcgctgtatgaaaagcacaaggtgctgacctacccgcgtaccgacgcgcgcgcgctgccggaagactacctgtcgacggtccagtccacgctcgagatgctcaaggagagccacaactacctgccgcatgccaagcaggtgctcgacaagggctgggtgaagccgaacaagcggatcttcgacaactcgaagatcagcgatcactttgccatcatcccgacgctgcaggcgccgaagtcgctgtccgagccggagcagaagctgtacgacatggtcgtgaagcgcttcctcgcggtgttcttcccggccgccgaattccgcgtgacgacgcgcatcaccgaagtcgccgggcatcacttcaagaccgaaggcaaggtgctcgtcgaaccgggctggctgcaggtgtacggccgcgacgccgaaggcgcggacgcgaacctcgtgccggtgcagaaggacgagaaggtgaaaacggacgaaatcgccgccgtcgcgctcgtgaccaagccgcccgcacgctactcggaagcgacgctgctgtccgcgatggaaggcgccggcaagctggtcgaggacgacgagttgcgcgaggcgatggccgcgaaaggtctcggcacgccggcgacgcgcgcggcgatcatcgaaggcctgctcggagagaagtacctgctgcgcgagggccgcgaactgatcccgaccgcgaaggcattccagctgatgacgctgctgcgcggcctcggcgtgaaggagctcaccgcgcccgagctcaccggcgaatgggaatacaagctgtcgcagatggagcgcggcaatctcggccgcgacgcgttcatgcatgaaatcgtcgcatgacgcagcatatcgtcaagcgcgcgaaggaatacgattccgacacgattcccggcgactacgcaacgctcgagacgccgtgcccgaactgcggcggccaggtgaaggaaaactaccgccgcttcgcgtgcacgaagtgcgacttctcgatctcgaagatcccgggcagccggcagttcgagattccggaagtcgaggagctgctgcagaagaaggaaatcgggccgctgtccgggttccgcagcaagatggggcgcccgttctccgcgatcctcaagctgtccttc

SEQ ID NO: 11313 - DNA, 729 bp, Burkholderia cepacia
atcggagcagggccgggcgccgcggacctcatcacggtgcgcggcatgcggctgctcgagcaggccgacgtcgtgctgcacgacgcgctcgtcgagcccgcgatgctcgactatgcgccgaacgcgcgcaagatcgcggtcggcaagcgctgcgggcagcgctcgaccgcgcagcatttcatcaacaagcagatcgtcgacgcggcgcgcgagcacgcgtgcgtcgtgcggctgaagggtggcgatccgatgctgttcggccgcgccgaagaggaaatgcgcgcgctcgaggcggccggcatcgactacgaggtcgtgccgggcatcaccgcggcgctggccggcgcggcgacgctcaagcgttcgctcacgttgcgcggcgtgtcgcgcagcgtcgcgttcgcgacgcacagccgcgcgccgggcagcgacgagatccgcgaagccgcgcgtgccgattcgatcgtctactacatgggccgcgacagcgcgcccggcatcgcgcaggaactgatcgacgccggccgtgcgcccgcgacgccggtggcgatcgtcgaggcctgcagcaccgcgcgcgaacgcacgctgacgctcacgctcgcgcagatggcggccggcgacgcgcaggcgtggctcgatccggcggaaccgagcctgctgatgatcggcgatgcattcgccgaacgcgcacggctggcgcaggcgggtgctccggtgcgcaatgccgcc

SEQ ID NO: 11314 - DNA, 321 bp, Burkholderia cepacia
atgcagaacacccacgacacgctgttccggacactcgccgatcccacgcgccgcgcgctgttcgagcggctctgcgcggagggcgagctgacggttgccgcgctgaccgcccatgcgggcgtgtcgcagccggccgtgtcgaagcaccttggcgtactgaagcaggccgggctcgtgaacgaccgtcacgaaggccggcagacgcactacagcgcgcagccgcaggcgctggccccgttgatcgactggacgagccagatggcgggcttctggcagcgccggttcgatgccctcgaagatctgctcaaaaggatggatcaa

SEQ ID NO: 11315 - DNA, 621 bp, Burkholderia cepacia
gtggcacgttatatcggccccaaagccaagctgtcccgccgtgaaggcaccgacctgttcctgaagagcgcacgccgctcgctcgccgacaagtgcaagctcgacagcaagccgggtcagcacggccgtacctcgggcgcacgtacgtccgactacggtacgcagctgcgcgaaaagcagaaggtcaagcgtatctacggcgtgctggagcgtcagttccgtcgttacttcgccgaagccgatcgccgcaagggcaacacgggtgaaaacctgctgcaactgctcgagtcgcgcctcgacaacgtcgtgtatcgcatgggcttcggctcgacccgcgctgaagcgcgtcagctggtgagccacaagtcgatcaccgtgaacggcgtcgtcgcgaacgtcccgtcgcagcaagtgaaggcgggtgacgtcgtcgcgatccgcgaaaaggcgaagaagcaggcgcgtatcgtcgaagcgctgtcgctggccgagcaaggcggcatgccgagctgggttgcagtcgatgcgaagaagttcgaaggcacgttcaagcaaatgccggaacgcgctgaaatcgcaggcgacatcaacgaaagcctgatcgtcgaattgtattcgcgt

SEQ ID NO: 11316 - DNA, 728 bp, Burkholderia cepacia
atgacgacccatccggacgcgacacgcgccgcttactacgcacgaatcgccgagcagcgcctggcgccgctgtgggaatcgctgcacaacctcgtgccgacctcgccgcagccggccgcgcaggccgcgatctggaagtacgcacagatacgcgacctcgtgatgcaggccggcagcgtgatcagcgccgaagaagcggtgcgtcgcgtgctggtgctcgagaaccctgggctgccgggcaagtcgagcatgacgccgagcctgtacgcggggctgcagctgatcctgccgggcgagatcgcgccgagccaccgtcatacgcagtcggcgctgcgtttcatcgtcgaagggcgcggcgcgtggacggccgtgaacggcgagcgcacgacgatgcatcccggcgacttcatcatcacgccgtcgtgggcgtggcacgaccacggcaatccgtcggtggaagacggcggcgagccggtcgtgtggctcgacgggctcgacatcccgctgctcgcgcacctcgacgccggtttcgcggagaacttcccggaagccgtgcagccggtgaatcgtccggaaggcgacagcttcgcgcgcttcggtcacaacatggtgccggtgcggcatcgcgtgagcgatccgacgtcgccggtgttcagctatccgtatgcgcgcagccgcgaggcgctcgacgcgctgtaccggaacggcgaactcgatgcgtgggacgg

SEQ ID NO: 11317 - DNA, 1419 bp, Burkholderia cepacia
gtgatcccgcccaccgaattctccgccgaccgcgctgtactcgacgcggtcggcgttgcgctttccggcctgccgcctgatgcgcgcatcgcgatcgcctacagcggcggcctcgattcgaccgtgctgctcgacgcggccgtgcgcgtcgcgggcgcctcgcgctgcgttgcgctgcacgtgcatcacggcctgagcgcgaacgcggacgcctgggtcgcgcatgccgaagcggaagcggcgcgactcggtgtcgcattcgaatcgatgcgcgtcgacgtgccgcgcgacagcgggctcggcatcgaggcgaccgcgcgcgagcgtcgctacgcggcgctcgacgcgatgggcgaacgccacggcgtggcgacgctgtggctcgcgcaacatgcggacgatcaggccgagacggtgctgctgcagctgttgcgcggggcgggaatcgcggggcttgccgcgatggcgccgcgttatcgccccgacggcgtgagtatcgagcgtgtgcgcccgttgctgcgactgttgcgcgcacaactcgagcgctatgcggagcagcatgcgctgacctggatcgatgacgaatcgaacggcgatacgcgctatgcacgcaatgcgctgcgcctcgatgtgctgccggcgctggccgtgcattttccgggttttcgcgatgcgctcggtcgcgcggcccagcatgcggccgccgcgcagcggctgctcgacgatctggccgagctggatttcgccgtcgccgcgcgcgacgacgggcgagcgctgtcgcgcgacgcgctggtcggattcgacgatacgcgcggtgcgaatctgctgcgcttctggatgcgccggctcggtttgccgggcgcgtcggctgcgcggctcgccaacatgatgcggcaactgcgtgccgcgcacgacgcgcatgcgctgcgcgtcgatcacgcggggcagtgcctgaggctctatcgcgatgtcgtgtactgggaagcgggcgacagcagcgaaccggccgacgacggcaccggtacgccgcacccggaggcggcgcttgcatgggacgggcaggaagtgtggcatctgccgggatggcgcggcacgttcgtgttcgcgccggccgacgcggggagcgccgatgcggtaccggaggcgctgctgcgcggtgcgcggctggctgcgcgcgcccgggcgggcggcgaacggatgcgtacgtcgccgggcgggccgggccggacgctgaagaacctgttccaggagcgcggcgtgccggcctggcagcgcgacgtgccgctgctgttcgcgggcgaccggctgatctacgtgccgcggctgggcgtcaatcgcgacatcgacgtgcctgacggcgcgacgtccggcgccgccgcatggcgccggatcgaatggcgtcccgacctgctgatcgcg

SEQ ID NO: 11318 - DNA, 975 bp, Burkholderia cepacia
atgcaaaccagtttgctgaaacccaagatcatcgccgtggaatcgctgggcgagaaccacgcgagggtggtcatggaaccgttcgaacgcggttacggccacaccttgggcaatgcgcttcgccgcgtgctgctgtcgtcgatggtaggctacgcgccgaccgaagtcacgatcgcaggcgtggtgcacgagtactcgacgctggatggcgtgcaggaagacgtcgtcaacctgctgctgaacctgaagggcgtggtgttcaagctgcataaccgtgacgaagtgacggttacgctgcgcaaggaaggcgaaggcgtcgtgacggccggcgatatcgagctggctcacgattgcgaagtcatcaacccgaatcacgtgattgcgcacctgtcgaagggtggcaagctcgacgttcagatcaagatcgaaaagggtcgcggctacgtgcccggcaacgtccgtcgctacggcgaagacacggccaagatcatcggccgcatcgtcctcgacgcctcgttctcgccggttcgccgcgtgagctacgcggttgaaagcgcacgtgtcgagcagcgtaccgacctcgacaagctcgtgatgaacatcgagacgagcggcgtgatcacgccggaagaagcgatccgccagtcggcccgcatcctggtcgaccagctgtccgtgttcgcggcgctggaaggcacggaaacggcagccgaagcgccgtcgcgtgcaccgcagatcgatccgatcctgctgcgtccggtggacgatctcgagctgacggttcgttcggcgaactgcctgaaggccgagaacatctactacatcggcgatctgatccagcgcacggaaaacgagctgctgaagacgccgaacctcggtcgcaagtcgctcaacgagatcaaggaagtgctcgcttcgcgcggtctcacgctgggcatgaagctcgagaactggccgccggctggtctcgacaag

SEQ ID NO: 11319 - DNA, 868 bp, Burkholderia cepacia
ttcgaaatgctggaaaccgagaccaacggcaccatcatcaaggtggtcggcgttggcggcgctggcggcaatgccgtccagcacatgatcaaccgcggcgtgcagggcgtcgacttcatcgtgatgaacacggacgcccaggcgctgtcgcgttcgcgcgcatcgtcggtgatccagctcggcaacacgggtctgggcgccggtgcgaagccggaaatgggtcgtgcggcggcggaagaagcgcgtgagcgcatcgccgacgcactgcgcggcgcgcacatggtgttcatcacggccggcatgggcggtggcacgggtacgggcgcggcgccggtggtcgcgcagatcgcgaaggagatgggcattctgacggtcggtgtcgtcagcaagccgttcgagttcgaaggcggcaagcgcatgcgcgtcgccgaagcaggctcgcagcaactggaggatcacgtcgactcgctgatcgtcgtgctgaacgacaagctgttcgacgtgatgggcgacgacgccgagatggacaagtgcttccagtgcgcggacgacgtgttgaacaacgcggtggcaggcatcgcggaaatcatcaacgtcgacggcctcgtgaacgtcgacttcgaagacgtgaagacggtgatgggctgagcagggcaaggcgatgatgggcacggcgacggtcgccggcgtcgatcgcgcgcgcctcgcggcggaacaggccgtggcgagcccgctgctcgaaggcgtcgatctgtcgggcgcgcgcggcgtgctggtcaacatcacgtcgagccgttcgctgcgtctgtcggaaacgccccaagtgatgaacactatcaagagctacgccgcgctaaatgctactggg

SEQ ID NO: 11320 - DNA, 2592 bp, Burkholderia cepacia
atgcacgagagatacgtacccgccgacgtcgaagccgccgcccagggcgactggcgcgcagccgatgcctacaagacgaaggaagattcgcagaagccgaagttctactgcgtatcgatgctgccgtacccgtccggcaagctgcacatgggtcacgtgcgcaactacacgatcaacgacgtgatgtaccgctatctgcggatgaacggctacaacacgctgatgccgatgggctgggacgcgttcgggatgccggccgagaacgccgcgatggcgaacggcgtgccgcccgcgaagtggacctacgacaacatcgactacatgaagggccagatgcagtcgatgggtctcgcgatcgactggtcgcgcgaaatcgcgacgtgcaagcctgactactacaagtggaaccagtggctgttcctgaagatgctcgagaagggcatcgcgtacaagaagacgggcaccgtgaactgggacccggtcgaccagaccgtgctcgcgaacgagcaggtgatcgacggccgcggctggcgctcgggcgcgctcgtcgagaagcgcgagatccccatgtactacctgcgcatcacgcagtacgcggatgagctgctgaacgatctcgacggcctcggctggcccgagcgcgtgaagatcatgcagcagaactggatcggcaagagcttcggcgtgaacttcggcttcccgtatgaactcgacggcgagcagaagctgctgcgcgtgttcacgacgcgcgccgacacgatcatgggcgtcacgttctgcgccatcgcggccgagcacccgctcgccacgcgcctcgcgcaggacaagccggaactgctcgcgttcatcgaggaatgcaagcgcggcggcgttgccgaagccgacgtcgcgacgatggagaagaagggcgtcgcgaccggcttctcggtcaagcacccgctgaccggcgagccggtcgaggtgtggatcggcaactacgtgctgatgagctatggcgaaggcgcggtgatgggcgtgccgggccacgacgagcgcgatttcgcgttcgcgaagaaatacgacctgccgatcaagcaggtgatcgcgagcgaggggcagacgtactcgctcgacgcatggcaagagtggtacggcgacaaggaaaccgcggtctgcgtgaacagcggcaagtacgacggcctgcgctacgcggaagcggtcgacgcggtcgcggccgacctgaaggccggcggcttcggcgacaagcaggtcacgtggcgcctgcgcgactggggcgtgtcgcgccagcgctactggggcacgccgatcccgatcatccactgcccgtcgtgcggcgacgtgccggtgccggagcaggatctgccggtcgtgctgccggaagacctcgtgccggacggcacgggcaacccgctcgcgaagtccgaagcgttcctgaactgcacgtgcccgacatgcggcgcggcggcgaagcgcgaaaccgacacgatggacaccttcgtcgattcgtcgtggtacttctcgcgctacacggcgccggacgccgagaccatggtcgacgcgcgcaccgattactggatgccgatggaccaatacatcggcggcatcgagcacgcgatcctgcacctgctgtattcgcgtttctggaccaaggtgatgcgcgacctcggcctcgtgaagttcggcgagccggcgaagaacctgctcacgcaggggatggtgctgaacgagacgtactaccgcgaggacgcggcaggcaagaagacctggtacaacccgctcgacgtgacggtcacgcacgacgacaagggtcgcccggtcggtgcgacgctgaacgcggacggccagccggtcgtgctcggcggcatcgagaagatgtcgaagtcgaagaacaacggcgtcgatccgcaactgctgatcgaccagtacggcgccgataccgcgcgcctgttcacgatgttcgcggcaccgcccgagcagcagctcgagtggtcgggcgcgggcgtcgaaggcgcgagccgcttcctgcgccgcgtgtggagcttcggctacggcaaccgcgaagcgctcgccgcgcgcgccgggttcgacgccgcgacgctcggcgacgccgacaaggcgctgcgccgcgagatctacagcgtgctgaagcaggccgatttcgactaccagcgcctgcagtacaacacggtcgtgtcggccgcgatgaagatgctgaacgcgatcgacggcgcgaagggcgcgacgcccgccgtgctgcgcgagacgtacggcgtgctgctgcgcgtgctgtacccggtcgtgccgcacgtcacgttcgagctgtggaaggcgctcggctacgcggacgaattcggcccgctgctcgatgcgccgtggccgaaggtcgacgaggccgcgctcgagcaggccgagatcgaactcgtgctgcaggtgaacggcaaggtgcgcggtgcgctgaaggtcgcgaaggatgcgagccgcgacgcgatcgaagcggcggcggtcgccgacgaggcattcgcgaagttcagcgacggcaagccggcgaagaagatcgtcgtcgtgccgggccgcctcgtgaacatcgtcgtc

SEQ ID NO: 11321 - DNA, 966 bp, Burkholderia cepacia
gtgcgcgccgtccgaatcgattcaattggggacgatatgaaatttgcattcgtttttccggggcagggctcgcaggcgatcggcatgctcaacgcattcgccgatctggccgtcgtgcgcgagacgctccaggaagcatccgatgcactcaatcaggatctcggcaagctgatcgccgaaggcccggccgaagagctgaacctgaccaccaacacgcagcccgtgatgctgaccgcggcgtatgcgtgctaccgcgcgtggcagcaggcaggcggcccggcgccgtcgatcgtcgccggccacagcctcggtgaatacacggcgctcgtcgcggccggcgcacttgcgttcaaggatgcggtgccgctcgtgcgctttcgtgcacaggcgatgcagacggccgtgccggtcggccagggcggcatggccgcgatcctgggcctcgacgacgacacggtgcgcgcggtatgcgcggaagccgcggaggcgggcgtcgtcgaagcggtgaacttcaatgctccggcgcaggtcgtgatcgcgggcagcaaggccgcggtcgaaaaggcatgcgagatcgcgaaggcgaagggcgcgaagcgcgcgctgccgctgccggtgtcggcgccgttccattcgtcgctgctcaagccggcgtcggaccagctgcgcgactacctcgcgaacgtcgacgtgaaggcgccgcagattccggtcgtcaacaacatcgacgttgccgtggtcagcgatccggccgcgatcaaggatgcgctggtgcgccaggccgcgggcccggtgcgctgggtcgagtgcgtgcggcatatcgccggcacgggcgtcacgcacgtgatcgaatgcggtccgggcaaggtgctggccggcctgacgaagcgcatcgatggcaacctgacgggtgcgtcggtgttcgatccggcttcgctcgacgaagcgctcaagctcgcgaccgcc

SEQ ID NO: 11322 - DNA, 825 bp, Burkholderia cepacia
atgtcgcaacaacttcagcaaatcatcgataccgcctgggaaaaccgcgccgagctgtcgccgaaggccgcgcccgccgacgtccgcgaagccgtcgctcacgcgatcgagcagctcgacaagggcgccctgcgcgtcgccgagaaaatcgacggcaactggacggtccaccagtggctgaagaaggccgtgctgctgtcgttccgcctggaggacaacgcgccgatgccggccggcggctactcgcagttctacgacaaggtgccgtcgaagttcgcgaactacacggccgaagacttcgccgcgggcggcttccgcgtcgtcccgccggccatcgcgcgccgcggctcgttcatcgcgaagaacgtcgtgctgatgccgtcgtacaccaacatcggcgcgtacgtcgacgaaggcacgatggtcgacacgtgggccacggtcggttcgtgcgcgcagatcggcaagaacgtgcacctgtcgggcggcgtcggcatcggcggcgtgctcgagccgctgcaggcgaacccggtcatcatcgaggacaactgcttcatcggcgcgcgctcggaagtcgtcgaaggcgtgatcgtcgaggaaaactcggtgatctcgatgggcgtgtacctcggccagagcacgaagatctacgatcgcgagacgggcgaagtcagctacggccgcatcccggccggctcggtcgtcgtcgccggcaacctgccgtcgaaggacggctcgcacagcctgtactgcgcggtgatcgtcaagaaggtcgacgcgaagacgcgtgcgaaggtcggcctgaacgagctgctgcgaggcgac

SEQ ID NO: 11323 - DNA, 1359 bp, Burkholderia cepacia
atgcgcgccacgcgggagcgtcccatgccccacaaggaaggcagtctcgaagcgccgacccggcatccgctcgactggcagtccgaagcgttctacgaccaggccgcgatcgatgcggaaatgacccgcgtattcgacatctgcgccggctgccggcgctgcgtgtcgctgtgcggcgcgtttccggcgctgttcgacctggtcgacgacacgccgacgggcgacatcgaggaagtgccgaaggccgcgttcggcaaggtcgtcgaccagtgctatctgtgcgacctctgctacatgacgaaatgcccgtacgtgccgccgcacgcgtggaacgtcgatttcccgcacctgatgctgcgcggcaaggccgcgcgttacaaacgcggcgaagcgacgttgcgcgacaaggtgctgtcgaataccgatgcgctcggccatttcgcgggcattccggtcgtcacgcaggcggtcaacgcggtgaaccgcacgccgcccgcgcgccacgcgctcgaagcggcgctcggcgtcgatcgtcatgcgtggctgccggaattcgcgccgcgcaagttccggcgcgccgccagacgttcggacaacccgcccgtgcgcgacggcgaacgcacgcccggcaaggtcgcgatctatgcgacctgctacgtgaatttcaacgagccgggaatcggccacgacctgctcgcgatcctcgcgcacaacgagatcccgtacgaactcgtcgcgcgcgaagcgtgctgcgggatgccgctgctcgagcagggcaatctcgacggcgtcgccgcgaagcaggccgtcaacatcccggtgctcgaacgctacgcgcgcgacggctatgcgctgatcggcgcgattccgagctgcgtgctgatgtacaagagcgagctgccgctgatgttccctgatgacgcagccgtgcgcgcggtggccgacgcgttctgggacccgttcgaatacgtgatcgcgcggcatcgcgacgggctgctgaagaccgatttcaagaccggcctcggcaccgtgtcgtatcacgtgccgtgccatgcgcgcgtgcagaacatcggccgcaagacggccgatgcgctgtcgctcgtgcccgatacgcgcgtgaacgtggtcgagcgttgctcgggccacgcgggcacgttcggcgtgaagaaggcatttcatgcggaggcgatgcggatcggcgcgcccgtgttcaaggcgatggccgagccgcagccggacgtcgtgtcgtccgactgcgcgctcgccggccatcacatcgtgcagggcatcgacgaaaaggggctgccgcacgcgccgctcgcgcatccgttgacgctgctgcgccgcgcgtacggcatc

SEQ ID NO: 11324 - DNA, 258 bp, Burkholderia cepacia
gtggcgttcaggctcaaagttgttcagcacatgcgcgagcatggcgtgtcgagcaaggaagcggcggcgcggttcaatattcgcaatccgagcgcggtgctcgaatgggctcgccgctatgatgatggtggtttgactgccctcgcgccgaggcccaaaggccgccgcccaaccgcaatgccaaaaacaccgcctgctcagcctctgaaccctaccgatggcacggatacccgtacccgcgaggacctgcttcaggaa

SEQ ID NO: 11325 - DNA, 777 bp, Burkholderia cepacia
atgttcgtcgactctcactgccacatcaatttcaagggcctggccgaccgcctgccggccgttctcgagaacatgcgcgagcacgacgtcacccacgcgctgtgcgtgtcggtcgatttggagacgctgcccgacgtgctcgcgatcgccgaagcgcacgacaacgtgtacgcgtcggtcggcgtgcatcccgatcacgaggacatgcgcgagccgacgctcgcggagctcgtcgagctggccgcgcacccgaaggtcgtcgcgatcggcgaaaccggcctcgactattaccgtctcgaaggccgctcgatcgccgacatggaatggcagcgcgaccgctttcgcacgcacatccgcgcggcgaccgcgacgatgaagccgctgatcatccatacgcgttcgtcgtcggaagacacgctgcggatcatggccgaggagcgcgcggacgtgccgggcggcgtgatgcactgcttcaccgagccgtggccggtcgccgagcaggcgctcgcgcagaacttccatatctcgctgtcgggcattgtcacgttcaagaacgcgaccgacgtgcaggacgtcgcgcggcgcgtgccgctcgaccggctgctgatcgagaccgactcgccgtacctcgcgccggtgccgtatcgcggcaagccgaatgaacctgcgtacgtcagccatgtcggacgctttatcgcatccgagcgcgggatcgccgtcgaggcgctcgcggatgcgacgacgcagaactttttccggctgttcaagatcgcccgc

SEQ ID NO: 11326 - DNA, 1950 bp, Burkholderia cepacia
atgggaaagatcatcggtattgacctcggcaccacgaactcgtgcgtcgccatcatggaaggcaaccaggtcaaggtcatcgagaactcggaaggtgcgcgcaccacgccgtcgatcatcgcgtacatggacgacaacgaagtgctcgtcggcgcgccggccaagcgccagtcggtgaccaacccgaagaacacgctgttcgcggtgaagcgcctgatcggccgccgcttcgaagagaaggaagtccagaaggacatcggcctgatgccgtactcgatcatcaaggccgacaacggcgacgcatgggtcgaagcgcacggcgaaaagctcgcgccgccgcaggtctcggccgaagtgctgcgcaagatgaagaagaccgccgaagactacctcggcgagccggtcacggaagccgtgatcacggtgccggcgtacttcaacgacagccagcgccaggcgaccaaggacgccggccgcatcgcgggcctcgaagtcaagcggatcatcaacgagccgaccgcggcggcgctcgcgttcggcctcgacaaggccgagaagggcgaccgcaagatcgccgtgtatgacctcggcggcggtacgttcgacgtgtcgatcatcgagatcgcggacgtcgacggcgaaatgcagttcgaagtgctgtcgaccaacggcgacacgttcctcggcggcgaagacttcgaccagcgcatcatcgattacatcatcggcgagttcaagaaggagcagggcgtcgacctgtcgaaggacgtgctcgcgctgcagcgcctgaaggaagccgccgaaaaggcgaagatcgagctgtcgtcgggccagcagaccgaaatcaacctgccgtacatcacggcggacgcgtcgggcccgaagcacttgaacctgaagatcacccgcgcgaagctggaagcgctggtggaggatctcgtcgagcgcacgatcgaaccgtgccgtatcgcgatcaaggacgcaggcgtcaaggtgtcggacatcgacgacgtgatcctggtcggcggccagacgcgcatgccgaaggtcatggagaaggtgaaggagttcttcggcaaggatccgcgccgtgacgtgaacccggacgaagccgtcgcggtcggcgcggcaatccagggccaggtgctgtcgggcgaccgcaaggacgtgctgctgctcgacgtgaccccgctgtcgctcggtatcgagacgctcggcggcgtgatgacgaagatgatcaacaagaacacgacgatcccgacgaagcacgcccaggtgtactcgacggcggacgacaaccagggcgccgtgacgatcaaggtgttccagggcgaacgcgaaatggcagcgggcaacaagctgctcggcgagttcaacctcgaaggcatcccgccggcaccgcgcggcgtgccgcagatcgaagtgaccttcgacatcgacgcgaacggcatcctgcacgtcggcgcgaaggacaaggcgaccggcaaggaaaacaagatcacgatcaaggcgaactcgggcctgtccgaggctgaaatcgaccagatgatcaaggacgcggaagcgaacgcagcggaagatcacaagctgcgcgagctggccgattcgcgcaaccagggcgacgcgctggtgcacagcacgaagaaggcgctgaccgagtacggcgacaagctggacgcgggcgagaaggaagcgatcgaagccgcgctgaagtcgctcgaggacgtgttgaaggacacgtcggccgacaaggcggcgatcgacgcgaaggtcgaggagctcggcaaggtctcgcagaagctcggcgagaagatgtacgccgacatgcaggcccagcaggcaggtgccgccggcgcggccggtgcagcggaaggcgcggcccatgcgggcggtgcgcaacaggctgccgacgacgtcgtcgacgccgagttcaaggaagtgaagaaggac

SEQ ID NO: 11327 - DNA, 704 bp, Burkholderia cepacia
agcgaccagttacagaaattcatgttcaatgcggcgcccgtgcgtggcgagatcgtttcgctgcgcaacacgtggcaggaagtgctcgcccgccgcgactaccctgccccggtgcgcacggtgctcggcgagatgatggccgcgtgcgcgctgctgtccgcgaacctgaaatttcacggcaccctgatcatgcagatcttcggcgacgggccggtccagatgctggtcgtccagtgcgggtccgatctgtcgatgcgggccaccgcgaagttctccggcgacgccgcgcagacgatcggcgacgacacgagcttcgcggcgctcgtcaacgcaagcggccacggccgctgcgtgatcacgctcgatccggccgacaagctgccgggccagcagccgtaccagggcatcgtgccgctgaacggcgtcgacggcccgctcgaatcggtgtcgcaggtactcgagcactacatgcaccactcggagcagctcgacacgcggctgtggctcgcggccgatcgcgaccgcgcggtcggcatgctgctgcagaagctgcctggcgacggcggcatcgtgccgcgcaacgccgaaaccgatatcgacacgtgggaacgcgtgtgcacgctcggcggcacgctgtccgcgaaggagctgctcgaggtcgaaccggaagtcgtgtccgccggctgttctggcaggaaaacgtg

SEQ ID NO: 11328 - DNA, 1105 bp, Burkholderia cepacia
atggaagcggaacgtctcaacgcgatcgaaagctccctgctcgacctgcgcaatcgcgcgggcgagcttcgggggtatctttgactacgacgccaaagctgcgcgtctgaccgaagtcaacaaggaactcgaagacccgaacgtctggaacgattcgaagaacgcccaggcgctcggccgcgagaagaagctgctcgaaggcgtcgtcacgacgctcaccgcgctcgatagcgacctgcgcgacgcgctcgacctgttcgagctggcgcgcgaggaaggcgacgaggacacgcttctcgcgtcggaagaagacgccgcgaagctcgaagcacgcgtcggcgacatcgagttccgccggatgttctcgaacccggccgatccgaacaactgcttcatcgatatccaggccggcgccggcggcaccgaggcatgcgactgggcgtcgatgctgctgcgccagtacctgcgctactgcgagcgcaagggcttcaaggccgaagtgctcgaagagtccgacggcgacgtcgccggcatcaagaacgcgacggtcaaggtcacgggcgaatacgcgtacggcttcctgcgcaccgaaacgggcatccaccgcctcgtgcgcaagtcgccgttcgactcgtcgggcggtcgccacacgtcgttctcgtcggtgttcgtctatccggaaatcgacgactcgatcgaagtcgagatcaacccggccgacctgcgcatcgacacgtaccgcgcgtcgggcgcgggtggccagcacatcaacaagaccgactccgcggtgcggatcacgcacatgccgaccggcatcgtcgtgcagtgccagaacgaccgctcgcagcaccgcaaccgcgccgaagcgatggcgatgctgaaatcgcgcctgtacgaagtcgaaatgcgcaagcgccaggccgagcaggacaagctcgaatcgagcaagaccgatgtgggctggggccaccagatccgctcgtacgtgctcgaccagagccgcgtgaaggacctgcgcacgaacgtcgaaatgagcaacacgcgggcggtgctcgacggcgatctcgacgacttcatcagcgcgagcctcaaacagggcgtgtaa

SEQ ID NO: 11329 - DNA, 1524 bp, Burkholderia cepacia
atgaacccgtttgacctgaagcaactgggcctcgacgtcgaatacccgtaccgtcagcaatacgacaactacatcggcggcaagtgggtggcgcccgtgaagggcgagtatttcgagaacgtgtcgccgatcaacggccagccgttctgccgcatcccgcgctccggcgccgacgacatcgagctggcgctcgacgccgcgcatgccgcgcgccgcaagtggggcaagacgtccgtcgccgagcgcgcgaacttgctgctcgccgccgccgaccggatggaaaagaacctgaagctgctggccgtggccgagacgatcgacaacggcaagccgctgcgcgagacgatggcggccgacctgccgctcgcgatcgaccacttccgctatttcgcgggctgcatccgcgcgcaggaaggcggcatctccgaaatcgacgacaacaccgtcgcgtaccatttccacgagccgctcggcgtggtcggccagatcatcccgtggaacttcccgctgctgatggccgcgtggaagctcgcgccggcgctcgcggccggctgctgcgtggtgatgaagccggccgagcagacgcccgcgtcggtgctcgtgctgatggagctgatcggcgacctgttcccggccggcacgatcaacatcgtgaacggcttcggcaaggaagcgggcgaagcgctcgcgaccagcaagcggatcgcgaagatcgcgttcacgggctcgacgccggtcggcaagcacatcctgcgcgcggcggccgacagcctgatcccgtcgacggtcgagctgggcggcaagagcccgaacatcttcttcgccgacgtgctcgaccaggacgacgcgttcctcgacaaggcgctcgaagggctcgcgatgttcgcgctgaaccagggcgaggtgtgcacgtgcccgtcgcggatcctgatccaggaatcgatctacgaacgcttcatcgagaaggccgtcgcgcgcgtcgagcgcatcaagtccggccacccgctcgacctgcagacgatgatcggcgcgcaggcgtcgcagcagcagctcgacaagatcctgtcatacatcgacatcggccgcggcgaaggcgcgcaatgcctgacgggcggcgagcgcgcggcgccggccgccgacctcggcacgggctactacgtgaagccgacgatgctgctcggcaacaacaagatgcgcgtgttccaggaggagatcttcgggccggtcgcgtcggtgatgacgttcaaggacgagcaggaagcgatcgaactcgcgaacgacacgttctacgggctcggcgccggcgtgtggacgcgcaacggcacgcgtgcgtaccggatgggccgcgaggtcgaggccggccgcgtgtggaccaactgctaccacctgtaccccgcgcatgcggcgttcggcggctacaagcagtcggggatcggccgcgagacgcacaagatggcgctgtcgaactatcagcagacgaagtgcctgctggtcagctaccaggccgaggcgctcgggttcttc

SEQ ID NO: 11330 - DNA, 1131 bp, Burkholderia cepacia
atgctcgatttcgactattcgctgctgtgggtcgcgatcgcgctgctggggctcggcgtcgtgatggtgtattcggcgtcgatcgcgatgcccgattcgccgaaatacgcgtcgtatcacgactacgcgttcctgatgcgccactgcgtgtcgctcaccgtcgcgttcatcgcggcggttctcgcgttccgcgtgccggtgtcgacctgggacaagtacgcgccgcatcttttcctgatcgcactggtcggcctcgtgatcgtgctgatcccgcatgtcggcaagggcgtgaacggtgcgcgccgctggattccgctcggcatcaccaacatgcagccgtcggaaatcatgaagctcgcggtgacgatctacgcggcgaactacacggtgcgcaagcaggaatacatgcagagcttcgcgaagggcttcctgccgatggcgttcgcggtcggcctggtcggcgcgctgctgctgctcgagcccgacatgggcgcgttcatggtggtcgccgcgatcgcgatgggcgtgctgttcctcggcggcgtgaacggcaagctgttcggcggcctcgtcgcgacggcggtcggcacgttcacgatgctcgtgtggctgtcgccgtggcgtcgcgagcggatcttcgcgtatctcgatccgtgggacgagcgctatgcgcagggcaaggcctaccagctcacgcactcgctgatcgcgtttggccgcggcgagtggttcggcgtcggcctcggtggcagcgtcgagaagctgaattacctgccggaagcgcataccgacttcatcctcgcggtgatcggcgaggagctcggcttcgtcggcgtgctggtcgtgatcctgctgttctactggatcgtgcgccgcgcgttcgagatcggccgtcaggcgctcgcgctcgatcgcacgttcgcgggcctgatggcgaagggcatcggcatctggttcggcgcgcagacgttcatcaacatgggcgtgaatctcggcttgctgccgaccaagggcctgacgctgccgctcgtgagctacggcggctccggcatcctgctgaactgcgtcgcgctcgcggtgttgctgcgggtcgactacgagaaccgggtgctgatgcgcggagggaaggta

SEQ ID NO: 11331 - DNA, 1473 bp, Burkholderia cepacia
atgacgaatcagccttcccagaccgcggccgaccggcccgtcgacatgatcatcttcggcggcggcggcgacctggccgcccgcaagctgttgcccgcgctgtacatggcgcacctgcactgcaatcttccgcccgagacgcgcatcatcgccgtcggccgccgcgactggggcatcgacggttatcgcaagttcatggacgagcagtcgcgcccgttcatcgacgagaaggcgttcgacgccgacgcgtggagccgcttcctcgacctgttcaagtacgtgctgatcgacgtgaacgcgccggacgactaccagcggctcgccgaagcggcgcggagcgaggcggtccgcgtgttctacctgtcgacgtcgccggagctgttcacgacgatctgcgacaacctgtcggccgcgcacctcgtcgacgcgcactcgcgcgtcgtcctcgaaaagccgctgggccacgatctcgcgtccgcgaaggcgatcaacgacgcggtcggcaagcacttcgaggaatcgcagatctatcggatcgaccactatctcggcaaggaaaccgtgcagaacctgatggtgctgcgcttcggcaacccgatcttcgggccgctgtggcaggcgccgaacatccgcagcgtgcagatcacggtggcggagacggtcggcgtcggcagccgcgcgggcttctacgaccataccggcgcgctgcgcgacatggtgcagaaccacctgctgcaactgctgtgcatcgtcgcgatggagccgcccgtgtcgctcgacccggatgcggtacgcgacgagaagctgaaggtgctgcgctcgctgcggccgatgtcgctgtcggacgtcgcgcgcgacacggtgcgcggccagtacacggccggcgcggtcgacggccagccggtcaagggctatctcgaggaggacaacgtgccggcggacagccgcgcggaaaccttcgtcgcgctgcgcgcgcacatcaacaactggcgctgggcgaacgtgccgttcttcctgcgcaccggcaagcggctgcagcgccgccagtcggaaatcgtgatcgagttcgcggacatgccgttctcgatcatcccgaccggtccgcgcaattacggcaaccgcctcgtgatccggctccagccggaagagtcgatccagttgcagatgctcgcgaaggagccgggcagcgggatgaatatggtgccggtgagcctgaacctcgacctgcagcaggcgattccggaacggcgcgcggaagcgtacgagcggctgctgatcgacgtgatccgcggccgcctcacgcacttcatgcgccgcgacgaactcgaagccgcgtggtcgtgggtcgagccgatcctcgacggctggaagcagctcggcgaccggccgcgcctgtacacggccggcacgttcgggcccgcggcttcgtcggcgctgctcgcgcgcgacgggatgtcgtgggccgaagaggcg

SEQ ID NO: 11332 - DNA, 939 bp, Burkholderia cepacia
atgacgcacgcatcgcccgcttcatccccccgtcgcgccgcccgcctggcggccgttgccgcgctcgccgtcgcggccctgttgcccgccgccgcgcatgccgcgccgctgcggatcggcatgacgttccaggaactgaacaacccgtatttcgtgacgatgcagaaggcgctgaacgacgcggccgcatcgatcggcgcgcaggtcgtcgtcaccgacgcgcatcacgacgtcagcaagcaggtgagcgacgtcgaggacatgctgcagaagaagatcgacatcctgctcgtgaacccgaccgattcgaccggcatccagtcggcgatcacgcaggcgaagaaggccggcgcggtcgtcgtggcggtcgatgcgaacgcgaacggcccggtcgattcgttcgtcggctcgaagaattacgacgcgggcgtgatgtcgtgcgaatacctcgcgaaggcgatcggcggcagcggcgaggtcgcgatcctcgacggcattccggtcgtgccgattctcgagcgcgtgcgcggctgcaaggccgggctcgcgaaattcccgaacgtgaagctcgtcgacacgcagaacggcaagcaagagcgcgcgaccgcgctgtcggtcaccgagaacatgatctccgcgcatccgaacctgaagggcctcttcagcgtgaacgacggcggctcgatgggcgcgctcgccgcgatcgagggttccggcaaggacatcaagctgacgagcgtcgacggcgcgcccgaggcgatcgccgcgatccagaagccgaactcgaagttcatcgagacgaccgcgcagtttccggccgaccaggtgcgcatcgcgctcggcatcgcgatcgcgcgcaagtggggcgcgacggtgccgaaggcgattcccgtcgacgtgaaggtcgtcgatcgcggcaacgcgaagggtttcagctgg

SEQ ID NO: 11333 - DNA, 435 bp, Burkholderia cepacia
atggacgcgcgccggccgaacagggatcattcggggaatccgggccggcgcgcccgcgaaaccggtacactcggcgccgggcgcgcgccggatcggcattcggcggcggcccgccgccgacccagaaatcgtgatcccatgaccacaccgatctatcaggaaatcaaggacttcatcctcgcgcgcattcatgccggcgaatgggcggaaggcgaccaggtgccgtcggagaacgagctcgcacgcgaattcaacgtcgcgcggatgaccgtcaaccgcgcgctgcgcgagctgacggccgaacaggtgctcacgcgcacgcgcggctccggcacgtatgtcgcgtcaccgaaatacgaatcgacgctggtcgcgatccgcagcatctccgacgaagtcgccgcgcgcggccacggctatcgcgcgcaggtgctg

SEQ ID NO: 11334 - DNA, 793 bp, Burkholderia cepacia
gtgcgccgggcgtcgtattgtcttttttcgctcgatcccacggtgattccgcattcgttcctgcaggatttgctgaaccgcgtcgatatcgtcgacgtggtgggtcggtacgtgcagctcaagaagggcggcgccaacttcatggggttgtgcccgttccataacgagaagagcccgtcgtttaccgtcagtccgaccaagcagttctatcactgcttcggttgcggcgcgcacggcacggcgatcggcttcctgatggaacatgcggggctcacgttcccggaggccgtgcaggaactcgcgcagtccgtcggcctgaccgtgccgcacgagccgtcgatgcgcggcggcggtgggggcggcggcggtggcggcgactatccggcgcccgtgtcgaaatcggtggcgaccgcgctgtccgacgcgatgacggcggcgtgcgactactatcgcaagcagttgcgcggcgcgaccgttgcgatccagtacctgaagaaccgtggcctgaccggcgagatcgccgcgcgcttcgggctcggctatgcgccggacggctggcagaacctcgaggccgcgttcccggattatcgcgacgagtcgctcgtcgaggcggggctcgtgatcgtcagcgagaaaaccgacgcgcagggcgtcgcgcgccgctacgaccggttccgcgagcggatcatgttcccgatccgcaacgtgaaggggcaggtgatcgggttcggcggccgcgtgctcggcagcggcgaaccgaagtacctgaactcgcccgaaaccccgctgttca

SEQ ID NO: 11335 - DNA, 2883 bp, Burkholderia cepacia
atggaacagatccgtatccgtggggcacgcacccacaacctgaaaaacgtcaatctcgacctgccgcgccacaagctggtcgtgattaccgggttgtccgggtcgggcaagtcgtcgctcgcgttcgacaccctttatgccgaaggccagcgccgctacgtggaaagcctgtccgcgtacgcccgccagttcctgcagttgatggagaagcccgacgtcgacctgatcgaggggctgtcgccggcgatctcgatcgagcagaaggccacgtcccacaacccgcgttcgaccgtcggcacggtcacggaaatccacgactacctgcgacttttgtacgcacgtgtcggcacgccgtactgccccgaccacgacatcccgctcgaggcgcagagcgtgtcgcagatggtcgacgcggcgctcgcgctgcccgaggaaaccaagctgatgatcctcgcgcccgtcgtcgcgaaccgcaagggcgagcacgccgagctgttcgaggacatgcaggcgcagggcttcgtgcgctttcgcgtgcgctcgggcggcggcgccgcgaacgaaggcgtcgcgaagatctacgaggtcgagtcgctgccgaagctgaagaagaacgacaagcacacgatcgacgtcgtcgtcgatcgcctgaaagtgcgcccggacatgaagcagcggctcgccgaatcgttcgaaaccgcgctgcgcctggccgacggccgcgcgatcgcgctcgagatggataccgatcacgagcacctgttcagctcgaagttcgcgtgcccgatctgctcgtactcgctgcaggagctcgagccgcgcctgttctcgttcaacaacccgatgggcgcgtgcccggaatgcgacggcctcggccagatcacgttcttcgacccgaagcgggtcgtcgcgcacccgtcgctgtcgctggccgcgggcgcggtgaagggctgggaccgccgcaaccagttctacttccagatgctgcagagcctcgcggcgttctacgagttcgacatcgacgccgcattcgaggatctccccgaaaagatccgcaaggtgctgctgttcggctcgggtaagcagacgatcccgttctcgtacatcaacgagcgcggccgcacgacgatccgcgagcacgtgttcgaagggatcatcccgaacctcgagcgccgttaccgcgagaccgattcggtcgcggtgcgcgaagagctgtcgaagtaccagaacaaccagccgtgcccgtcgtgcgacggcacgcgcctgcgccgcgaggcgcgccacgtgcggatcggcaccggcgactacgcgcgcggcatctatgaaatcagcggctggccgctgcgcgacgcgctcggctacttcgacgggctgacgctcgacggcgcgaagcgcgagatcgccgacaaggtgatcaaggaaatcgtcgcgcgcctgacgttcctgaacaacgtcggcctcgactacctgtcgctcgagcgcagcgccgagaccttgtcgggcggcgaggcgcagcgcatccggctcgcgtcgcagatcggctcggggctcacgggcgtgatgtacgtgctcgacgagccgtcgatcggcctgcaccagcgcgacaacgaccgcctgatcgcgacgctcaagcacctgcgcgacctcggcaactcggtgatcgtcgtcgagcacgacgaggacatgatccgcacggccgactacgtggtcgacatgggccccggcgcgggcgagcacggcggcgtcgtggtcgccgaaggcacgccgaagcaggtgcagtcgaatccgcagtcgctgaccggccagtacctgctcggcaagcgcgtgatcgagtatccggacgagcggctcgcgcccgatccggagcggatgctgcgcatcgtcgacgcgcacggcaacaacctgaagcacgtcgatctggaactgccggtcggcctcctgacctgcatcaccggcgtgtcgggctccggcaagtcgacgctgatcaacgacacgctgtatcacgcggtcgcgcgccacctgtacggctcggccgccgagccggcgccgcacgaggcgatcgagggcctcgagcacttcgacaaggtgatcaacgtcgaccagtcgccgatcggccgcacgccgcgctcgaacccggccacgtacacgggcctgttcacgccgatccgcgagctgttctcgggcgtcccgacgtcgaaggagcgcggctacgatccgggccgcttctcgttcaacgtgaagggcggccgctgcgaatcgtgccagggcgacggcgtgctgaaggtcgagatgcactttttgccggacgtctacgtgccgtgcgacgtgtgccacggcaagcgctacaaccgcgaaacgctcgaagtgcagtacaagggcaagaacatcagcgaagtgctcgacatgacggtcgagcacgcgtacgagttcttcagcgcggtgccggtcatcgcacgcaagctgaagacgctgctcgacgtcggcctcggctacatccgcctcggccagtcggccacaacgctgtcgggcggcgaggcgcagcgcgtgaagctgtcgctggagctgtccaagcgcgacaccggccgcacgctgtacatcctcgacgagccgaccaccggcctgcacttccacgacatcgcgctgctgctggaagtgatccaccggctgcgcgaccagggcaacacggtcgtgatcatcgagcacaacctcgacgtgatcaagacggccgactgggtgatcgacctcggccccgagggcggcgccggcggcggccagatcatcgcgcaaggcacgcccgagcaggtcgcgaagacgaaggcgagcttcaccggcaagtacctcgcgccgctgctcaagcgtccgacccgcaaagtcgcggccggc

SEQ ID NO: 11336 - DNA, 843 bp, Burkholderia cepacia
gctcgactcgtttcctcgcatgcgtgccacggcggcgagcagcgcttctaccgtcacgattcggcagtcatcggcctgccgatgaagttctcggtgtacctgccgccacaggccgcgcacggccgcgtgccggcgctgttctatctcgccgggctcacgagtaccgacgagacgttcgcgatcaaggccggcgcgcagcaatacgcggcgcagcacggcatcgcgctcgtgatgcccgacacgagcccgcgcggcgcgggcgtgccgggcgagaccgatgcgtgggacttcggcgtcggcgcgggcttctacgtcgatgcgaccgaagcgccgtggtcgacgcactaccggatggagtcgtacgtgacgggcgagctgcgcgagctcgtcgcggccgaactgccgatcgacggcgcgcggctcggcatcttcggccactcgatgggcgggcacggcgcgctgacgctcgcgttgcgtcatccggggctgtaccggtcggtgtcggcgttcgcgccgatcgccgcgccgacgcgctgcccgtggggcgagaaggcgttctccggctatctcggcgccgatcgcgacgcgtggaaggcgcacgacgcgagcgagctggtcgcgcgcgccgatgcgccgaagttcgcggacggcatcctcgtcgatcaggggctggccgatcagttcctcgcgaaccagctgaacccggacgtattcgaagccgcgtgcgcgaaggccggccagccgctgacgctgcgccgccatccgggctacgaccacggctactacttcatctcgacgttcatcggcgatcacctcgcgcatcacgcgcgcgtgctggcgcgg

SEQ ID NO: 11337 - DNA, 1083 bp, Burkholderia cepacia
aacctgggcagcaacacgctgacgctgggcggcgccggtaacggcacgtacggcggcaccgtcgccggcacgggcgggttgacgctgtcgggcagcggcacgcagacgctgacgggcaccaacacgtacaccggcgcgacgacgatcaacagcggcacgctggcgatcggcgcgggcggcagcctgtccggcagcagcccgctgaacctggccggtgcgggcgcaaccttcgacgtcagcggtgcgacgacgccgcaaacgacgaccgcgttgtcgggtgtcgccggttcgacggtgaacctcggcggcaacaccctgacgctcggcgggtcgggcagcggcacgtacggcggcacgatcgccggcacgggcggcagtctgacgctgggcggcacgggcaccgaaacgctgaccggcgcgaacacgtattcgggcggcacgaacctcaccggtggcggcacgctggtcgcggggaataacacggcgctcggtaccggcgtgctgaatgcgagcggtgcgggcggcacgctggctgccggcacgccgggcacgacgttgaacaacacggtgaacctcggtacgggatcgacgctgacggtcggcggcgcgaacaacctcggcctgggcggcgcgatctcgggtggcggcacgctcgcggtcaacggtccggcgacgacgacgctgtcgggtgccaacacctacaccggtggcacgagcgtcaccgggggcggcacgctggtcgccggcacgccgaccgcactcggcagcggcacgctgagcgtcggcggcaacggcggcacgctcggcaccagcgtcgcgggcacgacgctcggcaacgcggtgaatcttggcgcgggttcgacgctgacggtgggcggcgccaacaacctcggcctgagcggcccgatctccggtggcggcaacctggcggtgagcggcccgtcgacgacgaccctcagcggcgcgaacgcgtacacgggcggcacgacgatcggcaacggcagcacgctggcggtcgccggcaacggcggcctgtcggcgggcagcgcactgacgttggccggcaacggcgcgacgctcgat

SEQ ID NO: 11338 - DNA, 603 bp, Burkholderia cepacia
  misc_feature (561)..(561): n=g, a, t or c
atgcagattccgtcgaatgtcttcaaggccgcgctcgcgcgcggcgacgcgcagatcggtttgtggctcggtctcgcgaatccgtacagcgccgaagtggtcgcgggcgccggtttcgactggctgctgatcgacggcgaacatgcgccgaacacggtgccgacgatcctcgcgcaactgcaggcgatcgcgccgtatccgtcgcatccggtcgtgcgcgtgccgtggaacgatccggtgatcgtcaagcaggtgctcgatctcggcgcgcagacgctgctcgtgccgatggtgcagagcgcggacgaggcgcgcgcggcggtggcggcgacccgttacccgccgcacgggattcgcggtgtcggcagtgcgctggcgcgcgcatcgcggtggaatcgcgtcggcgagtacctgcatcgcgcgaacgacgagatggccgtgctcgtgcaggtcgagacgcgcgcggggctggaggcgatcgatgcgatcgcgcgggtcgacggcgtcgatggcgtgttcatcgggccggctgatcttgcggccgatctcggccatctcggncatccggggcacccggacgtgcataccgtgatcgaccgcgca

SEQ ID NO: 11339 - DNA, 2391 bp, Burkholderia cepacia
gtgccggaaaagaaacacgcccggcacccgcctgcctccttccgggaaagcacactgcctccccgagaaacactcacacattattcaagtgtccgttcgcgcggctcacagcacgcgggagcattgctcccggcgaccgctccgtgcatagcgatacacccacacgtcctcatacaggtgcttatgtcgaacgaagggcagtgcccattcaaccatgccaacggcggcggcacgaccaatcgcgattggtggccaaacgaattgcgcctggatctgctcagccagcactcgagtaaaaccgacccgctcgaccctggcttcaactatgccgaagccttcaacagcctcgacctcgacgcgctcaggaaagatctggctgccctgatgaccgactcccaggactggtggccggcggacttcggccactacggtccgttattcgtacggatggcctggcacagtgccggcacctatcgcatgggcgacgggcgcggcggcgccgggcgcggccagcagcgcttcgcgccgctcaacagctggccggacaacgtgagtctcgacaaagctcgccgcctgctgtggccgatcaagcagaagtacggtcagaagatctcgtgggccgatctgctgattctcacgggtgacgttgcgcttaccacgatgggattcaagaccttcggctacgccggtggccgcgaggacacgtgggagccggatcgcgacgtctactggggcagcgagacgacctggcttggcggcgacctgcgctacgacaagggcggcgcctgcgaatcgcaacacggtggcaacgccgggcgcaacctcgaaaatccgcttgccgcggtgcagatgggcctcatctacgtgaatccggaaggtccggacggcaatcccgatcccgtcgcggcagcgtacgacatccgggaggtcttcggacgcatggcgatgaacgacgaagaaaccgtggcgctgattgccggtggtcatgccttcggcaagacgcacggcgcgggtccggccgacaacgtcggtctggaacccgaggctgccggtctcgagcagcaagggcttggctggaagaacagctttggcaccggcaaaggcgcggacacgatcacgagcggcctcgaagtcacgtggagcgacacgccgactcaatggggcatgggctttttcaagaacctgttcggatacgaatgggaactcacgaagagccccgcaggcgctcaccagtgggtggcgaaaaacgccgaaccgacgatcccgcatgcacacgatccgtcgaaaaagctgctgcccaccatgctgaccaccgatctctcgctgcgcttcgaccccgtctacgagaagatctcgcgtcatttcatggacaaccccgacgtgttcgccgacgcgttcgcgcgcgcgtggttcaagctcacgcaccgcgacatgggaccgcgcgcccgatacctcgggccggacgtgccgaccgaagagctgatctggcaggatccgattcctgcggtcgatcatgtgctcgtcgacgacacggacgttgccccgctcaaggagacgatccttgcctcggggctttccgtggccgagctcgtgtccaccgcatgggcgtcggcatcgacattccgcggctcggacaagcgcggcggcgccaacggcgcgcgtatccgcctcgcgccgcagaaggactgggccgtcaacgagcccgcacgattggccaaggttctgaaagttctcgagcgcattcagggcgagttcaacagcacgcagcctggcggcaagaagatttcgctggccgatctgatcgtactggccggcggcgccggcatcgagcaggcggcgaagcgcgctggccacgacgtggttgtgccgttcgcgcccggccggatggacgcctctcaggaacagaccgacgcgcactccttcgcggtgctcgaaccggtcgcagacggtttccgtaatttcgtcaagggcaaattcgcggtgccggccgaagcgctgctgatcgacaaggcgcaactgttgacgctgaccgccccacagatgacggcgctcgtcggcggactgcgcgtgttgaacgtccaaaccggcgacgaaaaacacggcgtttttaccgaccagcccgaaacgctgaccgtcgatttcttccgcaacctgctcgacatggcgaccgaatggaagccgattgccggcgaagacacctatgaaggacgtgaccgtcggaccggtgagctgaagtggaccggtacgcgcgtggatctggtgtttggttcgaatgccgtgctgcgggcattgtccgaagtctatgcgagtgcagacggcgaggcgaagttcattcgtgacttcgtggcggcctgggtcaaggtgatgaatctcgatcgattcgatctcgcc

SEQ ID NO: 11340 - DNA, 1095 bp, Burkholderia cepacia
gtggtgcgttcgcccagaccgacctgcacgagcagcgcccgggcacgctcggccgcctcgcgcgcgctgatgccgccctgcagttcgagcggcagcatcacgttctcgagcgccgtcaggtgcggcatcaactggaacgactggaacacgaatccgaccgcgccgttgcgcagcgccgcgcgctcgtcctcgtcgagctggtcgagcgcgcggccgagcaggcgaaccgtgccgctcgtcgcgctgtccaaccccgcaagcaggccgagcagcgtcgatttgcccgaccccgacgcgccgacgatcgcgaggctgctgcccggttgcacggcgagcgtgatgccgtcgaggatcgtcagctcgcccgttgcatcggcaacccgcttgcacacgtcatggacttcgatgatcggatcggtaatcttgaacatggacacgacatttcgctggaaaagacgcgcggcggccgccgcgctgctgggcaccctgctggccgtcaccgtacctgcgcgcgccgcgacggcgtcggcatcgagccagcccgtgatcgtcgtgctcggcgacagtctctcggccgaatacggactgccgcgcgacacaggctgggttgcactgctgcggcaacggctcacgaccgagcgaatcgattatagcgtcgcgaacgccagcgtcagcggcgacaccacgagcggcggccgtgcacggttgcccgcggtgctgcagcgactcaagccgtcgatcgtcgtcgtcgaactcggttcgaacgatgcgctgcgcggcgtgccgctcgcgacgaccgagcagaacctgcgcgacatcatcgccagtgcgcagcgtgcgcgggcgaaggtcgtgctggtcggcatgtacgtgccgcccaattacggccccgactacacgcagaagttccacgcggtctatacgcggctgtcgaaggacctcgccgtgccgctcgtaccgttcctgctggccggtatcgagaacaagccggagatgttccaggccgaccagatgcatcccgcgcagcaagcccagggcattctgctcgacaacgtgtggccggcgctgaaaccgttgctcggcaagccgcacgga

SEQ ID NO: 11341 - DNA, 357 bp, Burkholderia cepacia
gtggatgggagaaaaggaaaagaaagggagggggaaaaagaagggggggggagagggaaaagggaagaaagggggagaaagaatggaaggggaaggggaaaggaggggggagaagaggaaagagagggtaaggggaaagaaggggaaaaagagggggaggggggaagaagaaaaaaaaaagaagaggggggaagagggggaaaagaaagaggggaggagaaattgaagagaagagggggaaagggaggagagagggaaggggcaagaaagaaaagggcgagcgcagcagggagtactacagaatcaaggcgggggggaggtacatccaccccccgaaagacaaaatggggagggcgc

SEQ ID NO: 11342 - DNA, 1275 bp, Burkholderia cepacia
atgaagattcatatcaaaggcggcacgctgatcgacccggtcgccggtaccgaagggcaggccgacgtattcgtcgcggacggcaagatcgccgcgctgggcagcgcgcccgccggtttcaacgcggacaagacgatcgacgcgtcgggcctggtcgtcgcgcccggccttgtcgacctgtgcgcgcggctgcgcgagcccggctacgaacacaaggcgacgctcgcgtccgagatggccgcggccgtcgcgggcggcgtcacgaccctcgtgtgcccgccggacaccgatcccgtcctcgacgagccgggcctcgtcgaaatgctcaagttccgtgcgcgcaacctccaccaggcgaacgtgcatccgctcggcgcgctgacggtcggcctcaagggcgaggtgatcaccgagatggtcgcgctgacggaatccggctgtgtcggcttcacgcacgccaacgtgccggtgcgcgacacgcaggtgctgctgcgcgcgctgcagtacgcgagcacctatggctacacgacgtggctgcgtccgctcgacgcgttcatcggccgcggcggcgtggccgcgagcggcgcgcttgcgtcgcggctcgggctgtccggcgtgccggtcgcggccgagacgatcgcgctgcacaccattttcgaactgatgcgcgtgacgggcgcacgcgtgcacctcgcgcggctgtcgtcggcggccggcctcgcgctcgtgcgcgcggcgaaggcggaagggctgccggtgacctgcgacgtcggcgtgaaccacgtccacctgatcgacgtcgatatcggctacttcgattcgcagttccggctcgatccgccgctgcgcagcgagcgcgaccgcgaagcgatccgcgtggcgctcgccgacggcacgatcgacgcgatctgctcggatcacacgccggtcgacgacgacgagaagctgctgccgttcggcgaagcgacgccgggcgcgacggggctcgaactgctgctgtcgctgacgctgaagtgggcggacgagacgcgcacgccgctcgcgcaggcgctgcgccgcatcacgtccgcgccggccgacgtgctgcaactgccggcgggccgcctcgccgaaggcggcgcggccgacctgtgcgtgttcgatccgcgcgcgcactggcgtgtcgagccgcgtgcgctgaagagccagggccacaactcgccgttcctcggctacgaactgccggccaccgtgcgtaccacgctcgtggccgggcaggtcgcgttcgagcgccac

SEQ ID NO: 11343 - DNA, 1785 bp, Burkholderia cepacia
ttgagcgtcaagcctactcttagcaaacccataggcggggaagacgcatcgtcgcccgtggtcgtcgcgcgccgcctttggccgtacctgaagccgctcctgtgggtgatggtggcgggcgtcctcgcgatggccgtcgtcgcggcaacggaagccgggattccggcgttgctcaagccgctgctcgaccgcggcttcggcacgaagggcgacgtgaccgcgaagctctacgtgccgatcgcggtcgtcggtctcgcgctggtgcgtgccgccgcgcagtacgcgtccaactatctgcttcagtatgtctcgaaccggatcctgctcgacctgcggatcgagatgttcaaccggatgattcacaccggcgtgtcgttttttcagcgcgagaccgcgagtacggtgatcaatgcggtcgtcttcgaggtcaaccaggtcctgaacgtattgctgggcgtgttgattacgctcgtgcgcgattcgttgacggtggtctttctgctgggttacctgttctatttgaactggcgactgacactgatcgtcgccgtgttgctgccgtgtatcggctggctcgtcggcaagatcaaccggcgtttgcgccggttgaaccgcgagcaccagatgctgacgaaccagctcgcgtacatcgtcgaggagaccgtcggcggctacaaggtcgtcaagatccacaacggcgagcagtacgaaatcagccgcttcaacgaattgagccggcgtctgcgcggctattcgatgcggatgatcgtgtcgggtgggcttgcgcagccgctcacgcagtttctcgcgtcgatcgcgctggccgtcgtgctgacgattgccgtcgtgcagtccgcgaacgaccagacgacggtcggtggctttgtcgcgttcgtcaccgcgatgctgctcatcatttcgccgctcaagcacctgatggacgtgaaccagccgctgcagcgcgggatgacggcggccgagctgatcttcggcctgatcgacgagccgcgtgagcccgaaggcggcggcaagccgctcgagcgggccaccggccggattcgtttcaacgacgtgtcgttcgcgtatcacgccggcaccggcaagccaacgctcgaccgcgtgtcgttcgacgtggcgcctggcgagatgatcgcgctcgcagggccgtcaggcagcggcaagacgacgcttgtcaacctgatgccgcgctttttcgatccgacgtccggagagattctcgtcgacggcgtcgcgttacccgagtatcggctacgtgacctgcgcgaccagattgcgatggtgagtcaggatgtcgtgctgttcaacgacacgatcgcgagcaacgtcgcgtacggccaaagccccgaccgcgaacgcgtgacggcggcgctgcgcgccgcgaatctgctcagtacggtcgaggcgatgcccgacgggctcgacacgctcgtcggcgacaacggcatgcgcctgtcgggcggccagcgccagcgtctcgcgattgcgcgcgcgatctacaaggatgcgccgatcctgattctcgacgaagcgacgtcggcgctcgattcggaatccgagcgtcacgttcaggcggcgctcgagacgctgatgaagggccgcacgacgctggtgatcgcacaccggctgtcgacgatcgagcgtgcagaccggattctcgtgatggacggcggcagaatcgtcgagagcggcagccacgcggcgctgctcgcatccggcggcctgtatgcccatctgcatcggattcagttccagcaggaggccggg

SEQ ID NO: 11344 - DNA, 273 bp, Burkholderia cepacia
atgagtcataccgtccgcgagaaacagaagctgctgaaccgcgtgcgccgtatcaagggacaggtggaagcgatcgagcgggcgctggaagaagagcgcggctgcaacgacgtgctgcaactgatcacgagctgccgcggcgcgatgaacggcctgctggccgtcgtgctggaagaccacatccggtcgcatctcgtcgatgcggacacgcccgatgcgcacgagggcagcgcgaccgagcagctgatcgaggtcgtgcacagctatttcaag

SEQ ID NO: 11345 - DNA, 557 bp, Burkholderia cepacia
atgacaaacgacgatcgcaccacgttcgttccgcgcagaacgcccgaatcggcggccatggtggccgaggtcagacgggcgatggcgatcaccgcgcggctcaaccgcctgacgttcgacgatgcggccgacgtgcgcgcattgttcggtgaactgatcggcacgcaggccgacgacggcttcgtgctgatcccgccgtttcatgcgaccggcggcaccggcatgaagctcggcacaacgtgttcgtcaaccagaactgcacgttctacgatctgggcggactcgagatcggcgacgacgtgatgatcggcccgaacgtcagcctgatcacgtccggtcatccggtcgaaccttcgcggcggcgcgatggcgtggtcgcgaagccgatcgtgatcgaacgcaacgtgtggatcggcgcgggcgcgacgatcatcggcggcgtgacgatcggcgagaacgcggtcgtcgcggcagcggccgtcgtcacccgggacgtgccgccgaatacgctggtcggcggcaatccggcgaaggtcatccggtcgattgccgaataa

SEQ ID NO: 11346 - DNA, 750 bp, Burkholderia cepacia
atgtcccgcagctttcctacgacgttgccaacttcccgcatttctctcgtcgcgctcggcgcagcgctcgccgcggctttgtctgccgggccttccggcgcattcgcgcaggccgctgacgccagcgcgccggacgccgtcgcgtccgcgcccgttgccgcctccgccgtcccggatttcgacgcccgtcaaaaagtgctcaatcaacgctccgcggaaaacgattatcgttatgcggtggcggagcacgattgttacagcaagttcttcgtcaatcactgtctcggcaaggcgcgcgaccagatgcgcgaggaacgggcgagcattcgccaggagcagctcgcgctcaacgacgagcagcgtgcggtgcgcgcgcagcagcgcgaccagcagcaggcgctgaagcaggcccggaacgcggcggaagcgccgcagcgggcggcgaacgaagcggcgaacgcggctgcattccgcgacaagcaggagcagaatgcactgaaacaggcgcagcgcggcgcggaaggaccgcaacgcgcggcgagcaagcaggcatacgaccagaagcaggcggatttccagcgcaagctcgaccaggcgcaccagcaggcggcgcagaaggcgcaggaacgggcggacaacgccacgcgctacgagcagaagcagaaggaagccgcgcagcacaaggccgatgtcgagcggcgtcagcaggaagcggccgagaaggccaagcagcaacagcagcaggggcag

SEQ ID NO: 11347 - DNA, 327 bp, Burkholderia cepacia
atggaagtgaaagcaattcatcgcggtgcccgcatctcggcgcaaaaaacgcgccttgtggctgaccagatccgcggtttgccggtcgacaaggcgctgaacgttctgacgttctcgccgaagaaggcggctggcatcgtgaagaaggttgtgctgtcggcaatcgcgaatgcggagcacaacgaaggcgctgatatcgacgagctcaagatcaagagcatctacgtcgacaaggctgcatcgctcaagcgtttcaccgcgcgcgcaaagggccgcggtaaccgcatcgagaagcaatcctgtcacatcactgtgacggtcgggaat

SEQ ID NO: 11348 - DNA, 897 bp, Burkholderia cepacia
atgaacactcccgctcctaccggtttccgttgcggcatgatcgcgatcgtgggccgcccgaacgtcggcaagtcgacgttgatgaacgcactcgtcggccagaagatcagcatcacgtcgcgcaaggcgcagacgacccgccaccgcatcaccggcatcaacacgttcgacgacgcgcaattcgtattcgtcgacacgccgggctttcagacccgtcacagcaccgcgctgaaccgttcgctgaaccgcgcggtcacgtcgacgctgacgtcggtcgacgtgatcctgttcgtgatcgaggccggccgcttcggccccgacgaccagaaggtgctcgacctgatcccgcccggcatgccgacgctgctgatcgcgaacaagatcgatcgcgtgaacgacaaggcgtcgctgttcccgttcatgcagaaggtgagcgaactgcgcgaattcaccgagctcgtgccgctgtcggcgcagaagccggaagacatcaagcgcctgctggacacgatcaagccgtacctgccggaaggcgagccgatctacggcgaggacgagctgaccgaccgcagctcgcgttttctcgcggccgaaatcctgcgcgagaaggtgttccgctggaccggcgacgagctgccgtacacgagcaccgtgctgatcgacaagttcgaggaggaggggcgcctgaagcgcatcttcgcgacgatcctcgtcgagcgcgattcgcacaaggcgatggtgatcggcaagaagggcgagaagctcaagcagatcagcaccgaggcgcggatggacatggaaaagctgttcgacggccccgtatacctcgagaccttcgtgaaggtgaagagcggctgggccgacaacgaggcggggctgcgtgcctatgggtacgaa

SEQ ID NO: 11349 - DNA, 531 bp, Burkholderia cepacia
atgacgcccgctcatctgattccgagcccgctgggcgacatcgccgtgcgcatcgaggacgatgcgctgaccggcctgtacttcgtcggccagaaatacttcccgtcgctggcgatcgtgcgcgaagcggatgcgctcgccacatcgcccatcgcacgccaggtcgcggaagaaatcgccgaatacttcaccggcgcgcgcgacacgttctcggtgccgatccacctgcgcggcaccgcgtttcagcgacgcgtatggcaagaactgctggcgattccgttcggcgaactcgtgtcgtacggcgacatcaccgagcgcgtcgggctgccgatgagcggcgcgcgcgccgtgggcggtgcggtcggccgcaatccggtgtcgatcatcgtgccgtgtcaccgcgtggtcggcgcatcgggcagcctgaccggctatgcaggcggcatcgaccgcaaacgcgcgctgctgtcgctcgaaggcgcagaactttcacgcggtgtgcatcatccgatgcagcacgcgctcgcgttc

SEQ ID NO: 11350 - DNA, 879 bp, Burkholderia cepacia
atgtcgattctgatcaacaaggacacgaaggtcatcacgcagggcattaccggcaaaaccggtcagttccatacgcgcgcctgccgtgaatacgcaaacggccgcgaagcattcgtcgcgggcgtgaacccgaagaaggccggcgaagacttcgaaggcattccgatctacgcgagcgtcaaggaagcgaaggcggaaaccggcgcgaccgtgtcggtcatctacgttccgccggcaggcgcggcggctgcgatctgggaagcggtcgaagccgacctggatctcgcgatctgcatcacggaaggcattcccgtccgtgacatgatcgaagtgaaggaccgcatgcgtcgcgaaggccgcaagacgctgctgctcgggccgaactgcccgggcacgatcacgccggacgaactgaagatcggcatcatgccgggtcacatccaccgcaagggccgcatcggcgtcgtgtcgcgttcgggcacgctgacgtatgaagccgttgcgcagctgacggccctgggcctcggccagtcgtcggcagtcggtatcggcggcgacccgatcaacggtctgaagcacatcgacgtgatgaagatgttcaacgacgatccggatacggacgcggtcgtgatgatcggcgaaatcggcggtccggacgaagccaacgcggccgagtggatcaaggacaacatgaagaagccggtcgtcggcttcatcgcgggcgtcacggcgcctccgggcaagcgcatgggccacgccggcgcgctgatctcgggcggtgcggatacggccgaagcgaagctggaaatcatggaagcgtgcggcatcaccgtcacgcgcaacccgtcggaaatgggccgtctgctgaagaaggcgctg

SEQ ID NO: 11351 - DNA, 573 bp, Burkholderia cepacia
gtggcgcgaaggattgatggcgccgaaaacctgacgtcgccgagcggccagtgccggccgcgcgtcgaccgcgcttccccgtatctacgactttcgtcggatcctttccgtcgccagcgcgcgaccttcgcccgatgcgcggcgcggccggcgtccctaaagtggcgctgtcgcgcgattccgcgcattcgttacggcgaaaacatgagacctgcctggctgttgggccttcctgtcgcgctggcggcatgcgcgccgctcgaaccttccgccgcggggcgcgacgtgcgcatcgtcacgagcgaccccggcggcacctgccgccacctcggcgacgtgaccggcagccgcggcaacttcctgatcggcggcttcatccccgatgcgacgttcgagaccggggcgcgcaacgacctgaagacccgcgcggccgcgctcggcggcaacgtcgtggtgctgctcacgcaccgcggcgtgcaaagcggcagtttcgacggtaccgacggccgctacctgcggcataccggcgtcacgctgaccggcagcgtgtatcgctgcccgggcgccggggcg

SEQ ID NO: 11352 - DNA, 825 bp, Burkholderia cepacia
atgcgggcaagcatacacgatggccggcacggcgaacgccggcggcccacctgcctggttcagccctcgggcacgcgcgcgacgatgcccgccagccgcctaggacagcacgatgttcttgatgaccttccggatgttcttgtagctgtcgaccgactccgctttctggtcggtgaccagcgtgccgatccgcgccggttcgcagaagccgatccggctgttcgtgccgagcttgctgaaatcggcgaggatcgcgacttccgccgcgttgctgaccatcgcgcgcgccacttcggtttccatccggtcgtagttcgtcgcgccgcgcacgtggtcgacgccgaccggcgacagcaacgcgagatcggcgcgatagcggaagatttcggcgaccgtgccgtcgccgaccgtcgccgccgcgcggctgccgatcatcccgccgagcaggatcgtttcgttcttcgcctgcgccgggtcacccgagcgcatcttcagcgcgacgtcgatcgaattcgtgacgatcgtgaggcccgacagcttcgccagttcctcggccagcagcgtcgtggtcgtgcccgcgtcgatgaacagcgtctgcgagcccgacaccagccgcgcggccgcgcgggcgatcgccagcttcgccttcacatgcgtctgcgcacgctcggcgatcggcgcttcgtcgccgacctgcaccgcgccgccgtgcacgcgcttcagttcaccgagcgcctcgaggtcgaccagatcgcggcgcacggtttcgcgcgacacgttcagctcggccatgatccggtcggtggaaacgcgctgcatcttcga

SEQ ID NO: 11353 - DNA, 366 bp, Burkholderia cepacia
atgattcctctcagcgccaaagccatcgtccgcaatggccgttccgtcctgttcctgcgcaatccccgcgacgagtgggagctgccgggcggctggcccgaagcgggcgaatcgctcgaagacgcggtcacccgcgaagtggaggaagaatgcggaatcgtcgcgtcggcgatccgctacgtgggcagccgctcgtgcgaggtcgtgccgggcaagcgcgtactgatcgtgtgcttccagtgcgaggtcgatcgccatgacatcgtgctgagcgacgagcaccaccagttcggctggatcgatctcgatgccgacaagccggcgaacctgccggatttctactggacattctgcaagcaggcggac

SEQ ID NO: 11354 - DNA, 701 bp, Burkholderia cepacia
gtgtggcttcacaccggcccgttttgcattcatccacatccgttgctcgtgtccgactccgcagtgtccccgttccttcccgcgccgctccagtgcggccgcttcgaactgacgttcgaacgcccgctcgtgatgggcatcctcaacgccacgcccgattcgttctccgacggcggccgcttcctcgcgcgcgacgatgcgctgcgccgggccgagcggatgattgccgaaggcgccgacctgctcgatatcggcggcgaatcgacgcgccccggtgcgccgcccgtgccgctcgacgaagagctcgcgcgcgtgatcccgctcgtggaggcgctgcggccgctgaacgtgccgctgtcgatcgatacctacaagccggccgtgatgcgcgcggcgctggccgccggcgcggacctgatcaacgacatctgggggttccgccaaccgggcgcgatcgacgcggtgcgcgacggcaacagcggcctgtgcgcgatgcacatgctcggcgagccgcagacgatgcaggttggcgagcccgactacggcgacgtcgtgaccgacgtgcgcgattttctcgccgcgcgcgcgcaggcgttgcgcgacgccggcgtggcggcggagcgcatctgcgtcgatcccggcttcgggttcggcaaggcggtcgtcgacgacaactatgcgctgctggccgcgttgccgga

SEQ ID NO: 11355 - DNA, 1176 bp, Burkholderia cepacia
atgcccgccatgactgcccaccactccttcgacgtcgccgtggtcggcggcgggctcgtcggcaagacggccgcgctcgcgctgacccagtccggctacaagaccgcgttgctcgcccagccggccacgccgcgcgccgcggatctcgcgttcgacacgcgcgtctacgcgctgtcgtccagctcgcaggcgttgctcgagcggctgcgggtctggcaggcgctcgaccacagccggctcgcgcccgtctacgacatgcgcgtgtatggcgatgcgcatgccgaactgcatttctccgcgtaccaggcgtccgtgccgcagctcgcatggatcgccgaatcgtcgctggtcgaggcgtcgctcgacgccgcgctgcgcttccagccgaacctgacgtggttcgacgcgcgtgcgcagggcttcgacgtgcgcgacgacgcggccgtgctcacactgtcgtcgggacaggtgctcgaagccgatctcgtcgtcggcgccgacggcgcgcattcgtgggtgcgctcccaaatgggggccagggtagagcggcgcgactaccggcaaacgggcgtcgtcgcgaatttcaaggcatctttgccgcaccgcgagaccgcgtaccaatggtttcacgaaggcgagatcatcgcgctgctgccgctgccggacggccacgtgtcgctcgtgtggtccgcgcacaccgcgcacgcggacgcactgctcgcactcgatccggcgcagctcgcggccgaggtggagcgcgtgtcgcacggccaggtcggcgcgctcgaatgcgtgacgccggccgccggcttcccgctggcgctgcagacggtcgacaagctgatcgcgccgcgcgtcgcgctggtcggcgatgccgcgcacctgatccacccgctcgcggggcaggggatgaacctgggattgcgcgacgtcgccgcgctcgccgatgcgatcgcgggcaaggaaagcttccgcaacctcggcgatacggtgctgctgcgccgctacgagcgttcgcgtcgggaggacatccgcgcgctgatggtcgcgaccgacggcctgcagcggctgttcgcggtgccgggctcgctcgcgaaggcggtgcgcaatgcgggcatggcgttcgtcggcgcgcagccgctcgtgaagcgctggctcgtgtcggccgcgctcggc

SEQ ID NO: 11356 - DNA, 1488 bp, Burkholderia cepacia
atgcacgcaaaaagcctgaccgaactgcgcgccgcgctcgccgccaaggaatgctcggccgtcgagctcgcgcagcactacctgaaacggatcgacgccgcgcgcgacctgaacgcgttcgtccacgtcgacgccgacctcaccctcgcgcaggcgaaagccgccgacgccgaactcgcgcgcggcgcgggcggcgcgctgaccggcctgccgatcgcgcacaaggacgtgttcgtcacgcgcggctggcgctcgaccgccggctcgaagatgctcgcgaattacgagagcccgttcgacgcgaccgtcgtcgcccgcctgcaggcggccggcatggtcacgctcggcaagaccaacatggacgagttcgcgatgggctcgtcgaacgagaattccgcgttcggcgcggtgaagaacccgtgggacacgaacgcggtgccgggcggcagctcgggcggcagctcggccgccgtcgccgcgcgcctcgcgccggccgcgaccggcaccgacaccggcggctcgatccgccagcccgcgtcgttcgcgggcgtgacgggcatcaagccgacctacggccgcgtgtcgcgctacgggatgatcgcgttcgcgtcgtcgctcgaccagggcggcccgatggcgcagagcgcgtccgactgcgcgctgctgctgaacgcgatggccggcttcgacgagcgtgactcgacgagcctcgagcgcgacgacgaagacttcacgcgccacctcggccagccgtgggcggccggcaacgacgcgggcaagccgctcgccggcctgcgcatcggcttgccgaacgagtatttcggcgccggcctcgccgacgacgtgcgcgcgacgatcgacgcggcgctcaagcaatacgaagcgctcggcgcgacgctcgtgccggtgtcgctgccgaagacggagctgtcgatccccgtgtactacgtgatcgcgccggcggaagcgtcgtcgaacctgtcgcgcttcgacggcgtgcgtttcggccaccgcgccgcgcagtacggcgacctgctcgacatgtacaagaagtcgcgcgccgaaggcttcgggcctgaagtgaagcgccggatcctggtcggcacgtatgtgctgtcgcacggctactacgacgcgtactacctgcaggcgcagaagatccgccgcatcatcgcgaacgatttccaggaagcgttcaagtcctgcgacgtgatcatgggcccggcgtcgccgacggtcgcatgggatctcggcgcgaagggcgacgatccggtgcagatgtatctcgcggatatctacacgctgtcggtgagcctcgccggtctgcccggcatgagcgtgccgtgcggcttcggcgcgggcgcgaacgcgcagcgcccggtcggcctgcagatcatcggcaactatttcaacgaagcccggatgctgcaggtcgccgacgcgttccagcgcgcgaccgactggcacaagcaagttccggcaggggtg

SEQ ID NO: 11357 - DNA, 1005 bp, Burkholderia cepacia
atgaacctgcctgattcttcttccacgccttccacgacgctcgcggccacggccggcgacgcgccgccgccgcgcgcgatgtgggcgcagctgcgccgctcgacgctgttctatccgctcgtcggcctgatcgtcgtgtgcatcgcgatgatgatcgcgagcccgagcttcctgtccgccgcgaacctcgagaacgtgctgcgccaggtgtcgatcaacgcgatcatcgcggtcggcatgacctgcgtgatcctgacgggcgggatcgacctgtcggtcggctcggtgatggcgttgtcgggcacgctcgcggccgggttgatggtcgcgggcgtcaacgcggtcgccgcgctggcgatcggcatcgcggtcggcctcggcttcggcttcctgaacggcgtgttcgtcgcgttcgcgggaatgccgccgatcatcgtcacgctcgcgacgatgggcatcgcgcgcggcctcgcgctgatctacacgggcggctatccgatcgacgggctgcccgactgggtcgcgttcttcggcagcggcaaggtgctcggcatccaggcgccggtgctgatcatgctggtggtctatgcgatcgcgtggctgctgctcgaccggatgccgttcggccgctacgtgtacgcgatcggcggtaacgagcaggcgacgcggctcaccggcgtgcgggtcgcgcgcgtgaaactgatcgtctacacgctggccggcgtcacgtcggcgctcgccgcgatcgtgctgaccgggcgcctgatgagcgggcagccgaacgcgggtgtgggtttcgagctcgacgcgatcgcggcggtcgtgatgggcggcacgtcgatctccggcgggcgcggcgcgatcctcggcacgctggtcggcgcactgctgctcggcgtgctcaacaacgggctcaacatgatcggcgtgaacccgtatgtgcagaacgtgatcaagggcggaatcatcctgctcgcgatgtacatcagccgcgaacgatcgaga

SEQ ID NO: 11358 - DNA, 426 bp, Burkholderia cepacia
gtgttccaaggggcgtcggcgctgacgctcgatgcgaaagggcggatgtcggtgccggctcgctatcgcgaagcgctgcaaggacaggcagaaggacgggtgactgtgaccaagcacccggacggctgcctgttgctgtttccgcgccccgaatgggaagtgttccgcgccaagatcgccgcgttgccgatggacgcgcactggtggcggcgaatttttctcggcaatgcgatggacgtcgatctcgacagcgcgggccggattctcgtatcgcccgagctgcgcatggcagccggactggaaaaggaagtcatgttgttgggaatgggtagtcacttcgagctgtgggattcgcagacctacaacgcgaaggagcaggcagcgatggcgcagggcatgcccgacgcgctgaagaatttcacgttc

SEQ ID NO: 11359 - DNA, 1122 bp, Burkholderia cepacia
gtgtcgcgcctgctcgccatttaccggctcgggatcaaggaactgtggagcctcgcccgcgacccgatcctgctcgcgctcatcgtctatacgttcagcgcgtcgatctacgtcgccgcgaccgcacgccccgaaacgctgcacaaggtgccgatcgcgctcgttgacgaagacgcgtcgccgctgtcggcacggatcgcggcggcgttctttccgccccagttcgcaccgcccccgatcatcgacaccggcgcggccgatcgcggcctcgacaacggcgactacacgttctcgctcgacattccgccgaacttccagcgcgacgtgcttgccggccgtcatgcgacgatccagctcaacgtcgatgcgacacggatgacgcaagccttcactggcagcacctatatccagcagatcgtgtcgggcgagatcgacgcattcgtgcggcgctatcgcggcacgccgttgccgggcgtcgatctcgcgatgcggatgcgcttcaacccgaatctcgacgaagtctggttcggcgcgctgatggaactgatcaacaacgtgacgatgctgtcgatgatcctcaccggcgccgcgctgattcgcgagcgcgaacacggcacgatcgagcatctgctcgtgatgccggtgaccgccgcggaaatcatgctcgcaaaggtctggtcgatggggctcgtcgtcacggtggcggccgtcgcgtcgctgacgtgcgtcgtgggcggcgccctgcacgtgccgattcccggctccatcccgctgttcgtggccgggatggcgttgcatctgttcgccacgacgtcgttggggatctttctcgcgacgctcgtgcgcagcatgccgcagttcggtatgttgctcgtgctcgtgctgctgccgctgcaactgctgtccggcggattgacgccgcgcgaaagcatgccggcggccgtgcgggacatcatgctggccgcgcccaccacccatttcgtcgagctcgcgcaacgcatcctgtaccggggcgccggcctcgatgcggtgtggccgcaattcgcggcgctttccgcgatcgggagcgtgctgttcctgctgtcgctgatgcggttccgcaagacgatcggtcagatgacg

SEQ ID NO: 11360 - DNA, 3198 bp, Burkholderia cepacia
atgaacatttccaaattctttatcgaccggccgatctttgcaggagtcctatcggtgatcatcctgctcggcggggtgatcgcgatgttcctgctgccgatttcggaatatccggaagtcgtgccgccttcggtgatcgtgaaggcgcagtacccgggcgcgaacccgaaagtgatcgccgagacggtcgcgtcgccacttgaagagcagatcaacggcgtcgaggacatgctctacatgcagtcgcaggcgaacagcgacggcaacatgacgatcaccgtcacgttcaagctgggcaccgatccggacaaggccacgcagctcgtgcagaaccgcgtgaaccaggcgctgccgcgcttgccggaagacgtgcagcggctcggcatcaccacggtgaagagctcgccgacgctgacgatggtggtccacctgatctcgccggacaaccgctacgacatgacctacctgcgcaactacgcgctgatcaacgtgaaggatcgcctgtcgcggatccagggcgtcggccaggtgcagctgtggggttcgggcgactacgcgatgcgcgtgtggctcgatccgcagaaggtcgcgcagcgcgggctgtcggccgaggacgtcgtgcaggcgatccgcgagcagaacgtgcaggtcgcggccggcgtgatcggcgcatcgccgtcgctgcccggcacgccgctgcagctgtcggtgaacgcgcgcggccgtctgcagacggaagacgaattcggcgacatcgtcgtgaagacgacgccggatggcggcgtcacgcacctgcgcgacatcgcgcggatccagctcgacgcgtccgagtacgggctgcgctcgctgctcgacaacaagccggccgtcgcgatggcgatcaaccagtcgccgggcgcgaactcgctgcagatctcggacgaagtgcgcaagacgatggccgaactgaagcaggacatgccggcgggcgtcgactacaagatcgtctatgacccgacgcagttcgtgcgctcgtcgatcaaggccgtcgtgcacacgctgctcgaagcgatcgcgctggtcgtgatcgtcgtgatcgtgttcctgcagacctggcgcgcgtcgctgattccgctgatcgcggtgccggtgtcgatcatcggcacgttctcgctgctgctcgcgttcgggtattcgatcaacgcgttgtcgctgttcgggatggtgctcgcgatcgggatcgtggtcgacgatgcgatcgtcgtcgtcgagaacgtcgagcgcaacatcgagaacgggatgaacgcgcggcaggcgacctacaaggcgatgcaggaagtgagcgggccgatcatcgcgatcgcgctgacgctggtcgccgtgttcgtgccgctcgcgttcatgtcgggcctgaccggccagttctacaagcagttcgcgatgaccatcgcgatctcgacggtgatctcggcgttcaactcgctgacgctgtcgccggcgctgtccgcgatcctgctgaaggggcacggcgacaaggaagactggctcacgcgtgtgatgaaccgcgtgctcggcggcttcttccgcggcttcaacaaggtgttccatcgcggggcggagaactacggccgcggcgtgcgcggcgtgctgtcgcgcaagacgctgatgctcggcgtgtatctcgtgctggtgggcgcgacggtgctcgtgtcgaaggtcgtgccgggcggcttcgtgcccgcgcaggacaaggaatacctgatcgcgttcgcgcagctgccgaacggtgcgtcgctcgaccgcaccgagaaggtgatccgcgacatgggttcgatcgcgctgaagcagccgggcgtcgagagcgcggtcgcgttcccggggctgtcggtgaacggcttcaccaacagctcgagcgcgggcatcgtgttcgtcacgctcaagccgttcgcggaacggcacggcaaggcgctgtcggccggcgccatcgcgggtgcgctgaaccagaagtacggcgcgatgaaggattcgttcgtcgcggtgttcccgccgccgccggtgctcggcctcggtacgctcggcgggttcaagatgcagatcgaggatcgcggcgcggtcggctacgcgaagctgtcggatgcgaccaacgacttcatcaagcgcgcgcagcaggcgcctgaactcggcccgctgttcacgagctaccagatcaacgtgccgcagctcaacgtcgatctcgaccgcgtgaaggcgaagcagctcggcgtgccggtgaccgacgtgttcaacacgatgcaggtgtatctgggttcgctgtacgtgaacgacttcaaccgcttcggacgcgtgtaccaggtgcgcgtgcaggccgatgcgccgttccgccagcgcgcggacgacatcctgcaactgaagacgcgcaacgacaagggcgagatggtgccgctgtcgtcgctggtcaccgtgacgccgacgttcggcccggaaatggtcgtgcgctacaacggctacacggcggccgacatcaacggcggcccggcgcccggcttctcgtcggggcaggcgcaggccgcggtcgagcgcatcgcgcacgagacgctgccgcgcggcgtgcgcttcgagtggaccgacctcacgtaccagcagatcctcgcgggcgattcggcgatgtgggtgttcccgatcagcgtgctgctcgtgttcctcgtgctcgccgcgctgtatgaaagcctgacgctgccgctcgcggtgatcctgatcgtgccgatgagcattctgtcggcgctgacgggcgtgtggctcacgcagggcgacaacaacatcttcacgcagatcggcctgatggtgctggtggggctgtcggcgaagaacgcgatcctgatcgtcgaattcgcgcgcgagctcgaacacgacggcaggacgccgctcgaggccgcgatcgaggcgagccggctgcggctgcgcccgatcctgatgacgtcgatcgctttcatcatgggcgtggtgccgctcgtcacgtcgaccggcgcgggttcggaaatgcgtcatgcgatgggggtcgcggtgttcttcgggatgctcggcgtgacgctgttcgggctgatgctgacgccggtgttctacgtcgtgctgcgcacgctcgcgggcggcaagattcacgtcgccggcaaggactcggcgggttatggcgtgtcgccgtcgggtgcgtcggcttccgatgct

SEQ ID NO: 11361 - DNA, 624 bp, Burkholderia cepacia
atggtgttggatgaactgatcagcgaattcgatcgcggcctgcgatcgctgaccggcattagccggatgagccggccggtgcccgcgccggccgatgcgccggacgccgagctgacgcccgccgagcgcacgcacgcggccggcctgatgcgcgtgaatcacgtcggcgaggtctgcgcgcaggcgctctaccaggcgcagaagctcaccgcgcgcacggcgtcggcgaaggcgatgttcgaggaggccgcgcgcgaggaggaggatcacctcgcgtggaccgcgcaccgcctgaaggagctcgactcgcgcccgagcctgctcaacccgctgtggtatgccggcgcgctcgcgatcggcgtggcggctggcgcgctcggcgacaaggtcagcctcggcttcatggccgagacggagcggcaggtcgagagccatctcgaaggccacatgtccgagctgccggcgaccgacaccgcgtcgcgcgcgatcgtcgaccagatgcggatcgacgaggtgaagcacggcaaggccgcgaccgacgccggcggcatcgagctgccgctgcccgcgcggatgctgatgcgcgccgcgtcgaaagtcatgacgagcactgcgtactatctc

SEQ ID NO: 11362 - DNA, 2364 bp, Burkholderia cepacia
gtttccctccccgcctcccccgcgccccccgggcgcccggcccccctgcctcgccgccccacccgcgtagcccccgccccccgccgccccccgcgccccccgcccgcggaacggcgcgccgcctccccaccccccccccccgctcggggcgcgccccaaacaccccccgccgaggtgttaacatgcgcgtcctgcctgcgtgtccgcgtgcttcgccagcctgccgcgcacggcatcctcccggcgttccgccgtcaacccgcaacaccatccgccatcatgtcagcaggcctcaatcccgctcagaacgaagcggtgcgctacctcgacggtccctgtctcgtgctcgccggcgcgggcagcggcaagacccgcgtgatcacgcagaagatcgcgcacctgatcgaagcgaaaggtttcgagccgcgccacatcgccgccgtcacgttcacgaacaaggcggcggccgaaatgcgcgagcgtgtgtcgaagctgctggaaggcaagacgctgaccacgccgggcaaggaaggccgcaaggtgcccgtcaaccagctcaccgtctgcacgttccattcgctgggtgtgcagatcctgcgccaggaggccgagcacgtcggcctgaagccgcagttctcgatcatggattcggacgactgcttcgggatgatccaggagcagctcggcacgaccgacaaagggctgatccgcaagatccagagcatcatctcgctgtggaagaacggcctgatcatgcctgacgaggcgatggcgatcgcggcgaacgaggacgaacaccaggccgcgctggtctaccgcaactacgtggcgacgctgcacgcgtaccaggcggtcgacttcgacgacctgatccgcctgccggccgagctgttcgcgaagaacgagcaggtgcgcgaccgctggcagaacaagctgcgctacctgctgatcgacgaataccaggacaccaacgcgtgccagtacgagctgctgaagcagctcgcgggcccgcgagccgcattcacggcggtcggcgacgacgaccaggcgatctacggctggcgcggcgcgacgctcgagaacctcgcgcagctcggcaaggatttcccgaagctgcacgtgatcaagctcgagcagaactaccggtcgacggtgcggatcctgaccgccgcgaacaacgtgatcgcgaacaacccgaagctgttcgagaagaagctgtggtccgagcacgggatgggcgattcgatcaccgtcacggcgtgcaacgacgaggaacacgaggccgagtcggtcgtgttccggctgtccgcgtacaagttcgagcggcgcgcgcagttccgcgactacgcgatcctgtaccgcggcaacttccaggcccgcatcttcgagcaggtgctgcggcgcgagcggattccgtacgtgctgtcgggcggccagtcgttcttcgacaaggccgagatcaaggatctgtgcgcgtacctgcggctgatcgcgaacgccgacgacgatcccgcgttcatccgcgcggtcaccacgccgcgccgcggcatcggcaacacgacgctggaagcgctcggctcgttcgcggggcaggcgaaggtgtcgctgttcgaggccgtgtacatgggcgggatcgaggcgcggctgtcggcgcgccaggtcgaaccgctgcggatgttctgcgacttcatccagcgcctgaccgagcgcgcggacaaggagcccgcgaccgtcgtgctcgacgacatgatggaggcgatccactacgaggcgtacctgtacgacgcgttcgacgagcggcaggcgcagtcgaagtggcagaacgtgctcgaattcctcgaatggctgaagcgcaagggcacgaagcccgagacggaggccgtcgacggcgaggccgacggtttccacaacgcggacgggctcgccgacacgggcaagaacctgctcggcctgatccagaccgtcgcgctgatgtcgatgctcgagggcaaggacgaggacccggacgccgtgcggctgtcgaccgtccatgcgtcgaaggggctcgagtatccgcacgtgttcctggtcggcgtcgaggaaggcatcatgccgcaccgcggcggcagcgaggacgacggcccgatcgacaacgagcggatcgaggaggagcgtcggctgatgtacgtcgcgatcacccgtgcgcagcgcagcctgcacctgaactggtgcaagaagcgcaagcgggcgcgcgagacggtcgtgtgcgaaccgtcgcgcttcatcccggagatggggctcgacgaagcgccgccgccgacgccggaagaggcgccgatgtcgccgaaggaccggctcgcgagcctgaaggcattgctgcagaag

SEQ ID NO: 11363 - DNA, 1020 bp, Burkholderia cepacia
ttgcgtctgcgcgcgtgtcgcgtaggatgtccgttaattcagcgcacgctacgttcgcgcagcaggccgccggctgttgcggccgatgaagcgcgacgcgctttccttcaggttcgtttcgcgcaaccgacggagaccgccttgacccctgttgctcgcctgttgctgtcccccggcgcacgccggttcgtatccggcctgtcggccttcgccgcgctcgccgccgccggcgcccgcgacgcgtcggcccagacgccttcgccgctcggcgaatggcaatacacggcgggcgtaccgctccagaaactcttcgatccgaatatccccacctggcaagtgagcgtcggcgccgcgatgacgctgcagccgcgctatgcgggctccgaccgctatcgcgtgatgggcggcccgaacttcgacatccgctatcgcgacctgttcttcctgtcgaccggcgaggggctcggcgcgaacgtgttgcgcgggccgaactggcgcgtgagcctgtcggtcggctatgacctcggacgccgttcggccgatgatctcggccacctgaacggtctcgacaacatcaacgcggcgcccgtgatgaagctcgcggccgactacgtggtgtcgaaggatttcccgctcgtgctgcgcgcggacgtccggcgcagcatcggcgggtcgaacggctggaccggcgatttctccgcgtacatgccgatgccgggcagcaacgaacacttcttctggttcgcggggccgaccgtgacgttcgccgattcccgctacatgaacagctggttcggcgtgaacccgggcgcggccgcgcgctcggggttgccgacctattcgtcgggggcggggatcaagtcggccggcctcggcgtgacgatggtgtggttcgtgaacaagcactggttcgtgacgatggacggcgcgatcgagcagctcgtcggccgcgcggcgcgcagcccaatcacgcagcagtcgaccaacggcgtgttcgacatgtcggtgaattaccagttc

SEQ ID NO: 11364 - DNA, 3198 bp, Burkholderia cepacia
atggcaaagttttttatcgatcgcccgatcttcgcgtgggtgatcgccatcatcctgatgctggccggggttgcggcgatcttcacgctgccgatctcgcagtatccgacgatcgcgccgccatcgatccagatcaccgcgaactacccgggcgcttccgcgaagacggtggaagacacggtgacgcaggtgatcgagcagcagatgagcggtctcgacaacttcctgtacatgtcgtcgacgagtgacgattcgggcaacgcaacgatcacgctgaccttcgcgccgggcaccaacgccgacatcgcgcaggtccaggtgcagaacaagctgtcgctcgcgacgccggttctgccgcaggtcgtgcagcagctcggtctgtcggtcacgaagtcgagcagcagcttcctgctggtgctcgccttcaactccgaagacggcagcatgaacaagtacgacctcgcgaacttcgtggcgtcgcacgtgaaggatccgatcagccggctgaacggcgtcggtaccgtcacgctgttcggctcgcagtacgcgatgcggatctggctcgacccgaaccgcctgaccaactacggcctcacgccggtcgacgtcagttcggcgatcaccgcgcagaacgtgcagatcgcgggcggccagatcggcggcacgccggccacgccgggcaccgtgctgcaggcgacgatcaccgaatcgacgctgctgcagacgcccgagcagttcggcaacatcctgctgaaggtcaaccaggacggctcgcaggtgcgcctgaaggacgtcgcgcagatcggcctcggcggcgaaaactacaacttcgacacgaagtacaacggtcagccgaccgcggcactcggtatccagctcgcgaccaacgcgaacgcgctcgcgaccgcgaaggccgtgcgcgcgaagatcgacgagctcgcaccgttcttcccgcacggcctcgtcgtgaagtatccgtacgacacgacgccgttcgtgaagctgtcgatcgaggaagtggtcaagacgctgctcgaaggtatcgtgctcgtgttcctcgtgatgtatctgttcctgcagaacctgcgggcgacgatcatcccgacgatcgcggtgccggtcgtgctgctcggtacgttcgcgatcatgtcgatggtcggcttctcgatcaacacgctgtcgatgttcggcctcgtgctcgcgatcggcctgctggtcgacgatgcgatcgtggtggtcgagaacgtcgagcgcgtgatggcggaagaggggctgtcaccgaaggaagcgacccgcaaggcgatgggccagatcaccggcgcactcgtcggcgtggcgctcgtgctgtcggcggtgttcgtgccggtggcgttctccggcggctcggtcggcgcgatctatcgtcagttctcgctgacgatcgtgtcggcgatggtgctgtcggtgctggtcgcgttgattctgacgccggcgctgtgcgcgacgatcctcaagccgatcccgcaagggcatcacgaagagaagaagggcttcttcggctggttcaaccgcacgttcaacaacagccgcgacaagtaccacgtcggcgtgcaccacgtgatcaagcgctcgggccgctggctcatcatctatctggtcgtgatcgtcgcggtcgggctgctgttcgtgcgcctgccgaagtcgttcctgcccgatgaagaccagggcctgatgttcgtgatcgtgcagacgccgtcgggctcgacgcaggaaacgaccgcgaagacgctcgcgaacatttccgactacctgttgaaggacgagaaggaaatcgtcgaatcggcgtttacggtcaacggcttcagcttcgcgggtcgcggccagaactcgggtctcgtgttcgtccgcctgaaggactactcgcagcgtcagcatgcgaaccagaaggtgcaggcgctgatcggccggatgttcgggcgctacgggagctacaaggacgcgctcgtgatcccgttcaacccgccgtcgattcctgagctcggtacggctgccggcttcgacttcgagctgacggacaacgccggtctcggccacgacgcgctgatggccgcacgtaaccagctgctcgggatggcatcgaaggacccgacgctgcagggtgtgcgtccgaacggcctgaacgatacgccgcagtacaaggtgaacatcgaccgcgagaaggcgaatgcgctcggcgtgacggcggatgcgatcgaccagacgttctcgatcgcctgggcgtcgaagtacgtgaacaacttcctcgacaccgacggccggatcaagaaggtgtacgtgcaggccgatgcgccgttccggatgacgccggaagacatgaacatctggtacgtgcgcaacgggtcgggcgggatggtgccgttcagcgcgttcgcgaccggtcactggacgtacggttcgccgaagctcgagcgctacaacggtgtgtcggcgatggaaatccaggggcaggccgcaccgggcaagtcgaccggtcaggcgatggccgcgatggaaacgctcgcgaagaagctgccggtcggtatcggctattcgtggacgggcctgtcgttccaggaaatccagtccggttcgcaggcgccgatcctgtacgcgatctcgatcctcgtcgtgttcctgtgtctcgcggcgctgtatgaaagctggtcgatcccgttctcggtgatcatggtcgtgccgctcggcgtgatcggtgcgctgctcgcggccacgatgcgcggcctcgagaacgacgtgttcttccaggtcggcctgctgaccaccgtgggcctgtccgcgaagaacgcgatcctgatcgtcgagttcgcgcgcgaactgcagcagacggagaagatggggccgatcgaggccgcgctggaagcggcgcgcctgcggctgcgtccgatcctgatgacgtcgctcgcgttcattctcggcgtgatgccgctcgcgatcagcaacggcgcgggttcggccagccagcacgcgatcggtacgggcgtgatcggcgggatgatcacggcgacgttcctcgcgatcttcatgatcccgatgttcttcgtgaagatccgcgcgatcttcagcggcgagaaggaagacgtcgacgaggcgctgcgcctggctcaggagcactcgcaccacgaagagaagccgggcaacggcgacgaaggcaacaagggacag

SEQ ID NO: 11365 - DNA, 1260 bp, Burkholderia cepacia
atgcatttatccgagctcaagtctctgcacgtgtccgaactgatcgaaatggccaacggcctggagatcgaaaacgcgaaccgcctgcgcaagcaggagttgatgtttgccattctcaaaaagcgcgccaagacgggagagacgatcttcggcgacggtacgctcgaagtgctgccggacggcttcggcttcctgcgctcgccggaaatgtcgtacctcgcgagcaccgacgacatctacatcagcccgtcgcagatccgccgcttcaacctgcacaccggcgacaccatcgaaggtgaagtccgcacgccgaaggacggcgagcgctacttcgcgctggtgaaggtcgacaaagtcaacgggcagccgcccgaggcctcgaaacacaagatcatgttcgagaacctcacgccgctgcacccgaacaagccgctgtcgctcgaacgcgaaatgcgcggcgaggaaaacgtcacgggccgcatcatcgacatgatcgcgccgatcggcaagggccagcgcggcctgctcgtcgcgtcgccgaagtccggcaagaccgtgatgctccagcacatcgcgcatgcgatcaagcagaaccacccggacgtgatcctgttcgtgctgctgatcgacgagcgcccggaagaagtgaccgaaatgcagcgctcggtcgccggcgaagtgatcgcgtcgacgttcgacgaaccggccacgcgccacgtgcaggtcgccgaaatggtgatcgagaaggccaagcgcctcgtcgaaatgaagcacgacgtcgtgattctgctcgactcgatcacgcgtctcgcgcgtgcgtacaacaccgtgatcccggcatcgggcaaggtgctgacgggcggtgtcgacgcgaacgcgctgcagcgtccgaagcgcttcttcggcgcggcgcgcaacatcgaggaaggcggctcgctgacgatcatcggcaccgcgctgatcgaaaccggcagccgcatggacgacgtgatctacgaagagttcaagggcaccggcaacatggaagtgcacctcgagcgccgtctcgcggaaaagcgcgtgtatccgtcgatcaacctgaacaagtcgggcacgcgtcgcgaggaaatgctgatcaagcccgagatccttcagaagatctgggtgctgcgcaagttcatccacgacatggacgaagtcgaggcaatggaattcctgctcgacaagatccgccagacgaagagcaactccgagttcttcgacctgatgcgccgcggcggc

SEQ ID NO: 11366 - DNA, 1749 bp, Burkholderia cepacia
atgttgttgcggcaagcgtttcgtttcgcagacaatacgctcccgaataaaagcattctaacggttagaggaacgccaatgacccccgcaagcctcatcgagcaatacggcccgcgcgaatcgatggaatacgacgtcgtgatcgtcggcggcggccccgccgggctgtcggcggcgatccggctcaagcagctggccgccgagaaaggcgccgagatcggcgtgtgcgtgctcgagaagggttccgagatcggcgcgcacatcctgtcgggcgcggtgatggacccgcgcgcgatcaccgagctgtttcccgactggaaggaacgcggcgcgccgctcgacgtcgaggtgacggaagaccgcttcctgttcctgtccgagaagagcgcggtcacgacgccgaactgggcgctgcccgacaacttcaagaatcacggcaattacgtgatctcgctgggcaacgtcacgcgctggctgggccagcaggcggaagccttgggcgtcgagatcttccccggcttccccgccgcggagattctctacaacgacgacggctcggtcaaaggcgtcgcgaccggcaacatgggcgtgggcaaggacggcgagccgaccgagaacttccagctcggcatggagctgcacgcgaagtacacgctgttcgccgaaggctgccgcggccatctcggccgccaactgatctcgaaattcaagctcgacgcgaacgccgatccgcaggcgtacgggatcggcatcaaggaactgtgggaaatcgatccggccaagcacaagcccggcctcgtgatccacacggccggctggccgctgaagtccgatacgtacggcggctcgttcctgtatcacatggacaacaaccaggtcgtggtcggcttcgtggtgggcctgggctacacgaacccgtacctgtcgccgttcgaggaattccagcgctacaagacgcacccgtcgatccgcgcattcctcgaaggcggcaagcgcgtgtcgtacggcgcgcgcgcgatcacggccggcggcctgctgtcgctgccgaagacggtgttcccgggcggcgcgctgatcggcgacgacgcgggtttcctgaacgcgtcgcggatcaagggcagccacgctgcgatcaagaccggcatgctggcggctgatgcggcattcgacgcggtgcaagccggccgtcagtcggacgagctcaatgcgtatccggatgcgttcaagcaatcgtggctgtacacggagctgtaccgcgcgcgcaacttcaagcagtggatggccaagggcctgtatctgggcacgctgatggtcgggctcgagcagaaggtgatgggcggcaacgtgccgtggacgctgcatcaccagcatgcggaccacgagatgctgaagccggcgtcgcagtgcgagccgatcgcgtatccgaagccggacggcaagctgacgttcgaccggctgtcgtcggtgttcatctcgaacacgaaccacgaggagaaccagccggcgcacctgacgctgaaggatgcgagcgtgccggtgaacgtgaacctgcgtacctacgcggggccggaggcacgcttttgcccggcggcggtgtacgagttcgtgaagaacgacgacggcagcgagcgcctcgtgatcaacgcgcagaactgcgtgcactgcaagacctgcgacatcaaggacccgacgcagaacatcgtgtgggtcacgccggaaggcggcggcgggccgaattacccgaacatg

SEQ ID NO: 11367 - DNA, 548 bp, Burkholderia cepacia
atgtcatcagacgaagtttccgaatcccgtcgcaaatgggtgcagggcacgacggccggactggtcgccagcgtcgccctgccgacgatcgcgcagacgggcggcggcccgcccgacgacgccggcgatacggcgccgcgcgatccgcgcacgctttatccgcatgcgccgtttccgcagcagcaccagccgtggccgggcctcgcgggccggatgacgccgcgccccgatcacggcgagcgcagctatcgcggcagcggccggctcgacggccgcaaggcgctgatcaccggtggcgactcgggcatcggccgcgcggtcgcgatcgcctgtgcacgagaaggcgcggacgtcgcgatcgtctatctgcccgacgaggagcccgatgcgcgcgaagtcgtggacctgatccgcagcgcggggcgcaaggccgtgccgctgccggtcgacatccgcagcgaaggcgcgtgcaacgggctcgtcgagcgggccgtcgccgcgctcggcgggctcgacatcctcgtgaacaacgcggcccgccagcagag

SEQ ID NO: 11368 - DNA, 726 bp, Burkholderia cepacia
atgagcatgatcgaattccagaacgtgtcgaagagcttcggccacgtgccggtgctgaagaacatcgacctgaagatcgacgcgggcgaggtggtcgtcgtggtcggtccgtcgggctcgggcaaatcgacgatgttgcgctgtatcaacgcgctggagaaaatcaccggcggcgagctgctggtcgacggccagagcgtgcgcggcaacgcgacgacgatccgcaacatccggctcgaagcgggcatggtgttccagcagttcaacctgttcccgcaaatgaccgcgctcgagaacgtgatgttcgggccgatccaggtgcgcggcgcgtcgcgcgccgacgcgcgcgaccaggcgatggcgctgctcgacaaggtcggcctcgaatcgcgcgcgaatcattacccgtcggagctgtcgggcggccagcagcagcgagtcgcgatcgcgcgggcgctcgcgatccggccgcggttgatgctgttcgacgagccgacctcggcgctcgatccggagctgcgccacgaagtgctgaaagtgatgcaggatctcgcgaccgaagggatgacgatgatcgtcgtcacgcacgagatcggcttcgcgaagcgggtcggcacgcggctgctgttcatggatcagggcggcatcgccgaggacggccatccggtcgacctgatcgaccggccgccgacgccgcgcctgaaggaattcctgaaacacgtgtcc

SEQ ID NO: 11369 - DNA, 900 bp, Burkholderia cepacia
atgaccaaaatgaaattccacaaggcagtcctgacggtcgcggcgctttgcgcgttcgcaagcggcgcgcatgctcaggagacgggcacgctgaagaagatcaaggacacgggcgtgatcgcgctgggccaccgcgaatcgtcgattccgttctcctattacgaccagaaccagcaggtggtcggctattcgcgcgagttccagctgaaggtggtcgacgcggtgaagaagaagctgaacctgccgaacctgcaggtgaagaacatccccgtcacgtcgcagaaccgtattccgctggtgcagaacggcacggtcgacatcgagtgcggctcgacgaccaacaacctcgagcgccagcagcaggctgcgttctccgacacgatcttcgtgatcggcacgcgcctgatgacgaagaaggattcgggcgtcaaggatttcgccgacctgaagggcaagacggtcgtgacgacggccggcacgacgtcggagcgcctgctgcgcaagatgaacaacgacaagcagctcggcatgaacatcatcagcgcgaaggatcacggcgattcgttcaacacgctggaatcgggccgcgcggtcgcattcatgatggatgacgcgctgctcgcgggcgagcgcgcgaaggcgaagcagccgggcgaatgggtgatcgtcggcacgccgcaatcggaagaggcttacggctgcatgatgcgcaagggcgacgccgacttcaagaaggtcgtcgacgacgcgatctcgcaagtcgagaagtcgggcgaagccgcgaagatctacgcgaagtggttcgagaacccgatcccgccgaaggggctgaacctgaacttcccgctgtccgattcgatgaagaagctgtacgcgaacccgaacgacaaggcgctcgac

SEQ ID NO: 11370 - DNA, 522 bp, Burkholderia cepacia
atgctgcagatccattccaccacgctcgatgcgcaagtcgtcgacatcacgacgctcgaggtcgacgcaatcgtcaacgccgcgaacggctcgctgctcggcgggggcggtgtcgacggcgcgattcaccgcgcggccggccccggcctgctcgccgagtgccgcacgctcggcggctgcgacaccggcgacgcgaagctcacgcgcggccacgggctgccggcgcgctatgtgatccacgcggtcgggccggtctggtacggcggcgcgcgtggcgaggccgagttgctcgcgtcgtgctaccggcgcgcgatcgagctggccgaagaagtcgccgcgacgtcgatcgcgttcccggcgatcagttgcggggtctaccgctatccggccgaagccgccgtcgatatcgcggtcggcaccgtcgccgagatgctcgcgcaggcgccgaacctcacacgcgtggtgttcgcgtgcttttctcccgatatctacgacctgtaccgcgcacggctcgcgcgaacc

SEQ ID NO: 11371 - DNA, 162 bp, Burkholderia cepacia
cgcctgccgcaggtgacgggcacgggcggcgacatccagatcgtccgtgagttgtccgggctgctgaaccagtccgacaaggaagcgcagaagctcagcgacacgttcatcgcgagcgagatgttcatgctggcggttagcgcgtacaaagtcgatgccgcg

SEQ ID NO: 11372 - DNA, 834 bp, Burkholderia cepacia
gtgcgtgagctcaggcagtgtcatccggtagctgcgctcctgaaggcggcaggcctggcgcgcagcacgttctattaccagctcaaggcattggctgccggcgatcggtatgcgaatctcaaagcgaagatccagaccgtatacgaccaccacaagggccgttacggctatcggcgaatcacggcggcgatccggcagaccggagatgcgatcaaccacaagaccgtgcaacggttgatgggacagctgcaattgaaatctctggtacgcccaaagagatatcgttcctggcgaggcgaagtcggccgcgttgccccgaatctactgcggcgtcagtttgatgctgaacgcccgaatcagaagtgggtgaccgacgtgaccgaattcaatgtagagggccaaaagctctatctatcgccggtgatggacttgtacaacggggagatcgtcgcttaccaaatggatgagcgcccgagcttcgagttggtcagctgcatgttgaagaaggcgttggccaagctcgatgatgaaggacggccgttactgcattcggatcaaggctggcagtatcagatgcccgcctaccgtcggctgttgaagcagcatgcgctcacccagagcatgtcgcgcagaggcaactgccttgataacgcagccatggagagcttcttcggcacgctgaaatccgagtgctatcggctgacgcgctttgcgagcgtggagcagttgcgagatgcgttgagccgttacatccactactacaaccacgaacgcatcaagctgaaattaaatgggctgagtcccgtgcaatacaggactcagcccttggccgct

SEQ ID NO: 11373 - DNA, 858 bp, Burkholderia cepacia
atgaccgatcgaaacgaagctttttcgccgcgctcgaccgccgattttcgcgcgctcgacgccgcgcaccacatccatccgttctcggacatgggcgcgctcaatcgtgccggcagccgcgtgatcgtgaaggccgacggcgtctacctgtgggactcggacggcaacaaggtgatcgacgggatggccggcctgtggtgcgtgaacgtcggctacgggcgcaaggaactcgccgacgccgcgtatcgccagatccaggagctgccgttctacaacacgttcttcaagaccacgcacccgccggtgatcgagctttccgcgatgctcgcggaagtgacgccggccggcttcaactacttcttctattgcaacagcggctcggaaggcaacgacaccgtgctgcgtctcgtgcaccagtactggcgcgtgcagggcaagccgcagaagaaatacgtgatctcgcgcgagaacggctatcacggctcgacgatcgcgggcggcacgctcggcgggatgggctacatgcacgagcagatgccgtcgaaggtcgagcacatcgtgcacatcgaccagccgtacttcttcggcgaagcggcagccggcgaaacgcccgaagcattcggcctcgcgcgcgcgcagcagctcgaagcgaagattctcgaactcggcgcggagaacgtcgcggctttcatcggcgagccgttccagggtgcgggcggcgtgatcttcccgtcggctacgtactggccggaaatccagcggatctgccgcaagtactacatcctgctggtcgccgacgaagtgatcggacgcttcgggcgcaccggcaaatggttcgcgcaccatcacttgagctac

SEQ ID NO: 11374 - DNA, 1392 bp, Burkholderia cepacia
atgctcgctaccgattccgatccgatcgtcgccattgccaccgctgccggccggggcggcatcggggtcgtccgcgtgtcgttcgggcgtggcggcgaggcggccgcgctgccgctgatcgacgcgttgtgcgggcaaaagctcgcgccacgccacgcgagctacgtgccgtttctcgacgcgcacggcgcgccgctcgaccgcgggatcgcgctgtatttcccggcgccgcattcgtacaccggcgagcacgtgctcgagctacaggggcatggcgggccgatcgtgatgcagctgctgctgcagcgctgcctggatgcggggcgcggcttcgggctgcggctcgcggaaccgggcgaattcacgcggcgcgcgttcctgaacgataagctcgacctcgcgcaggccgaggctgtcgccgacctgatcgaggcgagcaccgaggccgcggcgcgctcggccgggcgttcgctcgacggcgcgttctcgcggcagatccacgcgctcgtcgacgacgtgatcacgctgcggatgctggtcgaggcgacgctcgattttccggaggaggaaatcgacttcctcgaagcggccgacgcgcgcggcaagctcgcgaagatccgcgcgcaactcgcgcacgtgctcggcgatgcgcgtcagggcgcgttgttgcgtgaagggctgtcggtcgtgctcgcggggcagccgaacgtcggcaagtcatcgctgctgaatgcgctggcgggcgccgagctggcgatcgtcacgccgattgccggcacgacgcgcgacaaggtggcgcagacgatccaggtcgaagggattccgctgcacatcatcgatacggccgggttgcgcgagacggaggacgaagtcgaacggatcggcattgcgcgcacgtggagcgagatcgagcgcgcggacgtcgtgctgcatctgctcgattcgcgcacggggatgacggcggacgacgaaacgatcgccgcgcggtttccggccggcgtgccggtggtgcgcgtgctgaacaagacggacctgaccggcgtgccggcatgcgtcgagcatccggcggcggaaggcgatctgaccgaggtgcatctgtcggcgaaacgcggcgacgggatcgacatgctgcgcgcggagctgttgcggatcgcagggtggcaggcgggggccgagggtgtgtatctcgcacgcgagcggcatctgatcgcgctgcgggccgcgcaggaacatctcgcgcaggcggcggatcatgcggagcagcgtgcgcagtcgctcgatctgtttgccgaagagctgcggctcgcgcaggagcagctcaatgcgattaccggggagttcacgtcggatgatctgctgggggtgattttcagcaggttttgtatcgggaag

SEQ ID NO: 11375 - DNA, 897 bp, Burkholderia cepacia
atgcgctgggtcctgctgatcgtgttcattgcgtgtgtcgtgtacacgcatcggcgcggcaaggttcggcacgggttgttccggcaactctccgaccactcgacctttaccgcgccgctgaactgcttttcatacgcgttctcgtcggtgccgaccaccccgtttctcgacacggatcactttccggagctcgcggtgctgcagcgcgaatggcgcacgttccgcagcgaagcgctcgcgttgcgcgacgcgagccggatcaaggcatcgggcgagtacaacgacatcggtttcaattcgttctttcgcaacggctggaagcgtttctacctgaagtggtacgacgcgccgcatccgtccgcgcaggcattgtgtccgcgctcggtcgagatcctgtcgcggattccgtcgatcaaggccgcgatgttcgcgcagttgccgccgggcggcaagctcgggctgcatcgcgatccgtatgcgggctcgttgcgctaccacctcgggctcgacacgccgaacgacgacgcgtgccggatcgtcgtcgacggcgaatcgtatgcatggcgtgacggcgaggccgtgatgttcgacgagacgtacctgcactgggccgaaaaccgcaccgcgaacgatcgcgtgatcctgttctgcgacatcgagcgcccgatgaaatatcgctgggcgcagcgcatcaacgatgcgttcgggcaactgctgatgcgcgcggccgcatcgccgaacgaaacgggcgatcgcacgggcgggctcaatcgcgcgttccggtacctgtatgcgattcgccgcgccggcaagcggttgaaggcgtggaatcgcaccgtgtactacatcgtcaagtggctgctgttcggcgggatcgcggtcgcgatcttctgtatc

SEQ ID NO: 11376 - DNA, 684 bp, Burkholderia cepacia
atgaaatcgacccgaccctttcacccgactcccgtcatcacgatcgacggcccgaccgcttccggcaagggcaccgtcgcggcgctcgtcgccgcgcaccttggcttccacctgctcgacagcggcgcgctgtaccggctcgcggcgctcgcgagcgtgcgctacggcatcgcggcggaggacatcgacgcgctcgtgaagctgatcgacgatctgcacatcacgttccgtgaggggtgcgcgcaactcgacggcgtcgacgtgtcgaacgacattcgcgccgaagcggtcggcaaccgcgcgtcggccattgccgtgcacggccccgtgcgcgccgcgctcgtcgcgcgccagcgcgcgttccgcaagacgccgggcctcgtggcggacgggcgcgacatgggcaccgtgatcttcccggacgccgtgctgaaggtgttcctgacggccagcgccgaggcgcgcgcgaccaggcggcataagcaattgatgcaaaaaggtttttctgctaatatagatgacttgctccgggatcttcgtgaacgtgacgcgcgcgacagcaatcgcgcggccgcgccgctgaagcctgcggcagatgccaagctgctcgatacgtcggcactttcggtcgatgaagccgtcgatcaggtgctgcagtggtaccgggcgctcggccagcccgcc

SEQ ID NO: 11377 - DNA, 642 bp, Burkholderia cepacia
atgaccgccgtccgtgcaccgcgccgccgcgcgccgagcgacgggcagggcggtttcgatttcagccgcccggacgagatcgtgtgcggcgtcgacgaagcgggccgcggcccgctcgcagggccggtggtggccgccgcggtgatcctcgatccggcgcggccgatcgacgggctcgacgattcgaaggtgctctccgcgaagaagcgcgacctgctgtacgacctgatcgtcgcgcgttcgcacgcgtattgcgtcgcgtcggcgagcgtcgacgagatcgatacgctgaacatcctgcacgcgacgatgctcgcgatgaagcgggccgtggaagggctgtcggtgctgccgacgctcgcgcagatcgacggcaaccgctgcccgacgctgagcgtgcgtgccgaggcgatcgtcagcggcgacgcgctcgtgccgagcatctcggccgcctcgatcctcgcgaaagtcacgcgcgatcgcatgctggtcgacctgcacgaacgtttcccggtgtacggcttcaacgtgcatgcgggctacggcaccgcgaaacacctcgccgcattgcgcgaacatggcccgtgcgaagcgcaccggcgctcgttcgcgccggttcgtgcggcgcttgatctgattcga

SEQ ID NO: 11378 - DNA, 372 bp, Burkholderia cepacia
atggcaatcgcaaaagaagacatcctggcagcagtcgaagggatgaccgttctggaactgaacgaactggtcaaggcgttcgaagagaagtttggcgtgtcggcagctgcagtggcagtcgctggcccggcaggcggcggcgctgctgctgctgcagaagagaagaccgaattcacggtcgtcctggctgaagccggcgccaacaaggtttcggtcatcaaggccgttcgcgaactgacgggcctgggcctgaaggaagcgaaggacctggttgacggtgcaccgaagcccatcaaggaaggcgtcgacaaggctgctgctgaagaagccaagaagaagctggaagaagctggcgcgaaggtcgaagtcaag

SEQ ID NO: 11379 - DNA, 1104 bp, Burkholderia cepacia
cccgaaccgtcattttttcttttctacagaggtgccatgggcgcgcatgtgccgtcgtctcacgattccgccgcgcggccgcgcgcgcaacagatcgcccgcgtcgcgttgtatgcggcgctgctggtgcttgcgctgtgggtgatccgcgacttcattcccgccatcgcgtgggcctgcgtgatcgccatcgcgatgtggccgctgctgaagcgcttcgaatcgcaccggctgttccgcgaccggccgacgctgatcgcgaccgtcatcacggcggcgatttcgctgctcgtcgtgctgccggtggcggtcgcgacgacccaggcgatcgcgcaggcgcatgacctgcgcgagtggctgcacacggtccaggacaacggcattccgttgccggacgtggtcagccggttgccgtacggcgcggcgcagatcaccgaatggtggcaggccaatctcggccatccgctgcatgcggccaccgcgatgcacggcgtcaacagcgagaaattcatcgcgttcggccggcaattcggcacgaagctcgcgcacgtgctgctcgaattcggtttcatgctcgtcacgctgttcgtgatcctgcgcgcgggccacaagctgtcgggtgcgttgctgcagggcgcgcggcgcgcgttcgggcgcaacggcgcggaactgatcgagcggatggtcgcggccgtgtacggcacggtgacggggctcgtcgtcgtcgggctcggcgagggcgcgctgctcggcgtcgcgtatgcgctcgcgggcgtgccgcatgcggcgctgctcgggctcgtcacggcggtcgccgcgatgctgccgttctgcgcgccggtcgtgttctgcggcgcggcgctctggctgttcgtgcaggggacgaccatgtgggccgtcgtggttacggcgctcgggttcatcgtcgtgttcgtcgccgagcatttcgtgcggccggtgctgatcggcggttcgacacggctgccgttcctgctcgtgctgttcggcatcctcggcggcgccgagacgttcggcctgatcgggctgttcgtcggcccggcgctgatgacggtgctcacgatgctgtgggccgaatggatcgct

SEQ ID NO: 11380 - DNA, 1536 bp, Burkholderia cepacia
atgcgccgccgccgtagtgaagacggcggcggccgttttcatccgtccttttcgaagcaggtgattcatatgagcactgttcaggaaaccctggcactgaaagatccgtcgctgttccgccagcaggcgtacgtcaacggcgaatggcaaggcgcgacgaacggcgagacgttcgacgtccgcaacccggccaccggcggcctgctcggcaccgtgccggcgatgggcgcggccgagacacgtcacgcgatcgacgccgcgaacgccgcctggccggcatggcgcaagaagaccgcgaaggagcgtgcggtcatcctgcgcaagtggcacgacctgatgatggaaaacgccgacgacctcgcgctgatcctgacgaccgagcaaggcaagtcgctggccgaagcgaagggcgagatcggctacgcggcgtcgttcctcgaatggttcgccgaggaaggcaagcgcgtgtacggcgacacgatcccgacgccggcgagcgacaagcgcatcgtcgtgacgaaggaagcgatcggcgtatgcgcggcgatcacgccgtggaacttcccggcggcgatgatcacgcgcaaggtcggcccggcgctcgcggccggctgcccgatcgtcgtgaagccggccgaggccacgccgttctccgcgctcgcgatggcggtgctcgccgagcgcgcgggcgtgccggccggcgtgttcagcgtcgtcacgggcgacccgaaggcgatcggcggcgagctgacgtcgaacccgatcgtgcgcaagctgtcgttcacgggctcgacgccggtcggccgcctgctgatggcgcaatgcgcggcgacggtcaagaaggtgtcgctggagctcggcggcaacgcgccgttcatcgtgttcgacgacgccgatctcgatgcggccgtgcagggcgcgatcgcgtcgaagtaccgcaacagcggccagacgtgcgtgtgcacgaaccgcttctacgtgcacgaagccgtatacgaccagttcgcgcagaagctcgcggcggccgtcggccagctgaaggtcggccgcggcacggagccgggcgtcacgcagggcccgctgatcaacgaagcggccgtgctgaaggtcgaggcgcacatcgaggacgcgctcgcgaagggcgcgaccgtcgtgacgggcggcaagcgccatgcgctcggccacggcttcttcgagccgaccgtgctgacgggcgtcacgccggcgatgaaggtcgcgaaggaagaaacgttcgggccgctcgcgccgctgttcaagttcggcagcgacgacgaagtgatccgcctcgcgaacgacaccgagttcggcctcgccgcgtacttctacagccgcgacatcggtcgcgtgtggaaggtggccgaagcgctcgaatacgggatggtcggcgtgaacacgggcctgatctcgaacgaagtcgcgccgttcggcggcgtcaagcagtcgggcctcggccgcgaaggctcgcactacggcatcgacgactacgtcgtgatcaagtacctctgcctggccgtc

SEQ ID NO: 11381 - DNA, 4104 bp, Burkholderia cepacia
atgcaatattccttcaccgagaagaagcgcattcgcaagagtttcgcgaagcgccccatcgttcaccaagttccgttcttgctggctactcagcttgaatcattcagcacgtttctgcaagccgatgtgcccgcgacgcaacgtaagcccgagggtttgcaggccgcgttcacgtcggtatttcccattgtttcgcacaacggtttcgcgcgcctcgagttcgtgagctatgcgctgtcctcgccggcattcaacatcaaggaatgccagcagcgaggcctgacgtactgctccgcgctgcgcgcgaaggtccgcctcgtcatcctcgacaaggaatcgccgaacaagccggtcgtcaaggaagtgaaggagcaggaagtgtacatgggcgaaattccgctcatgacgccgacgggctcgttcgtcatcaacggcaccgagcgtgtcatcgtctcgcagctgcatcgttcgcctggcgtgttcttcgaacacgacaagggcaagacgcacagctcgggcaagctgctgttctcggcacggatcattccgtaccgcggttcgtggctcgacttcgaattcgatccgaaggacatcctgtacttccgcgtcgaccgtcgccgcaagatgccggtcacgatcctgctgaaggccatcggcctgacgccggaacagatcctcgcgaacttcttcgtgttcgacaatttcacgctgatggacgaaggcgcgcaactcgagttcgtgcccgagcgcctgcgtggtgaagtcgcgcgtttcgacatcacggatcgtgatggcaaggtcatcgtccagaaggacaagcggatcaacgcgaagcacattcgcgacctcgaagccgcgaagaccaagttcatctcggtgccggaagactatctgctcggccgcgtgctggcgaagaacgtcgtcgacggcgacaccggcgaagtgatcgcgagcgcgaacgacgaagtcacggaaagcgtgctcgagaagctgcgcgaagcgggcatcaaggacatccagacgctctacacgaacgatctggatcagggcccgtacatctcgtcgacgctgcgtgtcgacgaaacgaccgacaagacggccgcgcgcatcgcgatccaccgcatgatgcgtccgggcgagccgccgaccgaagaagcggtcgaggccctgttcaaccgtctgttctacagcgaagaagcgtacgacctgtcgaaggtcggccgcatgaagttcaaccgccgcgtcggccgtgacgagatcgtcggcccgatgacgctgcaggacgacgacatcctcgcgacgatcaagatcctcgtcgagctgcgcaacggcaagggcgaagtggacgacatcgaccacctcggcaaccgtcgcgtgcgttgcgtcggcgaactggcggaaaaccagttccgcgccggtctcgtgcgtgtcgagcgcgcggtcaaggaacgcctcggccaggccgaaagcgaaaacctgatgccgcacgacctgatcaactcgaagccgatttcgtcggcgattcgcgagttcttcggctcgtcgcagctgtcgcagttcatggaccagaccaacccgctgtcggaaatcacgcacaagcgccgtgtttccgcactgggcccgggcggtctgacgcgcgaacgcgcaggcttcgaagtccgcgacgtgcacccgacccactacggccgcgtgtgcccgatcgaaacgccggaaggtccgaacatcggcctgatcaactcgctcgcgctgtacgcgcacctgaacgagtacggcttcctcgagacgccgtaccgcaaggtcgtggacagcaaggtgaccgatcagatcgactacctgtcggcgatcgaggaaggccgctacatgatcgctcaggcgaacgccgcgatcgacgaagacggccgactcatcgacgaactcgtgtcgtcgcgcgaagccggcgaaacgatgatggtcacgccggaccgtatccagtacatggacgtcgcgccgtcgcagatcgtgtcggtggccgcatcgctgattccgttcctcgagcacgatgacgcgaaccgcgcactgatgggctcgaacatgcagcgtcaggccgtgccgtgtctgcgtccggaaaagccggtcgtcggtacgggcatcgagcgtacctgcgcggtcgactccggtacgacggtccaggcgttccgcggcggtgtggtcgactacgtcgacgcaggccgtatcgtgattcgcgtgaacgacgacgaagcagtcgcgggtgaagtcggtgtcgacatctacaacctgatcaagtacacgcgttcgaaccagaacacgaacatcaaccagcgtccgatcgtgaagatgggcgacaaggtctcgcgcggcgacgtgctggccgacggcgcctcgacggacctgggcgagctcgcgctcggccagaacatgctgatcgcgttcatgccgtggaacggctacaacttcgaggattcgatcctgatctcggagaaagtggtcgcggacgatcgctacacgtcgatccacatcgaagagctgaacgtcgttgcacgcgacacgaagctcgggccggaagaaatcacgcgcgacatctcgaacctggcggaagtccagctcggccgtctcgacgaatcgggcatcgtgtacatcggtgctgaagtcgaagcaggcgacgtgctggtcggcaaggtcacgccgaagggcgagacccagctgacgccggaagagaagctgctgcgcgcgatcttcggcgagaaggcttcggacgtgaaggacacgtcgctgcgcgtgccgtcgggcatgagcggcaccgtgatcgacgtccaggtgttcacgcgtgaaggcatccagcgcgacaagcgtgcgcaacagatcatcgacgacgaactgaagcgctaccgtctcgacctgaacgaccagctgcgcatcgtggaaggcgacgcgttccagcgtctcgcccgcatgctcgtgggcaaggtcgcgaacggcggtccgaagaagctcgcgaagggcacgaagatcgaccaggcttacctggaagatctcgaccactaccactggttcgacatccgcctcgcggacgacgaagcagcggcatcgctcgaagcgatcaagaactcgatcgaagagaagcgtcaccagttcgatctcgcgttcgaagaaaagcgcaagaagctcacgcaaggcgacgaactgccgccgggcgtgctgaagatggtcaaggtgtacctcgcggtgaagcgccgtctgcagcctggcgacaagatggcaggccgtcacggtaacaagggtgtcgtgtcgaagatcgtcccgatcgaagacatgccgtacatggccgatggccgtccggcagacgtcgtgctgaacccgctcggcgtgccgtcgcggatgaacgtgggtcaggttctggaagtgcacctcggctgggccgcgaagggcctcggctggcgtatcggcgaaatgctgcagcgtcaggcgaagatcgaggaactgcgcacgttcctgacgaagatctacaacgagtcgggccgccaggaagatctggaaagcttcaccgacgacgagatcctcgaactcgcgaagaacctgcgcgaaggcgtgccgttcgcgacgccggtgttcgacggtgcgaccgaggaagaaatgggcaagatgctcgacctcgcgttcccggacgacatcgccgaacagctcggcatgaacccgtcgaagaaccaggtccgtctgtacgacggccgcacgggtgaaatgttcgaacgtcgcgtgacgctcggctacatgcactacctgaagctgcaccacttggtcgacgacaagatgcacgcgcgttcgaccggcccgtactcgctcgtcacgcagcagccgctgggtggtaaggcgcagttcggtggccagcgtttcggtgaaatggaagtgtgggcactcgaagcgtacggcgcgtcctacgtgctgcaggaaatgctgacggtgaagtcggacgacgtgaccggccggacgaaggtgtacgaaaacctcgtcaagggcgaccacgtgatcgatgcaggcatgccggaatccttcaacgtgctcgtgaaggaaatccgctcgctcggtatcgatatcgatctcgaccgcaat

SEQ ID NO: 11382 - DNA, 376 bp, Burkholderia cepacia
  misc_feature (322)..(322): n=g, a, t or c
ggctggggtgcagcgccccgcggatccgggcggtgtgatcttcatccacctgccccatcgtaaaggcatcgtgcaattggtgtgccacccggatcgccacgagatgttcgcgcccgccgaaggcgtgcgcaacgagttctgcgtcaggatcaagggcatcgtgcgcaaccgtccggaaggcacggtcaacgccggcgtgaagagcggcaagatcgaagtcctgtcccacgaactgaacgtgctgaacgcgtcggtcaggccgcagttccagctgcgctagtacaacaggtcgtgaccgaagtgtttcacgcaccgggtgctnccccggcgggtccggcttcagcagccggtgcggcaggcgccgcgtcgcctgacg

SEQ ID NO: 11383 - DNA, 1431 bp, Burkholderia cepacia
ttgcccgtttggccaattgccgccgtgtggcgcgcgccctattctccgttcacccttcgacttcaatgcagcatcggacgcggcgccgccacgattccacgatgcgccgtgccaggagacattgccatgacccccaccttcgataccctcgacgccgcggccggcgcccgtgcgcgcagccaggcccgcaaggccgcgatcggcagcttcgtcggcgccgtcgtcgactggtacgacttcctgctgtacgggatcgtcgccgcgctggtgttcaattcggagttcttcccgaaagtcagtccgacgatgggcacgctcgcggcgttcgccaccttcggcgtcggcttcctgttccggccgctcggcggcatcgtgttcggccactacggcgaccggctcggccgcaagcggatgctcgtgctgaccgtgatgctgatggggctgtcgacggtcgcgatcggcctgctgccggcgttctcgacgatcggctggtgggcgcccgtgctgctggtgctgatgcgcgcgatccaggggttcgccgtcggcggcgaatggggcggcgcggcgctgatggccgtcgagagcgcgccgaagcaaaagaaggcgttctacagcagcggcgtgcaggtcggctacggcgtcgggctcgtgctggccaccggcatcgtctcgatcctgggccatacgctcggcgaggccgcgttcaagtcgtggggctggcgcctgccgttcgtgttcagcatcgtgctggtgctgatcgggctgtgggtgcgcaagaacatggacgaatcgcaggagttcgtcgagaaggtcgagcatggcaaccgcaagctgcgcctgccggtgctggaagcgctgacgcgccacccgaaggcgttcctgctgatcgtcgcgctgcggctcgccgaactgttcacgatgtatatcgtcaccgcgttcgcgctcagctattcgacgacgaacctcggcatgtcgcgcgacctgttcctgaacatcggcctgctggtcggcgcggtgagctgcgtgacgatcccgtgcttcgcgtggctcgccgaccgctacggcctgcgccgcatctacctgatcggcgcgctgatcggtcttgcgtcggcggtaccgttcttcgtcgcactggaagcgcggtcgatcgcatggatcgtgatcttctcgatcctgctggcgaacgcggcgcacgacatggtcgtgagcgtccagcagccgctgtttaccgagctgttcggcgccgaataccgctacagcggcgcgggcgtcggctaccagttcgcgagcgtcgtcggcggcgggttcacgccgttcatcgcggtcggcctcgtcagcgtggccggcggttcgtggcacctcgtcgccggctatctcgcggtcggctgcctgatctcgctggtggtcgcggcgcggatgcgcgcggcgcaa

SEQ ID NO: 11384 - DNA, 2073 bp, Burkholderia cepacia
atggcccgaacccaagccgaaccgccagcaagccagcccgacgcgcgcgccgcgtggctgcgcgaccaactcgagcgggcgaactacgcctattacgtgctcgaccagccggatctgcccgacgccgaatacgaccggctgttccgtgagctgcagcagctcgaaaccgaccatcccgaactcgtgacgcccgattcgccgacgcagcgcgtcggcggcgaagcggccggcggcttcacgccggtcgtccacgatgcgccgatgctgtcgctgaacaacggcttcgccgacgaggacatcgtcgcgttcgacaagcgcgtcgctgatgcgctcgccaaggcgaccgatctcgccggctcggtgaccgaccccgtggaatacgcgtgcgaactgaagttcgatggcctggcgatttcgctgcgctacgagaacggcgtgttcgtgcaggccgcgacgcgcggcgacgggacgacgggcgaggacgtgaccgagaacgtgcgcacgatccgctcgattccgctgaaactgaagggcaagcacgtgccggccgtgctcgacgtgcgcggcgaggtgctgatgttcaagcgcgatttcgcacgcctgaacgaacgccagcgcgcggccgagcagcgcgaattcgcgaacccgcgcaacgcggcggccggcagcctgcgccagctcgactcgaagatcaccgcgcagcggccgctgtcgttcttcgcgtacgggatcggcgtgctcgacgggatgccgatgcccgacacgcacaccgcgctgctcgactggtacgaggcgttcggcctgccggtgaaccgcgagcgcgcggtcgtgcacggcgccgaaggtttgctcgacttcttccgcaaggtcggcgagaagcgcgagtcgctgccatacgacatcgacggcgtcgtctacaaggtcaaccggcgcgacgagcaggagcggctcggcttcgtgtcgcgtgcgccgcgcttcgcgctcgcgcacaagttccccgcgcaggaagcgctgacgaagctcgtcgcgatcgacgtgcaggtcggccgcaccggcgcgatcacgccggtcgcgcgcctcgagccggtgttcgtcggcggggcgaccgtgaccaacgcgacgctgcacaacgaggacgaagtgcgccgcaaggacatccggatcggcgacaccgtgatcgtgcgccgcgcgggcgacgtgattccggaagtggtcggcgcgctgctcgaccggcgcccggcagacgcggccgaattcgtgatgccgaccgaatgcccggtgtgcggctcgaagatcgagcgcctgccggacgaggcgatcgcgcgctgcaccggcgggctgttctgcccggcgcagcgcaagcaggcgctgtggcatttcgcgcaacgccgcgcgctcgacatcgacggtctcggcgagaagatcatcgatcagctcgtcgaactgaatctggtgcgcacgccggccgacctgttcaatctcgggttcgcgacgctggccgaactcgaccggttcgcggagaagtccgcgcagaatctgctcgattcgctcgagaaggcgaagcacacgacgctcgcgcgcttcatctacgggctcggcatccgccatgtcggcgaatcgaccgcgaaggatctcgcgaagcatttcggctctctgacgccgatcatggacgcgtcgatcgaggaactgctcgaagtgaacgacgtcggaccgatcgtcgccgagtcgattcaccagttcttcgcggaagagcacaaccggacggtgatcgagcagttgcgcgcgccgggcaaggtcacgtggccggaagggccgcccgcgccgaaagcgccgcagggcgtgctagccggcaagacggtcgtgctgaccggcacgctgccgaatctgacgcgcgatgcggcgaaggaaatgctcgaagcggcgggcgccaaggtggccggctcggtatcgaagaagacggattacgtggtcgcgggcgccgaagccggcagcaagctcgcgaaggccgaggaactcggcatccccgtgctggacgaagacggtctgcaccaactcctggagggtaatacgcca

SEQ ID NO: 11385 - DNA, 744 bp, Burkholderia cepacia
atgacttcctccaacacgacgatcggcagcaacggcaccaacgtgtcgacgctgccgaccgacacgatgaacaccaacaacgtgtcgtcgaccaacggcacgtcggcgagcgacctgcaggcgacgttcctgaagctgctcgtcacgcagttgcagaaccaggatccgaccagcccggtcgacagctcgcagatgacgtcgcagctcgcgcagatcaacacggtgagcggcatcgcgcagttgaacacgtcgctcacgtcgctgtcgacgcagctcgcggccggccagcagacgcaggccgcgctgctgatcggcaccaacgtgctcgcgccgggcaacagcgtcgcggtgaagggcggcgcggcgtcgccgttcggcgtgtcgctcgcgaattcggtgtcgaacctgacgatcaccgtgaagaactcggcgggcgccgtcgtgaacacgatcaacgcgggcgcgcagtcggccggcaccgtgccgttcaactggacgccgaccgacgcggccggcaacgcgctgccggacggcacgtacacggtcagcgcgtcgtacaccaacagcgccggcacgccgcaggcggccacgacgctcgcggccgcgacggtgcagagcgtggtcaagcaggcggacggcaccgcggggctcgtgctgtcgaacggcacgacggtggggctcacccaggttgcgtcgatcttcccgaacaccaagtcgtccacgtccggcgacaccactaccaac

SEQ ID NO: 11386 - DNA, 297 bp, Burkholderia cepacia
atggccctgaccctgaccgatgtgaaacgcatcgcgcacctggcgcgactcgaaatggccgacgccgacgccgagcacatgctcggccagctcaatgaattcttcggcctcgtcgagcagatgcaggcggtcgacaccgccggcatcgcgccgctcgcccacccgatcgaacagatccaggaagtcgcgcagcgcctgcgcgacgacgccgtgacggaagtcgtcgatcgcgacgacaaccagcgtccggcgccggccgtccaggacggcctctatctcgtgccgaaggtgatcgag

SEQ ID NO: 11387 - DNA, 1158 bp, Burkholderia cepacia
atgccgatgatcgctggcggcgaaacgcgtgccgcgctcggcgcgctcgcgcacggctggcggatgcgattcccgctgccggtcgtcgcggtgacgggcagcaacggcaagacgaccgtcaaggaaatgatcgcgtcgatcttcgcggcggcggtcggtgccgacgcgcggctcgcgacggccggcaacctgaacaacgatgtcggcctgccgctgacgctgctgcgcctgtcggccgcgcatcgtctcgcggtgatcgagatcggcatgaaccatccgggcgaaaccgaagtcctcgcgcgcctcaccgcgccgacggtcgcgctcgtcaacaacgcgcagcgcgagcaccaggaattcatggcgacggtcgaagccgttgcgctcgaacacgcggccgtgatccacgcgctgccgccggacggcgtcgcggtgttcccggccgacgacgcgtacgcgggcatctggcgcgtcgcggcaaccggcaaccggatcctcgatttcgcgctgcacgacgccgaacggcagaacgacgcacagatcgtcggtcgcatgcacggcgacgaactcgcgatcgacacgccggccggcgccgtcacggtgcggctgcgtgcgctcggcgagcacaacgcgcgtaacgcgctggccgcgacggccgcggcgctcggcgccggcgtcgcgctgtcggcgatccggcagggtctcgaagcgttcgaaccggtcaagggccggctgcaggtgaagccggcgagcgtcggcagcctcgcgggcgcgacggtcgtcgacgatacgtacaacgcgaaccccgattcgatgcgtgcggcgatcgacgtgctcgccgcgcatccggcgccgcgtgtgctggtgatcggcgacatgggcgaagtcggcgacgaagggccggcattccaccgcgagatcggcgcgtacgcgcgcgaacgcgggatcgacgcgctgttcgcgctcggcgacgcgtcgcgcgacgcgtgcacggcctacggcgacaccgcgcgccatttcgacgatgtcggcgcgctcgtgtcggcgctgctcgcggccggttacggcgcgcaggcgacggtgctcgtgaagggctcgcggtacatgaagatggagcgcgtggtcgacgcgctgacgaaccaacccgcggcgggcacc

SEQ ID NO: 11388 - DNA, 1119 bp, Burkholderia cepacia
  misc_feature (3)..(3): n=g, a, t or c
gtngacgccggccgcaccggcgcccgccgcgcgaatatgcatttcacgattcgatgtttgtcggccggaaaccgattccgtaacctgcccggcagccgcgcggcccgcgcgcggatcaccgaggacacaccgccgatgccccacgcttccgccccagcgcgccgccgcgcgctgcagcgccttgccgccctcgccgccgcgccgttcgcgggcggccttgccctgcccgcccgcgcggccggcgccgatctgtcgggcgtcacgctcgtcctcggcgaccaggccggcggcctgcgcgcgctcgccgaagcggcgcgcgtgctcgacggcacgccgtaccggttccgctgggccaacttccagggcgccgcgccgctgttcgaagcgcagcgcgcgggcgcgatcgatctcgcgccggccggcgacctgccggtcctgacggccgcgctcggcgatccgtcgttgcggatcgtcgcgacgcgcgtcggttcgccggcgtcgctcggcatcgtcgtgcagcccgactcgccggttcgcgccgtggccgacctgaaagggcaaaccgtggtcgtatcatcggcgcgcggcagcatctcgcaataccagctgtacggcgcgctgcgcgaacacgggctcgcgccgcgcgacgtcgacgtgcgcttcgtgctgccggtcgacgcgttcgccgcgttcgaggcgaagcggatcggcatctgggccacgttcgatccgtactacgggcatgcggtgcgccgcggcgcgcgcatcgtccgcgacggcagcggcatcaattcggggctcgcgttcctgacgtcgccggtcgagacactcgacgatcgcggcaagcgcgcggcgcttgcggacgtgctcgcgcggctcgcccgcgcgggccagtgggcgctcgcgcacccggccgactacgcgagcgtctatgcgtcgctcacgcgcctgccgcccgatgcggccaccgacatcgcgcgccgggccgcgctcgcgcagcgcagcctcagcggcgccgacatcgacgtgttgcagcacgtcgccgatcgcgcggcggcggacgcgatcctgccgcgccgtgtcgacgttgcatcgatcgccatccggcaggtgtccgcg

SEQ ID NO: 11389 - DNA, 477 bp, Burkholderia cepacia
atgaatggttgtttccttgtgttttcggcatcgcaagcggcaacgcgcggtgcctgccggcacacgtcgtgtgcgtcactgcgacgagtcggtcacgcccgcggtcggcccccgcatcgacatcacgtagcgatgctccagcagcttgcgcacgcgggcctgctttcgcagcgactccggcaacgcatccggcccggccacttcgcagcgcaccttgccgaccatcatcagcacgtcctgctggcgcttcacgtgcagcgggcaacgcatcagcgtcggaccatccacgacgaacaattcgttttccttatggtcaagttcagcaataaagccgccctgactgtcgatcaacggcatcgcgccgttgagaatcacgctgtccgagagcggcatgccgcctttcgagaatgcctggcgcgacataggtgtacgtcaccttggcgtcgacgtcgcgcagcgcgagttgccccggcacca

SEQ ID NO: 11390 - DNA, 261 bp, Burkholderia cepacia
atgcccgcctaccgtcggctgttgaagcagcatgcgctcacccagagcatgtcgcgcagaggcaactgccttgataacgcagccatggagagcttcttcggcacgctgaaatccgagtgctatcggctgacgcgctttgcgagcgtggagcagttgcgagatgcgttgagccgttacatccactactacaaccacgaacgcatcaagctgaaattaaatgggctgagtcccgtgcaatacaggactcagcccttggccgct

SEQ ID NO: 11391 - DNA, 1002 bp, Burkholderia cepacia
atgcttacgtttcagcaaatcatcctgacgctgcagtcctactgggacaagcagggttgcgccctgctccagcccatcgacatggaagtcggcgcgggcacgtcgcacgtccacacgttcctgcgcgcggtcggccccgagccgtggcgcgccgcgtacgtgcagccgtcgcgccgcccgaaggacggccgctatggcgaaaacccgaaccgcctgcagcactactaccagtaccaggtcgtgctcaagccggcgccggaaaacatcctcgacctgtacctcggctcgctcgaggcgctcggcttcgacctgaagcagaacgacgtgcgcttcgtcgaggacgactgggagaacccgacgctcggcgcgtggggcctcggctgggaagtgtggctgaacgggatggaagtcacgcagttcacgtatttccaggaagtcggcgggctcgaatgcaagccggtgctcggcgagatcacgtacggcctcgagcgcctcgcgatgtatctgcagaaggtcgagaacgtgtacgacctcgtgtggaccgagtgggaagagcaaggcccgaacggccccgagctgcgccgcctgtcgtacggcgacgtgtaccaccagaacgaggtcgagcagtcgacctacaacttcgagcacgcgaacgtcgacctgctgttcacgttcttcaacagctacgaagcggaagcgaagaagatgatcgacgcgcagctcgcgctgcccgcgtacgaactcgtgctgaaggccggccacacgttcaacctgctcgacgcgcgcggcgcgatctcggtgaccgagcgggccgcgtacatcggccgcatccgcgcactgtcgcgtctcgtcgcgcaggcttactacgactcgcgcgagaagctcggcttcccgatgctcggcaacccgccgggcgtgccgggcctcaccaccgacgcccaggacgccgcccagccggcatgggcgccgccgctcaaggtcgaacgcaagatcgatcaggtc

SEQ ID NO: 11392 - DNA, 1164 bp, Burkholderia cepacia
atgacgcctgcccggtacttccagctggacgagcactatgaccacgaggggaagccggaagatcgccagtttctgattacgggcgtcatgcatgccggatcgaacaactatcaggcgggcgagggtgcggcaacctacgcgtgcagcttcacctgcatccgcaagaagatcccgtaccggccgccgttcaccattgccaagccgaccatcatcgggccgcagactgctgtcgtggtcggcccgaagggtgaagaaatctacacggacagcctcgggcgcgtgaaggtccagtttccgtgggaccggctgggcgagcgcaatcaatccagctcgtgctgggtgcgcgtggggcaaccgtgggccggcagcggtttcggcatggtcaacattcctcgaatcggcgacgaagtggtcgtgatttttctggatggcgaccctgatcgacccctaattatttctcgcgtttacaacgcgcagaacatgccgccgtgggcattgccggctagtgcgacccaaagcggcattctgtcgcgatcgaccaagggcggtaacgtcaatacggccaacgcgatccgtttcgaggacaagaagggcgaggaagaggtctggcttcacgccgagaaggatcagcgcatcgaggtcgagcacgacgagtcgcattgggtcggcaacgaccgcgccaagaacgtcgatcacgacgagacggtgcatgtcggccacgaccgcacggagacggtagggaacaacgagacgatcacgatcggcgtggatcgcacggaacgcgtcgggaacaacgagacgctgacggtgggcggcaaccggaacgagacgatcgaaggcatggagaacctcgtgattgcgctcacgtcgacggagaccgtggggcttgcgaaagcgctgacagtcggtggcgggtatcaggtaacggtcgccggtgcggtgaatacgtcggcagggctggcgagtgcagaggaagtcggtctttcgaaaactacgatggtcggcaaaacatacatgattacggccggcgaccgaatcgagctgaagaccggtagcgccgtcctcatcatggagtccaacgggcatatcacactacgtggcacgcaattgctgatcgaaggctctgggccggtacaaatcaacggcagggacgttgacatcaac

SEQ ID NO: 11393 - DNA, 846 bp, Burkholderia cepacia
atgacatccgccgattacgccagccgccaacgcgcgatcattgccgaactgaacgtcgccccgcacttcgacgccgaagccgaaatcgaccgccgcatcgatttcctcgcgcagtaccttcgttcgaccggcctgcggacctacgtgctcggcatcagcggcggcgtcgattcgtcgacggccggccggctcgcgcaactgtcggtcgagcgcctgcgcgccgacggctacgatgcgcgcttcatcgcgatgcgcttgccgaacggcgtgcagaacgacgaggaggatgcacagcgcgcgctggcgttcgtgcgcgcggacgaggtattgacggtcgacgtgaagccggccgccgatgcgatgctccgttcgctggtcgcctccggccacgcgttcgacaccccggcgcaacaggatttcgtgcacggcaacatcaaggcgcgcgagcgcatgatcgcgcagtacgcggtggccggcgcgcggcgcggcatcgtgatcggcaccgatcacgcggccgaatcgctgatggggttcttcacgaagttcggcgacggcggcgcggacatcctgccgctcgcgggcctgaacaagcgccgcgtgcgcggggtggcgcgcgcgctcggcggcgaggagctgatcgtgatgaaggtgccgacggccgacctcgaggaactgcgcccgctgcgcccggacgagcacgcgtatggcgtgacctacgacgagatcgacgatttcctcgaaggcaagccggtcgccgaccgcgtctacgaaacggtgctgcgcttctacgacggctcgcgccacaagcgcgcgctgccgtacacgatgttcgactggccggccgcg

SEQ ID NO: 11394 - DNA, 1365 bp, Burkholderia cepacia
atgtttgaaaaaatcctcattgccaaccgcggtgaaatcgcgctgcgcatccagcgcgcgtgccgcgaactcggcgtcaagacggtggtcgtctactcggaagccgacaaggaagccaagtacgtgcgcctcgcggacgaagccgtctgtatcggcccggccccgtcgaacctgagctacctgaacatgccggcgctgatcagcgccgcggaagtcaccgatgccgaggcgatccaccccggttacggcttcctgtcggagaacgccgatttcgcggagcgcgtcgagcagtcgggcttcacgttcatcggcccgcgcccggaaacgatccgcatgatgggtgacaaggtcaccgcgaagcagacgatgatcaagaccggcgtgccgtgcgtgccgggttcggaaggcgcgttgccggacgatccgaaggagatcgtcaagattgcgcgcacgatcggctatccggtcatcatcaaggcggccggcggcggcggcgggcgcgggatgcgcgtcgtgcacaccgaagccgcgctcgtcaacgcggtgaacatgacccgcgaggaagccggccgtgcgttcggcaacccgcaggtgtacatggagaagttcctcgagaacccgcgccacatcgagatccaggtgctgtcggacgcgtacaagaacgcgatctggctcggcgagcgcgactgctcgatgcagcgccgccaccagaaggtgatcgaggaagcgccggcgccgggcattccgcgccgcctgatcgaccgtatcggcgaccgctgcgcggacgcgtgcaagaagatgggctacctcggtgcgggcacgttcgaattcctgtacgaaaacggcgagttctacttcatcgagatgaacacgcgcgtgcaggtcgagcacccggtatcggagctgatcacgggcgtcgacatcgtgcaggaacagatccgcatcgcggccggcgagaagctcacgctgcgccagcgcgacatccagttccgcggacacgcgatcgaatgccggatcaacgccgaagatccgttcaagttcacgccgtcgccgggccggatcacgtcgtggcatacgccgggcggcccgggcgtgcgcgtcgattcgcacgcctacaatggctatttcgtgccgccgaactatgattcgatgatcggcaagctgatcacctacggcgcgacgcgcgaacaggcgatccgccggatgcgcatcgcgctgtcggaaatggtcgtcgaaggcatccagaccaacatcccgctgcaccgcgagctgatgatcgactcgaagttcgtcgaaggcggcaccagcatccattacctcgaaaaccggctcgcgcagaagcagcaggtcgcaccggaagaagcg

SEQ ID NO: 11395 - DNA, 726 bp, Burkholderia cepacia
atgaaaaaaacgatccgcatcgcatcgctggcgctggccgtcacgatggcgacgcttggctgcaccgcgcaggccgaccagaccaccgacaagctgaaggctacgctgcaggcccggctgggcaacgacgcgccgatcaagagcgtgtcgaaatcgccggttgcaggcctttacgaagtgaacctcggctcgcagatcatctatagcgacgcggcgggcgactacgtgctgctcggcgatctcgtcgacgcgaagacgcacaagaacctgaccgacgcccgcctgtccgaaatcaacaagatcgacttcgcgagcctgccgttcgcgaatgcgatcaaggtcgtcaagggcaacggcgcccgcaagatcgcggtgttctccgatccgaactgtccgtactgcaagaagctcgagacgacgctgcagtcggtcgacaacgtgaccgtctacacgttcctgtatccggtgctgtcgccggattcgaccgcgaagtcgaaggcgatctggtgtgcgaccgaccgcgcgaagacgtgggaaagctggatgctcgaccaccgcgcgccgtccggcgccggtacctgcgataccagcgcgctggacaagaacctcgcgctcggccgcgggatgaacgtcacaggtacgccgacgatcttcctgccggacggccgccgccaacaaggagcggtatcggccgaccagctcaaccaggcgctcgcctcgagcaag

SEQ ID NO: 11396 - DNA, 1162 bp, Burkholderia cepacia
aacgattatctcttcacgtccgaatccgtctccgaaggccatccggacaaggtcgcggaccaaatctcggacgcgattctcgacgccatcctcgagcaagacaaatattcccgcgttgcggcggaaacgctgtgcaacacgggtctcgtcgtgctggccggtgaaatcaccacgacggccaacatcgactacatccagatcgcgcgcgatacgatcaagcgcatcggctacgacaacaccgactacggcatcgacctacaagggttgcgcggtgctcgtcgcgtacgacaagcaatcgccggacatcgcgcagggcgtcgatcgtgcacacgacgacaacctcgatcaaggcgcgggcgaccagggcctgatgttcggctatgcgtgcgacgaaacgccggaactgatgccgctgccgatctacctgtcgcaccgcctcgtcgagcgccaggccagcctgcgccgcgacggccgcctgcaatggctgcgtccggacgcgaagtcgcaggtcaccgtgcgctacgtcgacggcaagcccgattcgatcgacaccgtcgtgctgtcgacgcagcacgcaccggacatcgagctgcccgcgctgcgcgaagccgtgatcgaggaaatcatcaagccgacgctgccggccgacctgatcaagggcgacatcaagttcctcgtgaacccgaccggccggttcgtgatcggcggcccgcagggcgattgcggcctgaccggccgcaagatcatcgtcgacacgtacggcggcgccgcaccgcacggcggcggcgcgttctcgggcaaggatccgtcgaaggtcgaccgttcggcagcgtatgccggccgttacgtcgcgaagaacatcgtcgccgccggcctcgcgtcgcgcgcgctgatccaggtgtcgtacgcgatcggcgtggccgagccgacctcggtgatggtcaacacgttcggcacgggccgcgtgtcggatgcggtgatcacgaagctcgtgcgcgagcatttcgacttgcgtccgaagggcatcatcaagatgctcgacctgctgcgcccgatctacgagaagacggcagcttacggccacttcggtcgcgaagagccggaattctcgtgggaagcgaccgacaaggcgctcgcactggccgaagcggccggcgtggag

SEQ ID NO: 11397 - DNA, 768 bp, Burkholderia cepacia
gtggcagcaattgacctgaacgtcaacctcggggaggggcgtgcacacgacgacgccctgatgacctacgcgacgtcgatcaacatcgcatgtggctggcatgccggcgacccgaccacgatgcacaggaccgcgtccgccgcgctcgcgcgcgacatcgcgattggtgcgaatccgagctatccgggtagagcgcattgcggtcgtccctcgtcggaaatggatcgcgacgacctttgtgcaggcatccaatatcagataggcgcgctggggggcatcgtgaaagcgctgggcggccgtctcgcgcacgtcaaaccacacggcgcgctctataacgatgccgagcatgacgcctcgatcgccgacgtcgtcgtggccgcggttcgtcgcgtcgacccgtcgctggccttgtatggtctgtccggcgggcaccttgtcgccaaagctcgcgaggctggtcttgttgccatcgctgaaacgtttgcggatcgtaggtaccgtcccgacggcactctggtgccctgctccgagcccgacgcgttcatcgacgatcctggccatatcgcccgccgcaccaaggacatcgttgttgcgggtcgtctccaggccgacgacggctcatggatctcgataacagcacagagcctatctctgcacggacacgggcaccacgccgtggcgttcgcccgcgagatacatgcggcgcttcgatctgcgtcatgcacgctgaggccgccgataagggttgacaccagatctgcgatacct

SEQ ID NO: 11398 - DNA, 1407 bp, Burkholderia cepacia
atgacgtcccaactgcacaaaaagggcgaggcctggtcggcccgcttctcggaaccgatgtcggagctggtcaagcgctacacgtcgtcggtgtttttcgacaagcgcctcgcgctcgtcgacatcgccggctcgctcgcgcacgcgaacatgctcgccgcgcagaagatcatcagcgccgacgacctggccgcgatcgaacgcgggatggcgcagatcaagggcgagatcgagcgtggcgaattcgaatggcagctcgacctggaagacgtccacctgaacatcgaggcgcgcctgaccgcgctgatcggcgatgccggcaagcgcctgcacacgggccgctcgcgcaacgaccaggtcgcgaccgacatccgcctgtggctgcgcggcgaaatcgaccgcatcggcggcctgctgaacgacctgcgcggcgcgctgatcgatctcgcggaacagaacgccgacacgatcatgccgggcttcacgcacctgcaggtcgcgcagcccgtcacgttcggccaccacctgctcgcgtacgtcgagatgttcacgcgcgacgcggaacgcatgcgcgactgccgcacccgcgtgaaccgcctgccgctcggcgcggccgcgctcgcgggcacgagctacccgatcgaccgtcacgcggtcgcgaaaacgctcggcttcgacggcatctgcgcgaactcgctcgacgcggtgtccgatcgcgacttcgcgatcgaattcacggccgcgtccgcgctcgtgatgacgcacgtgtcgcgcttctccgaggaactcgtgctgtggatgagcccgcgcgtcggcttcatcgacatcgccgaccgcttctgcaccggcagctcgatcatgccgcagaagaagaacccggacgtgcccgagctcgcgcgcggcaagaccggccgcgtgaacggccacctgatggcgctcctcacgctgatgaagggccagccgctcgcgtacaacaaagacaaccaggaagacaaggaaccgctgttcgatacggtcgacaccgtcgccgacacgctgcggatcttcgccgagatggtcgccggcatcaccgtgaagccggacgcgatgcgcgcggccgcgctgcagggcttctcgaccgccaccgacctcgccgactacctcgtgaagcgcggcctgccgttccgcgacgcgcacgaagcggtcgcgcacgcggtgaagatctgcgacgaccgcggcatcgacctcgccgacctgacgctcgacgaaatgaagcaggaactgccgaacgtcgcgcacctgatcggcgacgacgtgttcggctacctgacgctcgagggttcggtcgcgagccgcaaccatccgggcggcaccgcgcccgaccaggtgcgtgcggccgtcaaggcggcccgcgccgcgctcggcaag

SEQ ID NO: 11399 - DNA, 786 bp, Burkholderia cepacia
gtgctcggcgagaaggtgccgctgaatccgacgccgttcacgctgatcggcctgacgctcgcgatcttcgccgggtttcgcaacaacgccagctacgaacgctatcgcgagggccggcagctgtggggcggcgtgctgaccgccacgcgcacgctggtgtcgcaggcgctctgctacggcgcggtcgaccatgacgacgcatcgcgccgcgcgttcgtgcgcacggtcgtcgcattcgtctacacgctcaagcatcagctgcgcggcaccgatccggccgcggacctgcgcgggctgctcgacggcgcgacctatacgcgcgtcgccgctgcccggtttcgtccggtcgtcgtcgtgcacgcgctgcgcgaagcgttcgccgcgcgcgccgatgcgggccagctcgccgacacgcggctgtggatgctcgatgcgcgcctcgacgatctcgtcgcgatggtgagcggctgcgagcgcatcgcatcgacgccgattccgttttcatacgacgtgctgctgcaccggaccatctacgcatattgcgtgttgttgccgttcggcctcgtcgattcgatcggcgcggcgacaccttttgtaacagttttcgtcgcctatacgctgatcgcgctcgacgcgatcgcgcatgcgatcgccgaaccgttcggcgacgggccgaaccatctcgcgctcgatgcgatgacgcggcagatcgagcgcacgctgctcgaactgaaccgcgagccgctgccggccgaggtgacgcccggcccgtcgtaccgcctcacc

SEQ ID NO: 11400 - DNA, 273 bp, Burkholderia cepacia
gtgatcatgcaagcttacatcgccaacatccagggtctgaccgccatcggtatcggcatcatcatcggcctgggtgcaatcggcgcctgtatcggtatcgcgctgatgggtggcaagtacatcgaagcctgcgcacgtcagccggaactcatcaacccgctgcaaacgaagatgttcctgctggctggtctgatcgacgctgcattcctgatcggcgttggtgtcgcaatgctgttcgcgttcgcgaacccgctcctgtcgaagctcgcaggc

SEQ ID NO: 11401 - DNA, 468 bp, Burkholderia cepacia
atgaagcttttcatcctcgcggtcggccacaagatgccgggctggatcgcctccggcttcgacgaatacacgaagcggatgccgcccgagctgcgcatcgagttgcgcgaaatcaagcccgaactgcgttcgggcggtcgcagcgccgaaagcgtgatggcggccgagcggcagaagatcgaggccgcgctgccgaagggcgcgcgcctcgtcgcgctcgacgagcgcggccgcgactggaccacgatgcagctcgcgcaggcgctgcccggctggcagcaggacggccgcgacgtcgcgttcgtgatcggcggcgccgacgggctcgatccggaactgaaagcgcgcgccgacgtgctgctgcgcatctcgagcatgacgctgccgcatggcatggtgcgcgtgctgctcgccgaacagctttaccgggcgtggagcatcacgcagaatcacccctaccaccgcgca

SEQ ID NO: 11402 - DNA, 966 bp, Burkholderia cepacia
  misc_feature (31)..(31): n=g, a, t or c
  misc_feature (43)..(43): n=g, a, t or c
gtgtcgatcggcctgctcgaaaaaaagaccnacgtgttcccgnaactcgtcaagcgcggcatcacgccggactgcgtgaccgaccagacgagcgcgcacgacccgatcaacggctacctgccgcaaggctggaccgtcgcgcaatggcgcgaagcgcagaaggtcgatccgcagagcatcgtgaaggttgcgaagcagtcgatggccgtccaggtgcgcgcgatgctggcgctgcaggaacgcggcgcggcgacgctcgactacggcaacaacatccgccagatggcgctggaaatgggcgtcgagaacgcgttcgacttcccgggcttcgtgccggcgtacatccgcccactgttctgcgagggcaagggcccgttccgctgggtcgcgctgtccggcgatccggaagacatctacaagaccgaccagaaggtgaaggagctgatccccgacgatccgcacctgcacaactggctcgacatggcgcgtgagcgcatcgcgttccagggcctgccggcgcggatctgctgggtcggcgtgaaggatcgctaccgcctcggccaggcgttcaacgagatggtgaagaacggcgaactgaaggcgccgatcgtgatcggccgcgaccacctcgacaccggttcggtcgcgagcccgaaccgcgagacggaatcgatgaaggacggttcggacgccgtcagcgactggccgttgctgaacgcgctgctgaataccgcgggcggtgcatcgtgggtgtcgctgcaccatggcggcggcgtcggaatgggcttctcgcagcactcgggcgtcgtgatcgtcgccgacggcaccgccgacgcgcacgagcgtctcggccgcgtgctgctgaacgatccggccacgggcgtgatgcgccatgcggatgccggctacgaactcgcgcagcagacggctcgcgaagccggcctgaagctgccgatgctcggccgc

SEQ ID NO: 11403 - DNA, 755 bp, Burkholderia cepacia
cgcgccttcgcgctgctcgaacatctcgtccaggccggcgacgccgtgtcgctcgccgatctcgcgcgcgacgtcgatatcccgaaggcctcgctgcaccggatgctcgcgtcgctcgaagccggcgggctcgtgatccgggagccgggccgcaagaacgcgtatgcggtcggcccgcgcctcgcgcggctcggcaccggcgtgatgctgcacgcgggcacgcgccggctgcgccatgcgatcctcgaacggctcgtcgccgacctcgccgagacctgcaacctgaccgccctgcacgacacggaagtcgtctatctcgaccgcgtggaagccgactggccgctgcggctcgacctgaaacccggctcgcgcgtgcccgcttactgcagcgccagcggcaagctgctgctcgcgctgctgccgcgcgacgaacgcgcttcgctggtgcgcacgatggcgctgccgggccatacgccgaacacgatctccgacccggaattgctcgaagccgaactcgaccgcaccgcgcacaagggcatcgcgatcgacaacgaggaattcgtcgcggggatcgtctgcatcgcggcgccggtgctcgacgacgacggcgcgtgcatcgccgcggtcgccgtccatgcgccggtgtcgcgcgcgccgctgtcgcggctgctcgaccacgtgccgcggctgcaggaagcggcccgcgcgctcgcgaagaccttctagtgccgcgcggcggcgcgccgcccgcgtca

SEQ ID NO: 11404 - DNA, 1101 bp, Burkholderia cepacia
  misc_feature (1083)..(1083): n=g, a, t or c
tcggccggcaacggcgcgacgctcgatgtcagcgcggccacgacaccgcagacggcgagcgcgctgtcgggcgccgccggttcgaccgtgaatctcggcggcaatacgctgaccgtggccggtccgacgggcggttcgttcggcggcacgatcgccggcaccggcggcttcgcggtgcagggcagcggcacgcagacgctgacgggcgccaacacgtacaccggcggcacgacgatcggcagcggcagcatgctcgcacttgccggcgcaagcagccttgcgccgacgagcccggtgattctcgcgggcagcggcgcgacgctggacttcacgggttcggccgcaccgcagtcgatcggcacgctgtcgggcacgacgggttcgaacgtgaacctcggcgcgacgccgctgaccgtcaataccgccggcaccagctcgttcgcgggcacgctgtcgggtaccggtccgctgacgctggccggcacgggtgcacaggtgctgagcgggaccaacacgctgtccgggccgaccaccgtgacgggcggcacgctcgcggtcaccggttcgctggccaactcgccggtgaccgtcggcagcggcgcgaccgtcaccgggacgggcacgatcggcggcttggtcgtgtcgggcggcggcaccgcatcggtcctccagctcgggcagccgctgaaggtcgcgggcaacgcgaccttccagccgggctcgacgctgcaggtcggcgccacgccgcaacagagcggcggtctcgacgtgaccggctccgccacgctcaacggtggatcggtacaggtcgtcgcggccaccgggcaataccagccgggcaagctctacaccatcgtgaatgccggtgcgggcgtgcaagggcagttcatacgcggtgaactcgacgtatgcgttcctcacgccgacgctcacgtacaacccggcgcaggtgctgatgtcgctgacgccgaacggcacgccgttctcgtcggtcgcgacgacacccgacgggcaagcggtggcgggtgcggtcggcacgctcggcgccggcaacccgctgttcgagacggtgttccgagctcncaacttaggaacggtttt

SEQ ID NO: 11405 - DNA, 1386 bp, Burkholderia cepacia
ttgcggcagctccacgtggggacggctcgcgggcaacaggccctgcggacgccacatcatcatcaataccatcacgagaccgaagatcagcatccggtactcggcgaacccgcgcgcgacttccggcagcacggtcagcaggatcgccgcgagaatcacgccgagctgcgagcccatcccgccgagcacgacgatcgcgaggatcagcgccgattcgatgaaggtgaacgattcgggattcacgaggccctgacgcgccgcgaagaacgcgccgccgatccccgcgaacgccgcgccgagcgtgaacgccgacagcttgatgcgcgtcgggttgagacccagcgaacggcacgcgatctcgtcgtcgcgcagcgcttcccacgcacggcccatcggcatgcggatcaggcggctcgtcacgaacagcgtgaagcccaccagcagcagcgcgatcaggtacaggaagatcaccatgtgctcgccgctgtattccagcccgatcagttcatggaaggtcttcgcgccttcgacgctcgccgagcgcgccatctcgaagccgaacaccgtgggcttcggaatgctcgagatgccgtccgggccgccggtgaggctcgtcaggttgttcgcgagcaggcggatgatttcgccgaagccgagcgtgacgatcgccagatagtcgccgcgcaaccgcagcaccgggaagccgagcaggaagccgaacgtcgccgcggcgatcgccgcgatcggcaggcattcccagaacgacagcccgaaatactggttcagcatcgcgtacgtatagccgccgaccgcgtagaacccgacgtagccgagatccagcagccccgcgaaaccgaccacgatgttcagcccgaggccgaggatcacgtagatcagcgcgagcgtcgcgacgtccaccgcgccgcgcgagccgaagaacggccacacgaggccgaccgcgagcagcacccagatgatcacgcgctgctgccgcgcgcccatcgtcggcgccgccggcagcttcacgaccgctttcgcgcgcatcagccacggcttgaacaactggaacaggaacacggccgcgaccgcgatccacaccgggcgccagtgcggcgtcagcaccacctgatagccgtcgagcttcagttgcagcccgagcaccggaatcgtgaggatcgccgtcaggatcgcggcggccacggcgttcttcagcgcctggccgaacgacgcgtcggcggccgggcggcgaacggaaatgacttgactcatctgcgtctccctcaaaccttttcgatgtccgacttgccgagcaggccggtcgggcggaagagcaggatcagcacgagcaggccgaacgcgaccacgtccttgtactcggccggcatg

SEQ ID NO: 11406 - DNA, 1161 bp, Burkholderia cepacia
atggagactcgcgtcatgaaaatcacccgcctcgaaactttcgtcgttccgccccgctggctgttcctcaagatcgaaaccgacgagggcatcatcggctggggcgagccggtcgtcgaaggccgcgcgcacaccgtcgaggccgccgtgcaggaactggccgactacctcgtcggccgcgacccgctgttgatcgaggatcactggcaggtgatgtaccgcgcgggcttctaccgcggcggcccgatcatgatgagcgcgatcgcgggcgtcgaccaggcgctgtgggacatcaagggcaagcatcacggcgtgcccgtgcacgcgctgctgggcggccaggtacgcgaccgcatcaaggtgtattcgtggatcggcggcgaccgcccgagcgacgtcgcgaacaatgcgcgcgcggtcgtcgagcgcggcttcaaggccgtgaagatgaacggctccgaagagctgcagatcgtcgacacctacgacaaggtcgagcaggtgatcgcgaacgtcgcggcagtgcgcgacgcggtcggcccgcacgtcgggatcggcgtcgacttccacggccgcgtgcacaagccgatggcgaaggtgctcgcgaaggaactcgacccgtacaagctgatgttcatcgaggagccggtgctgtcggagaacgccgaagcgctgcgcgacatcgtcaaccagaccaacacgccgatcgcgctcggcgaacggctgtactcgcgctgggacttcaagcacatcctcgcgggcggctacgtcgacatcatccagccggacgcgtcgcacgcgggcggcatcaccgagtgccgcaagatcgcgacgctcgcggaaagctacgacgtcgcgctcgcgctgcactgcccgctcgggccgatcgcgctcgccgcgtgcctgcagctcgacgcggtcagctacaacgcattcatccaggaacagagcctcggcatccactacaaccagggcaacgacctgctcgactacctgcgcaaccccgaagtgttccgctacgaggacggcttcgtcgcgatcccgcagggcccggggctcggcatcgacgtgaacgaggagaaggtgcgcgagatggcgaagaccggccatcgctggcgcaacccggtgtggcgccacgcggacggcagcgtcgccgaatgg

SEQ ID NO: 11407 - DNA, 1452 bp, Burkholderia cepacia
atgtgcacgcaggcgcgccgcccgcgcaccggggcgacgctcgacggcgggaccgctatacgcctgtacggcggccggcgcggcgcggcgggaatcgatgccgcggccgcgcgtgtgcactcaggaaacggccggccggacgatgatcttcacgttgcggtccttgtggttgaccagttcctcgaagccgtgcgcgacgatgtcgccgagcgcgatgcgcccggtgatgagcggctgcacgtcgatgcggccgtccgcgatgaagcggatcacgtccgcgaattcgccgttgtacgcgagcgagccgatcacttccttctcggtcgacacgatgtcgaagaagttgaacggcgccggttcctcgaagatgccgaccatcaccgacttgccggccttgcggatcacgtcgatcgcgagcttcgcggtggccgtgtgcccgatgcactcgaacgagacatccgcgccgtagccgcccgtcagcgcccggacttccgcgatcgcgtcggacgtcttcggatcgacgaccacgctcgcgccgacctccagcgccttctgcttgcgcgcggccgacatttccagtgcgatcacgcgtccggcgcccgcggccttcgcgcacatgatcgtgcacaggccgatcgtgcccgcgccgaccacgacgacggtctgcccgacgatgttgccggccttcttcaccgcatgcagcccgaccgcgagcggttcgatcagcgcgccggcctcggtcgggaaatggtcgggcagcttatacagcagttcggccggcacgttcacgtattcggcgaacgcgccgttgttcatcagccccgtgaacgcgaggttctcgcagatgttgtacagcccgtgccggcaataccagcaggtgccgcaatgctggcatgcgtcggccgtcacgcggtcgccgaccgcgaagcccgacacgcccgcgccgagctcggcgatctcgccgctgaactcgtggcccaggatgcactggcctttcaggccggtcagcggatgcggcgcgtcgaccgggatgaacaccggcccggcgacgtattcgtgcaggtcggagccgcagatgccgcaccagtgcacgcgaatcgtgacccagcctgccggcgggcgttccggaacgggaacctcttcgacgcggatgtcgtggcggccgtgccagacggcggccttcatgctgaggggagtgatcggtgccggtgtactcacgttgctgtctccgtcaggttgtcgtcgggcgtgcggcgatgttgccggcgtacccggcgcgcgattgcgcgttcgaccggtatgcaggaacggggccagcgtgaagcggggcgatgcgtggcggccggaaaatgtgcgttgggtgcgctgcaccatgtcgctgtccgccgaacggcaacgatttggaaggaacggagcgtcgaatttgctgcgatagcgccacagcgaagcgcg

SEQ ID NO: 11408 - DNA, 783 bp, Burkholderia cepacia
gtgggtgcggccgaaaaggcgctgatcgcgacgtccacctgggcgatgctgatcgtcgtcgtgccggtgatcctgctcacgctatggttcgcgtggcgttaccgcgcgtcgaaccgcaacgccgcctatgcgccgaactggtcgcactcgaccgcgatcgaggtcgtgatctggaccgtaccgacgctgatcatcctgttcctcggggtgctcacgtggaagaccacccacgaactcgatccgtacaagccgctcgaatcggcggtgaagccgctcgacgtcgaggtggtcgcgctcgactggaagtggctgttcatctatccggaactcggtatcgcgtcggtgaaccagctcgcgattccggtcggcacgccggtgaacttccgcatcacgtcggattcggtgatgaactcgttcttcatcccgcagctcggcggccaggtctacgcgatggccggcatgcagacgcgcctgcacctgatcgccgacgagcccggcaactacgcgggcacgtccgccaacttcagcggccgcggtttctccgacatgaagttccgcacgctcgccgagccgcgcgagcagttcgatgcgtgggtgcagaaggtgaaggcgtcgccggaccggctcgacgcgaccttgtacggcagcgtcgcgcagccgagcgagaaggcgccggtgcgctacttctcgtcggtcgatccgcggctcttccacaacatcatcgcgaaatacaacgatggccacgtcctcgacctgaaggacgccgcctgcggcacgaagggg

SEQ ID NO: 11409 - DNA, 1248 bp, Burkholderia cepacia
gtgcaccgcagtttttttaacagggccggtaacgacgcgccgtgtcgtgcgggcctggaggaaagggaaatgacggatgtagtgatcgtatcggccgcgcggaccgcggtcggcaaattcggcggctcgctggcgaaggttgcggcgcccgaactgggcgcgacggtgatccgcgcagtgctggagcgtgcgggcgtgaagcccgagcaggtcagcgaagtgatcatgggccaggtgctgacggccggctccgggcagaacccggcgcggcagtcgctgatcaaggcggggctgccgaacgccgtgccggggatgacgatcaacaaggtgtgcggctcgggcctgaaggccgtgatgctggcggcgaacgcgatcgtcgcgggcgacgcggagatcgtgatcgcgggtggccaggagaacatgagcgcgtcgccgcacgtgctgccgggctcgcgtgacgggttccggatgggcgacgcgaagctggtcgacacgatgatcgtcgacgggctgtgggacgtgtacaaccagtaccacatggggatcacggcggagaacgtcgcgaaggaatacgggatcacgcgcgaagagcaggacgcgttcgcggcgctgtcgcagaacaaggcggaagccgcgcagaaggccgggcgtttcaacgacgagatcgtgccggtgtcgattccgcaacgcaagggcgagccgctgcagttcgcgaccgacgagttcgtgcgtcacggcgtgacggcggagtcgctggcggggctgaagccggcgttcgcgaaggacggctcggtgacggcggcgaacgcgtcggggctgaacgatggggcggcggcggtgctggtgatgtcggcgcagaaggcagccgccttgggcctgacgccgctggcgcggatcaaggcgtatgcgaacgcgggcgtggacccgagcgtgatgggcatgggcccggtgccggcgtcgcgccgtgcgctggagcgcgcgggctggacgccgggcgacctggacctgatggaaatcaacgaggcgttcgcggcgcaggcgctggcggtgcacaagcagatgggctgggacacgtcgaaggtgaacgtgaacggcggggcgatcgcgatcggccacccgatcggcgcgtcgggctgccggatcctggtgacgctgctgcacgagatggtcaagcgcgacgcgaagcgcgggctggcgtcgctgtgcatcggcggcgggatgggcgtcgcgctcgcggtcgagcgtccg

SEQ ID NO: 11410 - DNA, 1038 bp, Burkholderia cepacia
atgaatccatgccgtgcccggcccgcgccctcagagcgcgcgggccggcgccggcaccccacgaaaacaggtccgaccatgaccgaacttcttcacggcgacggcgcgatccgtcgcacgacgccgtacggttcctcgatcgaaaacacctatgcgggcgtgctgtcgttcatgcgccgcaattactcgcgcgtgctcgacggcatcgacgtcgcgatctccggcgtgccgctcgatctcgcgacgacctatcgttccggtgcccggctcgggccggccgcgattcgcgcggcaagcgtgcagctcgcggagctcaatccgtatccgtggggcttcaacccgttcgacgacctcgcggtcgtcgactacggcgactgctggttcgacgcgcacaacccgttgtcgatcaagccggcgatcgtcgagcatacgcgcgcgatcctgcgttcgggcgcgaagatgctgacgctcggcggcgatcactacatcacgtatccgctgctggtcgcgcacgcggagcgctacggcaagccgctgtcgctgatccatttcgacgcgcactgcgatacgtgggccgacgacgatccggacagcctcaatcacgggacgatgttctacaaggcggtgaaggaagggctgatcgatcccgcgacgtcggtgcaggtcggcatccgcacgtggaacgacgactttctcgggatcgagcggctcgatgccgcgtgggtgcatgaccagggtgcgcgggcggcggtcgagcgaatcgtcgcgatcgtcggtgcgcggcctgcgtacctgacgttcgatatcgactgcctcgatccggcgttcgcgccgggaacggggacgccggttgccggcgggctctcgtccgcgcaggcgctggcgatcgtgcgggggctcggggcggtgaatctggtcggggcggatgtggtggaggtggcgccggcgtacgatcacgcggacatcacggcgatcgcggccgcgcatgtggcttgcgatctgctgtgtctgtggcggcagaagaaggtggcggcgcgg

SEQ ID NO: 11411 - DNA, 1038 bp, Burkholderia cepacia
atgagcgtgcgcgggcaggtggcgcggccccgcatgcgcgtggtgctgccgatgctggccgtgctgctgggcgtgtcgatcgtcgtgtcggccgcgttcggtccggcgtcgattgcgatgccggatgccgtacgaatcgtcgccgcgcacgccgcgtcggcgttcggtggtgccgacgcattcgcggcggtatcgggcgacgacagcatcgtatggctgatccggatgccgcgtgcgctgctggcggcgctcgtcggcgcgacgctggcgacggtcggcgtcgcgttgcaggcggcgaccgcgaaccgcctggccgatccgcacctgctcggcgtgagcgcgggcgcgatgctcggcgcgatcgcggtcacggtggtggccggcgcggcgttcggcccgttcacgctgtcggtcgccgcgttcgcgggtgcgctcgcggcgaccggctgcgtggtcgcgctcgcttaccgcggcggccggctcgaatcggaccggctgctgctcgcgggcgtgtcggtgtcgttcatgatggccgcgttcggcaatctgctgctgtatctcggcgaccagcgcgccgcgtcgtcggtgctgttctggatgctcggcggcgtcgggctcgcgcgctgggatctgctgccggtgccggccgtgtgcgcggtgctcgccggcggcgcgctctatgcgcgtcgacgcgaactgaatgcgctgatgtcgggcgatgtcgccgccgcgtcgctcggcgtgccgagcgcgcggatgcggcgcgaggtgttcgtcgtcgcgtcgttcgcgacgggcgcgatggtcgcggtgagcggcgcgatcggcttcgtcgggctcgtgacgccgcatctgtgccgtcgcgtcgtcggggccgagcacggccggctgctgccggtcaccgcgctggccggcgcgatcctgctcgtgtgggccgatgtcgccgcgcgcacgctcgcggcgccggaggatctgccgatcggcatcgtgaccgcactgttcggcagcctgttcttcgtcgcgctgttgcgccggcgc

SEQ ID NO: 11412 - DNA, 390 bp, Burkholderia cepacia
atgatcggtaactggaactacggcacgggccgccgcaagagcgctgtcgcacgtgtcttcatcaaggctggcaagggcgacatcatcgtcaacggcaagcccatcgctgactacttctcgcgcgaaacgtcgctgatgatcgtgcgtcaaccgctggaactcacgaaccacggccagacgttcgacatcaaggtgaacgtcaacggcggcggcgaaacgggtcaggcaggcgcagtgcgccacggcatcacccgtgcactgatcgactacgatgcgacgctcaagccgtcgctgtcgagcgcaggcttcgtcacgcgcgatgcgcgtgaagtcgagcgtaagaaggtcggtctgcgcaaggcacgccgcgcaaagcagttctcgaagcgt

SEQ ID NO: 11413 - DNA, 675 bp, Burkholderia cepacia
atgaggaaattcaatgttcgcatcgtcgtcgcgtacgactggccgttgacgctggccggcatcgagcagatcgcgggcagcacctgcgcgatcgagctcgtcgcggtctaccggagcgcggccgaactggtcgcgtcgctcggcggcgtcgactgcgacgtcgtgctagtcgactatgcgattcccggcgacgagcagatggacggcctcgcgctgttcgactggctgcgccgcatgcggccgaacgtcgggatcgtcgtgctggtcgccaacgagaatccgctgatcttccgctcgatcctggggattggccgcgtgagcgtcgtcagcaagctcgacgaggtcggccatatcgtcacggcgatccattcgagttacagcggcggcgcctatctgtcgccgtccgtccggcgcgcggtcgatgcgctcggcacccgcggcgacccgcccgtgaagctgtcggcgcgcgagatcgaggtgattcgactgtatctgtcgggcgtgccgatcaagacgatcgcgcagcgcctgagcaagggcaagcagacggtcagcgcacagaagatcagcgcgatgaagaagctcggcgcgagcaacgacgtcgagctgattcagcgggcggcggggctggggctcggtagcggggaggccgcgcggcgggcgggcagcgcggcg

SEQ ID NO: 11414 - DNA, 2004 bp, Burkholderia cepacia
atgttcggcaaactcacactttcggcgatcccgttcgatcagcccatcatcatgggggccggcgccttcatggggctggtcgtgctgggcattctcgccgcgctgacgatcaccggccgctggaaatggctgtggacggaatggctgaccacggtcgaccacaagagactcggcgtgatgtacatcatcgtcgcgctgatcatgctgctgcgcggcttcgccgacgcgatcatgatgcgcatgcagctcgcgctcgcgtacaacgcgcccggctacctgccgccgcaccactatgaccagatcttcacggcacacggcgtgatcatgatcttcttcatggcgatggtgttcatggtcggcctgatgaacctggtcgtgccgctgcagatcggcgcgcgcgacgtcgcgttcccgttcatcaactcgctgtcgttctggatgacggcggtcagcgcgatcctgatcaacgtgtcgctcgtgatcggcgaattcgcgcagacgggctggctcgcgtacccgccgctgtcggagctgcagttcagtccgggggtaggggtcgactactacctgtgggcgctgcagatctccggggtcggcacgctgctgaccggcgtgaacttcttcgtgacgatcatcaagatgcgcgcgccgggcatgacgctgatgaagatgccggtgttcacgtggacggcgctctgcacgaacgtgctgatcatggcgtcgttcccgatcctgaccgcgacgctcgcgctgctcggcctcgaccgttacctcggcatgcatttcttcacgaacgaagccggcggcaacgcgatgctgtacctgaacctgatctgggcgtggggccatccggaggtgtacatcctgatcctgccggcgttcgggatcttctcggaagtcatcgcgacgttcgcgaagaagccgctgttcggctacaagacgatggtgtacgcgacctgcgcgatcatggtgctgtcgttcctcgtgtggctgcatcacttcttcacgatgggctcgggcgcgaacgtgaacgcgttcttcgggatcatgacgatgatcatcgcgattccgaccggcgtgaaggtgttcaactggctgttcacgatgtaccgcggccggatcgagttcacgacgcccgtgctgtggacgatcggcttcatggtcacgttcacgctcggcggcatgaccggcgtgatgatggcgatccccggcgcggacttcgtgctgcacaacagcctgttcctgatcgcgcacttccacaacgtgatcatcggcggcgtgctgttcggctatctcgcgggcttcaactactggttcccgaaggcgttcggcttcaagctgaacgagaagctcggcaaggcggcgttctggttctggcaggtcggcttctacgtcgcgttcgtgccgctgtacgtgctcggcttcatgggcatgacgcgccgcctgaaccactacgacaacccggcctggcatccgtggctgctggtcgccgcgttcggcgccgtgctgatcgcgatcggcatcgcatgccagctgctgcaactggtcgtcagcatccgcaaccgtcacctgccggaataccgcgacaccacgggcgatccgtggggcggccgcacgctggaatgggcgacgtcgtcgccgccggccgactacaacttcgcggtgatcccgcaggtgcgcacgctcgacgcgtacgcggacatgaaggcgcgcggcgaaggccggccgaacccggcggcgattcgcgacatccacatgccgtcgaatacctgcgcgggcctcgtgatcgcgatcttcagcctggtgctcggcttcgcgctggtgtggcacatctggtggatggcgatcggcgggctcgtcggaatcatcgcgacgctcgtgatctacagctcgcgcgataacgacggctattacatccctgcgtcgacggtgcgcaagaccgaagacaagcagccgacgcagcgcacggccgcgcgcgtcgacgacgtggaactggaggccaac

SEQ ID NO: 11415 - DNA, 1626 bp, Burkholderia cepacia
atggaatacaaccgtctgttgcacaccctgcgtgttaccgccatggcaggcgtggcagcggcatcgctcggcgtcgcgggttctgcattcgcacagatcccgaacaaaacgctcgtctactgctcagaaggcagcccggcgggtttcgattccgcgcaatttacgaccggcgtcgacttcaccgccgccacgttcaccgtctacaaccgcctcgtcgaattcgagcgcggcggcacgaaggtcgagcccggcctcgccgagaagtgggacgtgtcgtccgacggcaaggtgtacacgttccacctgcgccacggtgtgaagttccatacgaccgacttcttcaagccgacgcgtgaattcaatgcggacgacgtcgtgttctcgttccagcgcatgctcgatccgaacaatgcgttccgcaaggcgtacccggtgtcgttcccgtacttcaccgacatgggtctcgacaagctgatcacgaaggtcgagaaggtcgatccgtacaccgtgaagttcacgctggccgagccgaacgcgccgttcatccagaacatggcgatggaattcgcgtcgatcctgtcggccgaatacggcgaccagctgatgaaggccggccgtgccgccgacatcaaccagaagccggtcggcacgggtccgttcatcttccgcagctacacgaaggacgcgacgatccgcttcgatggcaatcctgattactggaagaagggcgaagtgaagctgtcgaagctgatcttctcgatcacgccggacccgggcgtgcgcgtgcagaagatcaagcgcaacgaatgccaggtgatgagctatccgcgcccggccgacatcgcgacgctgaaggccgattcgaacgtcgacatgccgtcgcaggccggcttcaacctcggctacctcgcgtacaacgtcgagcacaagccggtcgacaagctcgaagtgcgtcaggcgctcgacatggcgatcaacaagaaggcgatcctcgagtccgtctaccagggcgccggccaggccgcgagcgcgccgatgccgccgacccaatggtcgtacgacaagaacctgaagatggcggcctacgacaccgcgaaggcgaaggcgctgctcgcgaaggccggcttcccgaacgggttcgagatcacgctgtgggcgatgcccgtgcagcgcgcgtacaacccgaacgcccgcctgatggccgagatgatccaggccgactgggcgaagatcggcgtgaaggcgaagatcgtcacgtacgagtggggcgagtacatcaagcgtgcgcacgcgggcgagcaggacacgatgctgatcggctggacgggcgacaacggcgatccggacaactggctcggcacgctgctcggctgcgaagcgatcaagggcaacaacttctcgcactggtgctacaagccgttcgacgagctggtccagaagggccgcacgacgacgggccaggacgcgcgcacgaagctctacacgcaggcccagcagatcttcgcgcaacagctgccgttctcgccgatcgcgaactcgacggtctaccagccggtgcgcaagaacgtggtcgacatgcgtatcgagccgctcggctatgctcgcttcgacggtgtcggcgtgaag

SEQ ID NO: 11416 - DNA, 4545 bp, Burkholderia cepacia
atgtcggacacgccgagttacgacgaaccgagcggcagcgcacaggaacgtctcgatcagatcgccaagctggaggacggtgaagccgcgaaagcggccgagcagccgttttacgagcacctcaactatgggatgcttggcgccgatgcgggcctgaccgccgttgaggggacggccgccgggctgagtgcggccggtacagcgctggcgggtggcgcgaccggcggggcggcactgggtgcgggcgcggttgcggcgggcaccgtcatgcttccgctcgcgattgcagtcgggggagcttgggcgctcgacaaggttggcgtgaccggctggctgtcgaaggagttcacacaggttggcgacgcactgggcctcaccatcggccgaggcgatccacaccccgcatgcattggcgatcggatcgcgcactcgtcaggttttatggggattctcgccggcattgccgtgggggttgcgattggcgtggcagtggcggcgactgtggcaacaggtggactcgccggggcgctgatcgttggcgcttgcatggccggcggcctgacgcttggtggtgcgctcgcgtcggccagccaaagtatgggcagcaactgtggcgagatcgtcaccggttcgagcaacgtatattttgaaggcaaaaaggtggcgcgtgtcacggacctggtgaaatgcgatcaccattccggcgcgccgcaggcgctcgtcgacggcagcaaaaccgtgttcgtcaacgggctgccgctggtgcggatcggccacgagacccactgcagcggcaaagtcaattcggggcgcaacagtatctggatcgacaagacgaccggaaattatggcccgaagaacccggagctgtccgcgacgcaggaattcctggcgggcttgatcggcgggattgtaggcggcggagttggaaaagttggcggcaaggggctgcgggcggtgcgcgaaaaattccggcccgaacccacccgatcggcggagcagaggggtatcaaggacgagaatcgaccgaagtgcaaggacccggttgatccggtatccggagaaatgctggagatccgtacggatctggccattcccggaatcttgccccttgagttcaaacgacgctatcggactcgatcggacgatcatggattgctcggtcaccgctggtcggacaactggtcgcagcgattgacgttcgatggtggccgcttcgtgagattccacgacggcgctggcctggtgatcggctttgacgcgccggatatggcgctcaacggcatcaaccttcgtgagccgcgttatcggctggtcggaagccgactcgaaccgcgcatcttcgatcgtgacacgcgacaactgcgtattttcgcgccgctcgtcgacgggcgctcgtctcgcctcgaacgggtcgaggacctcgacggcaacgcgatcgttctttcctacgatactgctggccgtttgagcggcatggtccatagcgatggctatcggctcgagattgcctatcctggccgcgaccgtcagctgcaacggatcgttctccatgatgcggacggtggttccagaacgcttgtgggctacgactaccagaacggcatgcttacccatgtggcgagcttccagtttgggcagttctattacgcgtacgacgaacacggctggatgacccaatggcgggatacagaccagaccgatgttcgatatcggtacgacaccgctggtcgtgtagtcgaaacaggtacacggcagggctatcacacgggccgattcatctacgaagccggctgcacacgcgtgattgacgtcgatggcgaatggacctacgcctataacgacgaaggccttgtaacggccgaaactgatccgctcggtcattgcacttactccgaatgggagcttggtcgtttgatggcccggattgatccgcttggccgacggacggactatcgatacgacgagcgaggccaactgacttcggtcgtcgaaagctcggggaggacggttgacttcgactatgacgatgagcagcgcctaaccggggcgcgcttgccgaacggcggcacgatcaagctcgagtacgaccatctgtctcggttgattgcacggaccgagccggacggcaacaaaacgacctatcgctatgggccccgtggcgaactgctgcgagtagttcaaggtgatcgcgagacacgcctggactacgatgaccggctgcggctgaccgacatcgagttgccaacgggtgcgcgctttaggcgcaagatagacgcgctgggccggctgctggaggaaacgtcgcccgacgggcatgtgacgcgttacgactatgctgacggcccggcaaatccgcgcggtctgctgagcgccgttacgcgccccgatggctcggtatcgagggcacgctataacagcgagagcctgcccgtcgagtggatcgatccgctaggacgtacgatccagcgaacctacggtccattcgatctgctgacggcgtcgatcgacgcggccggacatgcaacgcgttttgagtacgaccatgcgacccggctgacgaaggttatcaatgcgctgggagagacttacacgtaccgctacgacgcggccgggcgtctcgcggccgaaattgactggggaggccgcgcgaccgaatacgaccgcgatgccgtcggtcgcctgctgacgaagacactgcccgacggtggccagtggcgctatacgtacgatgcatccgaccgactcatcgagatcgatgccggcgacgtgaagcttgcctaccgctacgatgcgagcggccgattggcgtcggcggaggtccagggtgagcacactcatgtgacgcgctttgcctacgacaggaatggccgcttgatcggcgaagatcagcatggcgaactgttgcggcacgtctacgacgccgatggacaacgccgtctgcggatgacacctaggcgcgagaccacctatgcgtacgatgtatccggggctttgacgcaagtcgggcaactgacgatccggcgtgatgggttagggcgcgagattggccgcgaggcgggagattttgtcgcgcagcaacagtacgatgcgctcggccggatacgccggcagattgcggggcctgccgtagccttcgatgccttgcaagccgatccggcccgtgcgctggagcaattgacgcggcaggtctatcactacgacgcagccgggcaactggagcgagtcgacaccggcgcggatacgctcacctaccagcgcgatgagcgcggccagatcatctgcgcagaaagtctgctgcagccgagcgagcacttccgctacgacgctgtgatgaacattgccgcgcacgggcaacgggcacccgtggatgcccaccactatcgccgcggaggtctgccggaacaggttggctacgcacgctataaatacgatgcacgtggccgcacgatcgagaagacggtcgaacagccgggggtcaggccgaaaacgtggcaatacacgtgggacgggctcaatcggctcgtgagggtcgttacgcccgagcgcggtgtttgggcgtatcgctacgacgctttcaatcgccggatcgagaagcagcaagtcggtggccgcgaaacggtgaagttcctgtgggacggtccgatgcttgccgaacgctggatcgagcagcgcgacggcacgacgggccaagtcgtgacctggcatatcgagccgggcagttttttgccgctcgcgcaggagacagacgatggtctcttccctatcttgacggatcaaataggccggccgaagacggtgttcgatgaacaggggcgacccgtctggaaagccgcctattcgttatggggaaagttgttgccggtcaagcgaccagccaatgacgcggactgcggcgcgacttcaatcgatacgactctgcgcttctccggtcaatgggcggatgacgagacgggactgaactacaacctgaaccggtattacgatccagattctggacagtacctaagcgcggacccgatcggactgcttggtggagctcggacgcaagcgtacgtgcatgatccctcccaatggattgatccgttgggtttgcagggatgcaagccagcaggaaagaagatcagtatgcgagcctatcgctatgagatgccggagcgattcgacacaacgtgggacgcgcacgaatggaacgttgcggcacggcatcgatacaccaagaaaggtctgggtggcgtctatggtgcggattcgcccgcgaccgctcttgctgaggtgacgcattgggatgtcgatctgtcgacacgggaattgatcagcaaggacgtgacgcttaataatgtcttggatttgacggaccctagcgtgcgaaagcaaactgcggcggcaatggatatgccgttcacacttgaagacatcaccgggaacaactacgaatacactcacaaactgggggactgggccagccagaacggctatgatggaattcttgcgccgtcggcacggaatcccgatggtgccaatttaatttcctttggagggttc

SEQ ID NO: 11417 - DNA, 789 bp, Burkholderia cepacia
gtggccggactggctcgcagcacgttttattaccagtgcaaggcgctggccgctcccgatcggcatgcgagtgtgaaagcgaaaattcgagcactgttcgagcagcacaaggggcgctatggctatcgacgcatcacgctggcgctgcgccgtctggggcagatgattaaccacaagacggttgcacgcctgatgcgcaagatgcagttgaagtcctgcgtgcgggtcaagaagtaccgtgcgtataggggcaacacgtgcaagacggccccgcatctgctccagcgccagttccatgccgcccgtccgaacgagaagtgggttaccgacatcaccgagttcagcgtaggtggccaaaagctgtatctgtcaccagtgctggatctgtacaacggggagatcatcgcgtaccagacgcatactcggccagccttccagatggttactgacatgttgcgcaaggctttgcgtcgcctgcaacccgacgaaagacccatgttgcactctgatcaaggctggcattatcaaatgcccggctggcggctcatgctcgagcaacgctcgttggcgcaaagcatgtcgcgtaaaggcaattgcctggacaacgctgccatggaaagcttcttcggcacgctgaaatccgagttcttctacttgaaccacttcagcagcattgaacagctacgcatcggcttgaagcgctacatccggtactacaatcacgagcgcatcaagctcaaactgaaagggctgagtcctgtgcaatacaggactcagcctcatccggcc

SEQ ID NO: 11418 - DNA, 700 bp, Burkholderia cepacia
atcggccctcacgtattgcgtaacaacctgttcgtcgccccgatggccggggtgacggatcgtccgttccgccagctgtgcaaacggctgggggccggttacgccgtgtccgagatggtcgcgtcgaacgcgcagctgtggaaaagcgcgaagacgatgcggcgcgcgaaccacgaaggcgaagtcgagccgatcgcggtgcagatcgccggcgccgatccggagatgatggccgaagcggcccgctacaacgtcgacaacggcgcgcagatcatcgacatcaacatgggctgcccggcgaagaaggtctgcaacgtcgcggccggctccgcgctgctgcagaacgagccgctcgtgcagcggatcgtcgaggcggtcgtcgcggcggtcggtaccgggcccgatgcggtgcccgtcacgttgaagatccgcaccggctgggaccgcgagcacaagaacgcgatcacggtcgcgcgcctggccgaggcggccggcatctcgatgctgaccgtgcacggccgcacgcgcgccgacctgtaccggggcgacgccgagtacgacacgatcgcggccgtgaaggcggccgtgcggattccggtcgtcgcgaacggcgacatcacgtcgcccgccaaggcgaaggccgtgctcgatgcaaccggcgccgacgcgctgaatgatcggtcgcgccgcgcaaggccgg

SEQ ID NO: 11419 - DNA, 729 bp, Burkholderia cepacia
atgagcaaaacccacttcggcttcgagagcgtcgaggaaaacgaaaaagcgaagaaagtggcgggcgtgtttcattcggtcgcgagcaactacgatctgatgaacgacctgatgtcggcgggcatgcaccgcgcgtggaaggcgttcacgatcgcgcaggcgaacgtgcgccccggcttcaaggtgctcgacatcgcggccggcaccggcgacctgacgaagtcgttcgcgaaggcggccgggccgacgggcgaggtctggcataccgacatcaacgaatcgatgctgcgcgtgggccgcgaccggctgctcgacaagggcgtcgtgacgccgtcgctgctgtgcgacgccgagaaaattcccttcccggacaactacttcgacgtggtcacggtcgcgttcgggctgcgcaacatgacgcacaaggatgccgcgctggccgagatgcgccgcgtgacgaagcccggcggtcgcgtgatggtgctggaattctcgaaagtctgggatccgctgaaaaaagcgtacgatctgtattctttcaaagtattaccgtggcttggcgacaagttcgcgaaagatgccgaaagttatcggtatcttgctgaatctatccggatgcaccccgatcaggacacgctgaagacgatgatggaacaagcgggcctcgacgccgtcaaatattacaatttgtcaggtggcgtggtagctttacacctagggaccaagtac

SEQ ID NO: 11420 - DNA, 1962 bp, Burkholderia cepacia
atgtgcggaatcgacggctttctgaatagcgtcgccttcgatgaggagacagcgcgcggcacgctcgcgcgaatgacggcgagcctcgcgcatcgcgggccggacgggcaggggatctgggtcgacccggaggccggcatcgcgctcggccaccggcggctcgcgatcgtcgacctgtcggtgcacggccggcagccgatggcttccgcgtgcggccgctacgtcctcgtcttcaacggcgaaatctacaaccatcgcgaactgcgcgcggagctcgagcgtgcggggcgcgcaccggcgtggcgcggccactccgacagcgaggtgctgatcgcggcgatcgtcgcgtggggcgtcgaggccacgttgcgccgcgcgaccggcatgttcgcgttcgcgctgtggaatcgcgcgtcgcgggtgctgacgctcgcacgcgaccggatcggcgagaagccgctctactacggccggatcggcgacgcgctggtgttcgcgtccgagctgaaggcattgcgcggctacccgggcttcgacggcacggtcgaccgcgacgcgctgtgcctgtacctgcgccagtcgagcgtgcccgcgccttacacgatctatcgcggcatccgcaagctgccgcccggcacgtacatccagttcgaacatgcgcgcgacacgccgcgcctgcgcgcgtactggacgctcgaacaggtgatcgaggcgggccgcgcgcagccgttcgaaggcactcccgacgaagccgtcggccagctcgacgcgatcttgcggcaggccgtcgcgcggcagatggaggccgacgtgccgctcggcgcgttcctgtcgggcggcgtcgattcgtcggcgatcgtcgcgctgatgcaggcgcaatcggcgacgccggtcgacacgtttacgatcggcttccacgaggccggctacgacgaagccggttatgcgaaggccgtcgcgcgccatctcggcacgcgccataccgagctttacgtgaccgccgaccatgcgctcggcgtcgtgccgaagctgccgtcgatctacgacgagccgttctccgatgcgtcgcagatcccgacctttctcgtctccgaactgacgcgccggcacgtgaaggtaagcctgtccggcgacggcggcgacgagctgttcggcggctacacgcgctatttcctgacgccgcgcctgtggcgcaagctgcatcgcgtgccgggcgccgtgcgcgcgcggatcgccgccgcgttgcacgcgctgcggcccgaccacgcggaccagctggcagccgtcgcgcagggcgcgtggggtggcggcgtggaggcgcgcgaatcgacgtcgcgcatcggcgatcgcctgcacaagctcggccatgtgatgacggccgaaagccgcatcgggctgtaccggctgctgatgtcgtcggtgcatcacccggagcgcatcgcgctgtcggggcaggagccgccgacgccgctcgacacggtgtccgcgtggcccgcgcatctgagcttcgccgagcaggcgatggcgatcgacacgctcacgtacctgccgaccgacatcctcgcgaaggtcgatcgcgcggcgatggccgtgagcctcgagacgcgcatgccgttcctcgatcatcacgtcgtggaattcgcgtggcgcgtgccggcgtcggtgcgcttgcccgaagggcagtcgaaggcgctgctgcgccggctgctcgaccggtacgtgccgtccgcgctgatcgaccggccgaagcagggcttctgcgcgcccgtcgaccactggctgcgcggcgcgctgcgcgactgggccgaggcgctgctgcggccgtcgcgcctgcgcgaagaaggcttcttcgatgcggcggcggtcgagcggctgtggcgccagcaccagacgggccggatgaactggcagcaccagttgtggacggtgctgatgttccaggcgtggctggaggcgcagcgc

SEQ ID NO: 11421 - DNA, 846 bp, Burkholderia cepacia
ttgcgtgaggtcaatctcgagtacgccaactcgtatcggcttgcctcgacctgtgaagaactgctgttgccgcgctgcgcggatgacgtcgctgaaatgttcgagcgcggcggtgcagcgtcgtttccgattctcggccatggcagcaacgtgattctgtctcggacacgctaccctcgcgtcatgaaattcggtcgtcgtttcggcgccgtcacgcggctggccgaacatgttgtgtatgccgatgccggcgccagccttcgtagggtcgggttagcatgcgagcgcttcggactggccggattcgaggttctgggaaacattccgggctcagttggcggaggcatagtgatgaacgcgggagcattcggggacgacatttccagtgtcgttcaatcggtacgggtttatgcgatccacacccggcaagtgatcgaactcgatcggtccgagtgcgaatggggataccgatcttccggcttccagcacggcgcgtacgtggtactcggcgcgtacttccgactacatgatggcgatccgcacgagctccggatccggcgactggctaatctcgcgctcaggcgcgagcgatttcccggctcggaaccgaacgctgggagcgtgttcaaacgaccagcgcacgggatgaaaatcggtgaaatgatcgaggcactcgggcacaaggggctcaccatcggcacagcacggatttcgcccaagcacgccgggttcatcgttgttcggcgtcccggacgcgcgaacgacatttgccagttgatcgacttcatgcggagcgagatgtggaaacacttcaatgtcgaggcggaagtcgaacagcgaatcctg

SEQ ID NO: 11422 - DNA, 957 bp, Burkholderia cepacia
gtgcacgattcgttcgacgacgcacgccaggcgctgcaaccgttgccggcgacgctcgcgaaacaggccgccgccgcgtacacggtgtcgaacgtgccgcagatcggtacgtgggtccagcaactgcaggccagcaacatcgtcggcacgatcacgtcgctgtccggcttcacgaaccgctactacacgacgtcgcacggcgtcgccgcgtccgactggctcgcgctgcagtggaagcagctggcgggggcgcgcgccgacatcaccgtcgaacaggtcgcgcacacgggctttccgcagaaatccgtgatcctgacgatccgcggcagcgatccggccgcgggcaccgtcgtgctcggcggccacctcgattcgaccgtgggccgcacgacggagaacacgcgctcgcccggcgcggacgacgatgcgtcgggcatcgccagcctgaccgaggcgctgcgcgtgctgctcgcgaacaactaccggccgaaacggacgatcaagttcgtcgggtatgcggccgaggaagccgggttgcttggttcgaaggcgatcgcgaagcagttccgcacgcagaatgcgaacgtggtcggcgtgctgcagctcgacatgacgaactacaagggcgatccgaaggatatctacctgatcaccgactacacgaacgcggcgcagaacacctacgtgaagaacctcgcggcgacctacctgccggagctcgcggtcggcacgtcgcaatgcggctatgcgtgctcggatcacgcgtcgtggaatgcgcaggggtatccggcgtcattcccgttcgaggccgaccagaacgacagcccgtacattcacacggtgaacgacacgctggagaactcggatcgccaggccaaccatgcgctgaagttcggcaagctggcgctcgcgtacgcggtcgatctcggcggccttgccggcgcgacggtcaagcgc

SEQ ID NO: 11423 - DNA, 1176 bp, Burkholderia cepacia
atgcgacccctcgacggcatcaaggtaatcaccctcgaacatgcgatcgcggcgccgttctgcacgcgccagctcgccgatctcggcgcgcgcgtgatcaagatcgaacggccgggcagcggcgattttgcgcgcggctacgacgaacgcgtgcacgggctgtcgtcgcacttcgtgtgggtgaaccgctcgaaggagagcctgacgctcgacgtcaagcagcccgctgcggcggccgtgctcgacgcgctgctcgcggatgccgacgtgctcgtgcagaatctcgcgcccggtgcggccgagcgtctcgggctcggctacgacgcgttgaagcacacgcatccgcgcctgatcgtctgcgacatctcgggttacggcgacgacggcccgtatcgcgaccgcaaggcgtacgacctgctgatccagagcgaagccgggttcctgtcgatcacgggctcgcccgggcaaccggcgaaggccggctgctcgatcgcggacatcgcggccggcatgtacgcgtacacgaacatcctgagcgcgctgctgatgcgcggccgcacgggcgcagggtgccggatcgacgtatcgatgctggagagcatggtcgagtggatgggctacccgctctactacgcgatcgacgggcaaagcccgcccgcgccgtcgggcgcgtcgcacgcgacgatctgtccgtacggcccgttcccggccggcgacggcaagaccgtgatgctcgggctgcagaacgagcgcgaatggaagctgttctgcgagcaggtgctgcggcagccggcgctcgccgacgatccgcgtttcaacgcgaattcgaaacggcatgcggcgcgcgacgcggtcgatgcgctgatcgtcgatgcgttcgcgacgctgacggccgccgaagtgatgcagcggctcgacgcggccggcatcgcgaacgcgcagatgaacacgctcgacgacgtatggcggcacccgcaattgcaggcgcgcgagcgttggcgcagcgtcgacacggccgcgggcccggtgcccgcgctgttgccgccggggctgcccgccggcgtcgagccgcgcatggatgcggtgccggcgctcggccagcataccgatgcgatcctcgccgaactcggctacgaccgcgcgcggatcgctgcgctgcgcgcgaacggcacgatc

SEQ ID NO: 11424 - DNA, 1239 bp, Burkholderia cepacia
atgagcaccgaacccagttccaagcccgttttcccgatcaccgacgaagtccggcatgcgctcgccgtcacgaagcgcggcgtcgacgagctgctgatcgaggaagagttcgcgcagaagctcgcgcgcagcgcagccacgggcacgccgctgcgcatcaagctcggcctcgatccgaccgcaccggacatccacatcggccatacggtcgtgctgaacaagatgcgccagctgcaggatctcggccatacggtgatcttcctgatcggcgatttcacgtcgctgatcggcgatccgtcgggtcgcaacgcgacgcgcccgccgctcacgcgcgagcagatcgaatcgaacgcgaagacctacttcgagcaggccgcgctcgtgctcgatcgcgacaagaccgagatccgctacaacagcgaatggtcgatgccgctcggcgcggacgggatgatcaagctcgcgtcgcgctacacggtcgcgcggatcctcgagcgcgaggatttcacgaagcgcttccagggcggcgtgccgatctcgatccacgaattcctgtacccgctgatgcagggctacgattcggtcgcgctgaacgccgatctcgaactcggcggcaccgaccagaagttcaacctgctggtcggccgcgaactgcagaagcagtacggccaggaacagcagtgcatcctgacgatgccgctgctcgaaggcctcgacggcgtcgagaagatgtcgaagtcgaagggcaactacgtcggcatcagcgagaagccgaccgacatgttcggcaagctgatgagcatctcggacacgctgatgtggcgttacttcgagctgctgtcgttccgcagcctcgacgagatcgccggcttcaagcgcgaggccgaaggcggccgcaacccgcgcgatttcaaggtgctgctcgcgcaggaaatcgtcgcgcggttccactcgcagcccgacgccgagcgcgcgctcgaggacttcaaccaccgcgcgaagggcggcgtgccggacgacattccgtcggtcacgctggccggcgcgccgctggcgatcgggcagttgctgaagcaggcgggcctcgtgccgtcgaccagcgaagcgctgcgcaacatcgagcagggcggcgtgaagatcgacggcgcgaccgtgtcggacaagggcctgaaggtcgaggccggcgagttcgtcgtgcaggtcggcaagcgccgcttcgcacgcgtcacgctgaccgca

SEQ ID NO: 11425 - DNA, 528 bp, Burkholderia cepacia
atgtctcgagtaggtaagagcccgatcgcgctgcaaggcgcggaagtcaagctggccgacggtgcaatcaccgtcaagggcccgctgggcaccatcacgcaagcgatcaatccgctcgtgaacgtggcgaacaacgacggcacgctgaatctgtcgccggtcgacgaaagccgcgaagcaaatgcactgtcgggcacgatgcgcgcgatcatcgcgaatgccgtgcacggcgtgaccaagggtttcgagcgcaagctgacgctggttggcgtcggttaccgtgcgcaagcgcaaggcgacaagctgaacctgtcgctgggtttctcgcacccggtggtgcaccagatgccggaaggcgtcaaggctgaaaccccgacgcaaaccgaaatcgtgatcaaggggatcaacaagcaacaagtcggtcaagtggctgcggaagtccgcggttaccgtccgccggagccgtacaagggcaagggcgtgcgttatgccgacgaggttgtgatcctcaaagaaacgaagaagaag

SEQ ID NO: 11426 - DNA, 408 bp, Burkholderia cepacia
gagcagcacgtgccgttcatttgcttcacggcatcgggcggcgcgcggatgcaggaaagcctgctgtcgctgatgcagatggccaagaccaccgcgatgctgaccaagctggccgaggcgaagctgccgttcatctcggtgctgaccgacccgacgatgggtggcgtgtctgttatcttcgcattcctcggcgacgtcgtgatcgccgagccgaaggcgctgatcggcttcgccggcccgcgcgtgatcgagcagacggtccgcgagaaactgccggaaggtttccagcgcgccgaattcctgctgaagaccggcgcgatcgacatgatcgtcgatcgtcgcaagatgcgcgacgagatcgcgcagttgctcgcgctgctgcagcgacagccggccgacgcgctggcc

SEQ ID NO: 11427 - DNA, 1116 bp, Burkholderia cepacia
atgcaatcctccccttcctccctggcggcggccgtgccggccgacgcgcccgactggcccgacgacttcgcgcgccgctatcgtgacgccggctactggcaggacacgacgttcttcgacgcgctcgatgcctgcgcgcagcgccatcccgacgcgctcgccgtcgtcgacggcgcgctgcggctgtgctatcgcgatctgctcgcgcgcattcgccgcctcgcgggcggcctcgcgcgcctcggcctggtacgcggcgacgcggtcgtcgtccagttgccgaacggcgcgcgcttcatcgagacgtgcttcgcgctgttccagctcggcgtgcggccggtgctcgcgctgcccgcgcaccgtcactacgagatcggcgcgttctgccgcttcgccggcgcgcgcgcttatctcggcgcgtcgcagctcggcgatttcgactgccggccgctcgcggccgccttgcaggccgagtgcccaacgctcgagcacatcgtgatggccggcgacgaccacgcattcacgtcgttcgacgcgctgtacgacgcggcgcccgtgctcgactgcgcggcgcgcgccgacgatatcgcgtgcttccagttgtcaggcggcacgaccggcacgccgaagctgattccgcgccgccatcgcgaatacctgtacaacgtgcgcgcgtgcagcgccgcgagcgggttcgatgtcgacaccgtctatctggccgcgctgccgatggcgcacaacttcacgctgtgctgccccggcacgatcggcgcattgctcgcgggcggccgggtggtgacgaccgcgcggcccgagcccgaccagagcttcgcgctgattgcgcaggaacgtgtcacgcataccgcgctcgtgccgccgctcgcgctgctgtggctcgacgagcagccgcaacggctggccgacctgtcgagcctgcgcgtgctgcaggtcggcggcgcgcggctgatggaccacgcggccgaacgcgtgacgcccgtgctcggctgccggttgcagcaggtgttcggaatggccgaagggctgatctgctgcacgcgggtcgacgacgcccccgaacggatcgcgcacacgccgggccccacggccttggacggc

SEQ ID NO: 11428 - DNA, 1845 bp, Burkholderia cepacia
atgtcccgcgccctcgaaatactcgacgaagtctttggttattccgcctttcgcggccagcagggcgagatcgtcgagcacgtcgccggcggcggcgattgcctcgtgctgatgccgaccggcggcggcaagtcgctgtgctaccagattcccgcgctgctgcgccgcgaggccgggcagggcgccggcatcgtcgtgtcgccgctgatcgcgctgatgcaggaccaggtcgccgcgttgagcgaagtcggcgtgcgcgcggcctacctgaattcgacgctgtcgggcgccgaggccgcggccaccgagcgcgcgctgcgcgaaggcgaaatcgacctgctgtacgtcgcgccggagcgcttgatgacggggcgcttcctcgagctgctcgagcgcgcgaagatcggcctgttcgcaatcgacgaagcgcactgcgtgtcgcaatgggggcacgatttccgcccggaatacatccagctgtcggtgctgcacgagcgcttcccgtccgtgccgcgcatcgcgctgaccgccacggccgatgcgatcacgcgcgacgagatcatccatcgtctcgcgctcgacgacgtgcgcgtgttcgtgtcgagcttcgaccgtccgaacatccgttaccggatcgtcgaaaaggacaacgcgcgcgcgcagctgctcgacttcatccgcgccgagcacacgaatgccgacggcacgaccgatgcgggtgtcgtctattgcctgtcgcgccgcaaggtcgaggaaacggctgaatggctgaaggcgcagggcgtgcgcgcgctgccgtatcacgcggggatggaattcgaggtgcggcagaagcaccaggaaatgttccagcgcgaggaaggcatcgtgatgtgcgcgacgatcgcgttcggcatgggcatcgacaagcccgacgtgcgcttcgtcgcgcacctcgatttgccgaagagcgtcgaaggctattaccaggaaaccggccgcgccggccgcgacgggatgcccgcgaacgcgtggatggcgtatgggctgggcgacgtcgtccagcaacgcaagatgatcgacgagtccgatgcggacgacgcacacaagcgcgtgcagacgtcgaagctcgatgcgctgctcgggttgtgcgagacgatctcgtgccgccgcgtgcggctgctgaattacttcggcgaggcgagccagccgtgcggcaactgcgacacgtgcctcgagccgcccgcgtcgtgggatgcgacgcgcgaggcgcagatggcgctgtcgtgcgtgttccgcgcgcagcgcgcgagcggcttcaatttcggctcgagccacctgatcgagatcctgcgcggcgggcgtaccgaaaaggtgttgcagcgcggccacgaccagctcagcacgttcggcatcggcgcggcgctgtccgagcccgagtggcgcgcgattttccggcagctcgtcgcgtacggctacctggcggtcgaccatggcggcttcggcgcgctgatgctgaccgaggccgcgaagcccgtgctgaagaacgaggaaaaagtcacgctgcgccgctacgtgaagccgcagcgcacccgccagtcgtcgagccgcagcggcacgcgcgtcgacccgacggccggcatgggcgcccgcgagcgtgcgcggtgggacgcgctgcgcgcatggcgcgcggaaaccgcgaagacggacggcgtgccggcctacgtgatcttccacgacgcgacgctcgccgaaatcgcacgcaacgcgccggagacgatcgacgacctgcgccacattcccggcatgggcgtgcgcaagctcgagcgcttcggcgacgagatcatcgacgtcgtcgaatcggcc

SEQ ID NO: 11429 - DNA, 1233 bp, Burkholderia cepacia
aagttcatccacgcggcagacattcaccttgacagcccgttgcacggcctgagcgcgtaccccgacgcgccggccgcgcagttgcgcaacgcgtcgcgcgaggcgctgcggcaactcgtggatcgggcgatcgaggaggaagtcgcgttcctcgtgatcgcgggcgacctgtacgacggcgactggaaggatcacaacacgggcatcttcttcggccagcagatgggccgcctgcgcaaggccgggatccgtgcgttcgtcctcggcggcaaccacgatgccgaaagcgagatgacgaagaagctgacgctgcccgacaacgtcacggtgttcggccatcgcaagccggaaaccttcaggctgccggaattcgacgtcgcgctgcacgggcagagcttcaaggacaaggctgtcgtcgacaatctcgcggtcggctatccggacccggtgcccgggtactacaacatcggcgtgctgcacacggcgctcgaagggtatgcggcgcacgcgaactacgcgccgtgcacgctggccgaactgcacgcgaaaggctacgactactgggcgctcggccacgagcacgaattccagcaatggacgggcccgtccaccgtcgtgtttcccggcaacctgcaagggcgccatatccgcgaaaccggccggcgcggcgcggtgctcgtgacggtcgagcaaggcaacacgcaggtcgagcgactgtatctcgacgtgctgcgctgggaagccgtgtcggtcgatgcgtccgattgcctgtcggtggccgatctgtcgcgaaagatcggccagtcgctggaggcgctgttgaccgtcgacggccacgtgccgcgcgcggtgcgcgtcaccgtcaccgggcgcacgcccgcgcatggcctctttttcggccgcgcgccgcagttgcgtgcggaagtgctgaaccagatcggcatcatcggcaacgagcggctgtggctggagaaggtccggctcgcgacgtccgctgccgatcggcagccgggcgaaagcgaaccgctcgaggcgctggaggacctgaagcagatcctggccgacgccgcgcatgatccggatttcctcgcgctgctcgaacgcgacctgaagccgttcgtcggcaaggtccgcagcgacgtgaaggaggaggtgccgttgctgacgatggtgcgcgcgggcgagctgaccgcgctggtcgagcaggtcgggcccgcgttgctcgcgcggctc

SEQ ID NO: 11430 - DNA, 531 bp, Burkholderia cepacia
cacgtgacggcctcggtcggccgcagcaaggtcgagtcggggcgcgacgcgctcgcgcaactgaaccccgaggtgacggtgaacgcggtcgcggagcgcgtcgacgatgcgtggctcgacgcgcacgtgccgcatgcgagcgtcgtgctcgactgcaccgacaacttcgcgacgcggcacgcgatcaatcgcgcgtgcgtcgcgcacggcgtgccgctcgtgtcgggcgccgcgctgcgcttcgacggccagatcagcacgttcgacttccgcgacgcggccgcgccctgctatgcgtgcgtgttcccggaagaccagccgttcgaggaagtcgcgtgttcgacgatgggcgtgttcgcgccgaccgtcgggatcatcggcgcgatgcaggcggccgaggcgctgcgcgtgatcggcggcatcggcaagacgctcaacggccggctgatgatgctcgattcgctgcggatggaatggacgacgatgaaaatcgcgcgccaggccgactgccccgtgtgcgggggtcggcac

SEQ ID NO: 11431 - DNA, 1278 bp, Burkholderia cepacia
gtgttacccgccacgcgcggcggccggcatcggccggcgccgcgcccggcccatttcgatctcatcatgcaaaccgtcaccctcaagccgtccaaggaaaaatcgctgctgcgccgccatccgtggatctacgccaatgcgatcgaccgcgtcgacggcaagcccgcgcccggcgcgaccgtgctcgtgcgcgcgcacgacggccgcttcctcgcgcgcggcgcgtacagcccgcagtcgcagatccgcgtgcgggtgtggagcttcgacgagcacgagccgatcgatcacgcgttcttcaagcgccgcgtgcagcgcgcggtcgcgcaccgcacgacgatggtgtcgggcacgggcgcggtgcggctcgtgttcggcgaagccgacgggctgccggggctgatcgtcgactactacgtcgcggacaccgcggaggccggcgccgcgccgcgcggccagctcgtctgccagttcatggccgcgggcgtcgaagcgtggaaggacgcgatcgtcgcggcgctcaccggcgcgaccggctgcccgaacgtgtacgagcgctcggacgtgtcgatccgcgacaaggaagggctcgaacagacgaccggcgtgctggccggcgacgcgccgcccgcgacgctgatctcgaacgaaaacggcgtgcgctatcacgtcgacgtgccgaacggccacaagacgggcttctacgtcgaccagcgcgacaaccgcgcgctcgtcgcgcagtacgcggccgaccgcgacgtgctgaactgcttctgctacaccggcggcttctcgctcgcggcgctcaagggcggcgcgaaacgcgtcgtgtcgatcgactcgtcgggcgatgcgctcgcgctcgcgcagcagaacgtcgtggccaacggcttcgacgccgaacgcgcgacctggctcgacgccgatgcgttcaagacgctgcgccgcctcgtcgacgaaggcgaacgattcgacctgatcgtgctcgatccgccgaagttcgcgccgacccgcgacagcgtcgatcgcgcggcgcgcgcgtacaaggacatcaacctgagcggtttcaggctgctgcgtccgggcggcctgctgttcacgtactcgtgctcgggcgcgatcgacatggacctgttccagaagatcgtcgcgggcgcggccgccgacgcgaaggtcgacgcgcggatcctgaagcggctcggcgcgggcgtcgatcatccgctgctcgccgcgttcccggaaggcgaatatctgaagggcctgctgttgcaaatcgtc

SEQ ID NO: 11432 - DNA, 858 bp, Burkholderia cepacia
atgaaccgtcccgatccagaccaacttctcgacaagctgcagcgagatgaagaaaagcagcggcgcggccagctcaagatcttcttcggcgcgtccgccggcgtcggcaagacctacgcgatgctgcaggccgcgcgccagcgccggcaggatggcgtcgacgtcgtcgtcggcatcgtcgagacccacggccgcagcgagaccgccgcgctgctcgacggcctcgacgtgctgccgcccgcccgcatcgactatcgcggccgcacgctcgccgaattcgatctggacggcgcgctcgcgcgggcgccgcaactgatcctcgtcgacgagcttgcgcattcgaacgtgcagggcgcacgccacctgaagcgctggcaggacgtctacgagctgctcgacgcgggcatcgacgtctatacgaccgtcaacgtccagcatctcgaaagcctgaacgacgtggtcggcgcgatcaccggcatccgcgtgtgggagaccgtgcccgatcgcgtgttcgacgcggccgacgaagtcacgctcgtcgacctgccggccgaggaactgctcgagcggatgcgcgacggcaaggtctatctcgcgcagcaggccgagcgcgcggtgcgcaacttcttccgcaagggcaacctgatcgcgctgcgcgaactcgcgctgcggcgcacggccgatcgcgtcgacgcgcagatgcgcgagtaccgcgccgaccgttcgatccagcgcatctggcaggcgcgcgagcggttgctggtgtgcgtcgggcccggccccgaagcgccgacgctggtgcgcgcggccgcgcggctcgcggcgagcctgaaggccgactggatcgccgtgtacgtc

SEQ ID NO: 11433 - DNA, 585 bp, Burkholderia cepacia
atgccgttcaatttcccgattttcctgacgtgggtacggatcgtgctgattccgctcgtcgtcggcgtgttctatctgccggacacggtgatgggcggcgcgcaccgcaatctcgcggcggcggcgatcttcatcctcgccgcgctgaccgactggttcgacggcttcctcgcccgcaagtggaaccagacgtcgtcgttcggcgcgttcctcgacccggtcgcggacaagctgatggtgacggccgcgctgctgatcctcgtgcagatttcgcgggtcgacgcggcgatcgcgctggtgatcgtcggtcgcgagatcgcgatttcggcgctgcgcgagtggatggcccagatcggcgcgtcgaagagcgtggcggtgaaccagctcggcaagttcaagaccgcgtgccagatggtcgcgattccgatgctgctgttctacgggccgctgccgctggggatcgtgacgatcgacacgcgcgtgtggggcgagtggctgatgtatctggccgcggtgttgaccatctggtcgatgctgtactacatgaaactcgcatggccgcagattcgcgagcgtggcggcgcc

SEQ ID NO: 11434 - DNA, 450 bp, Burkholderia cepacia
atgcaaatcattctgttggaaaaagtcgccaatctgggtaacctcggcgatatcgtcaaggtcaaggacggttacgctcgcaacttcctgatcccgaaccgcaaggctcgccgtgcaacgaaggaagcgatcgccgaattcgaagtgcgccgcgctgaactcgaaaagatcgccgctgaaaagctggccgcatcgcaggcagtcggcgagaagctgaacggccagtcgttcgaaatcacgcagaagtcgggcgtggacggccgtctgttcggctcggtcacgaacggcgacgtcgcggaactgctgaagaaggcaggctacgaagtcgagaagctgcaagtgcgcatgccggaaggcccgctgaagatgatcggcgagcacaacgtccaggtcgcgctgcacacggacgtcgtcgtcgacgtcacgatcaacgtgatcggcgaccacgcg

SEQ ID NO: 11435 - DNA, 948 bp, Burkholderia cepacia
atgaatactcttcgcgaagtcgttccggtgccgcgcgagcaactcgcgcgctcgcgtgtgctcgtcgtcggcgacgtgatgctcgaccgttactggttcggcaacgtcgaccgcatttcgcctgaggcgccggtgccggtcgtgcacgtgcagcgtcaggaggagcggctcggcggtgcggccaacgtcgcgcgcaatgccgtgacgctcggcggccaggccgggctgctgtgcgtcgtcggttgcgacgaacccggcgagcggatcgtcgagttgctcggcagcagcggcgtgacgccgcatctcgagcgcgatccggcgctgccgaccacgatcaagctgcgcgtgctcgcgcgccagcagcaactgctgcgcgtcgacttcgaggcgatgccgacgcacgaggtattgcttgcggggctcgcgcgcttcgatgtgctgctgccgcagcacgacgtcgtgctcatgtcggattacgccaaaggcggcctcacgcacgtcacgacgatgatcgagaaggcgcgtgcggcgggcaaggcggtgctggtcgacccgaagggtgacgactgggcacgctatcgcggcgcatcgctgatcacgccgaatcgcgcggaactgcgcgaggtggtcgggcagtggaaatcggaagacgacctgcgcgcgcgcgtcgcgaatctgcgtgcggagctcgacatcgacgcactgttgctcacccgttcggaagagggcatgacgctcttttccgcaggcggcgaactgcatgcgccggcgctcgcgcgcgaagtgttcgacgtgtcgggcgcgggcgacaccgtgatcgcgacggtcgcgacgatgctcggcgccggggtgccgctcgtcgacgcggtggtgctcgcgaatcgcgcggcaggcatcgtggtcggcaagctcggcacggccacggtggattacgacgaactgtttcac

SEQ ID NO: 11436 - DNA, 465 bp, Burkholderia cepacia
atgagcactgaaaaaatcaacctcgacatccacaagatcctcacgctgctgccgcatcgctacccgattctgctcgtcgatcgcgtgctcgaactcgaaccgcacaaagggatcaaagcgctgaagaacgtgtcgatcaacgagccgttcttccaggggcatttcccgaagcggccggtgatgccgggcgtgctgatcctcgaggcgctcgcgcaggccgcggcgctgctgacgttcgcggaagagcagccgaaggatccggagaacacgctgtattacttcgtcgggatcgacggcgcgcgcttcaagcgcgtggtcgaaccgggcgaccagctgattctgaacgtgacgttcgagcgctacatccgcggcatctggaagttcaaggcggtggcggaagtgggcggcaaggtggcggcggaagccgaactgatgtgcacggtcaagacggccgacgcggcgccc

SEQ ID NO: 11437 - DNA, 1011 bp, Burkholderia cepacia
atgaccttgcaaatcggcgtgatcggctgcggcgcgatcggccaggaccacatccgcagactgacccgcacgctgtccggcgcgcgcgtcgtggccgtcaacgacatcgatccgcagcaggcgcgcgatgcggtgacgaagtacgggctcgacgccgagatctacggcgacggccacgaagtggtcgcggccgccgacgtgcaggccgtgctcgtcacgtcgtgggggccgacgcacgaagcgttcgtgctcgacgcgatcgcgcacggcaagccggtgttctgcgagaagccgctggccgtcacggccgacggctgcatgcggatcgtcgaagcggaagtcgcgcacggcaagcggctcgtgcaggtcggcttcatgcggccgtacgacgaaggctatcgcgcgctcaagcgcgtgatcgacagcggccagatcggcgcgccgctgatgctgcattgcgcgcaccgcaaccagtcggtcggcgagcgctacacgaccgacatggcgatcaccgacacgctgatccacgaactcgacgtgctgcgctggctgctcggcgaggactacacgagcgcgcaggtcgtctatccgaagaagacgcgccatgcgagcgcgcatctcgccgatccgcagatcgtgctgctggagaccgcgagcggcgtgcgcatcgacgtcgagatcttcgtgaactgccagtacggctacgacatccagtgcgaggtggtcggcgagcagggcatcgcgaagctgcccgatccgccggccgtcgggctcaggcatgcggcgcggcagtcggtcgagatcatgaccgactggaaggagcgtttcatcgcgtcgtacgacgtcgaactgcaggcgttcattgacggcgtgcggcagggtgcgctgaccgggccgtccgcgtgggacggctacgcggcggcggtcgcggccgacgcgtgcgtgcgggcccagcagagcggcgcggtcgagccgatcgcgatggccgagcgtcccgcgttctatcgcgga

SEQ ID NO: 11438 - DNA, 945 bp, Burkholderia cepacia
atgaatagccgccccacattgaatgaactgagagcgctcagcgcggttgtcagtcaccgcagttttcgaaaggccgccgaagaactcgagctggctgcctccacgcttagtcacatgatgcgcgacctggaagagcgagtaggcgtgcgcctgcttaaccggacgacgcgcagtgtctcccccacaccagccggggagcgcctcgtcacgaagcttcatccgattttgcaggatctcgatagtgcgctagccgagatggatgcgaaccgcgatcacccttctggcacattgcgtctcactgcatccgagacggtatcgatgttgcttgttcagaagatcatccccgaattcctgaaccgctaccccgaaatgcgcgtggacctcgtcgccgaaccggcctttgtggatatcgttgccgaaggcttcgatgcaggctttcggctcggggaggcagtgcctcaggatatggtcgcggtccatttcggcggtccgtctcgaatgattcccgtcgcatcgaaaacatatctcgctgcccgcaaaccgccgcgcacgcccgttgaccttgccgaacaccagtgcatttgttctcgtacgccgaacgggcgaccgtacaagtgggagttcaagcgccgcggtcacgcagtttcgattgatgttccgggctcgctggtcttgaaccggaccgaattgatgcttgaggccgcactacaagggctcggggtagctttcgttcccgagcagatggccaggccgtacctcgataatggctcactgagcgcgttgctgagcgagtggtgcccgacctaccccggcttgtatttgtactaccccggacaccgacaagttcctgttggtttgcgcgcttttgtcggcgttcttaaggagctcgacgctacgcggtcgcatcgctgcagtccaaaggcgcccaccgaaactctggcgagg

SEQ ID NO: 11439 - DNA, 132 bp, Burkholderia cepacia
atgaaacgtacttaccaaccgtccgtgacgcgccgcaagcgcacccatggcttccgtgtccgcatgaagacggcaggtggccgcaaggtcatcaacgctcgccgcgcgaagggccgcaagcgcctcgccatc

SEQ ID NO: 11440 - DNA, 2081 bp, Burkholderia cepacia
  misc_feature (1504)..(1504): n=g, a, t or c
  misc_feature (1507)..(1507): n=g, a, t or c
ggcgaccgcgcggcattcgccgccacgctcgcgcacgcgcaggcgagcgcaccggacgatcccgacatgctcgccgcgatcggcgcgcagtggatcgacgcgggcgaacccgagcgcggcctcgcgccgctgcgcgactggatcgccgcgcatccgcgcgaagccgacgcggacgtgcggctgcgctacggcgacctgctcggccgcgcggggcgcgacgacgcgctcgccgcgtggctcgacacgctgcgccgcgactcgtcgctgacgcccgcgcagaccgcgcggctcgaggatcagtcgctgcggctcgtgctgcggcagaccgacgacgcgatcgcgcgacaggactacgcacaggcgcgcacgctgctcgaccgcgcgagcccggccggccgggcggacaagcgttacgcgctcgaactcgccgatctcgaacgcgcgcagggccattacgatgccgcgcgcgatgcgctcgcgccggtcgtggcgcgcacgcccgacgatgccgatgtgcagctcgcgctcgcccggagcgacgaggacagcggcaaccgtgccgccgcacgcgcgcgcgtgcaggccgtgctggcgcgcacgccggacgacgacgttgacacgcaactgtcggccgtgcgccgcctgaacgcgctgcgccgcccggacgaagccgcgcaggtcaccgaccggctgcaggccgcgtatccggcgcgcgccgacgtgacggtcgccgccggacgcgtggccgaggcgcaggggcgctatgacgacgcggcgtcgctgtaccggctgtcgcagtcgcaggaacgcgcgacgggcgtgagcccgggccgcgacgggttgacgcccgcgcaggccgcgttcgcggatctgcagcagcggcgcaatcccgagatcgagaccggctggatacccgcgtacaaatcgggcgacgaaggcatctcgtcgtatcgcgcgcagcaggtgccgatctatatgcagatgccggtccgttacgacgggcacgtgttcgcgcagatcgacaccgtgcatctcgacccgggcacgctcgacacgagcaacccggacgcctattcgctgaagacgttcggcacctacgcggcgctccgcgcgcaaaacgggttgccgccgccattccagctgaatcagccggccgccgcgctgctcgcgaatccgccgggttcgctgcaccagtcgacgacgggcgtcgcgctcggcgccggctatctgtcggacgcgtggcgcgtcgatctcggcacgtcgccgctcggcttccccgtgcactacctggtcggcggcgtgcgctatcgcttcgacgcgggccccgcgatcttctcggtgaatgcgtcgcgaaggccggaaacgagcagcgtgctgtcgtacgcggggatgcgcgacccgtggaccggcgcggtgtggggcggcgtgcgccgcgacggcgtgaactgcgtgcgccgccccaaaacgaaccgcacgaaccaaaaaaaaagatcggcgcgggcgngcngtccggccgcaacgtcgaacgcaacgcggaagtcacgactggcgcaccgagtttctcgggtgcccctgtgtaagagcgcgcgacgatgaagctcagcacggggctcgtcgacaatgcgtggcactacgcgcagaacctgcgttactacacgtacgggcagggcggctactacagcccgcaacgctacctgtcgctcggcgtgccgatcgaatgggcggggcggcgcgatgcgctgtcgtgggacctgaccgttaccggcgggatctcgaacagctacgaaaaggattcgctgtattacccgacgttctcggaccagcgcgccgcgcaggtggcggccgggttcgtctatgcgggcagctcgacgcgcggcgtgtcgttttcttacggcgtgaacggcatcgtcgagtatcgcgtgaacccgcacctgagcgtcggcgcgcagttgcacatcgaccggtcgcacgactatgcgccgagctcggcgctcgtgtatttgcgctatgcgttcgatgcgcgcgcgccgcgcagctggctcgtcacgccgacgccggtgcggctttattcggattactag

SEQ ID NO: 11441 - DNA, 819 bp, Burkholderia cepacia
atgctgaaaacccgtgtgatcacggcgatcgtgatgctggcagtgctgctgccggtgacgctgttcgcgccgctcgccgggttcggtgcgctgatcggcgtcgtgctcgtgttcgccgcgtgggagtgggcgcgcctgctcaagctcggcggcgccggcccggtcgtctatgcgctcgtcgcggcgctcgcgctcgcggccaccgcgccgctcggcgtcgatgcggcatcgtcccgtccccttttcatggcggccggcgtgttctggctgctggtcggcccgttcgcgctgcggcgcaagcccgaactcgcgggcggcgtgtggcggccgttcctgctggccgccggcctcgtcgtgttcgccgcctgctggcatgcgctcgtggcagcccgcgcgcagggcgtgccgttcgtgctgtcgctgcttctggtcgtctggctggccgatatcggcgcatacttcgcgggcaaggccttcggaaagcgtaaactggccatcacgatcagccccggcaagagctgggagggtgcgatcggcggctggttcgcggtgatggtcgtcgccggtgtcgcgatggccgtgcatgcgttcgaaccgaccctgttttctgcattcgccatgcgctacgggatgcccggcgcgtgggccgcgctgacgctgctggtcgcgtacagcgtgatcggcgacctgttcgagtcgctgctgaagcggcaggcgggcgtgaaggattcgagcggactgctgccgggccacggcggcgtgctcgatcgtgtcgacgcgctgctgccggtgctgccgctcgcgatgctgctgcttggt

SEQ ID NO: 11442 - DNA, 2100 bp, Burkholderia cepacia
gtggctcgcaagactcctatcgagcgctaccgcaatatcggtattagcgctcacatcgacgccggcaaaacgacgacgaccgagcgcattctgttttacaccggtgtgaaccacaagatcggtgaagtccacgacggcgcagccacgatggactggatggagcaggaacaggaacgtggcatcacgatcacgtccgctgctaccacggccttctggaagggcatgggcggcaactatccggaacaccgcatcaacatcatcgacaccccgggccacgtcgacttcacgatcgaagtggagcgttcgatgcgcgtgctcgacggcgcgtgcatggtgtactgcgcagtgggcggcgtgcagccgcagtcggaaacggtgtggcgtcaggcgaacaagtacaaggtgccgcgtctcgcgttcgtcaacaagatggaccgtaccggcgcgaacttcttcaaggtctacgaccagctccgtctgcgcctgaaggcgaacccggttccggtcgtggtgccgatcggcgcggaagagaacttcaagggcgtcgtcgacctgatcaagatgaaggcgatcatttgggacgaagcgtcgcaaggcacgaagttcgactacgtcgacatcccggccgagctcgcggagacctgcaaggaatggcgcgaaaagatggtcgaagtggctgccgaagccagcgaagacctgatgaacaagtacctggaagaaggcgatctgccggaagccgacatcgtcaaggcgctgcgtgatcgtacgatcgcgtgcgaaatccagccgatgctgtgcggtaccgcgttcaagaacaagggcgtgcagcgtatgctcgacgccgtgatcgacttcctgccgtcgccggtcgacatcccgccggtcaagggcgaactcgaaaacggtgaagaagcagagcgcaaggcatcggacgaagagaagttctcgtcgctcgcgttcaagatcatgaccgacccgttcgtcggccagctgatcttcttccgtgtgtactcgggcgtcgtcaactcgggcgacacgctgctgaactcgaccaagggcaagaaggaacgcctcggtcgtattctgcagatgcacgcgaaccagcgtgaagaaatcaaggaagtccgcgcaggcgacatcgctgcagcggtcggcctgaaggaagcaaccacgggcgacacgctgtgcgacccggcgaacccgatcgttctcgaacgcatggtgttcccggagccggtgatttcgcaggcggtcgagccgaagaccaaggccgaccaggaaaagatgggcctcgccctgaaccgtctggctcaggaagacccgtcgttccgcgtgcagaccgacgaagagtcgggccagaccatcatttcgggcatgggcgagctccacctcgaaattctggtcgaccggatgaagcgtgaattcggcgtggaagcgaccgtcggcaagccgcaggttgcgtaccgtgaaacgatccgttcgacggcgaaggatgtcgacggcaagttcgtcaagcagtcgggtggtcgcggccagtacggtcacgcggtcatcacgctcgagccgaacgaacaaggcaagggctacgagttcttcgacgagatcaagggtggtgtgattccgcgtgaatacatcccggcggtcgacaagggtatccaggacacgctgaagtcgggcgtgctggctggcttcccggtcgtcgacgtgaaggttcacctgacgttcggttcgtaccacgacgttgactcgaacgaaaacgcgttccgcatggccggttcgatggcgttcaaggaagcgatgcgcaaggcgaatccggtcgtcctcgagccgatgatggctgtcgaagtcgagacgccggaagactacatgggcaacgtgatgggcgacctgtcgggccgtcgcggtatcgtccagggcatggaagacatggttggcggcggcaagatcgtgcgcgccgaagtgccgctgtcggaaatgttcggctactcgacgtcgctgcgctcgctgacgcaaggtcgtgcaacgtacacgatggagttcaagcactacgctgaagctccgcgcaacgttgccgaagcgatcatcagcgcgaagtcgaag

SEQ ID NO: 11443 - DNA, 777 bp, Burkholderia cepacia
atggcaaagatcttctgcgttgcgaaccagaaggggggcgtcggcaagacgacgacatcggtcaatctcgccgcaagccttgcagcgcaggagcaacgagtcctgttgatcgatctcgacccgcagggcaacgcgacgatgggcagcgggatcgacaaggccgcctgcgaagcgaccgtgtatgaagtgctggtcgatggcgtgtcggtgaccgacgcgcgcgtgcgtccggaaggcgtcacctacgacgtgcttcccgcgaaccgcgagctgtccggcgccgagatcgagctgatcagcatcgacaatcgcgagcgccggctgaaggccgcgctcgagcgcgtggccgacgactacgatttcgtgctgatcgattgcccgccgacgctgtcgctgctgacgctgaacggcctgtgcgcggcgcacggcgtcgtgatcccgatgcagtgcgagtacttcgcgctggaagggctgtcggacctcgtcaatacgatcaagcaggtccacgcgaacatgaatcgcgacctgaagatcatcggcctgctgcgcgtgatgttcgatccgcgcatcacgctgcagcagcaagtctccgatcaactgaaagcgcacttcggcgacaaggtgttcgacgcggtgattccgcgcaacgtgcgtctggcggaagcgccgagttacgggttgccgggcgtcgtgttcgatcgcagctcgcgcggtgcgcaggcgtatatccagttcggtgccgagatgatcgaacgcgtgcgcgcgttcgaggtgtcg

SEQ ID NO: 11444 - DNA, 846 bp, Burkholderia cepacia
aagacgtcgaccggcaagccgtcgaacgtcgtgatccgcggcgtatcgccggccggcctcgcgctgcgtccgcacgtgaagctcgtggccggccgcccgttcgcgcccggctcgtcggagatcgtcgtcggcagcgcgatcgcgaaaggcttcagcggcacgcagctcggcgaccgcctgcatttcgcgcagcgcgactggaccatcgtcggcatcttcgatgcgggcggcagcggcttcgattcggagatctggggcgacgtcgaccagctgatgcagtcgttccggcgcaccagctattcgtcgatggtgctgcgcatcccgagcgcggacggcttcgcgcgcttcaaggccgacatcgacgtcgacccgcggctgaccgacgaggcgaagcgcgagcagaccttctacggcgaccagtcgaaggcgctgtcgaccttcatcaacatcctcggcatcacgctgtcgacgatcttctcgatcgccgcgatgatcggcgcgatgatcacgatgtatgcgtcggtcgcgaaccgcgtggccgagatcggcacgctgcgcgcgctcggcttcaagcgcaccagcgtgctcgccgcgttcctgctggaggcgctgctgctcggcttcgtcggcggcgtcgcggggctcgcgtgcgcgtcgctgatgcagttcgcgtcgttctcgacgaccaacttccagaccttctcggatctgtcgttccgcttcgtgctgacgcccgcgatcgtcgtgaagacgctcgtgttctcgctcgtgatggggctcgtcggcgggttcctgccggcgatgcgcgccgcgcgcttgaagatcgtcgacgcgctgcgcgcgcag

SEQ ID NO: 11445 - DNA, 2484 bp, Burkholderia cepacia
gtgcgaatcagacattccttcctttgcgtctccgtgctggtcgtcggcagccagagccaggcgacggaattcaattcgtcgttcctcgacatcgacggaacgagcaacgtcgacctgtcgcagttctcgcaggcggacttcacgctgcccggcgagtacatgctcgacgtgcaggtcaacgacctgttctacgggctgcaagcgatcgaattcatcgcggtcgacgcgtcgggcgccggcaagccgtgcctgcggcccgagctcgtcgcgcagttcgggctgaagccgtcgctcgtgaaggatctgccgcgcttccagggcgggcgttgcgtcgacctcggcgcgatcgagggcgcgaccgtgcgttacctgaaaagcgacgggcggctcaagatcacgattccgcaggccgcgctcgaattcaccgattcgacctacctgccgccggcgcgctggtccgaaggcattccgggggcgatgctcgattaccgcgtgatcgcgaacacgaaccgcaacttcggtgcgggcggcggacagacgaatgcgatccaggcctacgggacggtgggcgcgaactgggatgcgtggcgctttcgcggcgactatcaggcgcaatcgaacgtgggtaacacggcgtacgcggaccggacgttccgcttcagccggctgtatgcgtttcgcgcgctgccatcgatccagtcgacggtgacgttcggcgacgactacctgacctccgacattttcgacacgttcgcgctgacgggcgcgtcgatccgcagcgacgatcgcatgctgccgccgtcgctgcgcggctatgcgccgctgatctcgggcgtcgcgcgcaccaacgcgaccgtgacggtgtcgcaggccggccgcgtgctgtacgtgacgcgcgtgtcgccgggcgcgttcgcgctgcagaacatcaacacgagcgtgcagggcacgctcgacgtggcggtcgaggaagaagacggcagcgtgcagcgcttccaggtgacgacggccgccgtgccgttcctcgcgcgcgccgggcagttgcgctacaaggccgcggtcggcaagccgcgcctgttcggcggcgccggcatcacgccgttcttcggcttcggcgaaatcgcgtacggcctgccgttcgacgtcacggcgtatggcggtttcatcgccgcgtcgggctacacgtcgatcgcgctcggcgtcggtcgcgatttcggcgcgttcggcgcggtgtcggccgacgtcacgcatgcgcgggcgaagctgtggtggaacggcgcgacgcgcaacggcaactcgtatcgcatcaactattcgaagcacttcgacgggctcgatgccgacgtgcgcttcttcggctaccgcttctccgagcgcgaatacacgaacttcgcacagttctccggcgacccgaccgcatacggcctcgccaacagcaagcagcgctactcggcgacgctgtcgaagcgtttcggcgacacgtcgacctatttttcgtacgaccagacgacctactgggaacgtgcgaacgagcagcgcgtcggcctcacgctgacgcgcgcgttttcgatcggcacgctgcgcaacctgaacgtcagcgtgtcggctttccgcacgcagagcgcgggcgcaagcggcaaccaggtctcggtcaccgcgacgttgccgatcggcgggcgtcacaccgtcacgtcgaacctgacgacgggcagcggcagcacgagcgtgaacgcgggctacatctacgacgatccgaatggccgcacctaccagatcaacgcgggcgcgaccgacggacgcgcgtcggcgaacgcgagctaccgccagcgctcgtcggcgtatcagctgaccgcgcaggcatcgacgctcgccaacgcgtatgcggccgcgtcgctcgaagtcgacggctcgttcgtcgcgacgcagtacggcgtgtccgcgcacgccaacggcaatgcgggcgacacgcggctgctggtgtcgaccgacggcgtgcccgacgtgccgctgtccggcacgctcacgcataccgattcgcgcggctacgcggtgctcgacggcatctcgccgtacaacgtgtacgacgcgaccgtcaacgtcgagaagctgccgctcgaagtgcaggtgacgaacccgatccagcgcatggtgctgaccgacggcgcgatcggcttcgtgaagttctccgccgcgcgcggcagcaacctgtacctgacgctgaccgacgcggccggcaagccgctgccgttcggggcgtcggtgcaggacgcggcgaacggcaaggaactcggcatcgtcggcgaagccggcgcggcgttcctgacccaggttcagccgaaatccacgctggcggtgcgggcgggcgaacgcacgctctgcacgatcgccgcactgccgaaccagctccaactcgaaggcacgccgattccgatgacgtgccagccgcccggcgagtcgcatgcagcggccgcgcgggccgaacga

SEQ ID NO: 11446 - DNA, 1074 bp, Burkholderia cepacia
atgactccatcgaccggccgacccgccgcgccgctgctttttcagcaagcccggattcgcgccgacaccccgcccggtcgaccagaacgcccggacacccgtaccggcaccgaatatggagacagaccgatgactcgcttcctcgacgttcccgccaccgcccgcctgatcgccaggaccggcgtcacgacgttcctgcgcgaactcgtcgacacgctgcgcgccgactacctgcactgggccgatttcgacaagtcgccgcgcgtcgcgtgccactcgcgcgacggcgtgatcgagctgatgcccgtcgcgaacgcgtcgctgttcgcgttcaagtatgtgaacggccatcccgtcaatgcggcgcgcgggatgcacacggtgatggcgttcggcgcgctcgccgaagtcgataccggctacccgctgctgctcgccgaactcacgctcaccaccgcgctgcgcacggccgcgacgtcggtcctcgccgcgcaggcgctcgcccggcccgattcgcgcacgatggcgctgatcggcaacggcgcgcaaagcgaattccaggcgatcgcgttccacacgctgctcggcatcgacgaaatccgcgtgttcgacgtcgatccgcgcgcaaccgacaagctcgtgcgaaatctcgccgcgtacccgaaattgcgggtcgtgcgcgcggcctcgaccgccgacgccgtgcgcggcgccgacatcgtgacgaccgtcaccgccgacaaggcatacgcgacgatcgtcacggccgacatgatcgagcccggcatgcatctgaacgccgtcggcggcgattgcccgggcaagaccgaactcgaggcgggcgtgctgcacgcgggccgcgtgttcgtcgaattcgagccgcagtcgcgcatcgagggcgagatccagcagatgccggccgacttccccgtgaccgagctgtggcgcgtgctgcagcgcgaaacggctggccgcgagcgcgcggacgaagtcacggtgttcgactcggtcggcttcgcgctcgaggattactcggcgctgcgctacctgtacgcgctcgcgcagcagcacagc

SEQ ID NO: 11447 - DNA, 1374 bp, Burkholderia cepacia
gtggccaaacagaaaaccgtttacgtctgcagcgagtgcggcggacagaccccgaagtggcaggggcagtgcccgtcgtgccaggcctggaacaccctcgtcgaatcggtcgccgagtcgccggccgcccatcgcttccagtcgctcgcgaagcgggcgccggtgcagcgcctcgccgacatcgaggccgccgacgtaccgcgcttctccaccggcatcggcgaattcgaccgcgtgctgggcggcgggctggtgccgggcggcgtcgtgctgatcggcggcgatccgggcatcggcaagtcgacgctgctgctgcagtcgctcgcggatatcgcgagcgagcggcgcgcgctgtatatcagtggcgaggaatcggccgcgcagatcgcattgcgcgcgcaacggctcgcattgctcgacggcggcgcaccggcggccgaactgaagctgctcgccgagatccagctcgagaagatccaggccgcgatcgatacggagcggccggacgtggccgtcatcgactcgatccagaccgtctattcggacgcgctcacgtcggcgcccggctcggtcgcgcaggtgcgcgaatgcgcggcgcagctcacgcgcatcgcgaaacagtcgggcaccgcgatcatcatggtcgggcacgtgacgaaggagggcaacctggccggcccgcgcgtgctcgagcacatcgtcgacacggtgctgtacttcgaaggcgacacgcactcgtcgttccggctcgtgcgcgcgttcaagaaccgcttcggcgcggtcaacgagctcggcgtgttcgcgatgaccgagcgcgggctgcgcggcgtagccaacccgtccgcgctgttcctgtcgcagcacgagcaggtcgtacccgggtcgtgcgtgctcgtcacgcaggaaggcacgcgcccgctgctcgtcgaaatccaggcgctggtcgataccgcgcacgtgccgaacccgcgccggctcgcggtcggcctcgaacagaaccggctcgcgatgctgctcgcggtgctgcaccgccacgcgggcatcgcggccttcgatcaggatgtgttcctcaatgcggtgggcggcgtgaagatcaccgagccggccgccgacctcgcggtgctgctcgcgattcactcgtcgatgcgcaacaaggcgctgccgaaagggctgatcgtgttcggcgaggtggggctggcgggcgagatccggccgtccccgcgcgggcaggaacggctgcgcgaagcggcgaagctcggcttcacgtccgcgctgattccgaaggcgaatgcgccgaaacagccgatcgaagggctgaacgtgatggccgtcgagcggctcgagcaggcgatcgaccgcgtgcgcgatcttgaa

SEQ ID NO: 11448 - DNA, 897 bp, Burkholderia cepacia
atgggagtagcggtcatgccgaccgatcacagctttatcttgaaactgtcgtgccccgaccggcacggcatcgtccatgcggtctcgggcttcctgttcgagcgcagcaacaacatcctcgattccgcgcagttcggcgacagccgcaccagcgagttcttcatgcgcgtgcacttcgagcaggacggcggcggcgtggatgccgcgtcggcgctcgacacgcttcgcaaggaattcgcgccgctcgccgaacagttctcgatgcgctgggagctgcacgatgcggccgtgaagccgcgcgtcgtgatcatggtgtcgaagatcggccactgcctgaacgacctgctgttccgctatcgcacgggccagctgccgatcgagattccggcgatcgtgtcgaaccacaaggagttctaccagctcgcggcgagctacaacattccgttccatcacttcccgctgatcggcggttcgtccgatgccgcgaaggccgcgcaggaagcgcgcgtgctggaagtgatcgacgagcaccaggccgatctcgtcgtgctcgcgcgctacatgcagatcctgtcgccgaatatgtgcgagcagctcgccgggcgggcgatcaacatccaccattcgtttctgccgagcttcaagggcgcgaagccgtactaccaggcattcgaccgcggcgtgaagctgatcggcgcgaccgcgcactacgtgacgaccgatctcgacgaaggcccgatcatcgagcaggaagtcgaacgtgtcgatcacagcatgacgcccgaccagctgaccgcgatcggccgcgacgtcgagtgcgtgacgctcgcgcgggcggtgaagtggcacgtcgagcaccggatcgtgctgaacgggacgaagacggtcgtgttccgc

SEQ ID NO: 11449 - DNA, 1905 bp, Burkholderia cepacia
atggtttcgatacgcttgcctgacggctcagttcgacaatacgagcatccggtgacagttgccgaggttgcggcctcgatcggtcccggccttgcgaaggctgcgcttggtggcaagctcgatggcgagctcgtcgatacgtcgacggtgatcgaccgcgacgcgtcgctcgcgatcgtcacggacaaggatgccgacggcctcgacatcatccgccactcgaccgcccacttgctcgcgtatgcggtgaaggagctgtatccggacgcgcaggtgacgatcggtccggtgatcgacaacggtttctattacgacttctcgtacaaccgcccgtttacgccggaagatctcgaaaagatcgaaaagcgcatgcaggaactcgcgaagaaggacgagccggtcacgcgccgtgtcgtgtcgcgcgacgaggcggccggttatttccgcagcatcggcgagaagtacaaggccgagatcatcgaatcgattccgcaaagcgacgaaatcaagctgtactcgcacggcggcttcaccgatctgtgccgcggcccgcacgtgccgtccaccggcaagctgaaggtattcaagctgatgaaggtcgcgggcgcgtactggcgcggcgattcgaagaacgagcagctgcagcgcatctacggtacggcctggacgaagaaggaagaccaggaccagtacctgcacatgctcgaggaagcggaaaagcgcgaccaccgcaagctgggcaagcagctcgacctgttccacatgcaggaagagtcgccgggcatggtgttctggcatccgaagggctgggcgctgtggcagcaggtcgagcagtacatgcgccgccgcgtcaacgaggccggctatctcgagatcaagacgccgatgatcatggaccgctcgctgtgggaagcgtcgggccactggcagaactatcgcgagaacatgttcacgacggagtcggagaagcgcgactacgcgatcaagccgatgaactgcccgggccacgtccaggtgttcaagcacggcctgcgttcgtaccgcgacctgccgctgcgttacgcggaattcggctcgtgccaccgcaacgaggcgtcgggcgcgctgcacggcctgatgcgcgtgcgcggcttcgtgcaggacgatgcgcacatcttctgtacggaagatcaattcatctcggaatcgatcgcgttcaacacgctggccatgagcgtgtacaaggatttcggtttcgatcacatcgacatcaagctgtcgctgcgccccgatcagcgtgccggtacggacgagacgtgggatcgtgccgagcaaggtttgcgcgacgcgctgacggcttgtggtctcacgtgggaagagttgccgggtgagggcgcgttctacggcccgaagatcgagtaccacatcaaggacgcgctcggccgctcgtggcagtgcggcacgcttcagctcgacatggtgctgccggagcgcctgggtgccgaatacgtcgcggaagacaacagccgccgccggccggtgatgctgcaccgcgcgatcgtcggttcgatggagcgtttcctcggcattttgatcgagcaccatgctggtgcaatgccggtctggctcgcgccgtatcaggcaattgtgctcaatatcgccgaaagtcaggccgaatatgcgcagtctctggcccaatcgttgcaaaaacaaggggttagagtggcggccgatttgcgcaacgagaagattagctataaaatacgcgagcacacgctggaaaaggtgccttatctcctcgtcgtgggcgataaggagcgtgatgcgcaaacggtagccgtgcgtgcccgtggcggcgtcgatcttggcgtaatgccggtcgaagccttcgttgagcgtctgcaggaagacctgcgctcgttcaag

SEQ ID NO: 11450 - DNA, 450 bp, Burkholderia cepacia
ttgggatcgagggtgattgagggcagcagagccgggaaacgggaggcgcggacgggcaacaaggaggacccggggggagagccggagggacaacggggagaacgacggagaacgcgggcaaagaaagaaggacgggggggggggggaaaaaacggggggggaggggaggggcggagaacgcaaagggcagggcgcggacgaagcgcggcagggcagggaaacaacgggggtggggcgggcgagaggacggaaagagccggggagaagggggcgggggacgcggcgagcgcgaagaagaacaagccggggaggacgcgcgagaaggcggccagaacccggacgccgagcgggcaaggcacgctgaacaagacggcgcgcgcgctcaacaggcgcacgctagtgatggggaaaaagctcaacgacagctaccggttcagctccgacggcgcc

SEQ ID NO: 11451 - DNA, 1902 bp, Burkholderia cepacia
atgacttcgagccgtaacccgtcgccgctggcgctgcccgagcagcgcgtggtggccgtcgacgacctgtcggtcacgttccgccgcgaaggcgcgacgttcgacgcggtgcgcaacgtgtcgtttcacgtcgatcgcggcgagacgctcgcgatcgtcggcgaatcgggctcgggcaagtcggtcacgtcgctcgcgctgatgcgcctcgtcgagcacggcggcggcgagatcacgagcggacggatcgcgttccggcgccgtggcggcgcgctggtcgatctcgcgcaggcgagtgccgcgacgatgcgcggcatccgcggcgcggacatcgcgatgatcttccaggagccgatgacgtcgctgaacccggtgttcaccgtcggcgaccagatcagcgaggcgatcgcgctgcaccagtcgaagggcacggccgaagcgcgcgcggaagcgctgcggctgctcgatctggtgcgcatcccggaagcgcgccgcgtgttcgcgcgctatccgcaccagttgtcgggcgggatgcggcagcgcgtgatgatcgcgatggcgctgtcgtgccggcccgcgctgctgatcgccgacgagccgacgaccgcgctcgacgtgacgatccaggcgcagatcctgcaactggtgcgcgggctgcaggacgaaatgaacatgggcgtgatcttcatcacgcacgacatgggcgtggtggccgaagtcgccgaccgcgtgctcgtgatgtaccgcggcgagaaggtcgaggagggcgagtcggaccgcatcttcgcgacgcccgcgcatcgctacacgcgcgcgctgctcgcggccgtgccgcggctcggctcgatggagggcaccgacgcccccgagaaattcccgctgctgaaggtggacggcaccagcgcgacggcgccggccccgaccacggcgtccgccgcgaacgacacgcagccgcccgtcgatcatgccgcgccgccgatcctgcgcgtgcgcgatctcgtcacgcgctttccggtgaagagcggcgtgttcggccgcgtgtcgcaatacgtgcatgcggtcgagcgcgtgagcttcgagttgcgcgcgggcgagacgctcgcgctcgtcggcgaatcgggctgcggcaagtcgaccaccggtcgttcgctgttgcgcctcgtcgaatcgcaaagcggctcgatcgaattcgacggccgcgacatcagcgcgctgaagggcccggacctgcaggcgctgcgccgcaacatccagttcatcttccaggacccgttcgcctcgctgaacccgcgcctgaccgtcggcttctcgatcatggagccgctgctcgtgcacggcgtcgcgagcggcgccgaggcgcaggcgcgcgtcgactggctgctcgacaaggtcggcctgccgccggaagccgcgcgccgctatccgcacgaattctcgggcggccagcgccagcggatcgcgatcgcgcgtgcgctcgcgctgaacccgaaggtcgtgatcgccgacgagtcggtgtcggcgctcgacgtgtcggtgcaggcgcagatcgtcaacctgatgctcgacctgcagcgcgagctcggcgtcgcgtacctgttcatctcgcacgacatggcggtggtcgagcgcgtcagccatcgcgtcgcggtgatgtatctgggccagatcgtcgagatcggcccgcgtcgcgcggtgttcgaggcgccgcagcatccgtacacgaagaagctgatgagcgcggtgccggtcgccgatcccgcgcgccggcatgcgccgcgccagctcgcggcggacgagattccgagcccgatccgcgcggtcggcgacgagccggtcgtcgcgccgctcgtcgcggtcggtcccgatcattacgtcgcgacgcatcgcgtcggcggcgcgtat

SEQ ID NO: 11452 - DNA, 457 bp, Burkholderia cepacia
atgaatcgcctagccaaaatcctgcccatagagaacgtcgtcatcgacctctccgtcaccagcaagaaacgcgtcttcgaacaagccgggctgatgttcgagaatcagaacggcatcgcccgcagcaccgtcacggacaacctgttcgcgcgctagcgcctcggttcgaccgggctcggcgaaggtgtcgcgattccgcacggcgcgcatcaagggcctcaagcacccgctcgccgcgttcgtccgcctcgccgatgcgatcccgttcgaagcgcccgacggccagccggtcggcctcctgatcttcctgctcgttcccgagcaagccacccagcagcacctcgagatcctgtcggaaatcgcgcaactgctgtccgatcgcgacgcccgcgagcgtctgcacaacgaaacggatatcgccgagttgcatcgcctgctcactcagtggcaaccttga

SEQ ID NO: 11453 - DNA, 543 bp, Burkholderia cepacia
atgctttccgactctcctttttccgcgcccggcgccacgcgcggcggcgacgaagtgattcccgtttcggcgctcaatcgcgcgatttcgacgatgctcgagcgctcgtttccgctgctgtggatttcgggcgaagtatcgaatttcacgcgcgccgcgagcggccactggtatttctcgatcaaggaccagcaggcgcagatgcgctgcgtgatgttccgcggccgcgcgcaatacgccgaattcacgccgcgcgaaggcgaccgcatcgaagtgcgcgcggtcgtcacgatgtacgagccgcgcggcgaagtgcagctcaacgtcgaagccgtgcgacgcaccgggcaggggcggctgtacgaggcgttccggcggctgaaggcgcagctcgaagccgagggtctgttcgcccccgagcgcaagcggccggtgccgccccacccgcgcgcgatcggcatcgtcacgtcgcagcaggccgccgcgctgcgcgacgtgctcaccacgctcgcccggcgcgcgccgcacattccggtgatcgtc

SEQ ID NO: 11454 - DNA, 1704 bp, Burkholderia cepacia
atgacactacgcttgagccgccgcgcgtacgcggaaatgttcgggccgacgacgggcgaccgcgtccggctcgccgataccgaactgctgatcgagatcgaacgcgacttcaccacgtacggcgaggaagtgaaattcggcggcggaaaagtgatccgcgacgggatgggccagtcgcagcgcgtggccgccgacgtgcccgacaccgtcatcacgaacgcggtgatcctcgatcactggggcatcgtgaaggccgacatcgcgatcaagcacggccgcatcgccgcgatcggcaaggccggcaaccccgacatccagccgggcgtgacgatcgcgatcggcgccgcgaccgaagtcatcgccggcgaagggctgatcgtgaccgcgggcggcatcgacacgcacattcacttcatcagcccgcagcagatcgacgaggcgctcgcgtcgggcgtcacgacgatgctcggcggcggcacggggccggccaccggcaccaacgcgacgacctgcacgccgggcccgtggcacatggagcggatgctgcaggccgccgacggctggccgatcaatctcggctttctcggcaagggcaacgcgagcctgccgcagccgctcgtcgagcagatcgcggccggcgcgatcggtttgaaactgcacgaggactggggcacgacgcccgccgcgatcgacaactgcctgtcggtggccgacgacaccgacacgcaggtcgcgatccacaccgacacgctgaacgaggccgggttcgtcgaatcgacggtcgccgcgttcaagggccgcacgatccacacgtaccacaccgaaggtgcgggcggcggccatgcgcccgacatcctgaaggtgtgcggcgagatgaacgtgctgccgtcgtcgaccaatccgacgcgcccgtacacgatcaacacgctcgacgagcatctcgacatgctgatggtgtgccatcacctcgatccgtcgatcgccgaggatctcgcattcgccgaatcgcgcattcgtcgcgagacgatcgcggccgaggacatcctgcacgatctcggcgcgctgtcgatgctgtcgtccgattcgcaggcgatgggccgcgtcggcgaagtgatcatccgcacctggcagaccgcgcacaagatgaaggtgcagcgcggtgcgctgccggaggacaccgcgcgcaacgacaacttccgcgcgaagcgctacgtcgcgaagtacacgatcaacccggcgctcacgcacggcatcgcgcacgaagtcggttcgatcgaaccgggcaaatgggcagacctcgtgctgtgggaacccgcgttcttcgggatcaagccgtcgatgatcctcaagggcggcatgatcgcgctcgcgcagatgggcgacccgaacgcgtcgatcccgacgccgcagccggttcactatcgcgagatgttcgcgacgcgcggcggggcgctcgcgcgcacgtcgctgaccttcgtgtcgcagatggcggccgatgcgggcatcgcggagcgctatggcctcgcgaagcggatcgtgccggtgcgcaactgccgcaacgtgacgaaggccgacatgattcacaacgcctggcgtccgtcgatcagcgtcgacccggaaacctacgacgtgatcgccgacggccagttgctcacctgcgagccggcgactgtgctgccgatggcgcagcgctatttcctgttc

SEQ ID NO: 11455 - DNA, 391 bp, Burkholderia cepacia
gcccaaaccatcgatcacacgctgctcgcgcccgacgcgagcgacgcgcagatccgcgaactctgccgccaggcggccgagcatcgcttttactcggtctgcgtgaattcggcgaacgtgccgctcgccgcgcgcgagctggccgataccggcgtgctcgtgtgtgccgtggtcggctttccgctcggcgcggggctgtccgccacgaaggcattcgaagccaccgccgcgatcgcggcgggcgccggcgagatcgacatggtgatcaacatcggcgcgctgaaaagcgcgccgcgccgacgacgtgaaggccgacatcgacgccgtgcatcgcgcgtgcggcacggggccgctcaaggtgatcctcggaaccgggttggtgaccgagggg

SEQ ID NO: 11456 - DNA, 819 bp, Burkholderia cepacia
atgaagccgaatcgctacctgcagttcgcggcgctgttcgtcggctttgcgttcctgtacgtcccgatcatcagcctgatcgtctattcgttcaacgagtcgaagctcgtcaccgtgtggtcgggcttctcgttccgctggtacgcggcgctcgccgaggacgacgagctgctgacggccgcgtggctgtcgctgaagatcggcgtgctgaccgcgttcgcatcggtgttcatcggcacatgggccggcttcgtgctcgcgcggatggggcgctttcgcggcttcgcgctgttcagcgggatgatcaacgcgccgctcgtgatccccgaggtgatccaggggatctcgctgctgctgctgttcatcgagctcgcgaagtggatcggctggccggccgagcgcggcgtgttcacgatctggctcggccacgtgatgctgtgcatctcgtacgtcgcgatcatcgtgcagtcgcgcgtgcgcgagctgaacccgtcgctggaagaggccgcgctcgatctcggcgcgacgccgctgaaggtgttcttcacgatcacgctgccgctgatctcgcaggcgctgatcgccggctggctgctgtcgttcacgctgtcgatcgacgacctcgtgctgtcggcgttcctgtcgggccccggctcgacgacgttgccgctcgtcgtgttctcgcgcgtgcgcctcgggctgaacccggagatgaacgcgctcgcgacgctgttcatcatcgcggtgacggccggcgtcgtgatcgcgaacttcgtgatgctgcgccaggaacgcaagcggctggcggggttcgcggcc

SEQ ID NO: 11457 - DNA, 1539 bp, Burkholderia cepacia
atgaccgaatcccgaaacgccattctcgcgatcgacgaaggcacgtccggcacgcgcgccgcgctcgtcgacgcgagcggccacgtgtcgtgcctggaatacctgccgctgtcggtcgagagcccgcagcccggcgtcgtcgaacaggacgcgaacgcaatcctcgacaagacgctcgccgtctgccgtgcgacgctcgcgcaggcgcatcaacagcacgtgcgcatcgtcgcgctggcgctcgcgacgcagcgtgcgaccgccgtgctgtgggacacgcggaccgggcgcgcgctcgtgcccgcgatggtctggcaggacacgcgccatgcggccgagctcgaccgtctcgcggccgactgggaccgcgtgctggtgccgcaggtcggccggccggcgggggtgcgctcgccgtatctgtgggccgtgcaccagttgcgtacgtcgcgcgcggtggccgatgcgcatcgcgccggccgtctcgcgttcggcacgatcgacacgtggctgctgtggcatctgtccgaggcacgcgcgtgcatgacgacgccgaccaacgcgacgtccgccagcgcgtacctgctcggcgagcatcgctatttcgacccgtggctcgacgcactcggctttccgcgcgaactgctgccggcgctgcgcgaggacgccgacgcgttcggccacacgcgcgcggacgtgctcggcatcgacgtgccgatcctcgcgtgcgcgggcgaccagttcgcgggcgcggtcggcctcggctgcgtcgagcgcggccaggcgatgtgcgtgcacggcaccggcagcttcgtcgacctgctgacggggacggcgcgccccgacgccggatcgcatgcgcaacccggccacgcgcacgacggcacgctggcgatgaccgcgcggcggcacggcggcgtgtcgcattactcgctcgaaaccttcgtcgcgacgaccggctcggcgttgcgctgggtctgcgaaaagttgcgctggttcgacgaccccgcgcagatcagcgcgctggctggcaccgtgcggtcggcgcgcggcgtgaccttcgtgccggcgctcaccggcctgcgcgtgccgaggatggagccgaacgcgcgtgcgctgctgtcaggcatctcgatcgcgacgacgcaggccgaggtcgcgcacgcggtgctcgaaggcatcgcgcattcggtcgcgtcgtgcatggaggcgaacgaggcggtcgcgcgggccggcgtgtcggagctgatcgtcggcggcggcctcgcgggcagcgacacgctgctgcagatccaggccgacgtgagcggcgtgccggtgcgccggatgcgcgacggcgatcgcgcgagcctgcgcggcgcggcgtttctcgcgggcgcgtcggggttgctgtgggaatcgctcgaggcggcccgtgcgacgctcgtcaccgacgccgtcttcgaaccgtcgatcgatgcggacagccggcagcggcggcgcgcggcctggcatgcgcggatcgcgtccgagctcgcgcacgcggccgattttgctcatgcg

SEQ ID NO: 11458 - DNA, 453 bp, Burkholderia cepacia
atgctgaagaatctcgacccgctgctgcacgccgacatcctgcacacgctgcgcgcgatgggccacggtgacgaaatcgcgatctgcgatgcgaatttcccggcggaatccgtcgcggagcacacggtggtcggccgcgcgctgcggatcgacggtgccgattcggcgcgcgtcgtgcgcgcggtgctgtccgtgctgccgctcgatacgttcgtcgacacgcccgcatggcggatggaagtcgtcggcgacgcggccgcggtgccgcccgtgcagcgcgaagtgcaggccgagatcgaccgcgcggaagggcgcgcggtgccgctcgccggcatcgaccgtttcgcgttctacgagcgcgcgcagcaggcgtatgcggtgatcgtcaccggcgaaacgcgcggctacggctgcttcatcttcaagaagggcgtgctgttgagcgacgcgggc

SEQ ID NO: 11459 - DNA, 939 bp, Burkholderia cepacia
atgagcgggatcgatccgaaacgtttcggcaaggtggcagtgttgttcggcggggaatccgccgagcgcgaggtgtcgctcacctcgggccgcctcgtgctgcagggcctgcgtgacgcgggcgtcgacgcgcatccgttcgacccggccgagcggccgctgtcggcgctgaaggacgaaggcttcgtgcgcgcgttcaacgcgctgcacggtggctacggcgagaacggccagatccagggcgcgctcgatttctacgggatccgctacacgggtagcggcgtgctcgggtcggcgctcggcctcgacaagttccgcacgaagctcgtgtggcagcagacgggcgtgccgacgccgccgttcgagacggtgatgcgcggcgacgacctggccgcgcgcgcgaccgacatcgtcgcgaagctcggtctgccgctgttcgtgaagccggcgagcgagggctcgagcgtcgcggtgctgaaggtgaagacggccgacgcgctgccggccgcgctcgaggaagccgcgacgcacgacaagatcgtgatcgtcgagaagagcatcgaaggcggcggcgaatacaccgcgtgcatcgccggcgatctcgatctgccgctgatcaagatcgtgccggcgggcgagttctacgactaccacgcgaagtacgtcgccgacgatacgcaatacctgatcccgtgcggcctgccggcgcaacaggaagcggaactgaagcgcatcgcgcgccgcgcgttcgacgtgctcggctgcaccgactggggccgcgcggatttcatgctcgacgcggccggcaatgcgtatttcctggaagtgaacacggcccccgggatgaccgaccactcgctgccgccgaaggccgcgcgcgcggtcggcatcagctattcggagctggtcgtgaaggtgctgtcgctcacgctcaacgac

SEQ ID NO: 11460 - DNA, 597 bp, Burkholderia cepacia
gtgcgcatcgcgctcgcgctgaaagggctgccgtacgacacgctgccggtgaacatccgcaccggcgagcatcgcgacgccgattacatcgcgcaggtgaacccgtcggccgcggtgccggcgctgaccgacgacgatttccgtctcggccagtcgctcgcgatcctcgattacctcgaccagatccagccgacgcctcggctgattccgctcgaaccgcggcgccgggcgcgcgtgctggaactcgccgcgctgatcgcgtgcgacatccatccggtcaacaacctgcgcgtgctgcgctatctcgacagcgagctgaaggtcacgccgcaacagaagagtgcgtggtaccggcactgggtcgcggaagggatggccggcgtcgagcggctgctggcccgcgcgaacgcgggcccgtggtgtttcggcgatgcgccgacgctggccgacgtgtgcctggtgccgcaggtcgcgaacgcgttgcggatggattgcgacctgagcgcgtatccgcgctgcctcgcggtggtcgagcacgcgcggcacgaaccggcgttcgaggccgcgcaaccgcagcggcaaccggactacgtcgcg

SEQ ID NO: 11461 - DNA, 1023 bp, Burkholderia cepacia
gtggacatgacggtcatcctgtcgatcgggttagcggtaggcgacgcccggcatcacgcagagcatttcgaacgcgaggttcgcgccggtgagcgcggtggtgccggccggatcgtacggcggcgatacttcgacgaggtccgcgccgacgatgttcaggcccttcatgccgcgcacgatctccaggccctgttgcacggtcaggccgccgatttccggcgtgccggtgcccggcgcgaacgacgggtcgaggccgtcgatgtcgaagctcaggtacaccggcgtgtcgccgacgcgttcgcgcacctgcgccatcagcggcgcgagcgacttgttccagcagtcttccgcctgcacgacggtgaaaccctgctgccggcaccagtcgaaatcgtccgcgtgatagccggtgccgcgcaggccgatctgcgtgaccttgtcgcattgcagcaggccgtcttccaccgcgcggcggaacggcgtgccgtgcgcgatcttctcgccgaacatcgtgtcgttcacgtccgcgtgcgcatcgacgtgcacgaccgcgaccttgccgtacttccggtgcaatgcgcgcaggatcggccacgcgatcgtgtgatcgccgccgagcgtgatcggccggcagccgttcgcgacgatcgcgtcgtatgcctcctcgatgcggcgcaccgagtccttcaggtcgtacgggttggtcgcgacgtcgccgatgtcggccacctgcagcgaatcgaacggcgcggcgcgggtggccatgttgtacgggcgcagcagcacggattcggtgcggatctggcgcgggccgaagcgcgcgcccgagcggttcgacgtgccgagatcgagcggcacgccgacgaagcacgcgtcgaggccgtcggtcgtcgtggcctgcggcagccgcatcatcgtggcgatgccgccaaagcgcggcatctcgttgccgcccatcggttggttcagttcgcggggcatggggccgtctcctctttctggtgtcaagcgatcggccgatgg

SEQ ID NO: 11462 - DNA, 381 bp, Burkholderia cepacia
atgcgtttgctgcatacgatgctgcgagtcggcgatctcgaccgctcgatcaagttctacaccgaattgctcggcatgaagctgctgcgtcgcgaggattatccggaaggcaagttcacgctcgcgttcgtcggctacgaagacgagagcacgggcaccgtgatcgaactcacccataactgggagacgccgtcctacgatctcggcaacggcttcggccatctggcggtagcggtcgacgatgcgtacgcggcctgcgagaagatcaaggcgcaaggcggcaaggtcacgcgcgaggcaggcccgatgaagcacggcacgaccgtgatcgcgttcgtcgaggatccggacggctacaagatcgagttcatccagaagaag

SEQ ID NO: 11463 - DNA, 795 bp, Burkholderia cepacia
atgaagattgcgattgccggcgcatcgggccgaatgggccggatgctgatcgaagccgttctcaacgatgccgacgcgcagctcgtcggcgcgctcgaccgcgccggttcgccgttcctcggccaggacgccggtgcgttcctcggcaaggacaccgggatcaagctgaccgacgatctcgacgccgtgttcgcgcaggccgagtacctgatcgatttcacgcgtccggaaggcacgatggcccatatcgcggccgcgctgcgccacgacgtgaagctcgtgatcggcacgaccggcttcaccgccgagcagaaggccgagctgcaagccgcggcgggcaagatcggcatcgtgttcgcggcgaacatgagcgtcggcgtgaacgtcacgctgaagttgctcgaattcgcggcgaagcatttctcgcacggctacgacatcgagatcatcgaagcgcatcaccgccacaaggtcgacgcgccgtcgggcaccgcgctgatgatgggcgaagccgtcgccggcgcgctcggccgctcgctcgacgactgcgcggtgtacggccgccacggcgtgacgggcgagcgcgatccgtcgtcgatcggctttgccgcggtgcgcggcggcgacatcgtcggcgatcacaccgtgctgttcgccgggatcggcgagcgcatcgagatcacgcacaagtcgtcgagccgcgtgtcgtacgcgcagggcgcgttgcgtgcggtccgcttcctgtcggcgcgcggcgccggcttgttcgacatgcaggacgtgctcggcctgcgc

SEQ ID NO: 11464 - DNA, 627 bp, Burkholderia cepacia
ttgctggagcgcgggccggccgcgctgaccgacgacgagctgatcgcgctgctgctcggcaccggcaagcccggtcacgacgtcttcgtcaccgcccgcgcactggtcgagcagttcggcacgttgcgcgggctgctcgaagcgagcgccgacgatttcgaggcgtaccccggcatcggccccgcacgctccgcgcggctcgtcgcggtcaccgagatcgcgcggcgcatgctggtggagaaagcggaagaacggatgccgatcgactcgcccggcgcggtcgaggattgcttgcgactgaagatcggcacgcgccagtacgaagtgttcatcgcggtctatctggatgcgcgcaaccgtctgatcgacatggaggaaatcgcgcgcggctcgctcacccgcatggccgtctatccgcgcgagatcgtgcgccgcgcgatgaagcacaacgccgcggcgctgatcgtcgcgcacaatcatccgtcgggcgcggtacagccgagcgcggaagaccgccgcctgacccgcgtgctgaaagacgcgctcgagctcgtcgacgtgcggctgctcgatcacgtcgtcgtcggggtcagcgatactttctcgttcgcgcgggccggttggctg

SEQ ID NO: 11465 - DNA, 906 bp, Burkholderia cepacia
atgcgcatcgtcctcatcaccggcatctccggctcaggcaagtccgtcgcgctgaacgcgctcgaagacgcaggctattactgcgtcgacaacctgccgccgcacgtgctccccgaactcgcccgctaccttgcccaggacggccagcgccggcttgcggtcgcgatcgacgcgcgctcgagcgcgtcgctcgacgagatgcccggcctgatccgcgagctgtcccgcgaacacgacgtgcgcgtgctgttcctcaacgcgagcacccaggcgctgatccagcgcttctccgaaacgcgccgccgccatccgctgtccggctcgctgtcgcacgatgcggatgtcggcctgctgtcgtcgctcgaggaagcgatcgagcgcgagcgcgaactcgtcgcgccgctcgccgaattcggccaccagatcgataccagcacgctgcgcgcgaacgcgctgcgcacctgggtcaagcgcttcatcgagcagaagaacaacgatctgatggtgatgttcgaatcgttcggcttcaagcgcggcgtgccgctcgacgccgacctgatgttcgacgtgcgcgcgctgccgaatccgtactacgaccaccagttgcgcccgctcaccgggctcgaccagccggtcatcgcctttctcgacgcactgccgatcgtccatcagatgatcgacgacatccatgcgttcctgatgaaatggctgccgcacttccgcgatgacaaccgcagctacctgaccgtcgccatcggctgcacgggcggccagcatcgctcggtgttcatcgcggaaacgctcgccgcgcgcctggcgcgcgaggcgaacgtgatcgtgcggcatcgtgacgcgccagtggatgtcgacgcgtcgtcgcggctcgtctccgaggtcgaccgaccc

SEQ ID NO: 11466 - DNA, 273 bp, Burkholderia cepacia
atgccccgcccgactggtaagaaattcgacaagcgtcgtcagcaacaaaacccgctcttcaagcgcaagaagttctgccgtttcacggctgcaggcgtcgagcagatcgactacaaggacacggaaacgctgaaggacttcatcggcgaaaacggcaagatcacgccggctcgtctgacgggtacgaaggcgcactatcagcgtcagctggatacggccatcaagcgtgcgcgtttcctcgcgctgctgccgtacaccgatcagcacaaggcg

SEQ ID NO: 11467 - DNA, 792 bp, Burkholderia cepacia
atgcgctcaaccgtccgtccgcttcgccgcaccctgcttcgcctgctgccgatcgccacgcttgccgccgggttcgcgttcagcgcgcccgcttccgccgccgacgaactggtcgtgtcagccgccgccagcctgacgaacgcattcaaggccgtcggcgacgcgtacgagaagcagcatccggacaccaaggtgctgttcaacttcggcgcatcggacgtgctgatgcagcagatcgccaagggcgcgccggccgacgtgttcgcgtcggccgaccagaaggcgatggatcgcgcggtgaacgaaaaggtgatcgtgcccggcacgcgccgcgatttcgcggcgaactcgctggtgctgatcgtgccggcggacagccacgcggccgcgccgacgtcgctgaacgacctgaccgcgcccggcgtgaaacgcatcgcgtacggcgacccggcctcggtgccggtcggccgctacaccgagggcgcgctgcgcgcggccggcgtgtgggatgcggtcagcgcgaagggcgtgctggccgccaacgtgcgccagagcctcgactacgtcgcccgcggcgaggtcgacgcgggcttcgtgttcggcaccgacgccgcgatcatgccgggccgcgtgaaggtcgcgctgacggtgccgacccggacggccatcacctacccgatcgccgtggtcaaggacagccgccacgccgcgcaggcgcagtcgttcatcgatttcgtcgcgtcgtcccagggccaggccgtgctgtcgacgttcggcttcaagcccgccaag

SEQ ID NO: 11468 - DNA, 2052 bp, Burkholderia cepacia
atgtcaacgacactcaatgaaaacctgctgctggcgattccgctcgctccgctggccggctcgctgattgcggggctgttcgggaacgcagtcgggcgcaagggcgcacaccggatcacgatcctcggcgtattgatcgcgttcctcctgtcggcgaaagtcttcttcgacgtgatgggcggtgcgagcttcaacgcgaccgtctacgaatggatgaacgtcggctcgctgaagctcgaagtcggcttcctcgtcgattcgctgaccgcgatgatgatggtcgtcgtgaccttcgtctcgctgatggtgcacgtgtacacgatcggctacatggcggaagaggacggctaccagcgcttcttctcgtacatctcgctgttcacgttctcgatgctgatgctcgtgatgagcaacaacttcctgcagctgttcttcggctgggaagcagtgggtctggtgtcgtacctgctgatcggcttctacttcacgcgtgagagcgcgatctacgcgaacatgaaggcgttcctcgtgaaccgcgtgggcgacttcggcttcctgctcggcatcggcctgctgctcgcgttcgccggctcgatgaactacggcgaagtgttcgcgaagcgcgcggaactcgcgagcctgcacttcccgggcaccgactggggcctgctgaccgttgcctgtatctgcctgttcatcggcgcgatgggcaagtcggcgcagttcccgctgcacgtgtggctgccggactcgatggaaggcccgaccccgatctcggcgctgattcacgcggcgacgatggtcacggccggcatcttcatggtgtcgcgcatgtcgccgctgttcgagctgtcggataccgcgctgtccttcatcacggtgatcggcgcgatcacggcgctcttcatgggcttcctcggcatcgtccagaacgacatcaagcgcgtggtcgcgtactcgacgctgtcgcagctcggctacatgaccgtcgcgctcggcgtgtccgcttacccggtcgccgtgttccacctgatgacgcacgcgttcttcaaggcgctgctgttcctcggcgccggctcggtgatcatgggcatgcaccacgaccaggacatgcgcaacatgggcggcctgcgcaagtacatgccgatcacgtggatcacgtcgctcgtcggctcgctcgcgctgatcggtacgccgttcttctcgggcttctactcgaaggactcgatcatcgacgcggtgaagctgtcgcacctgccgggttcgggcttcgcgtacttcgcggtcgtcgcgagcgtgttcgtcacggcgctgtactcgttccgcatgtacttcctggtgttccacggcgaagagcgcttccgccagccgaagcatccggaatcgccgatgggcatggcggccgcgcacggccacgacgatcacggccatggccacggtcatgacgaccacgcgcacgagccgcacgagaccccgtgggtcgtgtgggtgccgctggtcctgctggcgatcccgtcggtgatcatcggcgcgatcgcgatcagcccgatgctgttcggcgatttcttccagcacggcgtcgcattcgacaaggtgatcttcatcggcgaaaaccatccggcgctggccgagatggccgaagagttccacggctgggtcggcatgggcctgcactcggtgtcgggcctgccggtgtggctggcgctcgccggtgtcgtcgtcgcgtggttcctgtacctgaagcgtccggagctgccggcgtcgatccgccgcgcgttcggcccgatctacacgctgctggacaacaagtactacatggacaagatcaacgaagtggtgttcgcccgcggttcggtggcgatcggccgcggcctgtggaaggagggcgacgtcgtcgtgatcgacggcctcgtcaacggcagcgcccggttcatcggctggttcgccggcgtgatccgcttcctccaatccggttacatctatcactacgcgttcgccatgatcatcggcatgctggggctcctgaccctgtttgtaacgctcggcggcaaa

SEQ ID NO: 11469 - DNA, 1704 bp, Burkholderia cepacia
gtggctcatcgtcgcgaggaacgcggatttcgcgtcgttcgcggcatcggcggcgcgcgccgcttcgtcgagctggcgctcgatgttcttctgcgacgtgatgtcggagaagttgcacagcacgacgtccgtgtcgcgaaagcgcgtgcgcacgagattgacgagcaggtcgacggtttcgccgccggcggtgggcagcgtcacgtgcagatcgggctgccacgcggcggcggcgggcgagcggtcgaagtgttcgagcagcctagccggcaacgaaggttcacccgcacggcgcgcatcgtagtcgcgcatcgtgtcgttctgcagcagcaccgcgccgtcggcgagcgacagcagagcgatgccggacggcgcggcttcgacgatcgtccggttcaggttctcgctgtcgatcacgcggcgcgtgcgcgcgtcgtcgggtttcagcacgcggcggtcgaagcgcaccagcagccaccacacgagcgcgatcaccgcgagcatgatcgcgacgtaccagcccgcgcgcaggccgatcgtcgcgagcagcgagcgcagcgtgaacgtctgcacgagggtccagtcggtttcgggaatcggctggctcagcgaaaacagcccgtcgccgaacgccgtgcgcgggccgccgcggcgcgcggcctctcgcgtacgcgcatcgaggcgttcgatcgcggcgcgcgtggcgtcgtcgtcgtccgcgctgcccgcgcgcaacaacgtgcggccgtgggcatcgacgatgatcgccgcgtcggtcgtgtcgcccgcggacaaacgcgtgcgcagcacgtcgaccggcagcgtcgacaggaacaccgcgcgcggcgattgcgcgtcgtacacggcgccggcgatccggaacacgtcgcgccgctgcacgggatcgtagacgggcggatgccattcgtattgcccgggcgacggcgtgccgacgccggcggcgaccttggcgacgagcgtggccgcatcggtggcgggcgacgcggtgagcggatcgggcggcaccggttcgggaatcacgaccgcgaagctgcggtcggggcgatacgcgtagccggcgatcgcgcggtcggcgtcgtgcttcgcgacgtacgcgccgacgcgatagctcatgtcgctcgccatcgcgagatcgtgcgcgtagctgtcggccgggtgcgcgggcgacaggtcggccagcacgagtgtcggcgggaaagtcgggctgccctggatgatcaatcggccgcggccggccgcgagggcggccacgcgggcgggatcgatcgcgcgcgaattccacacggcctcgtcgtgcgtgacgagcgtgtccatgcccgtcgtgcgcatcttgaattcgatctggacgaggaactggcggaccgcgaaggtcgtatagcgcgcctggatcgcttcgcgcgccatcgtatacagcatcagcccgctcgcgagcaggatcgagacggtcacggccgcgccgccggcatagagcagcgcgcgttggcggcggccgacgcgggtgggcgcggcaggcgcgtgcgcggcggcggagcgggcgggatcgggtgcggcgcggtggtccatcgagagcggggcggtcggccagggtgcccccatgataatgcagtccgatcagcgcgcaatggggcctgtcagggttgcggggggcggggccgccgcgtcgaccgggcgacgcacgcgcga

SEQ ID NO: 11470 - DNA, 1194 bp, Burkholderia cepacia
atgggcgggggcttgacaggtatgtttcaatggatggttgtgcgccccggctcgcagcgcgagggcgcgacgcacatcctggttttgaccccgattcacgaaccacaggcgaccgacatggccactcccgtcaccatccttaccggcttcctcggcagcggcaagacgacgctgctcaagcgcatcctgaacgaacagcacggcatgaagatcgccgtgatcgagaacgagttcggcgaagagaacatcgacaacgaaatcctcgtgcaggattcgaacgagcagatcatccagatgagcaacggctgcatctgctgcacgatccgcggcgacctcgcccgcgcgctcggcgatctggccgcgaagaagcgcgaaggcaagctcgacttcgaccgcatcgtgatcgagacgaccggcctcgcgaacccgggccccgtcgcacaaacgttcttcatcgacagcgaaatcgccgacgatttcctgctcgacgcggtcatcacgctggtcgacgcgaagcacgcgaacgcgcagctcgacgaacacgaagtggtgcagcgccaggtcggtttcgccgaccgcctgttcatcacgaagtcggacctcgtcgacgaccagaccgtcgcgggcctcaagcaccgcctgatgcacatgaacccgaaggccgcgatcaaggtcgtgaatttcggcgaagcggacatcaaggaaatcttcgacctgcgcggcttcaacctgaacgcgaagctcgagatcgatcccgatttcctcgccgaggacgatcacgcgcaccaccaccacgatcacgaccatgatcacgatcacgcgaattgcgaccacgatcacggccaatgcgcgcacgatcacgaccacggccaccacaaccatcaccacgcgcaccacgacgacaagatcaagtcgttcgtgtaccgcaacgaccgcccgttcgatccgaacaagctggaagacttcctcggcggcatcctgcagatctacggcgagcgcatgctgcgctacaagggcgtgctgtacatgaagggcgtcgaccgcaaggtcgtgttccagggcgtgcaccagatgatgggcagcgacctcgcggcgaagtggctgccggtcgagaagaaaaccaacaagatggtgttcatcggcgtcgacctgccgcaggacctgatcaccgacggcctcgacgcctgcctcgcc

SEQ ID NO: 11471 - DNA, 1806 bp, Burkholderia cepacia
gtgtgccgcggctttacttgtacagaggaggtgcgcgtgtccttcacgctgcatggcattcccgtctcacgaggtatcgcgatcgggcgagcgtatctgatcgcgccggcggcgctcgacgtcgcccattacctgatcgaggccaaccagatcgacgccgaagtggagcgattccgcacggcgctcgacgtcgtgcgtcgcgagctcgaagcgctgcgcgccgacctgaccgacgacaccccgagcgaagtcggcgcattcatcgacgtccacacgatgatcctgagcgacgagatgctcgtgcaggaaaccatcgacctgatccgcacgcgccgctacaacgtcgaatgggcgctgaccgagcaactcgaactgctgacgcgccatttcgacgacatcgaggacgagtacctgcgcgagcgcaaggccgacatcgagcaagtggtcgagcgtgtgctgaaggcgctcgccggtgcgccgtccgcgtcgcaggcgctcgacggcgcggccaggaacggcacgaacgacatgatcgtcgtcgcgcacgacatcgcgccggccgacatgatgcagttcaagacgcagtcgttccaggcgttcgtcaccgatctcggcgggcgcacgtcgcacacggcgatcgtcgcgcgcagtctcggcattccggccgcggtcggcgtgcagcacgcgagctcgctgatccgccaggacgacctgatcatcgtcgacggcgaccagggcatcgtgatcgtcgatccggcgccgatcgtcctcgaggaatattcgtaccgccagtccgagaagctgctggagcaacgcaagctgcagcgcctgaagttctcgccgacgcaaacgttgtgcggcacgaagatcgagctgtacgcgaacatcgagctgcccgacgacgcgaaggcggccgtcgaggccggcgcggtcggcgtcggcctgttccgctccgagttcctgttcatgcatcagaaggagatgccggaagaggaggagcagttcgccgcgtacaagcgggccgtcgagtggatgaagggcatgccggtgacgatccgcacgatcgacgtcggcgccgataaaccgctcgaggcgctcgacgaaggctacgaaacggcgccgaacccggcgctcgggctgcgcgcgatccgctggagcctgtccgagccgcagatgttcctcacgcagttgcgtgcgatcctgcgcgcgtccgcgttcggccaggtgaagatcctgatcccgatgctcgcgcatgcgcaggagatcgaccagacgctcgacctgatccgcgaggcgaagcgccagcttgacgacgcggggctcgcatacgatccgaacgtgcgcctcggcgcgatgatcgagatcccggccgcggcgatcgcgctgccgctgttcctgaagcgcttcgacttcctgtcgatcggcacgaacgacctgattcagtacacgctcgcgatcgatcgcgcggacaacgcggtcgcgcacttgtacgacccgctgcatccggccgtgctgcatctgatcgcgtacacgctgcgcgaagcgaagcgcgcgggcgtgtcggtgtcggtgtgcggggagatggcgggcgacccggcgctcacgcgcctgttgctcgggatggggctcaccgagttctcgatgcacccgagccagttgctcgtcgtgaagcaggagatcctgcgcgcgcacctgaaggcgctcgaaaagccgacggccgacgtgctggccgcgttcgagccggaggaagtgcaggcggcgctgcagcggctgtcggtcgccgagccgcgggcggacgcggccgcg

SEQ ID NO: 11472 - DNA, 750 bp, Burkholderia cepacia
atgtcccacgtcgtccggcgccggcccgatgcccggctgatcctgttgctcggcgcgctcgcggcctgcgggccgatcgccaccgacatgtacctgccgagcctgccgtcgatcgccgacagcttctccgtgagccccggcgccgcgcagcgcacgctgaccagcttcatggcgggcttctcgatcggcatgctgctgtacggcccgctgtccgacacgtggggccgccgtcccgtgctgctcggcgggatcgcgctgttcacgctcgcgagcatcggctgcttcgtgtcgggttcgatcgacatgctgatcgtcgtgcgctttctgcaggcgctcggcgccggtgccgcgtcggtgctcgcgcgggcgatcgcgcgtgacgcgcacgagccgagcgacgcggcgaaggtgttgtcgatggtcgcgatcgtcaccgcggtcgggccgctgctcgcgccgctgatcggcggccagatcctgcacttcttcggctgcgcggcctgcttcggttgccgtccctgtctccctccatcttccgcgttcccccttgtttccgccgatcccccgcttctttctcccagccccgtttccccctcgttctcgctcttcccccgctccgtcgccgctgctcccgcccccgtacggccgttcccgcgtgggtctcccggttgtcccgccgctccggctgcgcctttctcttctccgcggttgtgctccggcgcggttggtgcccgacatttcaaaactaaa

SEQ ID NO: 11473 - DNA, 1218 bp, Burkholderia cepacia
atggaaacctatgacatcgccgtgatcggcgcgggtgccgccggcatgatgagcgccgcggtcgccgggcagctcggccgccgcgtggtgctgctcgatcacgcgccgcggcttgccgagaaaatccgcatctcgggcggcggccgctgcaatttcacgaacctgtacgccgggcccgacaactacctgtcgtcgaatccgcatttcgcacgctcggcgctcgcgcgctatacgccgcgcgacttcctcgggctgctcaagcgccatcacgtgacctggcacgaaaagcacaagggtcagcttttttgcgaccacggcagcgacgcgatcatcgacgtgctgaagcacgagtgcgacgcgggcggcatcgcgtggcgccggcccgtcgtcgtcgacgcggtgcgccatgcgccatccgacggcttcacgctcgacacgcagcaggcggggccgatcggtgcgcgcgcgctgatcgtcgcgaccggcggcctgtcgatcccgaagatcggcgcgaccgacttcggctaccggctcgcgaagcagttcggccacaaacttgtcgatacgcggccggcgctcgtgccgctgacgttcgcgccgcaggactgggcgccgttcgcgccgctgtccggcgtatcgctcgaagtgcgcgtttcgaccggcgacaagaagcgcggcggcgaattcgtcgaggacctgctgctgacccatcgcgggctgtccgggccgggcatcctgcagatctcgagctattggcagcccggcgatccgattcgcgtcgacctgctgccgcagcgcgatacggtggctgacctgctcgacgcgaaacgcacgtcgaagcgtcagatcggttcgctgctcgccgactgggtgccgtcgcgcctcgcgcatgcgtggctcgacacgcatcgcgtcgcggccgacgcgcgactcgcggacctgccggacaagacgctgcgccagatcggcgacgcgctgtccggctggacgctgacgccgaatggcaccgaaggctacaagaaggccgaagtgacgaagggcggggtcgatacgcgcgagttgtcgtcggcgacgatgatgagcgcgcgcgtgccggggctgttcttcgtcggcgaggcggtggacgtgacgggctggctcggcggctacaacttccagtgggcatgggcgtccggcacggcggccgggcaggccgcggccgagtacgcgcgcggcgcc

SEQ ID NO: 11474 - DNA, 1173 bp, Burkholderia cepacia
atgcaagctttcagcggatcgtctctggccgcgccacccgtcgccgaccacaaggaacacgtgatcgacgcgatgcgcggcttcgcggcgctgctcgtcgcctatttccactgccgccaggtcgtctgggtcggcatgcagagcttccatcatgcttacggtcatgcactgagcccgggcgtgatcgccggctacctgaccttcccgttcgcgtggggctccgccggcgtgccgatcttcttcgtgatcagcggctactgcatccaccgcaacgcggcgctcaagctcgcggccaaccccgcataccggctcgacgcgccgaatttctgggtgcgccgcttcgcgcgcatctacccggtgctgctcgccgcgctgctgttcacgctcgcgctcgacgcggtcagcctgcagatcgagcccgtcagccacaagatccgcgacgtcggcctcgtcgcgttcctcgtgaacctgttctcgctgcagggcgtcgccggctacacgtacgggtcgaacggcgcgctgtggacgctgtcgctcgaagtgcagttctacgcggtctacccgctgctgttcgcgctgcgccggcgcatcgggatgccggccgtcgtggccgcggtcgcgctcgtcaacgtcgcgtcggcgtggctgctcgaacggcacgacctgcagttcttcacgtcgtactggctgtcctggacgatcggcgcatggatcgccgacgtgcgcgcgcagcaatcgcgcggcatggccgtcgtgccgtcgcgcgcgtggtacgtcgcggccgccgtgctgctggccgccggctgcggcgcgttccatgtcggccagtacggtgcgttccagctgtggtcggccggcttcgcgtgcttcctgtaccgcgcgcttgcccgcccgccgcgcccgacgccgccgctgcgcgtgctgagctggttcggcgacttcagctactcgctgtacctggtccacctgccgctgttcgtctgcctcggctcggtgctgttccattccgaactgcaactgtcgatctggccgtcgttcgcgttcatggccgtcgcgatcccggtggcgtacctgttctaccggatgttcgaacggccggcgatgacgtggtcggccagcttcaagccgacccgcgccgcccgcgtcgtcgcgtcgacgcccgaacaggccgtc

SEQ ID NO: 11475 - DNA, 763 bp, Burkholderia cepacia
aatccggtcgatctgtacccgaagccgccgttcccgcatcaggtccaggcgccgccgggactcgcgagccggatgcagccgcgccccgaccacggcgagcaaagctatcgcggccgtggccggctcgtcggccgcaagacgctcgtcaccggcggcgactccggcatcggccgggcagcggccatcgcgttcgcacgcgaaggggcggatgtcgcgatcggctacctgcctgtggaggaatccgacgcgcgggaagtcgttgcgctgatccgggcagcgggacgccaagccgtcgcgctgccgggcgacatccgcgacgaaacgttctgccagcgactggtcgcacgcgcggcggaagcactcggcggcctcgacattctcgtcaacaacgccgcccgacaacaggcgctcgattcgatcggcgagatgacgaccgagcacttcgatgcgacggtcaagaccaatctttacgggatgttctggatcacgaaggcggcgatcccgcatcttccgcccggcgcgtcgatcatcaacaccacgtcggtccaggcggtcagggcgagcgccaacctgctcgactatgcgacgacgaaagccggcatcatcgcgttcacgcgatcgctcgcgaaacagctcgggccgcgcggcattcgcgtcaatgcggtcgcgcccggtccttactggacgccgctgcaatcgagcggcggtgagggcaccagagacggacgacaaatatggggcggggtcgccgtacggcaagatc

SEQ ID NO: 11476 - DNA, 885 bp, Burkholderia cepacia
atgttgaaagtcaccaaggccgtgttccccgttgccggtctcggcacgcggttcctcccggcaacgaaggcgagcccgaaggaaatgctgcccgtcgtcgacaagccgctgattcagtacgcggtcgaggaagcgatcaacgccggtatcaccgagatgatcttcgtcaccgggcgcagcaagcgcgcgatcgaggatcatttcgacaagtcgtacgagatcgaggccgagctcgaggcgcgcggcaaggaaaagctgctcgaactcgtgcgcggcatcaagccgagccacgtcaactgcttctacgtgcgccagccggaagcgctcggcctcggccacgcggtgctgtgcgcggagaagctggtgcacggcgagccgttcgcggtgatcctcgccgacgacctgctgcacggcgaacagccggtgctcaagcagctcgtcgacgtgttcgaccactatcacagctcggtgatcggggtcgagacgatcccgcgcgaggacagccgctcgtacggcgtcgtcgaaggccgggagtgggaagaggacatcatcaagctgtcgggcatcatcgagaagccggcgccggaggatgcgccgtcgaacctcggcgtggtcggccgctacgtgttcatgccgacgatcttcgatcatctgcgcaagctcaagccgggcgcgggcggcgaattgcagctcaccgacgccgtccagtcgctgctcgcgaacgagcaggtgctcgcgtatcgctactacggcacgcgcttcgactgcggcagcaagctcggctatctcaaggccaccgtcgagctcgcgctccagcatccggaagtgagccgcgaattcgaggcgtacctgcgtacctgcttgcccgcgctggctgccgtcgct

SEQ ID NO: 11477 - DNA, 1395 bp, Burkholderia cepacia
atgtcctatacggagacgatcggtccgcgcacgtaccgcttcgcggacctgaagacgctgctcgcgaaggcgagcccgctgcgttccggcgaccagctcgccggcgtcgcggcggcgagcgaggaggagcgcgtcgccgcgaagatcgcgctcgcgggcgtgccgctgaaggcgttcctgaacgaagcggtgatcccgtatgaagacgacgaggtcacgcgcctcatcatcgacgatcacgacgcgcaggcgttcgccgacatctcgcacctcaccgtcggcgatttccgcaactggttgctgtcgcccgcggccgacggcgcggcgctcgagcgaatcgcgcccggcctcacgcccgagatggtcgcggccgtgtcgaagctgatgcgcaaccaggacctgatcgcggccgcgaggaagcgccgcgtcgtcacgcgctttcgcaacacggtcgggctggccggccggatgtcggtgcggctgcagccgaatcacccgaccgatgacgtgaagggcatcgccgcatcgatgctcgacgggctgatgtacggctgcggcgacgcgatgatcggcatcaacccggccaccgacagcctcgcggcgatcgtgaaattgctcgcgatgatcgacggctttcgcgaacgctacggcgtgccgacccagtcgtgcgtgctcacgcacgtgaccaacacgatcgcggcgatcgagaagggcgcgccggtcgatctcgtgttccagtcgatcgcgggcaccgagaaggccaatgccagcttcgggatctcgctcgcgctgctcggcgaggcgcgcgaggccgcactggcgctgaagcgcggcacggtcggcaacaacctgatgtacttcgagacgggccagggcagcgcgctgtcggcgaacgcgcatttcggcgtcgaccagcagacctgcgaagtgcgcgcgtatgcggtcgcgcgcaagttcgagccgttcctcgtgaacaccgtggtcggcttcatcgggcccgaatacctgtacgacggcaagcagatcatccgcgcgggcctcgaggatcacttctgcggcaagctgctcggcgtgccgatgggctgcgacatctgctacacgaaccatgcggaagccgaccaggacgacatggacacgctgctgacgctgctgggggcggccggcatcaacttcatcatgggaattccgggcgccgacgacgtgatgctgaactaccagagcacgtcgttccatgaccagctctacgtgcgcgaggtgctcgggctgcgccgcgcgcccgagttcgaggaatggctggagacgatggagatcgccgacgcgcacggcgcgctgcgcgccgcgacggcgcgcgtgccgctgctcgcgggggcgaacgactggatgggggtgtccgca

SEQ ID NO: 11478 - DNA, 1305 bp, Burkholderia cepacia
atgtccgattcctatttcccgcgctggcgggtccagccgaccggcgcgagctcgcgcgtggtcggtcccgacgagcgcctcgcgtggccgcagatggtcgcgatgggcgtgcagcacgtcgtcgcgatgttcggctcgaccgtgctcgcgccgctgctgatgggcttcgacccgaacctgtgcatcttcatgtcgggcatcggcacgctgctgttcttcgtgctggtcggcggccgcgtgccgagctatctcggctcgagcttcgcgttcatcggcctcgtgatcgcggtgacgggctacggcggcagcggcccgaacccgaacattccggtcgcgctcggcgggatcgtcgcgtgcggcgtcgtgtacgtcgcgctcggcgcgctggtgcaggcgatcggcacgcgctggatcgagacgctgatgccgcccgtcgtgaccggcgcggtggtcgcggtgatcgggctgaacctcgcgccgatcgcggtcaagggcgtgtcgggctccaccttcgaatcggtgatggcgctcgtcacggtgctgtgcgtcggcggcgtcgcggtgttcgcgcgcggaatgatgcagcgcctgctgatcctggtcgggctcgtgatcgcgtacgtgatctacgcgatcgcgaccaacgggatgggcctcggcaagccgatcgatttcgcgatcgtcgcgcatgcggcgtggttcggcgtgccgagcttccgcgcgccggtgttcgatccgcacgcgatgctgatgctcgcgccgatcgcggtgatcctggtcgcggagaacctcggccacatcaaggccgtcagcgcgatgacgggcaccaacctcgaccgctacgtcggccgggcgttcatcggcgacgggctcgcgacgatcgtgtcgggcagcgtcggcggcacgggcgtcaccacctacgcggagaacatcggcgtgatggccgtcacgcggatctattcgacgctggtgttcgcgctcgccgcgctgatcgcgatcggcctcggcttctcgccgaagttcggcgcggtgatccagacgatcccgggccccgtgctcggcggcgtgtcgatcgtggtgttcgggctgatcgcggtgacgggtgcgcgaatctgggtcgtcaacaaggtcgacttctctgacaaccgcaacctgatcgtctcggccgtcacgctcgtgctcggcgccggcgacttctcgctgaagatcggcggcttcgggctcggcgggatcggcaccgcgacgttcggcgcgatcatcctgtacgcgatcctgcgcaaggaaaaggaaccgggcccggtggtc

SEQ ID NO: 11479 - DNA, 420 bp, Burkholderia cepacia
gtgacgttctttaccaattacacgaacctggcccttatcgcgatcctgctggtttctggcggcctgctcgcatggccggccctgcgccgcggccgcggcggcctgtcggccgccgaggcgacgcagctcatcaatcgccgcaacgcggtcgtgatcgacctgcgcgccgcgtccgacttcgccgccggccacctgccgtcggcgcgtcaggtcgcggcgggcgagatcggcgcgaaaattgcgcaggtcgcgaagaacaagagcaccccggtgctgctcgtctgccagaacggccagcagtcgcagaaggcggcgcgcgaggtcgaggcggcggggtacgccgaggtgcacgtgctcgaaggcggcgtggccgcctggcagcaggccgggatgccggtcgtcaaacaaggagtggcgaag

SEQ ID NO: 11480 - DNA, 1362 bp, Burkholderia cepacia
gtgatcgaagaagccgatgcgcaatcgcgagaaatcgtcaagtcgcgtgccctgatcacggtttgcattggcttctttatggtcagcttggacgccactgtcgtcaatgttgcattgaacagcctgcgcctcagcctgcacgttggtttgagcggattgcagtggacggtggactcttacacgctggcgtttgcagctctgttgctaagcgctggagcgcttggcgatatcttcgggccgaagaaggtattcaatgtcggtctgattgttttctcgttggcatctgccttgtgcgggctgtcgacaagtctgggtgcactgcttgcgtcacgcgttctccaaggcgttggggccgcgctgcttgtcgcgacgtcgctgtcgcttcttcagaaaatatttgttgaaccggctgaccgcgcgcgtgcgttcggagtttggggtggggtcggtggcgtggcagtggccgccggtccggtgctcggtggtttcctcatctcgatgttcggatggccctccgtatttctggtcaacgtgcctttcggcatcctgggcgtaatcctctcggcgcgctatttgccgaagatgccgggggaggctcgccggatcaactttggggcacaggtgctttccgccgtcgcactgggtgcactcgcgtttctgttcatttccgccggcgcacacggatggtcgagccgcgatgtgcagatcgcggcagccgcgttcgcaatcgcgacatgcctgttccttgggattgagcgattctctgccaatccgatgttgccgcgcgggattttccggtcgcgaatcttttcggcggcgacgactgtggggatgatcatcaatttcgggttctacggacagctgtttgtactgagcctgtattttcaacagatctgcaaatattcgacgatggaaacaggcttggcccttctgcctcaggcgattgtttgctcacttaccgccttttattgcggacgagtcacggctcgaaccgggccaggtttcccgatgaaagtcggcctgcttgccggtgcgctcggcctcttcggattgaccttcgcaaacggaaatagctcatacgtttccgttctgataccgatgctcgcggttggtttcggcatgtcgtttactgcgccggcgactgttgctgcgggcatgtcggcggctccggccggacaggccggtatcgtatctggcgtgatcaacgcagcccgtcagagcggtagtgtgatgggaatcgctgtccttggtggcctgattggattgagctcgaatttcgaatatggcatgcatctggcgttctgggttgcatctgttctgtttgctggcgcattgttggttaccgctttgagaattcgtaag

SEQ ID NO: 11481 - DNA, 882 bp, Burkholderia cepacia
atgacattcgaacaatggatgcggtccgtgcttgaccgtgtcgaggacgcactcggccactatctgccggctgaaaccgcgatgcccgcgaaacttcacgaggcgatgcgctacgcggtcctcggtggcggcaaacgcgttcgcccgctgctgtgccatgcagcaggcgagctgaccggtgcgacggaggcggcacgcaacgcggcggcggcggcgctggagatgatccacgtctactcgctcgtgcacgacgacatgccgtgcatggacgacgacgcgctgcgtcgcggcaagccgaccgtgcacgtgcagtacgacgagccgacggcgctgctggtcggcgatgcgctgcaatcgcaggcgttcgtcgcgctgaccgacgccgacgcgctgtcgccggtgcagcaggcggcgctcgtgcgcgagctggcgctcgcgagcggctcgatcggcatggccggcgggcaggcgatcgacctggcgagcgtcggcctgaagctgacgcgcgaacagctcgagacgatgcaccggatgaagacgggcgccttgctgcgcgcggccgtgcggatgggtgcgctggccggcgagacgccttcgacggaaacgatggctgcgctggacgtgtacgcgggggccgtgggtctggccttccaggtcgtcgacgacattctcgacgtcacgaccgattcggcgacgcttggcaagacggccggcaaggacgcggcgaacgacaagccgacctatgtatcgatcctcggtctcgaggcgtcgcgcgagctggcagcgcagctgcgcgccgaagcgcacgacgcgctgaaaccgttcggcgcacgcgcacagcgtctggccgaacttgccgacctggtagtgaaccgggtcagc

SEQ ID NO: 11482 - DNA, 1209 bp, Burkholderia cepacia
atgctcaactgggatgacgagaagactgccgtaacccccgcgagcggagcgcagcaaaacgcgatgcgcacctccgccgggatggctgtcggaatgcaggctgcaacgcctgccgcccatcaggtccgtgacattttcgaaggcgatcttgcggtgccgccgcaagcatcggctgttcccgccggcggtacggaagcgcgggtcaatgtcgccgacaagcgcatcatcaacggccagactgacgtcaatcagctggtgccgttcaagtacaagtgggcgtgggaaaagtatctggccggttgcgcgaaccactggatgccgcaggaaatcaacatgtcccgcgacatcgcactgtggaaggacccgaacggtctgaccgaggacgagcgccgcatcgtgaagcgcaacctcggcttcttcgtgacggccgactcgctcgccgcgaacaacatcgtgctcggcacgtaccgccacatcacggcgcccgagtgccggcagttcctgctgcgccaggcgttcgaggaagcgattcacacgcacgcgtaccaatacatcgtcgaatcgctcggcctcgacgaaggcgagatcttcaacgcgtatcacgaggtcacgtcgatccgcgcgaaggacgaattcctgatcccgttcattcatacgctgacggacccggccttcaagaccggcacgctcgaggcggatcagaagctgctgaagtcgctgatcgtgttcgcctgcatcatggaaggcctgttcttctatgtcgggtttacgcagattctcgcactcggccgccagaacaagatgacgggtgctgcagagcaatatcagtacatcctgcgcgacgagtcgatgcactgcaacttcggcatcgacctgatcaaccagatcaagctcgagaacccgcatctctggaccgcggaattccgcgccgagatccgcgagctgttcaagcaggctgtcgaactcgaataccgctacgccgaaaacacgatgccgcgcggcgtgctgggtttgaacgcgtcgatgttcaagagctatctgcgcttcatcagcaaccgccgttgccagcagatcggcctcgatccgctgttcccgaacgaggaaaacccgttcccgtggatgagcgagatgatcgacctgaagaaggaacgcaacttcttcgagacgcgtgtgatcgagtatcagacggggggcgcgctgtcctgggaa

SEQ ID NO: 11483 - DNA, 507 bp, Burkholderia cepacia
atgcggcgggatcggccgcaccagccggccgccaatgtcaaacggcgggcccatcgcgtgcctgcgcgccgccaattctccgtaataatcacgactcgccttttccgtcgtgccgcagcacactgcattgtgtcggcgcggcgttcccccggtggaacggtccccctcgcttccatcgcgtcgcgccggcctattcatcacgacaccacggaaaagaacatgcaacgctcgctgatcgccctcgcctttgccggcctcggcctttcgctgtccggcctcgctcacgccgtcaacgtcgacgtcaacatcggcacgcccgcgccggtcgtcgtcgcccccgcgcccgtcgtggtcgccccggcgccggcgatcatcgtcggctggcatggcgaccgctactgggacggccgccgctactgggagcgccgcgagtgggaggatcaccagcgctatcgcggtcgtggcggctatcactgcccgccgggacacgcgaaaaagggcgagtgc

SEQ ID NO: 11484 - DNA, 1452 bp, Burkholderia cepacia
atgacctatcaagttctcgcacgcaagtggcgtccgaaggatttcgcttcgctcgtcggccaggagcacgtcgtcagggcgctcacgcacgcgctcgacggcgggcgtctccatcacgcctatctgtttaccggaacccgcggtgtcggcaagacgacgctgtcgcggatcttcgcgaaggcgctcaactgtgaaaccggcgtcacgtcgcagccgtgcggcgtgtgtcgcgcgtgtcgcgagatcgacgagggtcgtttcgtcgattacgtcgagatggacgcggcgagcaaccgcggcgtcgacgaaatggccgcgctgctcgagcgcgcggtgtacgcgcccgtcgatgcgcgcttcaaggtctacatgatcgacgaagtgcacatgctgacgaatcacgcgttcaacgcgatgctgaagacgctggaagagccgccgccgcacgtcaagttcatcctcgcgacgaccgatccgcagaaaatccccgtcaccgtgctgtcgcgctgtctgcagttcaacctgaagcagatgccggccgggcacatcgtgtcgcatctcgagcggatcctcggcgaagaacggatcacgttcgagccgcaggcgctgcgcctgctcgcgcgggccgcgcagggcagcatgcgcgacgcgctgtcgctgaccgaccaggcgatcgcctattcggcgaacgaggtgaccgagtcggcggtgtcgggcatgctcggcgcgctcgaccagacctacatggtgcgcctgctcgacgcgctcgcggccggcaacggcccggaaatcctcgcgattgccgacgagatgtcgctgcgcagcctgtcgttctcgaccgcgctgcaggatctcgcgagcctgctgcaccggatcgcgtgggcgcagttcgcgccgggctcggtgctcgacgaatggccggaagcggccgacctgcgccggtttgctgagacgctgagccccgagcaggtgcagttgttctatcagatcgcgacggtcgggcgcgccgaactcggcctggcgccggacgaatacgccggtttcacgatgacgctgctgcggatgctcgcgttcgagccggccgtcggcgccggcagcgcaccgggcggtcagccgtccgtgccgccgcgtgcggtgccggccccgcgtgctacggcggcaccggccgctgccgcggcgaagccggtatcggccgcgccggcaagcgcagcgcgcccgccagccgcgacgccggctgcgccggtcgcccgttcggcgccggtgcaatcgagcgatgaaacagaacggccgaccgccaagccggctgccgttcagtcaccggcagaagcagcgccggaaccggtcgcggctgacgtgcaagctgtcgagcctcctcagccggaaacgaaggcagcgcccgccggcgacacgccgcctcccgcgcgcaaggaacctgagccgcccgccgttgcc

SEQ ID NO: 11485 - DNA, 628 bp, Burkholderia cepacia
atggcaaaagaaaagtttgagcggaccaagccgcacgtgaacgttggtacgattggtcacgttgaccacggcaagacgacgctgacggcagcgatcacgacggttctgacgaagaagttcggcggcgaagcgaaggcatacgaccagatcgacgcggcaccggaagaaaaggcgcgcggcatcacgatcaacacggcgcacgtcgagtacgaaacggctaaccgccactacgcacacgtcgactgcccgggccacgctgactatgtgaagaacatgatcacgggcgcggcgcagatggacggcgcgatcctggtttgctcggcagcagacggcccgatgccgcaaacgcgtgagcacatcctgctggcgcgtcaggttggcgttccgtacatcatcgtgttcctgaacaagtgcgacatggtggacgacgctgaactgctcgagctggtcgagatggaagttcgcgaactgctgtcgaagtacgacttcccgggcgacgacacgccgatcgtgaagggttcggcgaagctggcgctggaaggcgacacgggcgagctgggcgaagtggcgatcatgagcctggccgacgcgctggacacgtacatcccgacgccggagcgggcagttg

SEQ ID NO: 11486 - DNA, 330 bp, Burkholderia cepacia
agatgcgcagccaggctctttgtcacgcggcgcgtataccatgaactcacgcgcacgcccgggcagtttccggacatcgacgcgatcgccgagatcctgtgcatgacctcgcgcacgctgcgccgcaagctcgaagccgaaggcacgtcgtacagcgaactgctgacgatttttcgcaaggcgctcgcgatcttttacctcatcacgaccacgctcatcaccgaggacatcgcgctgacgctcggcttcagcgacgcggtgggatttcgccacgcgttcaagcgctggaccggcacgacgccgagcgacgtgcgacgcaagcgcggcggc

SEQ ID NO: 11487 - DNA, 885 bp, Burkholderia cepacia
atgactgccctcctcgaactcgcgcatacgcagcactacccggacgccacgctctacgtggtcgccacgccgatcggcaatacggccgacatcacgctgcgcgcgctgcacgtgctcggcctcgccgaccgcatcgcggccgaagacacccgcaacacgggccagctgctcgcccgctacgggatctcgaaaccgctcgtcgccgtgcacgagcacaacgaacgcgaagccgcgcagcgcgtgatcgagctgctgcgcggcggcgaacgcgtggcctacgtgtcggacgcgggcacgccgggcatctcggaccccggcgcgcggctcgtcgacgccgtgcgcgcggccggcttcgcggtggttccgctgcctggcgcgagcgcggccgtgaccgcgctcagcgtggccggcgactgggccggcgcgttcacgttcgcgggcttcctgccgccgaaggcgaaacagcgcgcgagcgcgctgcaggcgctggtgtcgcacccgtacgcgctggtgttctacgaagcgccgcaccggatcgccgaaaccgtcgccgcgctcgccgacgcattcggccccgcgcgccggctgctgatcgcgcgcgaactcaccaagctacacgagcagttgttccagggcaccctggccgaaggacagggctggctcgccggcgacgcgaaccggcagcgcggcgagttcgtgctggtcgtcgaaggtgcgccggcggcaagcggcgaagccgacgacgccgcgcacgacgcgctgctcaggctgctgctcgaagaggtgccggtgaaaagcgcggcaaagctcgcggccgcgctgacgggcgcatcgcgcaacgcgctgtatgcgcgtgcgctcgtgctgaaggaaggcacggaaggc

SEQ ID NO: 11488 - DNA, 420 bp, Burkholderia cepacia
atggtgcgacgttgggtggcgagctatcgcgagcatggtgaacaggggctgcgcaagaagcacagccactacgacgcgcgattcaagttgtcagtccttcagcggatgcggcgcgatgaactgtcgtatgcgcaggtggcagcgctgttcggcatccgcaatgaacgaagcatcccgatctgggagcgtctgtatcatgagggcggtatagatgcgttggcgcctcgtcgccgagggcgccctccgaaaatgaccacctcaccaccaccgaaatcccccgacgataccgtgcagaaagagccgagccgcgaggaactgctcaaggaaatcgtgtatttgcgcgcggaggtggcatacctaaaaaagctcgatgcgctgctgcaatccaagaagcaggcagcgcccaggaaaaagcgcaaa

SEQ ID NO: 11489 - DNA, 1062 bp, Burkholderia cepacia
gtgggcggtttcgctcgccaagaccgaatgacgttggaaatgatgggatctatggatctggaccagattgtcgccgacgcgcagcagtccttcgaacaggctgccgacatcaccacgctcgaaaacgagaaagcacgatttctcggcaaatcgggtgcgctgaccgagttgctgaagggcctcggcaagctcgatcccgaagcacgcaagaccgaaggcgcccgcatcaacgtcgcgaagcagcaggttgaagccgcgctcaccgcccgtcgccaggcgctggccgacgcgctgctgaatcagcgcctcactgccgaagcgatcgacgtgacgttgcccggccgcggcgccggcgccggcagcctgcaccccgtgatgcgcacgtgggagcgggtcgaacagattttcggctcgatcggtttcgacgtggccgacggccccgaaatcgagaccgactggtacaacttcacgtcgctgaacagcccggagaaccatccggcgcgttcgatgcaggacaccttctacgtcgaaggcaaggatgccgacggccgccagctgctgctgcgcacgcacacgagcccgatgcaggtgcgttatgcgcgcatgaaccgtccgccgatcaaggtgatcgcgccgggccgcacgtatcgcgtcgacagcgatgcgacccactcgccgatgttcaatcaggtcgaggggctgtggatcgacgaaaacatcagcttcgccgacctcaagggcgtctataccgacttcctgaaaaaattcttcgagcgcgacgacatcctcgtgcgcttccgtccgtcgtatttcccgttcacggaaccgtcggccgagatcgacatgatgttcgagcaaggcaagaacgccggcaagtggctcgaaatttccggctcggggcaggtgcatccgaccgtgatccgcaacatgggcctcgaccccgagcgctacatcggtttcgcgttcggcagcggcctcgagcgcctgacgatgctgcgctacggcgtccaggatctccggttgttcttcgagaacgacttgcgtttcctgcgccagttcgca

SEQ ID NO: 11490 - DNA, 1125 bp, Burkholderia cepacia
gtgcctgctgaaacgcgggccaacgaggcgcgtgtggctgcgacgccggaaaccgtgaagaaatacgcggcggccggccatcgcgtcagtatcgcgaaaggggccggcagcgcagccagctatcccgatgaagcctatgtggccgccggtgccgaattgaccgaccagtcggccgcttttgccgccgacctcgtgctgaaggtccaggcgcccaccgacgccgaactgccgttgctcaagcgcggcgccgtgctggtcggcatgctcgagccgttcaacggcgaacaggcggcgaaactcgccgcggccggcgtgaccggtttcgcgctcgaggccgcgccgcgcaccacgcgtgcgcagagtctcgacgtgctgtcgtcgcaggcgaacatcgccggctacaaggccgtgctggtggccgcatcgctgtatccgcgcttcatgccgatgctgatgacggccgcgggcaccgtgaaggcggcgcgcgtgctgattctcggcgcgggcgtcgcgggcctgcaggcgatcgcgaccgcgaagcggctgggcgcggtgatcgaggcgtccgacgtgcggccggccgtgaaggagcagatcgagtcgctcggcgcgaagttcctcgacgtcccgttcgaaaccgacgaagagcgcgaagccgcgcagggcgtcggcggctatgcgcgcccgatgccgccgtcgtggctcggccgccaggccgcgctcgtgcacgagcgcgcgaagcaggccgacatcgtgatcaccaccgcattgattcccggccgtccggcgccgacgctgatctcggtcgacaccgcgcagtcgatgaagcccggctcggtgctcgtcgatctcgcggccggccgcggcccggaaatcgacggccgcaagggcggcaactgcccgctgaccgtcgccgaccaggtgatcgtgcaccacggcgtgacgatcgccggctacacgaacctcgcatcgatggtcgcgtcggacgcgtcggcgctgtacgcgcgcaacctgctggacttcatgaagctgatcgtcacgaaggaaggcacgctgaacatcgacctgaccgacgacatcgtcgccgcgacgctgctgtgccgcgacggcgagctcgcgcgcaaa

SEQ ID NO: 11491 - DNA, 3003 bp, Burkholderia cepacia
atgcaaaccaccgacaacgcgacgtcccagtacgagagcgcctcgagccgtccgctcggcgggaccgaacagggcgcgaaggcgctcgcgccgcaggccacgttcgccgactacaaggtgatccgccgcaatggcagcgtggtgtcgttcgaaccctcgaagatcgcgatcgcggtgaccaaggctttcctggccgtcaatggcgggcagggcgcggcatcggcgcgcgtacgcgagcaggtcgaacaactgacgcacaatgtcgttcgcgcgctcgtgcgcagccgcccgaacggcggtacgttccatatcgaagacatccaggaccaggtcgaactcgcgctgatgcgcggcggcgagcacaacgtcgcgcgtgcgtacgtgctgtatcgcgagaagcgtcacctcgagcgccagcatgcgggcgaggaagcggcggccgcgggcggcgagtcgaccaccggcatcaacgtcgtcgacaacggcgtcacgcgcccgctcgacctgaacgcgctgcgcgcgctgatcgtgtcggcgtgcgacggcctcggcgctgcggttaaccctgacccgatcgtcgcggagacggtgaagaacctgtacgacggcgtgccgatgagccaggtctacgactcggcgatcctcgcggcgcgcacgatgatcgaaaaggatccggcatacagccaggtcacggcccgcatcctgctgcacacgatccgccgcgagatcctcggcgaggaagtcgtgcaggccgagatgtcgacccgctacgccgaatacttcccgcagttcctgaagcgcggcgtcgacgccggcctgctcgacgacaagctgctgcagttcgacctgaagcgcctcggcgaagccctcgacgcgaaccgcgacctgcagttcggctacctcggcctgcagacgctgtacgaccgctacttcctgcacgtcgacggcacccgcatcgaaatgccgcaggcattcttcatgcgcgtcgcgatgggcctgtcgctgaacgagatcgaccgcgaaacgcgcgcgatcgagttctacaacgtgctgtcgagcttcgacttcatgagctcgacgccgacgctgttcaactcgggcacgcaccgctcgcagctgtcgtcgtgctacctgacgacggtcgcggacgatctcgacggcatctatgaagcgctgaaggagaacgcgctgctgtcgaagttcgcgggcggcctcggcaacgactggacgcgcgtgcgcgcactcggctcgcatatcaagggcacgaacggcaagtcgcaaggcgtggtcccgttcctgaaggtcgtgaacgacacggccgtcgcggtgaaccagggcggcaagcgcaagggcgcggtctgcgcgtacctggaatcgtggcacctcgacatcgaggagttcctggagctgcgcaagaacaccggtgacgaccgtcgccgtacgcacgacatgaacacggcgaactggatccccgacctgttcatgaagcgcgtgatggaaggcgccgactggacgctgttctcgccgtcgacctgcccggacctgcacgacaagttcggcgccgacttcgagaaggcttacacggcttacgaagacaaggtcgcgcgcggcgagatcaagctgttcaagaagatcccggcgcagcagctctggcgcaagatgctcggcatgctgttcgagacgggccacccgtggatcacgttcaaggatccgtgcaacgtgcgctcgccgcaacagcacgtcggcgtcgtccactcgtcgaacctgtgcacggaaatcacgctgaacacgagcgacaccgaaatcgcggtgtgcaacctcggctcggtgaacctcgtcgcccacctggtgaagcaggccgacggcagctacgcgctcgaccacgacaagctgaagcgcacgatcagcgtcgcgatgcgcatgctcgacaacgtgatcgacatcaactactacgcggtgccgaaggcgcgtaactcgaacctgaagcaccgcccggtcggcatgggcatcatgggcttccaggactgcctgcacctgctgcgcacgccgtacgcgtcggaagcggcggtcgagttcgcggaccgttcgatggaagccgtctgctactacgcgtactacgcgtcgaccgagctggccgaagagcgcggccgctactcgagctaccgcggttcgctgtgggatcgcggcatcctcccgcaggacacgctgaagctgctgacggaagcgcgcggcggctacgtcgaggtcgacacgtcggaatcgctcgactggacgacgctgcgttcgcggatcgccgcgcacggcatgcgcaactcgaactgcgtcgcgatcgcgccgacggcgacgatctcgaacatcatcggcgtgtcggcctgtatcgagccgaccttccagaacctgtacgtgaagtcgaacctgtcgggcgaattcacggtggtgaacgagtatcttgtccgcgacctgaaggaacgcggcctgtgggacgaggtgatggtcgccgacctgaagtacttcgacggcatgctgtcgcgcatcgaccgcatcccggccgacctgcgcgcgatctacgcgaccgcgttcgaggtcgacccgacgtggctggtcgaagcggcgtcgcgtcgccagaagtggatcgaccaggcgcagtcgctgaacatctacatgggcggcgcgtcgggcaagaagctcgacgaggtctacaagctcgcatggctgcgcggcctgaagacgacctactacctccgcacgatggcggcgacgcacgtcgagaagtcgacggtcgcacacggcgcgctgaacgcagtgccgacgggcggtgcaggcagcggcggctcgggcagcggcggcgcgcaaggcgcggcgggcggtttcggtgcggcaggcggcgatgcatcgtcgggcgcgatcaacgcggcgccggcactcgcgccggtcgaagcggacggtccggtgtgcacgatgcgtccgggcgatcccggcttcgacgaatgcgaagcgtgccag

SEQ ID NO: 11492 - DNA, 576 bp, Burkholderia cepacia
atgtcgcgccgcgaatggctgaagctcgcggccctgttcaccgcgacgggcgccgccccgttgctgtcgatggcgaacgcgcacgccgcggccgaaccggatgcgccggttcgcatcggctatctgccgatcaccgacgcggccccgctgctggtcgcccacaacaacggctatttcgcgtccgaagggctgacggtcgagcaacccaagctgctgcgcagctgggcgcaactcgtcgaggcgttcctgtccggccaggtcaacgtcgtgcacctgctgtcgccgatgacgctgtgggcacgctacggcagccgcgcgccggcgaaggtggtcgcatggaaccatgtgaacggctccgggctgacggtcgcgcccgacatcgattcgctgcgcgatctcggcggcaagaccgtcgcgattccgttctggtactcgattcacaacgtcgtgctgcaggacatgctgcgcgagcaggggctcgtccccgtgctcaagcggcgcggcacgcccgcggcgaacgaggtcaacctcgtcgtcatggcgccgtcggacatgctgcccgcgctcgccgcgcgc

SEQ ID NO: 11493 - DNA, 468 bp, Burkholderia cepacia
gtgcgcctggtcgggatcgagaacgaaccactcggtatcgtaaaactcgctgacgctttccgtaaatcggaagaactggatgttgacctggtggaaatcgcgccgcaagcggtgccgccggtttgccgtctgatggattacggcaagttcaagtaccaggaatcgaagaagcagcacgaagcgaagctgaagcagaaggtcatccaggtcaaggaagtcaagttccgcccgggtaccgatgacggggattacaacgtcaagctccgcaatctcgtgcgcttcctcgaagagggcgacaagacgaagatcacgttgcgtttccgcggccgtgaaatggctcaccaggaaatcggtatgcggatgctcgaacgtctgcgcacggatctcgaggaagtcggccaggtcgagcagatgccgaagatggaagggcgccagatgatcatggtgctctcgccgaagaaaaagaag

SEQ ID NO: 11494 - DNA, 2001 bp, Burkholderia cepacia
atggatgacgaaaacgatagcgcggtgctcgaggcgcacgtcggtacgcgcagcccctgctggcgtctcggcagcgacagcaacgcgctcgaactggccgcggtccgcggcctgaccaacgtcgcgatcgcgctgacggtcgagcaggccgcgcgcatccgcgcgctgaccggcgtcacgtcgcacctcgtgctcgacatcttgctgtttggcaacccggtcagcctccatctcgtcggcaggaaggtcaatacggtcgactgggccggcacggcgtccgcctattccgataccgaatccgtcgccggcgacctgtcgcacgggctcgcgttcgccgagcaggtcgtgtccgaagtgaattcgctcgtcgtgatcctcgaccgcaacgggatggtgcagcgcttcaaccgcctgtgcgaggaagtgacgggcaagcgcgaggtcgacgtgatcggccgcagcgcgttcgagctgttcatgagccccgagcagggcgcgcagtcgcgcagcaacatcacgggctttttcgcgagcaaccagtcgttcgcggtcgagcgctacatcaacacggtcaacgggccgcgcctgttccagttccgcaacaagttcgtgcagagcggcagcggcgtcgacgagcagtacctgatctgctcgggcatcgacatcaccgaggagcgcaacgcgcagcagcggctcaccgagctcgcgaacaccgacgtgctcaccgggctgccgaaccgccatgcgatcagcgagcgcatccacgcggcgatcgccgcggagagcgagcagacgcgcgggcaggtcggcatcctgttcctcgatctcgacaacttcaagcgcgtcaacgatcactacgggcacatcaccggcgaccgcctgctgcaggacgtgtcggcgatcatcagcggctgcctgccgtccggcgcgacgctcgcgcggctcggcggcgacgaattcctcgtgctgttcgaacagggcacgcgcccgctgctcgaagcgaccgcgcagatcatcctcgagcggctgcgcacgccgatccatctcgggctgatggaggtctacacgagctgctcgatcggcatcgcgatgcatccgcagcacggcgattcgctcgagacgctgatccgcagcgccgataccgcgatgtacgtcgcgaaggaagagggcaagcatacgtatcgcgtgttctcgctggagatgaaccagaaggtcgcgaagtacatgtggctcgacacgaacctgcgcaaggcgctcgaggaagagcagttcgtgctgcattaccagccggtcgtcgatatcgcgacgggcgacgtgcacggcgtcgaggcgctgatccgctggcagtcgcccgatcgcgggctcgtcgcgccggtcgagttcatccgtttcgcggaagagtcggggctgatcgcgccgctcggacgctgggtgatgcgcacggcagccgcgcaggccgccgcgtggaaggcgaaggggctcggcatccggatcgcggtgaacgtgtccgcgcggcagttgcaggacatgaacatcgtgcatcagttcgcgtcgattctcgacggcgcggggctcaagcccggcctgctcgacatcgagctgaccgagagctgcttcatcgaggacgaggacgcggccatcgggctgatgcggcagttccgccagctcggcgcggagatccatctcgacgatttcggcaccggctattcgtcgctgtcgcagttgtcgcggctgccgctcgacgcgatcaagctcgaccgcaccttcatcacggcgatcgaccgcaatccgcgctcgcaggcgctggtgcgctcggtcgtgtcgctcgcgaaggcgctgaatttcgcggtggtcgccgaaggcgtcgaaacgcatgcggaagccgaattcctcaagcagctcgacgtcgatcacgcgcagggctactactacgcgcggccgatgccggcgcaggcgttcgaggcgtggctcgcggagacgagaaagctcaggctgatcgcc

SEQ ID NO: 11495 - DNA, 891 bp, Burkholderia cepacia
atggcaaccatcggtttcatcggcctcggcatcatgggcgcgcacatggcgcgcaacctgctcaagggcgatcatcaactcgtcgtgaacggcgcgttcccgatcccggacgacctgcgcggcagcgcgaaggtcgtcgcgaactcgaccgaagtcgcgcagcacgccgacatcatcatctcgatggtgccggacacgccggacgtacgtaacgtgctgttcgccgacgacggcgtcgcgaagggcctgacggccggcaagctcgtgatcgacatgagctcgatctcgccgctcgacacgcaggcattcgcgaagcagattaacgcgctcggctgcgactacctcgacgcgccggtgtccggcggcgaagtcggcgcacgcgaagcgacgctgacgatcatggtcggcggaccggagaaggcattcgagcgcgcgaagccgctgttcgagaagatgggcaagaacatcacgctcgtcggcgacaacggcgcgggccagacctgcaaggtcgcgaaccagatcatcgtcgcgctgaacatcgaggcggtcggcgaggcgctgctgttcgccgcccgttcgggcgccgatccggagcgcgtgcgccaggcgctgatgggcggcttcgccgcgtcgcgcatcctcgaagtgcacggtgcgcgcatgaccaagcgcacgttcgatccgggcttccgcatcgagctgcaccagaaggacctgaacctcgcgctcgacggcgcgcgcaagctcggcctcgcgctgccgcacaccgcgagcgcgcagcagctgttcagcgtgtgcgcgtcgcacggcggcaaggcatgggatcactcggcactcgtgcgcgcgctcgagatcatgtcgaacttcgagatcggccagacgccggccgcg

SEQ ID NO: 11496 - DNA, 1968 bp, Burkholderia cepacia
atgaaaaagtccgcttcgccgttgcatgcctttcgtttccgtgtcgtctgcgccgcgattgccggcgcggtgtcgctcgcatcgtgcggcggcgtcgacagcgatgcgccgccgtcgcaggccggcgccacgccagcgcccaccccgacccaggccgcgaagcgcccgaacatcctgtacatcatggccgacgatctcggctactccgacatccatgcgttcggcggcgagatcaacacgccgaacctcgacgcgctcgtcgcatcgggccgcatcctgtcgaaccaccacacgggcaccgtctgcgcgatcacgcgcgcgatgctggtatcgggcaccgatcaccatctcgtcggcgaaggcacgatgggcgtgccgaccgacgaacggcgcgggctgcccggctacgagggctacctgaacgatcgcgcgctgtcgttcgcgcaactgctgaaggacgccggctatcacacgtacatcgcgggcaagtggcacatcggctcgggcatcgtcggcagtacgacgggcagcgggcagacgcccgaccagtggggcttcgagcgcagctacgtgctgctcggcggcgcggcgacgaaccacttcgcgcacgagccggccggctcgtcgaactacacggaagacggccgctacgtgcagccgggccagcccgggcagccgggcggcgcgggcggcagcccggccgtgttctattcgaccgatttctatacgcagaagctgatctcgtacatcgatgcgaacaagcaggacggcaagccgttcttcgcgtacgcggcctacacgtcgccgcactggccgctgcaggtgcccgatccgtggctgcacaaatatgcgggcgtgtacgacgccggctacgatgcgatccgcaacgcgcggatcgcgcggcagaaggcgctcggcctgattccggccgatttcaagccgttcgacgggctgcccgagacgacggtcgcctcgcccgcgaccgcgaacaacggcacggccggcgcgaagtacatcaacgcggtgcattcggccgcggacggctacggcgactacggccccggcaaggtcgacaagctgtggtcgagcttgtcgccggccgagcgcaaggcgcaggcgcgctacatggagatctacgcggggatggtcgagaacctcgactacaacatcggcctgctgatccagcacctgaaggacatcggcgaatacgacaacacgttcatcatgttccagtcggacaacggcgcggaaggctggccgatcgattccggcgccgacccgaccgcgaccgacaccgcgaacgcacaggagccgacctattcggcgctgggtactgacaacggcaagcagaatgcgcagcgcctgcagtacgggctgcgctgggcggaagtgagcgcggcgccgttccggctcacgaagggctattcgggcgaatgcggcgtgtcgacgccgacgatcgtgcacctgccgggccagtcgcagccgctgccgacgctgcgcgcgttcacgcacgtgaccgacaacacggcgacgttcctcgcggtcgcgggcgtcacgccgccgtcgcagccggcgccgccgctcgtcaacacgctgacgggcgtcgaccagaacaagggcaaggtcgtctacaacaaccgctacgtgtatccggtcacgggccagtcgctgctgccggtgctcaccggttcggcgacgggcgaagtgcacacgacgccgtttggcgacgaagcgtacggccgcgcgtatctgcgcagcgccgacggccgctggaaggcgctgtggaccgagccgccgctcggcccgctcgacggccactggcagctgtacgacctcgcgtcggatcgcggcgagacgaccgacgtgtccgcgcagaatccgtcggtgatcggcacgctcgtcgaccagtggaaggcctacatgagcaacgtcggcggcgtcgagccgttgcgtccgcgcggctactat

SEQ ID NO: 11497 - DNA, 363 bp, Burkholderia cepacia
atggctcgtatcgcaggggttaacatcccgaatcaccagcataccgagatcggcctgacggctatcttcggtatcggccgcacccgttcgcgcagcatctgcgtggcagctggcgtcgatttttcgaagaaggtcaaggatctgaccgacgcagacctggaaaagctgcgtgaagaagtaggcaagtttgtcgtcgaaggcgatctgcgccgtgaagtgacgatgaacatcaagcgcctgatggacctcggttgctaccgcggcgtccgtcatcgcaagggcctgccgatgcgcggtcagcgtacgcgtacgaacgcacgtacccgcaagggtccgcgtcgtgcagcgcaagcgctgaagaag

SEQ ID NO: 11498 - DNA, 902 bp, Burkholderia cepacia
atgtcctctaatcttgcggttagtgtagagaacttgagtaaggtatttcacatctacgatagcccgcgggctcggctgatgcagatgctacttggctcccgaaagcagttttatcgggaattctgggcgttgcgcgatatttccttcgatatcgtaccgggcgaaaccgtcggtatcgtaggtcacaacgggtcgggaaaatccacgctcctccaggtgatttcaggcacgttgacaccgagtgccggacgcgtcgcgacgagcggcaaggtcgcagcgttgttggagcttggttccgggttcaatccagaattcaccggccgggagaacgtgatgctgtacggtcagatcctcggaatgagccgagaggagatcgaagagaagtatccggcgatcgtcgaattttcggagatcgagagcttcatcgatcagccgctgaagacgtattcatccgggatgtatgtacggctggcgttctccgttgcgattcacgtcaatccggacattctgatcgtcgacgaggcgttgtccgtcggcgacgcgatgttccaggcgaaatgcatggccgtcatgaagaaactgatggaccggggtacgacgctactgttcgtcagtcatgatccaggtgcggtgaaggcgctttgcgaccgagccattcttctcgatcacggcaacatgctggcgagcggctcgacggatgacgttattgaggcctactactcgtcttacgtgcgcaagaggcaacgtgtcgtttccgatgaagcacaagccgtgacgcaaccgctcgaactggacgctgatatcagtactggtgcagaggaattccagaagcgtgccggatttcagcgaatccggaatggccgcgcgacgttcgtcaacgtgcaactgtacgacgaatggat

SEQ ID NO: 11499 - DNA, 786 bp, Burkholderia cepacia
atgtcggaatccgaaaaaaaccggagcgcgccgcgctggacgctcgatcggcaatcgctcgaactcgacgtgcgccgcacgctcgagatgccgtcgcgacgcctcttcaaccggcgcgtgctgacgctcggcggcctcgcgatgctgaccggctgcacgctgcaggacgacgcgtcggtcaacacgttcctcgagaaagtgtcgcgcatgaacgatcgcgtgcaggcgtggctgttcaatcccgaccggctcgcgccgacctatgccgaagccgacatcacgcgaccgtttccgttcaacgcgtactacgggatcgacgacgtgccgcacgtcgacgaatcgacgtatcggctcgtgttgtccggccgtgtaacgggcaagcgcgtgtggacgctcgacgagcttcgcgcgctgccgcacgcggaacagatcacgcggcacatctgcgtggaagggtggagtgcgatcggccgctggggcggcacgccgttcggcgcattcctcgcgcgcgccggcgccgacacgcgggcgaaatacgtgggcttcaagtgcgcggacgactactacgaaagcatcgacatgccgaccgcgctgcatccgcagacgctgctcgcgttcgattacgacggccgtcggctgccgccggaatacgggtttccgatgaagctgcggatgccgaccaagctcggctacaagaacccgaagcacatcatggaaatcttcgtgaccgatacgttcccgggcggctactgggtcgatcagggctacaactggttcggcggatcg

SEQ ID NO: 11500 - DNA, 1089 bp, Burkholderia cepacia
atgatcggccgcacgtggctgcagcaggcgctgccgatcacgctcggcctcaaattcgcccaatggctcgatgcgctgctgcgccatcgcgcgcgtttcgccgagttgcgcgaacgtgcgctcgtgctgcagttcggcggggcagccggcacactcgcgagcctgcgcgaacacgcagccggcgtgagcgctgcgctcgcggccgatctcaagctcgcggtgccggccgtgccgtggcatacgcagcgcgatcgcatcgcggaagcggcggcgtgcttcgggatgctgaccggcacgctcggcaagatcgcgcgcgacgtgtcgctgcagatgcagaccgaaatcggcgagctcggtgaaccggccgccgccggcaagggcggctcgtcgacgatgccgcacaaacgcaacccggtcggctgcgcagccgtgctgacggctgccgtgcgcgcgccgaacctcgtcgcgaccgtgttcgcggggatggtgcaggagcacgagcgcgccctcggcggctggcaggccgaatgggatgcgctgcccgacctcgcccgcctgacgggcggcgcgctcgcacagatcgcgcagatcgtcgctggcctcgacgtcaacaccgagcgcctcgccgcgaacctcgagctcacgcacgggctgatcctcggcgaagccgtgatgctcgcgctcggcgaccgcatcggccgactcgatgcgcatcacgtcgtcgagcacgcgtcgaaggaagccgtgcgcaccggcgcgacgctgttcgacgtgctgtcccgctgcgcgaccgtgttggtgcccctggctcgcgcgggcctcgcgcggtcgggcgctcccgcccttccgcttgtgccccccggcgcctggctgttgccgcgtccggcccccgccccgctttttctttctccgggccctcttctttccctcttcttccgccttgctgccctcctcccccttccccccccttcccccgccgcccggccccccccgctcgcccccccggtgcccccgcccccccgcccccgccctccccccgcccccccccccctcccccttccccgtcccccccacaaccccaaaaaacaa

SEQ ID NO: 11501 - DNA, 1035 bp, Burkholderia cepacia
atgctcacggtctacagcagcgatcaccacctgcatcgcggcgtcgaactgaaggacggcgcgatcaccgagtcgttcgaacacccccttcgcgccgaaacggtgctcgcgcaggtccgcgcggccggcctcggcgacgtgatcgcgccgcgtgcgttcgaccgggcgagctatgccggcgcgcacagcgcgcgctacgtcgacttcctcgccggcgcatgggacgaatggaccgcgaccggccgcacctgccaggcgctgccgctcgtgtggccggtgcgcgcgatgccggcggccgcgacgccgcccggcttcatcgacggcaagctcggcttcttcgcgatggacgccggcgcgccgatcaacgccggcacatgggacgcggtgagcgcgagcgcgaactcggcgctgaccggcgccgacctgctgtcggaaggcggcgcgcgcgccgcgttcgcgctgtgccgcccgcccggccaccatgcggggcgcgagtacatgggcggctactgctacctgaacaacgcggcgatcgccgcgcagcacggcatcgcgcgcggcgcggcgcgcgtcgcggtgctcgacgtcgatttccaccacggcaacggcacgcaggacatcttctacgagcggtcggacgtgctgttcgcgtcgctgcatggcgaaccgtcggtgtcgtatccgtacttctccggctacgcggacgagcgcggcgcgggcgtcggcgcgggcttcaacctgaacctgccgctgccgaagggcacgcggtgggacacctactcggcagcgctcgaccacgccgcggcggcgatcgcgaagcatgcgcccgacctgctcgtcgtgtcgctcggcgtcgacacgttcgagcacgacccgatcagccatttcaagctgcgctcgcccgactacctgcggatcggcgagacgctcgcgcgcctgaacctgccgacgctgttcgtgatggaaggcggctacatggtcgacgagatcggcatcaacgcggtgaacgtattgctgggattcgaagggcgtgcg

SEQ ID NO: 11502 - DNA, 186 bp, Burkholderia cepacia
atgaagaccaagaagagcgctgcaaagcgcttcgtggtgcgtccgggcggtaccgtcaagcgcggtcaagccttcaagcgccacatcctgaccaagaaaaccacgaagaacaagcgccatctgcgcggcgcaacggcagttcatgattccgatctgaactccgtccgcgcgatgctcccgttcgcg

SEQ ID NO: 11503 - DNA, 261 bp, Burkholderia cepacia
atgccggcgtatcgccggcaactggaggagcgcaagctgacccagagcatgtcgcgcaagggcaactgtctcgacaatgccgcgatggaaagcttcttcggtacgctcaagtccgagtgctacaagggtcatcgtttcacttgcgtgagccatttacgcgacacgctcgaccactacatccactactacaaccacgaacgcatcaagctcaaattgaaagggctgagtcccgtgcaatacaggactcagcccttgggcgct

SEQ ID NO: 11504 - DNA, 1392 bp, Burkholderia cepacia
atgaatcgagtcctgttgttcaagtccatgatcaccgcgttgctcgcgctggcgatcctgatcccgctgcagatggtccagagcatcgtgcgggaacgcgccgactatcggcagagcgcgctgcagagcatctgggcgagctatgcggggccgcagacggtgacggggccggtgctcgtcgtccgttacacggaagtcacgcgcgcgagcgacgacgtgcgggccggcggcaaggcgaaaaccgtcctgaaaagcgaggcgaaacggctgctcgtgttcccgaagacgctgaacgtcgacggcacgctgtcggtcagcacgcgctatcgcggcatccacaaggcgctcgtgtacgggctcgacagccggatgacgggcacgctgccgctgccggacctgaagaagctgccgcaggccgacggccacgtgagcttcaagatcgacagcgcggtcgtcgcgctcggcatcggcgacctgcgcgggctgaaggcgcagcccgacctgcgcatcggcggcaagcggatcgacgttgagcagggcacgcggctcgagagcctgcgccagggcgtgcatgcgaacgtcgatctcgcggcgctggcggaggcaaacgccggggcgacggtcgtgccgttcagcatcggcctgccgctggccggcgcggaatcggtcgcgttcgcgccggtgggcgaccagaacgacttctcgctgaaatcgacgtggccgcatccgagcttcggcggcgagttcctgccggccgagcgcacgatcgacgcgcgcggcttcgtcagcaactggcacgtgacgtcgttcaacacgaaggcgcgcgagcaggtggcgtccggcaacggcaacggcgacggcgggatcgagatggcgtcggtgtcggtgatcgaacccgtgaacgtctatctgcaggccgagcgcgcgacgaaatacggtgcgctgttcgtgatgctgacgttcgcgagcttcttcatgtacgagctcgtgaagcggctgcgcattcacccgatccagtacacgctggtcggcctgtcgctcgcgctgttcttcctgctgctgctgagcctgtccgaacacattgcgttcggctatgcgtatctcgcggcgagcggcgcctgcatcgggctgctcggcttctacctgtcgttcgtgctgcacagcgtgaagcgcggcgcgacgttcaccgcgctgctcgcgatgctgtacgcggcgctctacgggctgctgctgtcggaggacaatgcgctgatgctcggctcgctgctgctgttcgcgattctcgccggcatcatgacgctcacgcgccgcgtcgactggtattcgctcggcgcggcgtggcagccgctggccgacaagccgacggccatgaagccgggcgcgccggcgaag

SEQ ID NO: 11505 - DNA, 1752 bp, Burkholderia cepacia
gtgggcggcggcgccgtgcagggttcgtgggtgacgaacctgacggcgggcgccggcatccggaccaaaaacccgagttgctcgctcaccggcgacccgaacgccttcggctgcggcgcgggcgcgaacaccaaccagtggggctatgcggacaacggcgacctgaattaccgcaagggccagccgttcagcacatacgtcagcgcgaccagcgagctgctgctgaagatgccgagcgaagggctgaagttcatggtgcgcggcacgggcatgtacgacttcatggccaagaacacgaaccgcacgccgttgtcgagcaccgcggccgcgcaggtcgtctacaacgcgcagctgctcgacctgtgggcgcagaaggatttcacgctcggcgggcgcaacgcgcacgtgcggctcggcaaccaggtgatcaactggggcgagagcatgttcgcgcagagcggcatcaacgcgaccaactccatcgacacgcagaagctgctgatccccggctcgcagctcaagcaggcgctgctgccggcgccgatggtgagcctcgcggccgacctgtcgcacgggttcagcaccgaggcctactaccagttccagtggaacggcaaccgctacccgccggtcggctcgtactggtcggtgacgaacggtttcggccgcggtgccgagccgttcacgatcaacacgaacaacctgaacgtgaccggcccgagcgcgggcacgatcgcgaacgcgatcggcggatcgggcgcggccggcaaccaggacacgctcaacgcgatcaggaacgggctcgtgaacggggcctacgccgggccgccgttcaacgacatcggcctgccgagcacgacgaccctgccggcgaaataccggccgcagttcggcgtgaagttcaactattcgccgcgcgcgttcgacgcgaacttcgcgttctactacctgaactacaccgacaagtcgccggtgctcgcgtcgctcgctaacggcaccgagcaatggtcgtatctcggccgacgccagttgttcggcgtcagcgcgaacttcggcgtcgggccgtgggcgatcggcaccgaactgtcgtaccggccgcgcgatgcggtcgcgctgtcgagctgctacggcgcgggcggcccgctcgacctgaacacgaacggcgtggccggcatcgactgtcagcaatgggtcgacaagaagaagttccagtacgacatcaacggcttgctcgcgctcacgcgcagcgagtatccgttcctgaaactgctcggcgccgattcggccgcgctgacgtgggaactgacgtggatctactacccggggctgaagtcgagcggcgtgacgcgcacgatcgacgggcagactgtcacgcaggtgccgcagaccggctacctgccgtggctgaacaacggatcggcggccggctatccgatcgggatggcgcagggcacgtcgagctcggttggcgcgacgatcgacttcaactggacctacgacggctcgctgattcccggttggcaggtcacgccgggcgtgacgttctcgaccggcctgtacggctacacgcccaccttcaccgcgaactacgtgcagggtgcgaagtcgctgaacgtctacgtgctgttcaaccagaacccgccgaactggcaggccggcatcaacttcacttcgttctggggtggccacaacacggtgggccagccttatgcggaccgtaatttcgtcggcttgttcgtcacgcggaatttc

SEQ ID NO: 11506 - DNA, 2111 bp, Burkholderia cepacia
ccctctgcaccaccgcctacgccggcgacgccgatttcaatgcgcagggcgacgccaccgacgcgttcgcatcggtggccgcgcaacggcgcgccgatctgctcgtgcgcaagatgacgctcgacgagaaactccagttcattcattcgcaatacgaaatgtctaaggtgccgggcggcggcgccgggtacatccagggcgtgccgcgcctcggcattcccgatctgaacatggtcgattcggccaccggctccggcagcacgtcgcaggccagcacgacgttccccgcgacgatcgcggttgccgccagctgggatcggcgactgtcgtacgacttcggcaagcaggtcgcgatccagttgcgcgcgcaaggattcggcatggggctcggcggcggcaccaatctcgcgcgcgagccgcgcggcggccgcctgttcgagtatctcggcgaggatccgttgctcgccggcgatctgctcgccgaacgcacgctcgccacgcagcggcagaaagtcattgcgacgatcaagcactacgcgggcaacgagcaggagcacggccggatgggcggcaatacgcagatcgacgaacgcacgctgcgcgagctgtacctgctgccgttcgagatcgccgcgaagcgcggccggcccggcagcgtgatgtgcagctacaaccgcctgaacggcgcctatgcgtgcgagaaccctcacctgctgaacgacgtgctgaagaacgaatggggcttccagggccaggtacagtccgactggggcgccacgcacagcaccgccgccgcgatcaacgccgggctcgacgaggaagaagacgtcgggccgagcgtgtacctgacgccggcagccgtcaagcaggcgatcgcgaacggctcggtgtcgaccgcgcgcctcgacgacatggtgcgccgcaagctcgcggtgatgatccgcgtcggcgtgatggacgatccggccaaaggcggcggcacgatcgatttcgcggccggcaaccggttcgcgcaggcggcttccgagcagtcgatcgtgctgctgaagaacgacggcaaccagttgccgctcgtcgcgtcggcgctgtcgcgtatcgccgtgatcggcggccatgcggatgcggccgtgctgtccggcggcggctcgggcaacacgcgcgatcccgtaacgggttcgttcgcaggctgcggcggcctgacgttcgggtcgtcgaccgggtgcagctggtggcgcaatccgtggctcaaggtcgacgtgccgatcgtcgcggcgatccgcgcgctggcgccggccgcgcaggtcacgtatgcgggcaacagcgaccagcagtcgccgttccgcgcgtacacgcagcaggagatcgaccaggccgcggcgctcgccggccgctcggacgtcgcgatcgtcgtggtcgcgcagccggctggcgaggatttcggcgacctgcaaagcctgagcctcgcgaacccgtcgaaccaggatgcgctcgtcgaagccgtcgcgcgtgcgaatccgcatacgatcgtcgtcgtccagagcggcaatccggtactgatgccgtggaaggacaacgtgtcggccatcgtcgaggcatggtatccgggcgaagccggcggcaaggcgatcgcgaacgtgctgttcggcgcggtcaacccgtccggcaagctgcccgtgaccttcccggcgcgcgatcaggattcgccgacgtgggggcaaaacggcgcgttcgagaccgacccggtgtacgcggaaaagctgaacatgggctaccgctggtatgacgcgcgcaacatcaagccgatgttcgagttcggctacggcctgtcgtatacgcacttcgcgtattcgggactgtcggtgtcgaagcaatgggatggctcgctgagcgtcgcgtttaccgtgcgcaacgacgggcgcgtggccggcgcggaaataccgcaggtctatctcggcgtgccgtacaaggacgagccgcccaagcggctggtcggctgggagaagatccggctgaatccgggcgaggcacggcgtgtgcacataaccgtgtcgccgcggatgcaaagcgtctgggatacgtcgcgcaacggctggcgggtcgtgtcgggcgga

SEQ ID NO: 11507 - DNA, 714 bp, Burkholderia cepacia
atgtcaccttacattgcagaattcatcggcacagcgatcctcgtgctgctcggcaacggcgcggtcgcaaacgtgctgcttgcaaagaccaagggcaaaggcgcggacctgatcgtgatcgtgatgggctgggcgatggcggtgttcgtcgcggtctacgtgaccgcgtcgttcagcggcgcgcacctgaacccgatcgtcacgatcagcctcgcgctcgcgggcaagttcgcgtggtcgaaagtcggcggctacgtcctcgcgcagatgctcggcgggatggccggcgcgttgctcgtgtggctcgcgtatcgccagcacttcgcgaaggaagccgatgcggacctgaagctcgcggtgttctgcacggcgccggcgatccgcagcgtcacgcacaacgtgctgaccgaagcgatctgcacgttcgtgctgatcctcggcgtgctgtatctcgcgtcgccgcaggtcggcctcggcgcactcgacgcgctgcccgtcggcctgctggtgctcggcatcggcatctcgctcggcggcccgaccggctatgcgatgagccccgcgcgcgacctgtcgccgcgcatcatgcatgcgctgctgccgattcccggcaagcgcgacagcgactggcgctatgcatgggtgccggtcgtcggcccgctgctgggcggcgccgcggcggccggcctgtatctgcacctgcacaccacgatc

SEQ ID NO: 11508 - DNA, 1230 bp, Burkholderia cepacia
atgacgacctcgaccgtgacccgccagacattcgacgaagtgatggtgccggtattttcccccgccccgttcgtgccggatcgcgcagagggctcccgcgtgtgggatacggccggccgcgagtacatcgatttcgcgtgcggcatcgcggtgacgtcgctcggccacggccacccggaactgctgaaggtgctggacgaacaaggccgcaagctctggcacatcggcaacggctacacgaacgaaccggtgctgcgcctcgcgaagcgcctcgaatcgctgaccttcgccgaccgcgcattcttcgcgaactcgggcgctgaagcaaatgaagccgcactgaagctcgcacgccgcgtcgcgttcgaccgccacggcgccgacaaatatgaaatcgtgtcgttcgtccagtcgttccacggccgcacgttcttcacggtcagcgtcggcggccagccgaaatactcggaaggcttcggcccggtgccgcaaggcatcaagcacctgccgttcaacgacatcgaagccgcgaaggccgcgatcggcccgaaaacctgcgcggtgatcgtcgaaccagtgcaaggcgagggcggcgtgatccccgccgatccggcgttcctgaaagcgctgcgcgaagcgtgcgatgccaacgacgcactgctgatcttcgacgaagtgcaaacgggcgtcggccgcacgggccagttctacgcgtacatggacacgggcgtcacgccggacatcctgacgaccgccaaggcgctcggcaacggcttcccgatcggcgcgatgctgacgacgaacgaactggccgcgcacttcaaggtcggcgtgcacggcacgacgtacggcggcaacccgctcgcatcggcgatcgcggacaaggtcgtcgaactgatcggcgacccggcactgctcgaaggcgtgcgcgaacgcagcgtgcgcctgaagggcgcgctggaacgcatcaacgcacgcttcggcatcttcaaggacgtgcgcggcaagggcctgctggtcggcgcggaactcaccgccgccttcgacggccgcgcgaaggacttcgtcaccgccgccgcggagaacgggctgatcatgctgatcgccggcccgaacgtgctgcgcttcgtcccgtcgctggtgattccgttcgacctgctcgacgaaggcgtgaagcgcttcgagaaggcagtcgagcaggtgctcgcggcccaggaagccaccgcgcgc

SEQ ID NO: 11509 - DNA, 1963 bp, Burkholderia cepacia
attcgcaaggtcgccgtgctgggcgccggcgtgatgggcgcgcagatcgccgcgcatctcatcaacgcgcgcgtgccggtgctgctgttcgacctgccggccaaggaaggcccgaaaaacgcgatcgcgctgaaggcgatcgagaacctgaagaagctgtcgcccgcgccgttcggcgtgaaggacgatgcgaagtacctcgaagcggcgaactacgaagacgacatcgcgaagctggccgaatgcgacgtcgtgatcgaggcgatcgccgagcggatggactggaagcacgacctgtacaagaaggtcgcgccgcacatcgcttcgcacgcgatcttcgcgaccaacacgtcgggcctgtcgatcacgaagctgtccgaaggtttctcggacgagctgaagtcgcgcttctgcggcgtgcacttcttcaacccgccgcgctacatgcacctcgtcgagctgattccgaccgcgcatacgcgcccggagatcctcgaccagctcgagaccttcctgacgagcgtcgtcggcaagggcgtcgtgcgcgcgaaggacacgccgaacttcatcgcgaaccgcgtcggcatcttctcgatcctcgcggtgatcaccgaggccgcgaagttcggcctgcgcttcgacgaagtcgacgacctgacgggcagccgcctcggccgcgcgaagtcggcgacgttccgcaccgcggacgtggtcggcctcgacacgatggcgcacgtgatcaagacgatgcaggacaacctcgccgacgatccgttcttcccggtctaccagacgcctgccgtgctcgccgagctggtgaagcagggcgcgctcggccagaagacgggcggcggcttctacaagaaggaaggcaaggcgatcaaggtgctcgacgcgaagacgggcacctacgtcgattcgggcgcgaaggcggacgaaacggtcggccgcatcctgaagcgtccgccggcggaacgcctgaaggctgctgcgcgagacggatcatccgcacgcccagttcctgtggtcgatcttccgcgacgtgttccattacatcggcgtgcatctcgagtcgatcgccgacaacgcgcgcgacgtcgacctcgcgatccgctggggaaaaggctggaacgaaggtccgttcgaaggctggcaggccgccggctggaagcaggtcgccgagtgggtgcaggaagacatcgcggccggcaaggcgctcgcgagcgtgccgctgccgtcgtgggtgctcgaaggcccggtcgccgagaagggcggcgtgcacacggccgaaggctcgtgggcgccggccgcgaagcgcttcgtgccgcgctcggacctcgcggtctacggcaagcaggtattccgtgcgccgctgctcggcgaagcgggtgccgatccgaagacgtacggcaagacgctgttcgagaccgacgcggtgcgcgcatgggtcgacgaccgcgccggtgaagacgacgtcgtgatcgtgtcgttcaagtcgaagatgaacacgatcggaccgagcgtgatcgacggcctcgtgcaggcgatcgaactcgcggagaaggactacaagggcgtggtgatctggcagccgacgtcgctgaagctcggcacgccgggcggcccgttctcggccggcgcgaacctcgaggaggcgatgcccgcgttcatgatgggcggcgcgaagggcatcgagccgttcgtgaagaagttccaggaaggcatgctgcgcgtgaagtacgcgaacgtgccggtcgtcgcggccgtgtcgggcatcgcgctcggcggcgggtgcgagctgatgctgcacagcgcgaagcgcgtcgtgcacgtcgagagctacatcggtctcgtcgaagtgggcgtcggcctcgtgccggcgggcggcggcctgaaggaagcggcgctgcgcgcggcggacgccgcgacggccgcgaacgcgaccaccgacatcctaagttcg

SEQ ID NO: 11510 - DNA, 3816 bp, Burkholderia cepacia
ccgcgcttcggcacggtctcgccgtgggcgagcaaggcgaccgacatcgcgcagcactgcggcctcacgcaggtgcgccgcatcgagcgcggcgtcgaattcacggtcacgctgaagtcgggcctgctcggcggcaagaaggcgctgtcggacgacgcgcgcgcggccgtcgcggccgcgctgcatgaccggatgaccgaaagcgtgatcgcggcgcgcgacgacgcgaagcacctgttcgacgaactgccggccaagccgctgtcgaccgtcgacgtgctgggcgtcggccgcggcgcgctggagcgcgcgaacgtcgagctgggcctcgcgctcgccgacgacgagatcgactatctggtcgacgcgttccgcaagctcgaacgcaacccgaccgacgtcgaactgatgatgttcgcgcaggcgaacagcgagcactgccgccacaagatcttcaacgcgcagtggacgatcgacggcgaagcgcaggacatgtcgctgttcgcgatgatccgcaacaccgagaagctgagcccgcagggcacgatcgtcgcgtattcggacaactcgtcgatcatggtcggcgccgaggccgagcgctggttcccgcgcaaggccggtgcgcccggcgagccgggcgagcgctacggccgccacaccgaactcacgcacacgctgatgaaggtcgagacgcacaaccacccgacggcgatttcgccgttcccgggggcggcgaccggcgcgggcggcgagattcgcgacgaaggcgcgacgggccgcggtgcgcgcccgaaggccggcctcacgggcttcaccgtgtcgaacctcgacctgccggacgcccgccagccgtgggaaaacgcgcgcgacgccgcgcagccggtggccgagcgcaacccgaacgagcagcacggcccgtacggccgcccggaccgcatcgcgtcgccgctgcagatcatgatcgacgggccgctcggcggcgccgccttcaacaacgaattcggccgcccgaacctcggcggctacttccgcgtgtacgagcagaacgtcggcggcacggtgcacggctatcacaagccgatcatgatcgcgggcggcctcggcaacatcgcggatcagcacacgcacaagcacgacgtgccggcgggctcgctgctgatccagatcggcggccccggcatgcggatcggcatgggcggcggtgccgcgagctcgatggcgaccggcgcgaacacggccgaactcgacttcgactcggtgcagcgcggcaacccggaaatcgagcggcgcgcgcaggaagtgatcaacggctgctggcagctcggcgcggaaaacccgatcctgagcatccacgacgtcggcgcgggcggcctgtcgaacgcattccccgaaatcgtcgacggcgcgggcaagggcgcgcgcttcgaactgcgcaaggtcgcgctcgaggaatcgggcctgtcgccgcgcgaaatctggtcgaacgaggcgcaggagcgctacgtgctggcgatcgcgccggccgacctgccgcgcttcgaggcgatctgcgcgcgcgagcgctgcccgttcgcggtggtcggtgtcgcgaccgacgaacgccagctgaagctcgtcgacgacgaagcgacgggcgccgacgaatacccggtcgacatgccgatggaagtgctgctcggcaagccgccgcgcatgcaccgcgacgtcacgcgcgtgaacaccgagcgtgcgccggtcgacgtgaccggcatcgcgctgtcggcggtcgcgctcgacgtgctgaagcacccgacggtcggcagcaagtcgtttctgatcacgatcggcgaccgttcggtcggcggtacgtcggtgcgcgaccagatggtcggcccgtggcaggtgccggtcgccgactgcgcgatcaccgcgctcgactacgcgggcttcaagggcgaggcgatgacgatggccgagcgcacgccgctcgccgtgatcgatgcaccggcatcgggccgcatggccgtcggcgaagcgatcacgaacatcgcgagcgcgccgatcgcgtcgctcgacaagttgaagctgtccgcgaactggatggccgcgtgcggcacggccggcgaagacgccgcgctgttcgacacggtcaaggcgatcggcatggagctgtgcccggcgctcgggatcggcatcccggtcggcaaggattcgctgtcgatgaagacgaagtgggacgagcagggcgtcgcgaaggaagtggtgtcgccggtgtcgctgatcatctccgcgttcgcgccggtcgaggacgtgcgccgccatctcacgccgcaactgcgccgcgtggcggatgcgggcgacagcgtgctgatcgcgatcgacctcggccgcggcaagaaccggatgggcggcagcatcttcgcgcaggtcacgcagcaggtcggcgacacgacgccggacgtcgacgacgcggaagacctgaagcgcttcttcaacgcgatccagtcgctcaatgcgcaggacaagctgctcgcgtaccacgaccgctcggacggcggcctgtgggcgaccgtgtgcgaaatggcgttcgcgggccacgcgggcgtatcgctgaacgtcgacatgctgacgctcgacccgaaccacgaatccgactacggcgacgcgaaggactgggcgaagcagacgagcggccgtcgcgacgaccgcacgctgcgcgcgctgttctccgaagagcttggcgccgtcgtgcaggtgcgcgcgtccgaccgcgacgcggtgctcggcgcgctgcgcgaattcggcctgtcgacgtgctcgcacgtgatcggctcggtcaacgatcgcgacgtgatcgaggtgtaccgtgacgcgaagaagatcttcgacgcgccgcgtaccgagctccatcgcgcctggagcgaagtgagctggcgcatcgcgcgcctgcgtgacaaccccgcctgcgcggatgccgaatacgacgcgctgctcgacgcggccgacccgggcctctcgccggtgctcacgttcgatccggccgacgacatcgccgcgccgttcatcgcgacgggcgcacggccgcgcgtcgcgatcctgcgcgagcagggcgtgaattcgcatctggaaacggcgtatgcgttcgaccgcgccggcttcgatgcgcacgacgtgcacatgagcgacctgctcgcgggccgcgcgacgctggccgatttcgcgggtgcggtcgcgtgcggcggcttctcgtacggcgacgtgctgggcgcgggcgaaggctgggcgaagacgatccgtttcaacgcgaacctcgccgacatgttctcggccttctttgcgcgttccgatacgttcgccctcggtatctgcaatggctgccagatgctgtcgagcatcgcgtcgatgatcccgggcgcgcaagcgtggccgaagttcacgcgcaacaagtccgagcagttcgaggcgcgtttctcgttcgtcgaagtggagaaatcgccgtcgatcttcttcgcgggaatggaaggctcgcggattccggtcgcggtcgcgcacggcgaaggctatgcggacttctcgcagcaaggcgacatcgaccgtgtcgcggtcgcgatgcgttacgtcgaccaccgcggcgaagcgaccgagcgctatccgttcaacccgaacgggtcgcccgccggcatcacgtcggtcacgacggctgacggccgcttctcggtgctgatgccgcacatggagcgcgtgcatcgtacggtgacgatgagctggcacccggaaggctggggtgacgcgagcccgtggatgcgggtgttccgcaacgcacgtcgctggatcggc

SEQ ID NO: 11511 - DNA, 1038 bp, Burkholderia cepacia
gtgtgtgcggtaaagccgggcgtcacggcgcccggcgatcaaaagcaggcacccatgtctgatatttcatacacgtcctcccgatcgcccgacagtgcgcagcagcgcgcgccgagccgtctcggggatgtcctgttcggcggcctcgcacggctcgccgcgatcgtgaccctgctgctgctgggcgggatcatcgtttccctgatcattgcgtcgatgccgaccatccagaagttcggcatcggcttcctgtggcaatccgagtgggatccgaactcggatgtgtacggcgcactcgtgccgatctacggcaccatcgtgacgtcgatcattgcactcgtcatcgcggtgccggtcagtttcggcatcgcactgttcctcaccgagctggcgcccgtgtggctgcgccgtccgctcggcatcgcgatcgagctgctcgccgcgatcccgtcgatcgtgtacggcatgtggggcctgctcgtgttcgcgccgatcttcgccgaatacttccagaagccgctcggccgcctgttcaaggacgtgtgggtgctcggcccgctgacgtccggcccgccgatcggcatcggcatcctcgcggccggcgtgatcctcgcgatcatgatcatcccgtacatcgcatcggtgatgcgcgacgtgttcgaagtcacgccggtgctgctgaaggaatcggcatacgggatcggctgcacgacctgggaagtgatgtggaaggtcgtgctgccctacacgaagaccggcgtgatcggcggcgtgatgctcggtcttgtctgtgcgctcggcgaaacgatggccgtgacgttcgtgatcggcaacacgaacctgctcgacagcgtgtcgctgttcgcgccgggcaacagcatcacgtcggcgctcgcgaacgaattcgcggaagcgcagccgggcctgcatacgtcggcgctgatggagcttggcctgatcctgttcgtgatcacgttcatcgtgctgtccatctccaaactgctgctgcttcgtctcgagaagggagagggcaagaaa

SEQ ID NO: 11512 - DNA, 2817 bp, Burkholderia cepacia
atgttgagtctgcacaacatcgccagcgctgcccagacgcgaaactatttctcgaaggacaactattacacccaggacgagaacaccaagcactccgcctggttcggcgccggcgcggcccgcctcggtctagccgggcaagttcagccggcggcgttcctcaacctactcgagggtcgagtcgaggagcagcagctcggcaaatgggtaaccgacgaggagacgggcgaacgtcgtcaggaccaccagcctggcattgacatcaccttctccgctccaaagagcgtgtcgctgatggccgaagtcgccggcgacaccgccgtcagggacgcgcacgaagctgccgttcagtccgcgctagcgtacctggaggagaacgtgatccgcacgcggtcgacccagaacggcgtcacgtcgatcgaacataccggcaacatggtcgccgcgctcttcaaacacaacaccagccgggatctcgacccgcagacccacacgcatgccgttgtgatgaacgcgacgctgcgcgcagacggtaagtggcggtcgatcgacaaccgggagatctaccagactcagaagctcgcgggggccatctacaacgctgaactcgtatccggcctacagcagctcgggtatcgcctgacgaacccggatcggcacggcaactttgaaatccaaggaatctcccgcgaacagatcgaacatttcagtcagcggcgcaccgcaatgaaggaaaaactcggtaagcgccagctcgaactggacactgcatccgcggccgacaaggagcgcgcggcgctcgccacgcgcgagcgcaaggtggacgttgaccacgagcaactgctcgccgactggcaagcgcgcgctctggaacaggggatcgacctcggggcactgcgcgcgacagccgccgagcgtaaggcagagggcatcgacccaccgacgaagctaacgggccgtcaggcgctagcattcgccgccgcccacctgatcgagcgcgaagctgtggttgacaagtctgatctggtcgagacggcagtggtccacggtaccggccgcgtgtcgccgcaggaagtgatgaaggctttccggcagctcgagaagaacggcgacctggtgccgctgccggatgagaagtacaccacgcggaaaatgctcgagagcgaacggtgggccctcgacttcgtcaagcaggaaaaaggcaatgcgcccgtcgtgctcgaggcgaccaaagtccaggagcgtatagccgaagccgagcgtctgcagcagttctcgtacacgttcggtcaacgcgatgcgatcgtgcttgcgttgacgtccaaggaccgattcgtagcgattcaggggctagccggtacgggcaagacgacgatgctccgcacgctaaacgatatcgcggccgccgagggatatgtcgtgcggggcatggcgccgaccggagcggccgcgaaagtgatggtgaaagagactggcattgccgccgagacggtcgcgatgttccaaatcaaggaacggcaactacagaaggacatcgagttcgctcaacagtttgccccggacttcaagcggaagccggaagtatgggttgtcgacgaatcatcgttccttgcccaacgacagatggcgcaactgcatcggctcgccgagcatgccggtgcgaaggtcgtctacctgggggatacgcttcagctgcagggggtggaagccggcaagccgttcgaactcgctcagaaggatggtatcgctacggcgtatatgaccgacatcaaccggcaaaagacggacgtgatgaaggaagccgtggacatcatcaccggccgaaatcagttggacgccggcacacgactgaccgatattgaactgaagcgcaacggacagtcgtttcaatacctgtcacagcaaggcagggtgcacgagacggatgaagtcgtcacgtcgaccgtcgacaagatcttggccatgagccccgaggagcgagcgcgtaacatcacgattacgccgctgaaccgcgatcgtgttgcgattaatgaaggtgtccgtgtgggcctgcaagcacgcggagaactgtcaaagaacgaatctacacacgagatcttggtgtcgaagggctttacccgtgcacagatcaaggaagcacagtactacgaacggggtgatgtcgttcgattcaaccgcacctaccagcaaatcaatgcggacaagggcgactatacccgggtgattgacgtcgatcacgaatcgggcatcgtgacccttagaaaacgagacggatcgacgctcgcttgggagccggccaagcacaacaaggttgaagtctacgaccccgacctccggcagttggccgttggtgacgtgattcgcctcactcgcaacgacgaaacgttcaagaacggcgagacagcgcgcgtcgtccagctcaccggagaacacgctgtcttacaggtcgatgatcgcggtgtgattagccaccactccgtcaatcttgagacaagccaacactgggatcatgcgtacgcatcgaccgtgcacgcggcacagggcgcttccaggaataccacgatatttgcgatcaacatgccggacaacgaagacaagaaagcgcaggagcgcgaatttcaggcacttgcaaaggtattcggtgaccggagctattacgttggcgtcacccgagcgtctcacgacatttccattgtcaccaacgacatagacctggcgcagcgcgcgattaccgggaagctcgacaagacgacagtcatcgaggcaatgaatcaggaggttcgcgagcagacaatccagcgcgaacagcatgaaatt

SEQ ID NO: 11513 - DNA, 969 bp, Burkholderia cepacia
atgaagaccacgtttctggatttcgaacagccgatcgccgaactcgaggccaagatcgaagagctgcgattcgtgcaggacgactcggctgtcgatatttcggaagaaatcgagcggctgtcgaagaaaagccagcaactgacgaaagacctctacgcgaacctgtcgccatggcaggtttcgcagatcgcgcggcatccgcagcgtccgtacacgctcgattacgttgcggaactgtttaccgattttcacgagctgcatggcgaccgcgcgttcgcggacgacctgtcgatcgtcggcggtctcgcgcgcttcggcggccatccgtgcatggtgatcggtcaccagaagggccgcgacacgaaggagcgcgccgcgcgcaacttcgggatgccgcgcccggaaggctatcgcaaggccgaacggctgatgcgtctggccgagaagttcgggctgccgatcttcacgttcgtcgacacgccgggtgcgtacccgggtatcggcgcggaagagcgcggccagtcggaggcgatcggccgcaacctgtacgtgatggccgagctgaagacgccaatcatcacgacggtgatcggcgagggcggctcgggcggtgcgctggcgatcgcggtggccgacaccgtgatgatgctgcagttctcgacctactcggtgatctcgccggaaggctgtgcgtcgatcctgtggaagagcgccgcgaaggcgccggaagctgcggaagcgctcggcctgaccgcgcaccgtctgaaggcgcttggcctgatcgacaagatcatcaacgagccgctcggcggcgcgcatcgcgatccgaagggcatggccgcgctgctgcgccgtgcgctggccgattcgctgcgccagttccagggcatgagcatcgacgcgctgcgcgagcgtcgcttcgagcgcctgatggcctacggcaagttcaaggaaaccacgccgggcgca

SEQ ID NO: 11514 - DNA, 747 bp, Burkholderia cepacia
atgacgcaccgttcaacctggctgcgcgttgccgcagcattctgcgtcgcgggcgcggcgtggtcggccgcgccggcgcacgccggcatgttcgacgacaacgaagcgcgccgtgccgtgctcgatctgcgcagcaagagcgacaacctgtcgagccaattgtcggccgcccagcgtacgatcctcgatcaatccggccgtatcgaccagctgaaccagcaggtcgcgacgctgcgcggcgagaacgaggatctgacgaaccggctgacgacgctcgagcggcagcagaaggagtactaccaggatctcgacacgcggctcaagaagttcgagccgcagcaggcgacgatcgatggtgtcgaaggcaccgtgcagccgggtgaaacggatgcgctcagcgcggcgcagcagcagttccgcaacggcaacttcaaggcggccgcggcttcgttccgcgcgttcatcgcgaagtatccgcagagtccctatcagccgaccgcgcagtactggtacggcaacgcgcaatacgcgctgcgcgactaccgcggctcgacggcgacgtggcaagggatcgtcagcaagttcccgcaacacccgcgcgcggccgacgccctcgtggcgatcggcacgaaccagctcgagcaaggccagaaggcggccgcgaagaagacgttcgagcaggtcgtgtcgcagtacgccggttcgaatgcggcgcagacggcgcagggcaaactcgaaacgatcaaa

SEQ ID NO: 11515 - DNA, 786 bp, Burkholderia cepacia
atgagtggaagcaacacaggcctcggcaccggcctgaagcagcgtcacgtgacgatgatgtcgattgccggcgtcatcggcgcgggcttgttcgtcggctccggccacgcgatcgcggaagccgggccggcatcgatactcgcgtatgcgatcgcgggcgtgctggtcgtgctggtgatgcgcatgctcggcgaaatggccgtcgcgcatccggacagcgggtcgttctcgacctatgccgatcgcgcgatcggccactgggccggcttcacgatcggctggctgtactggtggttctgggtgctggtgatcccgatcgaggcgaccgccgccgcgaccattctcaatgcgtggttcccgggcatcgcgacgtggatcttcgcgctcggcatcacgctgctgctcaccatcaccaacctcttttccgtcaagaactacggcgaattcgaattctggttcgcgctgatcaaggtcgtcgcgatcgtcgtgttcctgtgcatcggcggtgcggcgatcgtcggcatcagtcctgcgccgtccgtgtcgggcgtgtcgaacctgttcgtgcacgacggattcatgccgcacggcgcgagcgcggtgctcgcgacaaagctcaagacgatgttctcgttcctcggcaccgagatcgtgacgatcgcggccgccgaatcggacaacccgcaacgccagatcgtgcgcgcgacgaactcggtcatctggcgtatcacgctgttctatctcggctcgatcctcgtcgtcgcggccatcgtgccgtggaacgac

SEQ ID NO: 11516 - DNA, 210 bp, Burkholderia cepacia
atgacgatcattcgcgttaaagagaacgagccgttcgaagttgcaatgcgtcgcttcaagcgcacgatcgagaagaacggtctgctgaccgagcttcgcgcgcgcgagttttacgagaagccgaccgcagaacgcaagcgcaagaaggctgctgcggtgaagcgtcattacaagcgtattcgcagccagacgctgccgaagaagctgtac

SEQ ID NO: 11517 - DNA, 606 bp, Burkholderia cepacia
atggagcacgaagtgagcgaaagcatagcacgcaaccctgtgccgaacccgaaggttgcgctgcgcaaaacgctgtccggcgcccgtcgcgacgccgcgtcgcaacctgccgcgaacgccgcgctcgacgcgcggctgcgcatgctgctcgaccgtctcgcgccgcgcacggtcgggttctactggccgctgccgggcgaattcgatgcgcgcgatgcggtgctcgcatggtgcgcggcaggggccggccgctgcgccgcgctgccggtaatcggcgaacgtcacacgccgctcgcgttccacgcatgggacgcgcacacgccgatgcgcgaaggtcatcaccggattcccgaaccggcgtcgggaatcgtcgtcgtgcccgatcttttgctgattccctgtgtgggattcgatccgcagcgctaccggctcggctacggcggcggctactacgaccgcacgctcgccgcgtggccgggcgacacgctgcccgtgacggtcggcatcgcgtacgaagcgtgccgcgtcgatgcgctgccggccgagacgcacgatctcgcgctgcgctggatcgtcaccgacggcgcgctttacccggccgccgga

SEQ ID NO: 11518 - DNA, 606 bp, Burkholderia cepacia
atggaatacacgttcctgtcggccaccgtgctcctcgtgctgatcacggatccgctcggcaacatcccgctgttcatttcggcgatgcgggatgtgccgcgcgagcggcgcgtgaagctgatcctgcgtgaagtggggatcgcgttcatgatcctgctgttcttcatggtggtcggcgaccgcttcctgcggatgatgagcctcaccgacctgtcgctgcggctcggcggcgggatcgtgctgttcctgatcgcgctgcggatgattttcccgcatccggacggcgcgctcggcagcgatccgcgcgcgggcggcgagccgttcatcgtgccgctcgcgattccggcgctggccgggccgtccgcgctcgcgacggtgatgctgctgacgtcgcaggcgccgggcaagatgttcgagtgggtcggcgcgctgacggtcacgatgatcgtctgcgcgatcacgctggtgctggccgaaaggattcaggcgtggctcggcgaacggaccgtcgcggcgttcgagcggctgatgggcctcgtgctcgtcgcgatctcggtcgagatgctgctcgcgggcattcgcgcgttcgtgcaccagttgcagccg

SEQ ID NO: 11519 - DNA, 795 bp, Burkholderia cepacia
atgatcgaaacgcccacgtcgggcagcctgacgatcgacggcaagaacgtggccggcgcgagccgcgacacggtcgccgacctgcgccgccgcgtgcagatggtgttccagaacccgttcgcgtcgctgaatccgcgcaagaccgtcgagcagacgctcgccgagccgctcgagatcaacgcgaacctgacggccgccgagcgcgctgcgcgcatcgcgcagatcatgcgcacggtcggcctgcggcccgagcacgcgaagcgctatccgcacatgttctcgggcggccagcgccagcgcgtcgcgatcgcgcgcgcgatgatcctcgatccgcgcatcgtcgtcgccgacgagccggtgtccgcgctcgacgtgtcgatccaggcgcagatcctgaacctgttcatggatctgcaggagcagttcaagacgagctacgtgttcatctcgcacaacctgtcggtggtcgagcacgtcgcggacgacgtgatggtgatgtacttcggcagcgtcgcggaactcggcgacaaggcgacgatctacgcacggccgcgccatccgtacacgcgggcgctgatgtcggcgacgccggcgatcttcgaggaagaccgccgcgtgcagatcaagctgcagggcgaactgccgtcgccgctcaatccgccgtcgggctgcgcgttccaccagcgctgcccgtacgcggtcgagcggtgccgcgtcgaggagccgcaattgcgcgaagtggacggccggcgcgtggcctgccatcgcgccgaggaggtaggggaggcgaatgcc

SEQ ID NO: 11520 - DNA, 885 bp, Burkholderia cepacia
ttggcccttcctgcgagtccgggcatacccgtatcgcgccccatttccagtaagcaagaaagcgagaaacagatgaagcgtcgcagtctcctgaaggtattttccgtgctggccaccggcgccgcgctgacgctgtcggcaggcgcgcacgccgaagacaaggtgatcaaggtcggcacggtcgccggcccggattcggaagtgtggcaagtcgtgcagaaggtcgcgaaagagaaggaaggcctgaacgtgaaggtcatcgagttcaacgactacgtgcagccgaacgcggcgctcgattcgggcgatctcgacgcgaacagcttccagcaccagccctacctcgacagccaggtgaagcagcgcggctacaagatcgtcagcgcgggcctgacctacatctcgccgatcggcgtgtactcgaagaagttcaagtcgctgaaggatctgccgcagggcgcgaagctcgcggtgccgaacgatccgtcgaacgagaaccgcgcgctgctgctgctgcagacgcaaggcgtgatcaagctgaaggccggcgccggcacgggcggcaacaacgcgacggtgctcgacatcgccgagaacccgaagaagctgaagatctccgaactcgacgccgcgcaactgccgcgcgtgctgtcggacgtcgacgcggccgtgatcaacacgaactacgcgctggccgcgaatctgcagccgaccaaggacgcgatcgcgctcgaatcgctgacgagcccgtacgcgaacctgatcgccgtgcgcgcgaaggacaaggatcagccgtgggtgaagaagctggtcaaggcgtaccagtcgccggaagtgaaggaattcatcaagaagcagttcaagggctcgatggtcgcgtcgttc

SEQ ID NO: 11521 - DNA, 891 bp, Burkholderia cepacia
atgaacgcgactgtccagaccgcggcgccggccgcaccgaccgcgatccgcacgccgtggcgcgaattctggcgcaagttccgcaagcagaccgtcgcgctcgtcgcgggcggcttcgtgctggcgctcgtcgtgctggcgttcgtcggcccgcacatcgtgccgttcgatccggagaactatttcgactacgacgcgctgaacgcggggccgtcggccgtgcactggttcggcgtcgattcgctcggccgcgacatcttcagccggatcgtcgcgggcacgcgcatctcgctcgcggccggcttcttctcggtggcgctcggcgcggtgatcggcacgttcttcgggctgctcgccggctactacgaaggctggtgggaccgcatcacgatgcgcatcgccgacgtgctgttcgcgttcccgggcatcctgctcgcaatcggcgtggtcgcgatcctcggcaacgggatggtcaacgtgatctgcgcggtcgcgatcttcagcatcccggcgttcgcgcggctcgtgcgcggcaacacgctgatgctcaagcacatgacctacgtcgaggccgcgcgcagcatcggcgcgtccgactggacgatcatcatgcggcacatcctgccgggcaccgtgtcgtcggtcgtcgtctacttcacgatgcggatcggcacgtcgatcatcaccgccgcgagcctgtcgttcctcgggctcggcgcgcagccgccgacgccggagtggggcgcgatgctcaacgaggcgcgcgcggacatggtgacggcgccgcacatcgcggtgttcccgagcctggcgatcttcctgaccgtgctcgcgttcaacctgctcggcgacgggctgcgcgacgcgctcgacccgaagctggagcgccgt

SEQ ID NO: 11522 - DNA, 1590 bp, Burkholderia cepacia
atgaatcaacctgcttcgtccgccccgaacaatccgggctccgtcgcgcgcacccggcaggtcggctatgccgccttcctgctggtgctcgtgctcggcgccgtctatatcgccacccacctggtcgccgatctggcgccggtccgcgaagggacgctgttcccgtacctgctgctcggcgccgccctgctgatcgcgctgggcttcgaattcgtcaacggcttccacgacaccgcgaatgcggtcgcgaccgtgatctatacgcactcgctgacgccgaacgtcgcggtgatctggtcgggcatgtggaacttccttggcgtgatggtctcgagcggcgccgtcgcgttcggcatcctgcagttgctgccggtcgagctgatcctgcaggtcggcagcggctcgggcttcgcgatggtgttcgcgctgctgatcgccgcgatcgtgtggaacctcgcgacctggtatttcgggctgccgtcgtcgagctcgcatacgctgatcgggtcgatcatcggcgtcgggctgatgaaccagctgatgcatgggccgtccggcacgagcggcgtcgactggggccaggcgctcggggtcggcaagtcgctgctgctctcgccgatcgtcggcttcctgtgcgcgtcgctgctgctgctcgtgctgaaggcgctcgtgcggattccggagctgtacaaggagccgccgaaggatcagccgccgccgttctggattcgctgcctgctgatcctcacctgcaccggcgtgtcgttcgcccacgggtcgaacgacgggcagaaagggatggggctcatcatgctgatcctgatcggcacggtgccgaccgcgtatgcgctgaacaaggccgtcacgcccgccgaatcgcagaccttcgtggcggtcgcgaaccaggcggctgcgacgttcgggaagtacacgaacggcatcgcgccgtccgcgaacccgcgtgccgatgtcgaacattacgtgcagcaccgtgaactgacacccgccgtgctgccggccgtcgcgcagctgtccacgtcgctcgcgaccgccgtcggcgcgtcgggctcgatggcggccgtgccgcaacgcgacgtcgacaacgtgcgcaacacgatgtacctcgtgtccgaggccattcgcctgatcgagaagtcggggcaacccgcgttcgccgccgccgacaagctcgcgatcgacaactaccgcaagcagctcgaccacgcgaccaagttcattccgacgtgggtgaaggtcgccgtcgcgatcgcgctgggcctcggcacgatggtcggctggaagcgcatcgtcgtgaccgtcggcgaaaaaatcggcaagcagcatctgacctacggacaaggcgcatcggccgaactcgtcgcgatgctgacgatcggtgccgccgacatgtacgggctgcccgtgtcgacgactcacgtgctgtcgtcgggcgtcgcgggcacgatggcggcgaacggttccgggttgcaatggagcacggtgcgcagcctcgttctcgcgtgggtgctgacgctgccggcgtcgatcgcactcgcggcggggctttactggttgttccggtcgctggcc

SEQ ID NO: 11523 - DNA, 1587 bp, Burkholderia cepacia
atgcagccagcgtcgccgatcggccgcggccggacttgtggtttttcgtcgcgaaccatcgccaaaacgcactttcgggccggccggcgcggcgcttggcggcgctatcccacgccgatgccgtttttgttctatcggccgattttacgctttgatgtactggggcccaacgacatttcacgcatgcaacccaaaggaagccagatgaacgtcagcgcgttcgacctgttcaagatcggcatcggcccgtccagttcgcatacggtcggcccgatgatcgccgcgtgccgcttcgcgtcgcacgtcgaggacgcgaacctgctcggcttcgtgcgccgcgtgcgggtcgagctgtacggctcgctcggcgcgaccggcaagggccacggcaccgacaaggccgtgctgctcggcctcgagggccacctgcccgacacgatcgatccggacctgatcgagccgcggctcgccgcgatccgcgcggagaagacgctgtcgctgctcggcaagcagacggtgcgcttcgaggaaaaggagcacatcggcttctttcgcaagctgatgagcggcacgagcatcgtgcacccgaacgggatgcgcttccaggcgttcgacgaacacggccagttgctcgtcgagaaggagtattactcggtcggcggcggcttcgtcgtgaaccgggacggcgatcgcgtgaacggcgtgcgggcggcggtcgacgtgccgtatccgttccgcaccggcgacgacctgatgcgccagtgccgcgagcacgggctgtcgatcgccgaactgatgctgcgcaacgaatgcgcgctgcgccccgccgacgaagtgcgcgccgggttgctcgcgatctggcgcacgatggccgcctgcgtcgagcgcggctgcaaggtcgagggcgatctgccgggcccgatgcgcgtgaagcgtcgcgcggccgagttgaatggccgcctgcgcgcgcgttcggaagagtcgctgcgcgatccgctgtcgatgctcgactgggtcaacctgtatgcgatggccgtgaacgaagagaacgcggccggcggccgggtcgtcaccgcgccgaccaacggcgcggccggcgtgatccccgcggtgctgcactactacgtgaagttcgtgccgggctcgaacgaagccggcatcgtcgaattcctgctgacggccgcggcgatcgggatcatctacaaggaaaccgcgtcgatctccggcgcggaagtcggctgccagggcgaagtgggcgtcgcgtgctcgatggccgcggccgcgctcgccgccgtgatgggcggcacgccggaccaggtcgagaatgcggccgagatcggcatggagcacaacctcgggatgacctgcgacccggtcggcgggctcgtgcagatcccgtgcatcgagcgcaacgcgatgggcgcgatcaaggcgctgaacgcgtcgcgcatggcgctcaagggcaacggccagcactacgtatcgctcgattccgtgatcaagacgatgcgcgaaaccggcgccgacatgaagacgaaatacaaggaaacgtcgcgcggcggtctcgccgtgaacgtcatcgaatgc

SEQ ID NO: 11524 - DNA, 897 bp, Burkholderia cepacia
gtgcggctccagcgcatcaagtcgcaattgcatcgctgcgtgcgcccgcgatcagagcggcggcggcggcagcggcgcgcgcggcgccacgcccggcaccacgtcctccggcgccggcgtcagcgagtggacgatcgcgaggcgccgcatcagctggtcgaccgcgtcgttctgcatgtcgccgtacaggatgtcggcttcctgcgccttcgcgttcgtgtactggtcgctgtacgtcatcgcgcggttcagcgcgatcgcgctcggcgggatcagcacggtgccgtccttgctcgtcagcgtgtagttcagcgtgtagaacagcgcgtattcctgcgcggagccgtacttgttgagcgtcagcgtgttctggccacgcgactcccacatgcgcagcacggcgtcggcgtcgtccgccgacttgacgatcttcgtgtcgctgccggcctggacgaggcgcgtgagccgcgcctcgacgggcgccggcgcaccggccacgaacaggtgcttgaacgcgtagtcctgctggccgcgcaactggaagccgcatgccgacagcgcgaccgcgctgccgacgagcatcaaaaacgatctgcggatcaccttcgctccttctgggtacgtccgacggccggcggccgtcagacgacgatgttcacgaggcggcccggcacgacgacgatcttcttcgccggcttgccgtcgctgaacttcgcgaatgcctcgtcggcgaccgccgccgcttcgatcgcgtcgcggctcgcatccttcgcgaccttcagcgcaccgcgcaccttgccgttcacctgcagcacgagttcgatctcggcctgctcgagcgcggcctcgtcgaccttcggccacggcgcatcgagcagcgggccgaattcgtccgcg

SEQ ID NO: 11525 - DNA, 4241 bp, Burkholderia cepacia
ggtggcggaaacgacccgggcgcgcggcaagcgctcgggcagcgcatcgggggcaagtcgccgcaccgcgcacgaggcaacgcgtcacgccacgcgccggtcgccactgcgcgtcgcggcgctcggcgccgccctggccgcgctgtcggtcggcaccgtacacgcgtcgacctgcggcaacggcgccgcaatcgcgagcggcggcacctgcgtgctcgacagtttcaacccgaccgtcaacaacgacctcgtcggcgccacgaccgtgtcgggcggcgaccgggtcggcctgacgggcgcctggacgggcgcgaccggcgacatgggctacacgccgatgccgctcgccaacacgtccatcatttcgggcaactcgaatcagccgttggtcacgctcggcggcaagacgcaaagcgtcggcacccccgattcgatcacgggcggtcgcacgtccgtcgccacctacgactcgtccgcgttcgtgtcgtcgaacgccggctcgaccgtcgtgcaggtgtaccacgacgtgaacggcgaccagtacgtgaacacgcggatcggcacggtcgcaagctcgggcggcacgctcgacgtctcgatcggcaacgcggcgaacgcgcccgcggcgaccggcaacgtgatgacgatcgcggccaagcagagcgatctcacctacgcggacggcaccggctcggtcccgagcgtcatcaactggaattcgcgcaaccagatctggttcatcaccggcgactatctcgcgagcggcggccccgtcggcagcatccagctcgacgtgccgacctacgcgggcaccttcaccgcgttcgacggcagcacgtggaccgtcaccgatgccgcgtcgctcgccgcgtacaacgactttctcgtgcgttcggtccgcaacggcgcgctcggctcgcagaccgcctacgacaacgcattcggccaggccgtgacgctctccccgcagaccttcgagtatgcgaacaacgtgtcgcccggcgacaagaacgcgctgccccggaactacccgtccgcgatgcacggcacgggcgcaaacgcgacgctgcacatcggcgaggacggccagatcgacttccgcggctccaacacgatcgacgcgagcgcggcggtcgtcgcggagaacggtgcgcacttcgtcaacgacgggcgcctgtcgggcgacttcacgctggtgcgcctgctgagcggcgcgagcggcgtcaacaacggcacgatctcatccggctacacggccggcgacaacgtcgacacgggcaccgcccggcccgacaacttcgggctcggcacgtatgtcgaaggcagcggcgtgtatgcgaacggcgcgggcaccacgttcgtcaacaacggcgtgatgaacgtcggcgcgtgggatctcacccgcaaccggctcgacctgcagaactacgcggtggccgcgacggacggcgcgcacgcgtcgaacgccggcacgatcaacgtcggcgtcaacgcgacgacgctggacagccaggtgatcggcggcctcgtcgccggcggcagcttcacgaacgaagccggcggcacgatctatctcggccgcgccgcgcagtacgacgtcgccgcgcccgaagccacgaacgacgtcgcgctcgccgcgcacgcgtacggcatcctgctcggcgcgtcgggcaccgcgagcaatctcggcacgatcgtgatcggcacgcagacccagaacggcgccgcgctggcgagcatcggctcgacttccggcacgctgaccaacgcgggcgcgatcgtcgtcaacggcgccgcggccggcacgccgctcgccaacgtcggcatgctggcggccaacaccgccgcgaccgtgaccaacacgggcacgatcacgctgaatggcgtgaacggcatcggcatcatggtcgtcggcaccggcacgaacgcgacggccgcgacgtcgaccggcacgatcaacgtggcgggtggcctcgatcctgcgtcgggcacgcgcaactatggcgtctgggccgaggggccgctcgcgaaggccacgctcgacggcgcgctgaacctgacgggcgcgggcgcgatcggcgtgcatgcgcgttcgggcgcgacgatcgacgtcggcgcgaacgccgtgccggccttcatgtccggcaccaaccagatcggcttctacgcctacggcgcgggctcgaaaatcaacgtcgccgcgcagcacctgagcgtcgacaccgacgattcgacgctgttccgcgtcgcgggtggcgcggcctacacgggtgcatccacggccggcgtgctgacgaccgacgtcaacggccagcgctcgcgcggcgtactcgcaaccgacgccggcaccacgctgtcgaccggcaacgcggtctacgacgtcaacggcgcgaacggcatcgcgatcgcggtcgaaggcggcgcgaagggcacgatcgacgccggcgcgacgatcaacctgaacgcggccggcgcgacggcgggcgtcgtcgacgggcaggcgcacgacctcgccggcgcgaatgccggcgcgccggtcgcgacgacgctgaccaaccacgcggccgtcacgtcgtcgaccgccggcgtgaccggcttcatcgcgcagaatctcggcacgctcgagaaccgcagcacggtgctgctgaccggcgccggctcgacgggcgtcgtggccggcacgctcggcacggtgaacaacgcgtcgacgatccgcgtgaccaacggcaccggcgcgctcgtgcagggtgcgtcggccacgctcgccaatgcgggttcgatcgaagccgacgacggtgtcgcgggcgtgcgtctgacgggggccggcgcatcggtcgcgttgtcgggcgccggcaccgtcatcgcgaacggcaacgccgacggcgtgctgatcgactcgaccgtcacgggcggcggcatcgcggccggcgcgacgtcgatcgcggtcggcggctcgggcagcggggtccgcaacctcggtgcgaatgcaacgatcgcgctgtccggcacgcaggtcgccacgaccggcaacggcgccgacggcctcacatcgaccggcgccggcgcgcgtatcgcgaccgatgcggccacggtcgtccgcacggcgggggccgatgcgcgcggcgtgtccgtgtcaggcgccgactccacgctcacggccaacgggacgaccatcgcgacgaccggcgcgaacgcgcatgcgatcatcatggacggtggcgcgacagccctgctgtcgggcgcgaaagtcaccgcgtcgggcaacgcggccgacggcatcgtcgcgcaaaacggcggccgcatcgccgatacgggttcgtcgctcgccagcgcggccggcagcggcgccaccgcgaacagcggcggcgtgctcgcgttgaccggcacggcgctcacgggcgcgacggccggcgtgctgacgtcggacacgctcgcgaacggcgcgaccagctcggtgctcatcgacggcggcagcgtgacgtccgccaccgggccggccttcgccgcgcgcggcggcacggccgacatcgcggtgcgcaacggcacggtcgtgacggccggcaacggcacgctgctgaatctcgcgaacggcagcaacgtcacgttcagcgcatcggcggtcaacctcgcgggcgacatcgtgtcggacgcgtcgagcaccggcaacgtgttcctcgcgaacggcaccacgctgaccggcaagatcgacccggtcgcgctgaccgtcgacggcacgagcacgtggcgcatgacgggcagctcggtgctgagcagcctgaccaacgcgggcctcgtcgcgttcgccgcgccgaccggctcgccgacgctgacgggcagctacaagacgctgacgaccggcggctacgtcggcaacggcggcacgatcgcgctgaacacgtatctcggcgccgacgcatcgccgaccgaccggctgatcgtgaacggcggcgcggcgaccggcacgaccggcctgaagatcgccaacacggccggcgccggcgcgcagacgaccggcgacgggattgccgtggtcgtcacggccaacggcggcacgaccaccgcgtcggcgttccatctcgccggcccggtacaggccggcgcgtacgaataccggctctatcgcggcgggcaaggcgatgcgaacggctggtacctgcgttcgcagctcgacccgaccgacccggtcgacccgatccacccgtccggcggcggcgacggcggcagcacggggaatggcaacg

SEQ ID NO: 11526 - DNA, 837 bp, Burkholderia cepacia
gtgtccgtggagaccgtgtcgcacagaaaccggatgcaccacgccaaggaacgcaccatgaagagactgattgccgctgtttcgatcgccctgctcgcggtatccgcaggccccgccgtcgcgaaggactggaccacgatccgcttcggcaccgatgccagctacgcgccgttcgagtcgaaagcgcccgacggcaagctcgtcggcttcgacatcgacctcggcaacgagatctgcgcgcgcctgaaggcgaaatgcgtgtggctcgagaacgatttcgacgggatgattccggcgctgaaggcgaagaagttcgacgcggtgctgtcgtcgatgtcgatcacgccgcaacgcgcgcagcagatcggcttcacgacgaagatctacaaccagccgacgcggctcgtcgtgaagaagggctcgccgctgctgccgaccgccgaatcgctgaagggcaaatcgatcggcgtcgaacagggcacgacgcaggagacgtatgcgaaggcgtactggggcaagcaaggcgcgaacgtcgtgtcgtaccagaaccaggacggcgtgtatgccgacctgatcgccggccgtctcgacgcggcgctgcaggatgaagtgcaggccgcgatcgggttcctgaaatcgccgcgcggcgcgaactacacgttcgtcgggcccgagctcgtcgacgaaaaggtgctcggcatcggcgcgggcatcggcttgcgccaggaagataccgacctgaaggcgaagatcgatcgcgcgatcctcgacatggtcaaggacggcacctacaagcggctcgcgtcaaagtacttcgacttcgacatctacggcagt

SEQ ID NO: 11527 - DNA, 858 bp, Burkholderia cepacia
atgatgcggcgtgcgcgtcgtcggacgcgcggcttacaaggattgaacaagatgaaccagatgaatcccgccttcgtgatgcccgacgtgcagagcacggtggatacccgtcagatcccgattcagcgcgtcggcgtgaaggcggtccggcatccgttgacggtatgcaccgaaagcggcgacgtgcaaccgaccgtcggtgtctggaacctcgacgtccgtctgccggccgaccagaaaggcacgcacatgtcgcgcttcgtcgcgctgctcgaagagaatcgcgcgccgctgacggtcgagcgcttccgcgcgatgctcgcgtcgatgctcgagaagctcgaggccgaggccggccgcatcgaagtcacgttcccgtatttcgtgaacaagacggcgccggtgtccggcgtgcaaagcctgctcgactatgaagtgacgctcgcgggcgaaagccgcaacggcgatacgcgcctgttcctgaaggtgctcgtgccggtgacgagcctgtgcccgtgctcgaagaagatctcgcagtacggcgcgcacaaccagcgctcgcacgtgacgatcgacgcggagctggctgcggatctgccggtcgaggcgctgatccgcatcgcggaagaagaggcgtcgtgcgaactgtggggtctgctgaagcggccggacgagaagttcgtgaccgagcgtgcatacgagaacccgaagttcgtcgaggatctcgtgcgcgacgtcgcgcagcgtctcgatgcggacgagcgggtggtcgcctacgtgctcgaagccgagaacttcgagtcgatccacaatcacagcgcgtatgcgctgatcgagcgcgacaagcggcaggctgca

SEQ ID NO: 11528 - DNA, 1410 bp, Burkholderia cepacia
gaaggcggcgcaggcgcccaggctaacggcgcggccgcgccggcagcagcgccggctcccgcagcggcgccggccgctgctgcgcccgctgccgccccggcagcatccggcggcacgctcgaagtgaaggtgcccgacatcggcgactacaaggacgttccggtgatcgagatctgtgtgaaggtcggcgacacggtcgagaaggaacagtcgctcgtagcgctcgaatcggacaaggcgacgatggacgtgccgagcccggccgccggcgtcgtgaaggacatcaaggtcaaggtgggcgattcggtgtcggaaggcacgctgatcgtgctgctcgaagccgccggcgcaccggctgccgcaccgcaggccagcgcaccggctccggccgctgccgcgcccgcgcctgccgctgcaccggcgcccgcgcctgcgaaggctgcgccggcaccggcagccgccgccccggccgccgcgccgtcgggcgaatcccgcgccagccacgcatcgccgtcggtccgcaagttcgcacgcgaactcggcgtcgacgtcgcacgcgtgcagggttcgggtccgaagggccgcattacgaaggaagacgtcacgggcttcgtgaagggcgtgatgacgggccagcgtgcggcgccgggcgcggcagccgcgccggcaggcggcggcgagctgaacctgctgccgtggccgaaggtcgacttctcgaagttcggcccgttcgaggcgaagccgctgtcgcgcatcaagaagatctcgggcgcgaacctgcatcgcaactgggtgatgatcccgcacgtcacgaacaacgacgaagcggacatcaccgagctcgaggcgctgcgcgtccagctgaacaaggagcacgaaaaggcgggcgtgaagttcacgatgctcgcgttcgtgatcaaggcagtcgtcgccgcgctgaagaaattcccgaccttcaacgcgagcctcgacggcgacaacctcgtgttcaagcagtacttccacgtcggtttcgcggccgatacgccgaacggcctcgtcgtgccggtgatccgcgatgcggacaagaagggcctcgtcgacatcgcgaaggaaatgagcgacctgtcgaaggccgcgcgcgaaggcaagctgaagccggaccagatgcagggcggctgcttctcgatctcgtcgctcggcgggatcggcgggacgaacttcacgccgatcatcaacgcgccggaagtggcgatcctcgggttgtcgcgcggccagatgaagccggtgtgggacggcaagcagttcgtgccgcgtctcatgctgccgctgtcgctgtcgtatgaccatcgcgtgatcgatggcgcggaagccgcgcggttcaatgcgtatctcggcgcgttgctcggcgatttccgtcgcatcattctt

SEQ ID NO: 11529 - DNA, 432 bp, Burkholderia cepacia
atgaacaacatgacgcgttacgatccgttctcgctcgaacccgtttccgacctgttccagggcctgttcaggccgctgcgcgggatgacgctggccgacgagccggatcttgcatcgatgaagatcgacgtcaccgaaaacgacaacgcatacacggtcaacgcggaactgcccggcgtcgccaaggacgatatcgacgtccaggtgacgggcaataccgtatcgatcaacgcgaagatcgagcgcaacaacgaacagaaggacggtgaacgcgtgatccggcgcgaacgctacagcggtgcggtcagtcgttcgttctcgctgtcgggcgagatcgacgacgcgaacgcgacggcgacgtatcaggatggcgtgctgtcgctgacactaccgaagaaggcgccggtcgggcagaagaagctcgcgatcagc

SEQ ID NO: 11530 - DNA, 915 bp, Burkholderia cepacia
  misc_feature (168)..(168): n=g, a, t or c
atgttgaagcagcgcaccatcaaatccatcgtgaagaccgtgggtatcggtgtccactcgggccgcaagatcgagttgacgctccgtcccgccgcgcccggcacgggcatcgtcttttcacgcgtcgacctgcccacgccggtcgacattcccgcatcggcgatgtcnatcggcgacacgcggctcgcgtcggtgttgcagaacgatggcgtgcgcgtgtcgacggtcgagcacctgatgtccgcgtgtgccggtctcggcatcgacaacctgtatgtcgatgtgacggccgaggaaatcccgatcatggacggcagcgccgccacgttcgtgttcctgatccagtccgccggcatcgaggaacagaacgcgccgaagcgtttcatcaaggtgaagaagccggtcgaaatccgtgacggcgacaagttcgcgcggctggatccgtatttcggcttcaagctgaagttctcgatcgacttccgtcacccggccgtcgacaagacgggccaggaactcgaggtcgatttcgcgaccacgtcgtacgttcgcgagatcgcgcgtgcgcgcacgttcggtttcgcgcacgaagccgagatgctgcgcgagatcggcctggcgcgcggcggcagcatggacaacgcgatcgtgctcgacgagtaccggatcctgaacaacgacgggctgcgctacgacgacgagttcgtgaagcacaagatgctcgacgcgatcggcgatctgtacgtgatcggccatccgctgctggcgtcgtacaccgcgtacaagtcgggccacggcctgaacaacgcgttgctgcgcgaactgctcgcgcacgaagacgcgtacgagattgtgacgttcgacgatccgcaggctgcaccgaaggggttcgcgttcgacgcgcagacggccttcgcg

SEQ ID NO: 11531 - DNA, 831 bp, Burkholderia cepacia
atgctttcgaaactgacccgctggttcgacgaccgccgccgcgaccgcgcgctgcgcagccatccgattcccgattcgctgtggcaggaaaccgtcgaacgcctgccgttcctcgccgccctgccgcccgacgcgctcgggcggctgcgcgagctgacgagcctgttcgtcgcgaaaaaatcgttttcgaccgcgcacgggctcgaactgaccgacgcgatgatcgtcgcgatcgccgcgcaggcctgcctgccggtgctgaatctggacctgtcgctgtacgacggctgggtcggcgtcgtcgtgtacccgggcgaattcgtgatccgcaagaccgtgcaggacgaggacggcgtcgtccacgaagtcgagcaggatgcgagcggcgaggcctgggaaggcggcccggtgatcctgtcgtgggaagacgcgcagatgacggacggccgggacgcgtacaacgtcgtgatccacgagttcgcgcacaagatcgacatggtcaacggcgcggccgacggctatccgcccctgtttcgccgctggcatgcgccgcacctcgacgcgcaggcgtgggccgacgtgttcgaacatgcgtacgaccagttctgcgcgcgcgtcgacgcggtgccggatcgcgcatgggcgcgcttcgagcgggattcgctgatcgatccctatgcggccgatcacccgtcggaattcttcgcggtatgcagcgaggcgctgttcgtgcgaccgaaagcgttcgagtccgaatttccggagctgtaccggctcctcgcgcgctactaccgacaggatccggccggcaccggcgcgctcgacgcaccg

SEQ ID NO: 11532 - DNA, 1356 bp, Burkholderia cepacia
atggaaggcatcctgatccagcacacgacgcaacgtcagctgtggttcggcgcgctgacggcgctcgtcatcctgctcacgctcgggatcgccgcgccgcatgcgaacgtcgcgctgccgcccgtcgagcccttcatgccgatgtgcgcgctcaccgtgttcacgaccgcgagcatcgccgcgttcttcctcggcgcgcagttcaccgtgacacgccagcccgtgctcggtgcgctcggcggcgcctatgcgttcaccgcgctcgccgtcgcgctgcaactgctcacctttcccggcgtgttcgcgccacatggcctgctcggcgcgcgcccgcaaagcgccgcgtggatgtgggtcttctggcatgccggctttccgtgcttcgtgatggccgcgctgttcgcacgcgaacggctgacgcgcgccccggtcggcgcgaaagagacgcgccgctggaccctcgcgctcgtcggtgggccggccatcgcggcggcgctgctgtgcgtgctcgcgctgaacgtgtcgctgccgcccgcgttccatccgccgcgcgacgcggccgtgctgcccgtcaacggcatcgcgctcgtcgtgtggatcctcaacgcgctcgcgctcgtggccgtgctggtcacgggccggctgcgcacgacgctcgacctgtggctcgcgatcgcggtgctcgcctgtctcaccgatacgacgctgaacctgctgtccaccaaccgcttcacggtcggctggtatgtcgcgcgcgtgttcagcatgttcacgcccggcgtgctcgtgtgcgtgctcgcgtgggaagtgacgatgctgtatcagcagttgttcgaagcgcacgcgacgctgatccgctcttccgcgcgcgacggtctcacgggcgcgttcaaccgcagccacttcaacgaccatttccatacgctgttcctgcaggcgcggcggcaaggcgaaccgctgtctctgctgatggtcgacgtcgatcgcttcaaggcgtacaacgacgcgttcggtcacgtgaagggcgatgcgtgcctgatcgccgttgcgaatgcactggccggcgcggtgcggcggccggccgacatcgtcgcgcgctacggcggcgaggagttcgcgatcgtgctgccgaacaccggcgcgcgcggtgcgcgggtggtggccgacgaagtgcgcgaagccgtgctgcggctcgacctcgcgatgcccgactcgccggccgggcgcgtgagcgtcagcgtcggttgcgcgaccgtgtcggccgacgatctgtcgacccccgacgcgttgatcgaagctgcggatgccgcgctgtatcgcgcgaaggatgcggggcgaaaccgggtcgtcgtcgcc

SEQ ID NO: 11533 - DNA, 555 bp, Burkholderia cepacia
atgagcgatactccggcatccccgagcggaaagcgttggtacgtcgtgcacgcctactccggtatggagaagagcgtgcaacgtgcgcttcaggagcgcatcgaacgtgctggcatgcaggacaaattcggtcagatcctggtcccgaccgaagaagtggtcgaagtcaaaggcggccacaaggcagtgaccgagcgtcgtttcttccccggctacgtgctcgtggaaatggaaatgacggacgaaacgtggcacctcgtgaagaacacggcgaaggtcaccggtttcgtcggcggtgcgcgtaaccgcccgaccccgatttccccgaaggaagtcgagaagatcatgtcgcagatgcaggaaggcgtcgaaaagccgcgcccaaagaccctgttcgaagtcggcgagatggtgcgcgtcaaggaaggcccgttcacggacttcaacggcaccgtcgaagaagtcaactacgaaaaatcgcgtgtgcgtgtgtcggtcacgatttttggccgatccaccccggtcgaactcgaattcggccaggtcgaaaaagtt

SEQ ID NO: 11534 - DNA, 1359 bp, Burkholderia cepacia
atgtcccaatcccccaaagtagggttcgtatccctcggctgcccgaaagcgctcgtcgattccgaacaaatcatcacgcaactgcgcgccgaaggttatgaaatctccggcacctacgacggcgccgacctcgtcgtcgtgaacacctgcggcttcatcgacgaagccgtgcaggaaagcctcgacgcgatcggcgaggcgctgaccgagaacggcaaggtgatcgtcaccggctgcctcggcgcgaagtcgagcgcgagcggctcgaacctgatcgaggaagtccacccgaaggtgctcgcggtcaccggcccgcacgcggtgggcgaagtgatgcaggccgtgcattcgcacctgccgaagccgcacgatccgttcgtcgacctcgtccctgcggccggcatcaagctcacgccgcgtcactacgcatacctgaagatctccgaaggctgcaatcaccgttgcacgttctgcatcatcccgtcgatgcgcggcgacctcgtgtcgcgcccggtcgccgaagtgatgctggaagccgagaacctgttcaagtcgggcgtgaaggaactgctcgtgatctcgcaggacacgagcgcgtacggcgtcgacgtgaagtaccgcacgggcttctggaacggcaagccgatcaagacgcgcatgaccgacctggtcgccgcgctcggcgaactcgccgcgcagtacggtgcgtgggtgcgtctgcactacgtgtatccgtatccgagcgtcgacgaagtgattccgctgatggcggaaggtccgttcaagggccacgtactgccgtatctcgacgtgccgttccagcacgcgcaccccgaggtgctgaagcgcatgaagcgccccgcgaacgcggagaaggtgctcgagcgcgtgcagaaatggcgcgagatctgcccggacctgacgatccgcagcacgttcatcgcgggtttccccggcgagacggaagaacagttcgagacgctgctcgacttcgtccgcgaagcggaactcgatcgcgtcggctgtttcgcgtattcgccggtcgaaggcgcgaccgcgaacgacctggacggcgcgctgccggacgaggtgcgcgaggaacgccgtgcacgcttcatggaagtcgccgaggaagtgtcggcgcaccgcatgcagcgcaaggtcggcaagacgctcaaggtgctgatcgacgaagtcggcgaggaaggcggcatcggccgtacggcagccgatgcgccggagatcgacggtgtcgtctacgtcgagccggcggcgaaggcatcgaagcgctacaaggtcggcgatttcgtgtccgtgaagatcacgggcgccgacggccacgatctgtggggcgaggtg

SEQ ID NO: 11535 - DNA, 352 bp, Burkholderia cepacia
atggcgagatataccgagcagttcaagctatcggtagtgaagcggtgcatcgggggggaagccatacgcgcggtggcgcgaacgcatggcttgagtcactcgacggtttcccagtggtacgccacataccaggctcatggtaaggacggcgtgcgtaggaagtacaactcatacgatgtggcgttcaggctcaaagttgttcagcacatgcgcgagcatggcgtgtcgagccaggaagccgcggccccggtttcattttctcacatccgagcgcggtgcttgcaatgggcttcgccgctatctttaaggctggttcacaacctacgggccccgcagcgcttattatccccta

SEQ ID NO: 11536 - DNA, 558 bp, Burkholderia cepacia
atgagtgtcgctgatgtgaagaagggcgtcgagcaaaagatgcagcgctcgatcgaagcgttcaagaacgatctggccaagatccgtacgggccgtgcgcacaccggtctgctcgatcacgtgcaggtcgactactacggctcgatggtgccgatctcgcaggtcgcgaacctgacgctcgtcgacgcgcgcacgatcggcgtgcagccgtgggaaaagaacatggtcgcgaaggtcgagaaggccatccgcgaagccgatctgggcctgaacccggcaacggccggcgacctgatccgcgtgccgatgcccgcgctgacggaagagcgccgccgcgagctgaccaaggtcgtgaagagcgaaggcgaaacggccaaggtcgcgatccgcaacctgcgccgcgacgcgaacgaagcgctgaagaagctcgtgaaggacaaggaaatctcggaagacgacgagcgccgtgcgagcgacgacgtgcagaagctgaccgacaagcacgttgccgaagtcgacaagctcgtgcagaccaaggaagccgagatcatgacggtc

SEQ ID NO: 11537 - DNA, 582 bp, Burkholderia cepacia
atgggcgtatccagacaacaggccgccgagaaccgaagcgcgatcgtcgcggccgccgaacggttgttccgcgtgcgcggcgtcgacgccgtggggctgacggagctgatgaaggaagccggcttcacgcaaggcggcttctacaaccacttcaaatcgaaagacgcgctggtcgccgaagtgatggaaaaggcgatgcacgaccgcgcggattcgccgaatgccggcagcctcgacgcgcaggtggccgcgtatctgtcacccgcgcatcgcgacaacctcgaggccggctgcccgctgtccggcttcgcgggcgatgcgccgcggctgaccgagacggcgcgcgcctgctacgcgcacgggctcgccgcgtatctcgatcgactggaacggatggtggcgaccgacggcgccacgccggagcagacgcgtcgcgacgcgctggcggtcttcagccagatggtcggtgcgctcgtgctgtcccgcgcgatcgccggcagcgatcccgcgctggccgacgagatcctcgacgcggggcgggacgcgctgaccggccgacgcggcgatccggtgacgtcggcg

SEQ ID NO: 11538 - DNA, 1191 bp, Burkholderia cepacia
atgtacaaccttcctgatgatcgcggccatttcggcccgtatggcggcgtgttcgtcgccgagacgctgattcacgcgctggacgaactgcgcgcggcgtatgaaaagttccagaacgatcccgacttcgtcgccgaattcgagcgcgagctgaagtatttcgtcggccgcccgtcgccgatctatcacgcgcagcgctggagcgagatgctcggcggcgcgcagatctacctgaagcgcgaagacctgaaccacacgggcgcgcacaagatcaacaacgtgatcggccaggcgctgctcgcgaagcgcatgggcaagaagcgcgtgatcgcggaaaccggcgccggccagcacggcgtcgcgaccgcgacgatctgcgcgcgcttcgggatggagtgcgtcgtctacatgggttcggaagacgtgcgccggcaggccgccaacgtctaccggatgaagctgctcggcgcgaccgtcgtgccggtcgaatcgggttcgcgcacgctgaaggacgcgctgaacgaagcgatgcgcgactgggtcacgaacatcgaaagcacgttctacatcatcggcacggtcgcgggcccgcacccgtatccgatgatggtgcgcgacttccagcgcgtgattggcgacgagtgcaaggtgcagatgcccgagctcgctggccggcagccggacgcggtgattgcgtgcgtgggcggcgggtcgaacgcgatgggcatcttctatccgtacatcgacgatacctcggtgcagctgatcggcgtcgaagcggccggcgacggcctcgatacgggccatcacgcggcatcgctgatcgccggcagcccgggcgtgctgcacggcaaccgcacgtacctgctgcaggacgacaacggccagatcatcgagacgcattcggtgtcggcgggcctcgactatccgggcgtcggccccgagcacgcatggctgaaggacagcggccgcgcgcagtacgtgccgatcagcgacgacgaggcgttgaaggcgttccacgactgctgccggatcgaggggatcattcccgcgctcgagtcgagtcacgcgatcgcgtatggcgtgaagctcgcgccgacgttgccgaaggacaagatcctgctcgtcaacttgtcgggccgcggcgacaaggacatgcacacggtcgccgagcgatcgggcatcgagctc

SEQ ID NO: 11539 - DNA, 1785 bp, Burkholderia cepacia
atgggacagtacgccgcgccgctgcgcgacatgcaattcgtgttgcacgagcttctgaacgtcgaagccgaagtcaagcaaatgcccaagcatgcggacctcgacgccgacacgatcaaccaggtcctcgaggaagcgggcaagttctgctccgaggtactgttccccctgaaccaggtcggtgaccgcgaaggctgcacgtatgaaggcgacggcgtcgtgaagaccccgaccggcttcaaggaagcgtatcagcaatacgtcgaggccggctggccggcgctcggctgcgatccggactacggcggccagggcctgcccgcgttcgtgaacaacgcactctacgaaatgctgaactcggcgaaccaggcgtggacgatgtatccgggcctgtcgcacggcgcgtacgaatgcctgcacgcgcacggcgcgccggaactgcagcagcaatatctgccgaagctggtgtcgggcgaatggacgggcacgatgtgcctgaccgagccgcactgcggcaccgacctcggcatcctgcgcaccaaggccgaaccgaacggcgacggctcgtactcgatcagcggcacgaagatcttcatctcgagcggcgagcacgacatgtcgaagaacatcatccacctcgtgctcgcgcgcctgccggacgcgccgcaaggcacgaaggggatctcgctgttcatcgtgccgaagttcattccggacgccgcgggcgagccgggcgagcgcaacggcatcaagtgcggctcgatcgaacacaagatgggcatccacggcaactcgacgtgcgtgatgaacctcgacggcgcgaagggctggatggtcggcgagccgaacaagggcttgaacgcgatgttcgtgatgatgaacgccgcgcgcctcggcgtcggcatgcagggcctcggcctcacggaagtcgcgtaccagaactcgctgacgtacgcgaaggaacgcctgcagatgcgttcgctgacgggcccgaaggcgccggacaagccggccgacccgatcatcgtgcacccggacgtgcgccgcatgctgctcacgcagaaggcctacgcggaaggcgcgcgcgcattcacgtactggtccgcgctgcagatcgacaaggagctgtcgcacgccgacgaagcggtgcgcaaggaagcggccgacctcgtcgcgctgctcacgccgatcatcaaggcgttcctgaccgacaacgcgttcgagtcgaccaaccacgcgatgcagatctacggcggccacggcttcatctccgagtggggcatggagcagtacgtgcgcgacgcgcggatcaacatgatctacgaaggcaccaactcgatccagtcgctcgacctgctgggccgcaaggtgctcggcgacatgggcgcgaagctgaagaagttcggcaagctcgtcaccgaattcgcggaagccgaaggcgtgaagccggagatggccgagttcatcaacccgctcgccgacatcggtgaaaaggtgcagaagctgacgatggaaatcggcatgaaggcgatgcagaaccccgacgaagtcggcgcggccgccgtgccgtacctgcgcaccgtcggccacctggtgttctcgtacttctgggcgcgcatggcgcgtctcgcactcgacaaggaagcgtcgggcgatccgttctacaagtcgaagctcgccaccgcccgcttctacttcgcgcgtctgctgcctgaaacggcatcgacgatccgcgccgcgcgcgccggttcgaagacgctgatggaagtcgacgaatcgctgttc

SEQ ID NO: 11540 - DNA, 768 bp, Burkholderia cepacia
ttgccgccgggcacggcgcccgcgcgctatgcgcccgatttccgcgcgcagctcgatgcgctcgttgcgctgcgcgtgccggtcgcgagcttcacgttcggcgtgctcgacgcggccgacgtcgcccgcctgaaagccgccggcacttatgtgatcggcaccgcgacgcacgtggccgaagggctcgcgtggcaggcggccggtgccgacgcgctgtccgcgcagggcgccgaggccggcggccatcgcggcaccttcatcggctccgccgacgacgcgctgatcggcacgctcgcgctcgtcccgcaactcgtcgacgcgacggggctgcccgtgctggccgcgggcggcatcatggacggccgcgggatcgcggccgcgctcgcgctcggcgcgcaggccgcgcaactcggcaccgcgttcctcacgtgcgcggaaagcgcgatcgccgcggactggaaggcgcgtctgctcgcgagcgccgatacgtcgacgcaggtcacgcgcgcgattaccggccgtcacgcacgcgggctgcgcaacacgctgatggcgcggctcggcgagcacgtggccgacgcggcaccgtatccggtgcagaacgcgctgacccagccgctgcgccaggccgccgcgcgcgcgaacgacggcgactatctgtcgctgtgggccgggcagggcgcacccctcgcgcggcggcgcggcgacacgctgacgacgtcgcaactggttgccgcgctcgacgccgaatggcgcgcctcggccgcc

SEQ ID NO: 11541 - DNA, 492 bp, Burkholderia cepacia
ttgtacgatgccgccaggcgtaaagtcggttgcttggccgattgcctttgctccgatcatccacatcgatttgacgatggcatctccgatcgccgggccgttgtacagaatccaccagaagaagcccagggtgccgaaaaatcgaatcgattcagcaaagaactcttgaatgtccgagcggcgcatcgccatcattccgtacgtccacaccatgctgacgagcgccaatccccagaagagccacgatccgtagctcaccatgacgccgccccacgaactggccgcagattggtacttgcccatcaccgaatcaacgacattgacgtccatcggtgcggcaaaggcagtcgcaacgtgaaggagcatcatcaaaccgagcgcaaaaagattgcctcgtttgaaaaacatggatctcatagcgtggccctcactgatttttcttcggttgttgagacggtgcatcgccccacgtccagttcttcggcggagagc

SEQ ID NO: 11542 - DNA, 1521 bp, Burkholderia cepacia
atgccgatttccgatctttccgcccggttcgccccccgcgcccgcgtctgcctgcgcgcggccgccgtcgtcgccacctgcacggccctcgcgttcgcgccgtccgcccaggcccgcaagaaatcccacaaggaaacgcgcaagaccgccgtcgtgtcgccggccgcgcgcgcggccggcctgccggcctccgtgctcgtcgcgctacagcgtgcgaaggtgccggcgtcggcgatgagcgtggtggtcgagcgcgtcggcgatccgcagccgctgatcgcgtggaatgcgagccggccgatgctgccggcctcgacgatgaagctcgtgacgaccttctcgggcctgtcgatcctcggccccgactaccgctggcgcaccaccgcgtacacggacggcacggtcgacccggacggcacgctgcagggcaacctgtacatcaagggcaccggcgatccgaagctcgtgcccgaggagctgatcgacctcgtcgacaagctgcgcaaggccggcgtcaagcgcgtggccggcggcctcgtgctcgacaagagttatttcgcggcgtcgacgcgcgacctgccgtcgttcgacgacgatgccagcgcgccgtacaacgtcggccccgatccgctgctgtacgcgttcaaggccgtgtcgttcacggtcacgccgggcgacgacggcaaggtcgccgtcgacgtgttgccgccgctcgcggacctgtcgatcgacaaccagctcgtcgaaggttcgggctcgtgcagcgcggccgcgcgcccgacgctgacggccggcggcggaatcatgacggcgtcgttcgccggcgactacccgctgcgctgcggcgcgcacacgaccaacctcgcgatcctcgatcacacgaccttcttcgcgcgcggcttcctcgcgctgtggcagcaggacggcggcacgatcgccgggcccgtgagcgaaggcaaggtgccgaccaccgcgcggccgctcgccgtgcatcacagcccggtgctcggcagcatcgtctacgacatcaacaagttcagcaacaacgtgatggcgcgcaacctgttcctgacgatcggcgcggtcagcggcaagccgcccgcgacgcccgagcagtcgagccgcgcgatccaggcattcctgcagaagaacggcattgcgatgcccgacctcgtgctcgagaacggctcggggctgtcgcgccaagagcacgtgagcgcgctgtctctcgccgcgctgctgcaggccgcgaacgcgagcccggtcgcgcaggcgttcatcgattcgctgccgatcgcgggcatcgacggcacgatgaagaaccgcctcaccaacgcgggcgtgctcggcaacgcgcacatcaagaccggcacgctgcgcgacgtgcgcgcgatcgccggctacgtggccggcgcggacggccagagctacatcgtcgtcagcttcatcaacaacgatcacgcggaagccgcgcgcgccgcgcacgacacgctgctcgaatggatctacgcgggcgcgcac

SEQ ID NO: 11543 - DNA, 1350 bp, Burkholderia cepacia
atgccgccgcgcgccccgcctggggcgccggcgtttgaagccgtctttgccagactgtccccgcacgccatgaaagctgccgaaatccgcgagaaattcctcaaattcttcgaatcgaagggccacacgatcgtccgctcgtcgagcctcgtgcccggtaacgaccccacgctgatgttcacgaactcgggcatggtccagttcaaggacgtcttcctcggcacggacccgcgcccgtactcgcgcgccacgacggcgcagcgcagcgtgcgcgcgggcggcaagcacaacgacctcgagaacgtcggctacacggcgcgccaccacacgttcttcgagatgctcggcaacttctcgttcggcgactacttcaagcacgacgcgatcaagttcgcgtgggagctgctgaccgcggtctaccagctgccgaaggaaaaactgtgggtcaccgtctaccaggaagacgacgaggcatacgacatctgggcgaaggaagtcggcgtgccgaccgagcggatcatccggatcggcgacaacaagggcgcgcgctacgcatcggacaacttctggacgatgggcgacaccggcccgtgcggcccgtgtaccgagatcttctacgaccacggcccggacgtgtggggcgggccgccggggtcgcccgaggaagacggcgaccgctacatcgagatctggaacctcgtgttcatgcagttcaaccgcgacgcgcagggcaacatgacgcgcctgccgaagcagtcggtcgacaccggcatgggcctcgagcgtctcgccgcggtgctgcagcacgtgcacagcaactacgagatcgacctgttccagaacctgatcaaggccgccgcgcgcgtgaccgagatcagcgacctcacgaacaactcgctgaaggtgatcgccgatcacatccgcgcgtgctcgttcctgatcgtcgacggcgtgattcccggcaacgaaggtcgcggctacgtgctgcgccggatcgtgcgccgcgcgatccgccacggctacaagctgggccgcaagggcgcgttcttccacaagctggtggccgacctcgtcgccgagatgggcaccgcctacccggagctgaaggaagccgaacagcgcgtgaccgacgtgctgcgccaggaagaggagcgcttcttcgagacgatcgagcacggcatgtcgatcctcgaggccgcgctggccgacgtcgacgcgaagggcggcaaggtgctcgacggcgaactcgcgttcaagctgcacgatacctacggcttcccgctggacctgacggccgacgtgtgccgcgagcgcgggatgacggtcgacgagccggcgttcgacgacggg

SEQ ID NO: 11544 - DNA, 648 bp, Burkholderia cepacia
atgaaacaggacagccgtttcccgaacctcttcatcaccgatcacccgctgatccagcacaagctcacgcacatgcgcgacaaggacacgtccacgcgcacgttccgcgaactgctgcgcgagatcacgctgctgatgggctacgagatcacccgcaacctgccgatcacgaccaagcgggtcgaaaccccgctggtggcggtcgacgcgccggtgatcgcgggcaagaagctcgcgatcgtgcccgtgctgcgcgcgggcatcgggatgtcggacggcctgctcgacctggtgccgtccgcgcgcgtcggccacatcggcgtgtaccgcgccgacgaccaccgcccggtcgaatacctggtgcgcctgcctgacctggaagaccgcatcttcatcctgtgcgacccgatggtcgcgaccggctattcggccgtgcacgcggtcgacgtgctcaagcgccgcaacgtgccggccgcgaacatcatgttcgtcgcgctggtcgccgcgcccgagggcgtgcaggtgttccaggacgcgcacccggacgtgaagctgttcgtcgcgtcgctcgactcgcacctgaacgagcacgcgtacatcgtgccgggcctgggcgacgcgggcgaccgcctgttcggcaccaagaac

SEQ ID NO: 11545 - DNA, 1236 bp, Burkholderia cepacia
atgagacttcgtgcgagccgactgctgcttgcgctgacgaccgccgcggcgtgcgccgcaggtatggccgacgcgggcacgctgaaagtgaacgtcgcggcgcgcggcaaccagcgcgcgacgtggcaggccgtgttcgaccagttccacaaggcgaatcccgacgtggacctgaagatcagctacgtcggcgaggaggcgtacaaggtgcagatgtccggctggctcgcgaccgatccgcccgacgtgctgagctggaacaacggcgagcggctcgcgtatttcgcgaagcgcgggctgatcgaggacctgggcgcggactggcagaagaacggctggaacgacacgtatgcgtccgtgaagcaatcgtcgacgtatggcggcaaggtttacagcctgccgctcggctacgacgcgtacggcctgttctaccgcaaggacctgttcgagaaggccggcatccacggcgagccggccgactggccgcagtttctcgatgcgtgccgcaagctgaaggcggccggcatcgcgccgatcgcggtggccgcgcgcgatgcgtggaccctcgccgcgtggttcgactatctcgacctgcggatcaacggctatgcgttccaccagaagctgatggccggcgacgtcgcgtacaccgatccgcgcgtgcgtgcggtgtatgcggcctggaagaagctgatcgacgacaagtatttcatcgacaacgcgctgtcctacgacgtcgattcgctgagcccgctgatcgtgaacggccaggccgcgatgacgctgatgggcacctggtattcggcaggactgctgggcgcggcgcgcaacccgatcggcttcttccgcttcccggtgatcgatgcatcggtgccgctcgccgaggacggcccggtcaacgtgctgatcgttcccgcgaaagcgcacaacaaggccgatgcgcggcgcttcctcgcgttcatggggcagccggcggtcaacggcgagttcgcgaaggggatggggcaactgccgtcgaacaacaaggcgcccgagccgcaggacccgatctcgaagatcggcttccgcacgctcgcgacgacgcccggcggcatcgcgcagttctacgaccgcgacatgacgaaggaaatggccgacgaggggatgaaggcgatgcagcagttcctgtccgacccgacgcagctcgacgcgatcctgcagcgcctcgaacagacccgcaagcgcatctaccgcaag

SEQ ID NO: 11546 - DNA, 2289 bp, Burkholderia cepacia
atgcgctattcggtcgaaatcagaaagtttttctacagccagtactttttcggcggcctgcggatcgcggtcggcgtgtcgctgccggccgtgttgtgcctgatcgtgtttcacaaccgggagctcggcttcacgatctcgacgggcgcgctcggcgcatgcgtcgtcgacatgccgggcccgctgaagtacaaacacaacgaaatgctcgcgtgcagcgtgatcggcttcctggccgcgctcgccaccggcctcgcgacaccgaatatcttcgcgctgtggctcacgatcgtgccgcttacgttcgtgctgtcgctgatcgtcgtctacggcaaccgctggccgcagatcagcttcgcgacgctgttcatgatggtgatgacgctcgaggagaagttcacgccgctgcaggcgttcgtcaacgccggctggattctcgcgggcggcctctggtacacgtactgggccacgctcgtgtcgcaatggcaggcgcgccggatcgagcagcaggcgctggccgaaagcctgttcgcgtgcgccgactacctgctcgcccgcgcgcagttctacgatctcgacgccgatctcgacgagtgctaccgcaatctcgtcgcccggcagatcaccgcggtcgaaacgcaggaaaccgcgcgcgacatcgtgctgcgcaacctgccgaagctgcggcgcggcaagctcgatcccggccgcacgacgatgtacaacctgttcatcaacagcgtcgacctgcacgagctgttcgtcggcgcgcacaccgattacccgctggtgcgcaacacgttcggcggcacggacctgatcattttctaccgcgacctgatccgcaaggccgccgccgatctcgaggaaatcggcctcgcggtgctcgaaaaccgcgcgccccattcgcgcatcagcgtgaaggccgagctgcgcgcgatcgagtacgagatcgagctgatgcgcaagaagaacttcgcggccaccaacgcggaagcgtatgcggccgtgcttgcgacgttccggcgcatctggagcgcgacgcgcctgatcgaccggatgcgccgcaacctgtcgggccacgccgatccacagcagaccgaactgaagatcgacaaggcgctcacgcgcttcctgcagcgccgccgcatgtcgccgctgctgattttctcgaacctgaacatgcgttcgccgagctttcgccatgcgctgcgcgtgacgatcgccgtggcggtcggcttctggatcggccggctgctgccgctcacgaacgcctactggatcgtgatgaccaccatcatcatcctgaagcccggctactcgctgaccaagcagcgcaacgcgcagcggatcatcggcacgctgatcggctgcgcggcgagcatcgcgctgatctacacggtgaaggaaccgcacctgctgatcgcgatcatgttcggatcgatggtgatgagttacagcctgctgctgttcaactacgcggcgagcgtcgtgttcacgtcgtcgtacgtgctgctgatgttccacctgctcgcgccgggcagcatgcggatcatcggcgagcgcgcgatcgacacggtggtcggctgcatgatcgcgatcgccgcgagccggctgttcccgtactgggaataccggctgatgggcaagctcgtcaccgacatgctgacgtccacgcgcaagtatttcgaggccgtgtggcgcgcggggcgcggcatgtcgccgccgccggtgccggccgccgacggcgcggccgtcgtcgcgggcgtggccgccgcggtcgaggcgcccgtgaccagcctcgacgacgactaccgctaccgcctcgcccgcaaggacgtgcacatcgcgttcgcgaacctcgggcaggcattccagcggatgatgatcgagccgaaggcgcaccagcgcttcgtgcccgaactgaacgacctgctcgtgcagacgcacgtgctcggcgcgcagatcacggccgccgcgccgctgatccgcagcgcatgcgcggccgatggcggcctggtgcacgacgacgcattgcagcgcggtctcgccgccgtgctcgacaatctcgagaaggcggaagccggcgagccgccgccggccgatcagctcgaagcgtcgaagcaaatcacgcgcgatctcgatgcgatggtcgtgtccgcggagcaatccgacgcggtcggcgcggagctcacgcacgacctgaaggtgctcgcgcaccagtgcaagcagatgctcgcgtcgtcgctgctgatccgcaaggatgcgagcgtgatccgcctgcccgcc

SEQ ID NO: 11547 - DNA, 693 bp, Burkholderia cepacia
atgagtgcgccggtctaccaggagatcaaggatttcatcctggcccgcatccatgccggcgagtgggaggagggcgaccaggtgccgtccgagaacgagctggcgcgcgagttcaaggtggcgcgcatgaccgtcaaccgcgcgctgcgcgagttgacggccgagcaggtgctcacgcgcatgaagggcgcgggcacctacgtcgcgcggccgaagtacgagtcgacgctggtcgcgatccgcagcatctccgaggaagtcggcgcgcgcgggcatgcgtaccgcgccagcgtgctcgggctcgacacgatccgcgccgacgatgccctcgccgacgagatgcaggtggccgtgcgcaccaagctgtttcattcgcaggtgctgcacttcgagaacgacgagccggtgcagctcgaagaacgatgggtgaatccggcggtcgcgccggattacgccgagcaggatttcacgaacacgacgccgaacctgtacctgatgcgcgcggcgccgctgcagcgcgtcgagtaccggatcgaagcggctgccccggcgccggagcggcgcgagcagctgcggatggacgacgtcgagccgtgtctggttttacatcggcgcacctggtcgcagggcgtcgtcgcctcggtggcgaatctgtggcatcccggcagccgttatcgcttcaccgggcatttc

SEQ ID NO: 11548 - DNA, 882 bp, Burkholderia cepacia
atgatggcggcaattaccgcaagcatggtggcagaactgcgcgcgaagaccgacgcaccgatgatggagtgcaagaaggcgctgacggaagccgacggcgatctggccaaggctgaagaactgctgcgcgtcaagctcggcaacaaggcgagcaaggccgcatcgcgcgtgacggctgaaggcgtcgtcgcctcgttcgtcggcggcaacgcgggcgcgctggtcgagctgaactgcgaaaccgacttcgtcgcgaagaacgacgacttcctcgcattctcgaagacggtcgcggaactcgtcgcgacgcagaacccggccgacgtggccgcgctgtcggcgctgccgctcgacggctcgaccgtcgacgcagtccgcctcgcgctgatcggcaagatcggcgagaacgtgtcgatccgccgtttcgtccgtttcgaaaccgccaacaagatcgcgacgtacctgcacggcgcgcgtatcggcgtgatcgtcgagtacacgggcgcggacgagcaggtcggcaaggacgtcgcgatgcacatcgcggcgatgaagccggtcgcgctgtcgtcggccgacgtgccggcggaactgatcgagacggaacgccgcgtggccgagcagaaggccgcggaatcgggcaagccggccgaaatcgtcgcgaagatggtcgacggtagcgtccagaagtacctgaaggaagtgtcgctgctgaaccagacgttcgtgaagaacgacaagcagacgatcgagcagatgctgaaggcagcgaatgcggcggtgcagaagttcgcgctgttcgtcgtcggcgaaggcatcgagaagcgccaggacgacttcgccgccgaagtggccgcgcaagtcgcagcagcaaagcagcag

SEQ ID NO: 11549 - DNA, 405 bp, Burkholderia cepacia
atgtcttacagcaacaaggttctggatcactacgaaaacccgcgcaacgtcggttcgttcgcgaaggacgacgacacggtcggcacgggcatggtcggcgcgccggcttgcggcgacgtgatgaagctgcagatccgcgtcggcgcggacggcgtgatcgaagacgcgaagttcaagacttacggttgcggttcggcgatcgcatcgagctcgctcgtcaccgaatgggtgaagggcaagacgctcgacgaggcactgtcgatcaagaacacgcagatcgccgaggaactcgcgctgccgccggtgaagattcactgctcgatcctcgcggaagacgcgatcaaggcagccgtggccgactacaagaagcgccacgacaccaaggaaggcgatcaggcagcagcc

SEQ ID NO: 11550 - DNA, 1155 bp, Burkholderia cepacia
atgaatccgtttcaattccgtaccgtgccgacgcagatcgtcgaattcggcgctgcgcgccggctcggcgcgctgttgcgcgaacgctttccggcgctcgcgcggctgtgcgtcgtcaccgatgcgttcctgcatcgcagcggcgtgctcgcgcccgcgctggagagcctcgccgcgcacggctggcaggtcaccgtgatcgacgacgtgatcgccgatccgcccgagcacgtggtgctggacgcgaccgagcgggccgtcgcggccgatgccgagatcgtgctcggcctgggcggcggctcgtcgatggacgtcgcgaagctgatcgcggtgctcgcgccggggcagcaggcgctggccgacatgtacggcgtcgacaaggtcgcgagcgcgcggctgccgctcgtgcagatgccgaccacggccggcaccggctccgaggtcacggcggtgtcgatcgtcacggtcggcgaggcgcgcaagatgggcgtcgtgtcgccgcatctgttcgcggacgtcgcgatcctcgacgcggaactcacgctcggcctgccgcgcgcggcgacggccgccaccggcatcgacgcgatggtgcatgcgatcgaggcgtacacgtccgcacggctgaagaatccggtctccgacatgctggccacgcacgcgctgacgctgctgtcgcgcaacctgcttgccgcgtgcgacgacggccggaaccggcacgcgcgcgaagcgatgctggtcggcgcgatgttcgcggggcaggcgttcgcgaatgcgccggtcgcggccgtgcacgcgctggcctatccggtcggcggaatcttccacgtaccgcacgggctgtcgaacgcgctggtgctgccgcacgtgctgcgcttcaatgcgccggccgccgcgccgctgtatgcggaactggcagccatcgtcgcgccgtcggccaccggcagcgacgaggcgaaaacgcatgcgctgatcgccgagatcgaccggctgatcgtcgcgacgggcattccgcgcacgctgcgcgaagtcggcatcggcgaggccgatctgccgaggatggcgtcggacgcgatgttgcagacgcgcctgctcgtgaacaatccgcgcgaggtggccgaggcagacgcgctggagatttaccggcaggcgtgg

SEQ ID NO: 11551 - DNA, 438 bp, Burkholderia cepacia
atggtcgtgttcctggtcctcgcgtggttcacgatgaaattcgtgtggccgccgttgatcaacgccctcgacgaacgttcgaagaagatcgccgacggcctcgccgccgcggagaagggcaaggcggaactcgacgcagcgcacaagcgcgtggaccaggaactcgcgcaggcccgcaacgacggccagcagcgcatcgccgacgctgaaaagcgtgcccaggcggtcgccgaggaaatcaaggccaacgcccaggctgaagccgcccgcatcgtcgcccaggcgaaggcggaagcagaacagcaaatcgtgaaggcgcgcgaagcgctgcgtggcgaagtcgccgcgctggccgtgaagggcgccgagcagatcctgaagcgcgaagtcgatcaaacggcccacgcccaactgctgaatcaactgaaagccgagctc

SEQ ID NO: 11552 - DNA, 1233 bp, Burkholderia cepacia
tgagtggtatctatgtctttcgattctctcggcctggccgaaccgctggccaaggcggtcaacgagctcggctacacgtcgccgaccccgatccagcagcaggcgatcccggccgtcctcggcggcggcgacctgctcgccggcgcacagaccggcaccggcaagaccgccggcttcacgctgccgatcctgcaacgcctgcacacgttctacgccgagcaccgtggcgcgaagcgcgcggtgcgcgcgctgatcctcacgccgacgcgcgaactcgccgcccaggtcgaggaaagcgtccgtgcgtacagcaagtacctgaagctgcgctcgaccgtgatgttcggcggcgtcagcatcaatccgcagatcgatgcgctcaagcgcggcgtcgacatcgtcgtcgcgacgccaggccgcctgctcgatcacatgcagcagaagaccatcgacctgtcggatctcgacatcctcgtgctcgacgaagccgaccggatgctcgacatgggcttcatccacgacatcaagcgcgtgctcgcgaagctgccgccgcagcgtcagaacctgctgttctcggccaccttctccgatgaaatcaaggcgctcgccgacagcctgctcgactcgcccgccctgatcgaagtcgcgcgccgcaacacgaccgccgagagcgtcgcgcagaagatccacccggtcgatcgcgaccgcaagcgcgagctgctcacgcacctgatccgcgaacacaactggttccaggtgctcgtgttcacgcgcaccaagcacggcgcgaaccggcttgccgagcagctgacgaaggacggcatcagcgcgatggcgatccacggcaacaagagccagtcggcccgcacgcgcgcgctggccgagttcaagaacagcacgctgcaggtgctcgtcgcgaccgatatcgccgcgcgcgggatcgacatcgaccagttgccgcacgtcgtcaacttcgacctgccgaacgtgcccgaggattacgtgcaccggatcggccgcacgggccgcgcgggggcgaccggcgaagccgtgtcgctcgtgtgcgtcgacgagaagcagttgctgcgcgacatcgagcggctgatcaagcgcgagatcccgcaggaagtgatcgcgggcttcgaacccgatccgaacgcgaagccggagccgatccagcagcgccgcgggcagcagcaaccgcgtggcggtggcggcggcggcaatcgccag

SEQ ID NO: 11553 - DNA, 705 bp, Burkholderia cepacia
  misc_feature (6)..(7): n=g, a, t or c
  misc_feature (9)..(9): n=g, a, t or c
  misc_feature (11)..(11): n=g, a, t or c
atggcnngncngaacgcccgcgccggtcttgaatcgaacggggagcgacaagtgaatttcgattggtcggcgatctgggcggcgctgccggacctgatggacggggtccggttgacggtgttcatcgcatttttcgggctggtgggcggcttcgtcgtcggaatgatcgcggggatgttccgcgcatacggaccgaaggcgatgaacgtgctcgcacaggtctatattgaattgatccgcggcacgccgatcgtcgtgcaggtgatgttcctgtacttcgcgttgccgttgctcgcgcatatccgcatcgacggcctgacggccgcgatcatcgcgatcacggtgaattccggcgcgtatctcgcggaagtggtgcgcggcgcgctgctgtcgatcccgaaggggctgacggaagcggggctcgcgatgggcctgtcgatgccgcgcgtgctgctcaaggtggtcgggccgctcgcgttccggcggctgattccgccgctcggcaaccagtgcatcgtgagcctgaaggacacgtcgctgttcatcgtgatcggcgtcggcgaactgacgcgcaaggggcaggaaatcatcgcgggcaatttccaggcggtcgagatctggacggcggtggccgtcatctatctgctgctgaccggcgcgatgacgctgacgctgcggctcgtcgaaaagcggatgaaaatctta

SEQ ID NO: 11554 - DNA, 1386 bp, Burkholderia cepacia
ttgtcccgcgaatcgtcactcccggacggccgtcccgggtggccgtccccgggtggccgtcccccgcttccccacgaattcatgccgctccgcgcggctcgcttctcgagtcacacgatggatatcgatcagtacatgaccgacctgggccgtcgcgcccggcacgcttcccgcgcgatggcgcgcgccagcacggccgcgaagaacgcggccctcgacgccgtggcccgcgcgatcgagcgcgacgcgcaggcgctgaaggaggcgaacgcacgcgacgtcgcccgcgcccgtgaaaaggggctcgatgcggcgttcgtcgatcgcctgacgctgtcggacaaggcgctgaagacgatggtcgaagggctgcgccaggttgcgtcgctcgccgatccgatcggtgagatcggcaacctcaagttccgcccgagtgggatccaggtcggccagatgcgcgtgccgctcggcgtgatcggcatcatctacgagtcgcgcccgaacgtgacgatcgacgcggccgcgctgtgcctgaagtccggcaacgcgacgatcctgcgcggcggctccgaagcgctcgaatcgaatgcggcgctcgcgaagctgatcggcgaagggctcgaggcggcaggcctcccgcaggacgcggtgcaggtcgtcgcgacggccgatcgcgcggcggttggcaagctgatcacgatgaccgaatacgtcgacgtgatcgtgccgcgcggcggcaagagcctgatcgaacggctgatcaatgaggcccgcgtgccgatgatcaagcacctcgacggcatctgccacgtgtacgtcgacgatcgcgccgatctcgacaaggcgctgaccgtctgcgacaacgcgaagacgcaccgctacggcacctgcaacacgatggagacgctgctcgtgtcgagcggcatcgccgcgaagctgctgccgccgctcggcaagctgtatcgcgacaagcaggtcgaactgcgcgtcgatgcgaccgcgcgcgcggtgctcgccgacgcgggcgtcggcccgctcgtcgacgcgacggaagcagactggcacaccgagtatctggcgccggtgctcgcgatcaaggtcgtcgacggcctcgacgccgcgatcgagcacatcaaccattacggctcgcatcacacggacgcgatcgtcaccgaggatcacgaccgtgcgatgcgttttctgcgcgaagtcgattcggcgagcgtgatggtcaacgcgtcgacgcgcttcgcggacggtttcgaattcggcctcggcgcggaaatcggcatctcgaacgacaagctgcacgcgcgcggcccggtcggcctggaagggctcacgtcgctgaagtacgtggtgctcgggcacggcgaaggccgtcag

SEQ ID NO: 11555 - DNA, 624 bp, Burkholderia cepacia
atgaccgactcgacccaccactattacgaaccgtcgcaaggccacggcctgccgcacgatccattgaacgcgatcgtgggtccgcgcccgatcggctggatttcatcccgcggcagcgacggcacgctgaatctcgcgccgtacagcttcttcaacgcgttcaactatcgcccgccgatcatcggcttttcgagcaccgccgcgaaggacagcctgcgcaacgtgcaggaaaccggcgagttcgtgtggaacctcgcgacgcgcgatctcgccgagcggatgaaccagacctgcgccgccgtgccgtacgacgtgaacgaattcgaactcggcggcttgaccgccgtgccgtcgcgcctcgtcgacgtgccgcgcgtcgcggaaagcggcgtcaacttcgaatgcaaggtgaccgacgtgatccggctgcgcgatcatcgcggtgtcgagacgccggctacgctggtgctgggcgaggtcgtcgcggtccatatccgccatgacctgctgaaggacggcgtgttcgacacgttcggcgcgggcatcattcttcgtgcgggtgggccgtcggcctatgcgcacgtgacgcccgacagccgcttcgacatcttccggcccgacgcg

SEQ ID NO: 11556 - DNA, 1263 bp, Burkholderia cepacia
gtgctctatgtgcaggtgatcttcgccatcatcgtcggcgtgatcctcggccactactacccggcgctcgccaccgacatgaagccgctcggcgacgggttcatcaaactgatcaagatggtgatcggtccgatcatcttctgtacggtcgtcaccggcatcgccggcatggaggacatgaagaaggtcggccgagtcggcggcaaggcgctgctgtacttcgagatcgtgtcgaccttcgcgctgctgctcggcctcgcggccacgcacctgctgcgtccgggcgtcggcttcaacatcgatccggcgacgctcgacggcaaggccgtcgcgtcgtacgcggcgaaggcgcacgggcagtcgacggtcgacttcctgatgcacatcatcccgaacacgatggtcgacgcgttcgcgcagggtgaaatcctgcagatcctgctgatcgcgctgctgttcggcagcgtgctcgcgcacctcggcgagcgcggccgtgtggtcaccgacttcatcgacggcctgacgcgggtgctgttcggcatcgtgcacatcgtcacgaagctggccccgatcggcgcgttcggcgcgatggcgttcacgatcggcaagtacggcgtcggctcgctggtgccgctgctcaagctgatcggcacgttctacctgacgtcggtcgtgttcgtgctcgtcgtgctcggcgcgatcgcgcgcttcaccggcttctcgatcatccgcttcgtgtcgtacatcaaggaagaactgctgatcgtgctcggcacgagctcgtcggaagccgcgctgccgcaactgatggaaaagctcgagaaggccggctgctcgcgttcggtcgtcggcctcgtcgtgccgaccggctattcgttcaacctcgacggcaccaacatctacatgacgatggccgtgctgttcatcgcgcaggcgaccaacatcgagctgacctggatgcagcagctcacgctgctggccgtcgcgatgctgacgtcgaagggcgcgagcggcgtgaccggggcgggcttcatcacgctcgccgcgacgctggccgtcgtgccgacgatcccgctgtcaggcatggtgctgatcctcggcatcgaccgcttcatgagcgaatgccgtgcgctgaccaacatcgtcggcaacggcgtggcgacggtcgtcgtgtcggcctgggagaaggagctcgaccgcaacaagctgcgccaggcgctgaagggcggcagcgaagtcgcgccgaccgagacggccggcgtc

SEQ ID NO: 11557 - DNA, 852 bp, Burkholderia cepacia
atggccatcgaaaccgtcggcgtcgtgggcgccggaaccatgggtaacggcattgcgcaaacggcggccgttgcaggactgaacgtcgtgatgattgacgtcagcgacgccgcgctcgacaagggtctcgcgacgctgaagggcagcctcgagcggctcgtgtcgaaggacaagctcgacgcggccgcacgcgatgcggcgctcgcgcgcatcacgacgtcgaccgactacgcgaagctcgccgccgtcgacatcgtgatcgaagccgcgaccgagaacgtcgagctgaagggccgcatcctgaagcagatcgaggccgtcgcacgcccggacgcgatcatcgcgaccaacacgtcgtcgatctcgatcaccgcgctcgcggcgccgctcgccgatccgtcgcgttttctcggcatgcacttcttcaacccggtgccgctgatgccgctcgtcgagatcatccgcgggctgcagacgagcgacgcgaccgcgtcggccgtgcgcgcgctgaccgagcgtttcgacaagtcgccgatcggcgtgcgcaattcgccgggcttcgtcgtgaaccggatcctggtgccgatgatcaacgaagcgttcttcgtgctggccgaaggcatcgcgtcggccgaggagatcgacgcggggatgaagctcggcgcgaaccacccgatcgggccgctcgcgctggccgacctcgtgggcctcgacgtgtgcctcgcggtgatggacgtgttcgtgaaggacttcggcgatccgaagtatcgcgcgtgcccgctgctgcgcgagatggtgtcggccgggcggctcgggcgcaagaccgggcgcggcgtgtacgactacagcaag

SEQ ID NO: 11558 - DNA, 486 bp, Burkholderia cepacia
atggccaagaaaggcaacgccacgcagatcaacatcggtatcagcgacaaggaccgcaagaacatcgcggacggcctgtcgcgcctgctcgccgatacgttttcgctgtacctgaagacccacaatttccactggaacgtgaccggaccgatgttcaacacgctgcacctgatgttcgaggagcagtacaacgaactgtggctcgcggtcgattccgtcgcggaacgcattcgcacgctgggcgtcgtcgcgcccggcacgttcggcgagttcgcgaaactgtcgtcggtgccggaagcgaagggcgtgccggccgccgaggaaatgatccgtcagctcgtcgaagggcacgaggcggtcgtgcgcaccgcgcgtgaaatcttccccatcgccgatgcggcgagcgacgagccgaccgcggacctgctgacccagcgcctgcagacgcatgaaaagaccgcatggatgctgcggtcgctgctcgcg

SEQ ID NO: 11559 - DNA, 627 bp, Burkholderia cepacia
atgacgaacccgtccgacgctaccgcgctgcgcgccgccgcccctgtcggcatcttcgactcggggctcggcggcctgtcggtgctgcgcgccgcgcgcgcgcacctgcccgacgaatcgttcgtctacgtcgccgactcgcaccacgcgccgtacggcccgcgcgacgaagccttcattacggaacgcacgctggccatcggcgagtggctcgcccgcgaaggcgcgaaagcgctcgtcatcgcatgcaacacggcaacggcccgggcgatcgcggccatccgcgaacgcctgtcgatcccgctcgtcggtgtcgagccgggcatcaagccggccgccgcgctgtccgcgaccggcgtcgcgggcgtcctcgccacgcaatcgacgttgaacagcccgcgcttccaggcgctgctcgaccgctacggcgccggccgccgcttcatctgccaacccggccacgggctcgtcgaagcgatcgaacgcggcgacacgaactcgcccgcgttgcgcgcgctgctcgagcgttacatccagccgatgctcgacgacggcgccgatacgctggtactcggctgcacgcactacccgttcttcacagaaacgattcgtgaccttgttggcgag

SEQ ID NO: 11560 - DNA, 726 bp, Burkholderia cepacia
  misc_feature (183)..(183): n=g, a, t or c
gtaaacggcacccaggccaccgaacggttaagcctcgctcgctgggccgtctacgcgggatcggtgttcgcgggcgcgtggctcgcgacgcaattgttctatctcgcgcagatcgcgctgtggtcgttcgtgaatccgggctcgaccgccttcatgcgcaccgacgcgtggtggctgtcgcgngacacgccgcccgcgcagatccggcaccagtgggtgccgtacgaccagatctcgcgcaacctgaagcgggcgctgatcgcgtccgaagattcgaccttcgcgaccaacaacggctacgacgtcgacgcgatcctgcaggcgtgggagaagaacaaggcgcgcggcaggatcgtcgcgggcggctcgacgatcacgcagcagctcgcacgcaacctgttcctgtcgcgcgagaagagctacatccgcaagggccaggagctgatcatcacgtggatgctcgaaacggtgctcgacaaggagcgcatcttcgagatctacctgaattcggtcgaatgggggcgcggcgtgtacggcgccgaagcggccgcgcgctattactacaagattcccgcgagccggctcggcgcgtggcagtccgcgcgtctcgcggtgatgctgccgaagccgcgctggttcgatgcgcatcgcggctcggcctatcaggcgcagcgcgcggcggtcatcgcgcgccgcatgggcgcggccgaactgccgcaatcggag

SEQ ID NO: 11561 - DNA, 2049 bp, Burkholderia cepacia
atgaccaaaaagctgaacgaagtatccgtcgaagacgacgcaaatcagagcgacgagcagcccgcagccgcggctgcaccgggcaaatccaaggtgcgcgatcgtcgcgccaaggaaaaggcgctgctgaaggaagcgttcgcgacgagcacgccgggcacggccgaggagctcgaagagcgccgcgtgaaactgcgcgcgctgatcaagctcggcaaggagcgtggcttcctgacgtacgccgaaatcaacgaccacctgccggacaacttcaccgagaccgaagccctcgagggcatcatcggcacgttcaacgacatgggcgtggcggtttacgagcaggcgccggacgcggaaacgctgctcctgaacgacaacgcgcccgccgcgtcgtcggacgatgaagtcgaagaggaagccgaagtcgcgctgtccaccgtcgattcggaattcggccgtacgaccgatccggtccggatgtacatgcgcgagatgggcacggtcgagctgctcacgcgcgaaggcgaaatcgagatcgcgaagcggatcgaggacggcctgcgccacatggtgatggccatctccgcgtgcccgacgacgatcgccgacatcctcgcgatggccgaacgcgtcgcgaacgaagagatccgcgtcgacgagctcgtcgacggcctgctcgatccgaatgctgcggacgccgccgatacggacggtttctccgcgaaggaagcggaagcgatcgagaacgaggacgaggaagccgaagaggaagaggaagaagaggaagaggaggaagacgacggtgccgcgcaggcatcggcgaacgccgcccagctcgaagccctcaagcgcgcgtcgctcgagaagttctcgcagatcagcgagtggttcgacaagatgcgccgcgcattcgagaaggaaggctacaagtcgaaggcctacctgaaggcgcaggaaacgatccagagcgagctgatgacgatccgcttcaccgcgcgtaccgtcgaacgcctgtgcgacacgctgcgtgcgcaggtggacgaagtgcgtcaggtcgagcgtcagatcttgcacatcgtcgtcgacaagtgcggcatgccgcgctcggaattcatcgcgcgcttcccgggcaacgagacggatctcgactgggccgagaagatcaccgcggaaggccattcgtacagcgcggtgctgtcgcgtaacgtcccggcgatccgcgaacagcagcaacgcctgctcgacctgcaggcgcgcgtcgtgctgccgctgaaggacctgaaggaaaccaaccgtcagatggcggccggcgaactgaaggcacgtcaggcgaagcgcgaaatgaccgaggccaacctgcgtctcgtgatctcgatcgcgaagaagtacacgaaccgcggcctgcagttcctcgacctgatccaggaaggcaacatcggcctgatgaaggcggtggacaagttcgaataccgtcgcggctacaagttctcgacctatgcgacgtggtggatccgtcaggccatcacgcgctcgatcgcggaccaggcgcgcacgatccgtattccggttcacatgatcgaaacgatcaacaagatgaaccgcatctcgcggcagatcctgcaggaaaccggtctcgagccggatccggcaacgctcgccgagaagatggagatgccggaagacaagatccgcaagatcatgaagatcgcgaaggagccgatctcgatggaaacgccgatcggtgacgacgacgattcccatctcggcgacttcatcgaggacaccaacacggtcgcgccggcggatgccgcgctgcatgccagcatgcgcgacgtcgtgaaggacgtgctcgattcgctgacgccgcgcgaggcgaaggtgctgcggatgcgtttcggtatcgagatgagcaccgatcacacgctcgaggaagtcggcaagcagttcgacgtcacgcgcgagcggatccgtcagatcgaagccaaggcgctgcgcaagctgcgtcacccgagccgttccgacaagctgaagtcgttcctcgaagggaac

SEQ ID NO: 11562 - DNA, 585 bp, Burkholderia cepacia
  misc_feature (83)..(83): n=g, a, t or c
atgccagccactcatcgctcccccaccaccgcggggcgcggcgacaaaccagataaggggggagaggagcgaggaggggaggngggtgcgacccacaacaagggcatcatgaacggcatcgatccggtggtggtcgcgaccggcaacgactggcgcgcggtcgaagccggcgcgcatgcgtacgcgagccgcagcggccgctatacgtcgctgacgacgtgggagaaggccgcgaacggcgacctcgtcggcacgatcgagatgccgatgccggtcgggctcgtcggcggcgcgacgaagacgcatccgctcgcgcgcctcgcattgaagatcatgaacgtgacgtccgcgcaggaactcggcgaaattgcggtcgcggtcgggcttgcgcagaatctcggggcgctgcgtgcgctcgcgaccgaagggatccagcgcggccacatggcactgcatgcgcgcaacatcgccgtcgcggccggcgcgacgggcgccgacatcgaccggatcgcgcagcggatggtcgcggcgaaggacgtgcgtaccgatttcgccgtcgagctgctcgcaggccgcagcgacggc

SEQ ID NO: 11563 - DNA, 528 bp, Burkholderia cepacia
atgcccacggaaaaagaacagggagagcctgcaccgcgcctcgaagcgcacacagacaagcaggaagaacacatcgggcaaagcattttttttggatcgatcatgaagacgttttccgcaaaagcccatgaggtgacgcgcgaatggtacgtgattgacgcgacggataaggttctcggccgtgttgccagcgaagtggcacgccgtctgcgcggcaagcacaagcctgagttcaccccgcacgtcgacactggtgatttcatcatcatcatcaacgcgagcaagttgaaggtcacgggcaacaagacgctggacaagaagtactaccgtcactcgggctacccgggcggtatctatgaaacgacgttcggcaagatgcaggaacgcttcccgggccgcgcgctcgagaaggcggtcaagggcatgctgccgaagggcccgctcggctacgcgatgatcaagaagctgaaggtctacgcagaagcgacgcatccgcactcggctcaacagccgaaggcgctcgagatc

SEQ ID NO: 11564 - DNA, 1282 bp, Burkholderia cepacia
gctttccgttcccagctgctgaccttcaacggcgacccggcgcaatcgagccaggccgcgaaccacgagaccgacgggctcctgatcgtcgacgacggcaaggtcgtcgcggccggcccgtatgcggcgctcgccgcgacgctcgcgcgcgatgcggtggtccacgacctgcgcgacaagctgatcgtgcccggcttcatcgacacgcacatccactatccgcagacggacatgatcgcgtcgccggcgccgggcctgttgccgtggctcgacaagtacacgttcccgaccgagcgccagttcggcgaccccgagcatgcgcgcgaagtcgccgacttcttcgtcgacgaactgcttgcgtgcggcacgacgagcgcactcgtctactgcacggtgcacaagcaatcggccgatgcgctgttcgccgcaagcgacgcgcgcgacctgcggatgatcgcgggcaaggtgctgatggaccgcaactgccccgaattcctgcgcgacaccgcgcagtcgggctatgacgacagcgccgagctgatcgaccgctggcacggcaagggccgccagatgtacgcgctcacgccgcgcttcgcgccgacgtcgaccgaggcgcagctcgaggcgtgcggcgaactcgcgcgccgccatccggacgtgttcgtgcaaagccacgtcgcggaaaacgtcgacgaggtgaaatgggtggccgagctgttccccggccatcgcagctatctcgacatctacgaccgctacggcgctgctgcgtccgcgcgcggtgtacggtcactgcatccacctcgacgacgaggatcgccgccggatggccgagacgcgcaccgtcgtcgcgcactgcccgacgtcgaacttcttcctcggcagcgggctgttcgacttcgacaaggccggcgaacacgacgtgcccgtcacgctcgcgaccgacgtcggcggcggcacgtcgttctcgatgctgcagacgatgaacgaggcgcacaaggtcgcgcggctgtcgggccaccacctgaccgccacgcggatgttctggctcgcgacggccggcgccgcgcaggcgctcgacctcgccgacacggtcggcacgctcaagccgcgcaccgaagccgacttcgtcgtgctcgatccgcaggcgacgccgctgctcgcgcgccgtacgaagcgcgcggagtcgctcgaggaactgctgttcgcgttcgcgctgctcggcgacgaccgcgcggtataccggacctacgcggccggcgaactcgtgcacgaacgcggc

SEQ ID NO: 11565 - DNA, 1473 bp, Burkholderia cepacia
atgagtcgcgaagtgttgatgctggtggatgcgctggcgcgcgagaaaaacgtcgacaaggatgtggtgctgggcgccctcgaggctgcgctcgcgtccgcttccaagaagctgttcgacgaaggcgccgaaatccgcgtccatatcgatcgcgaaagcggcgagcacgaaaccttccgtcgctggctcgtcgtgcccgacgaggcaggcttgcaggagccggatcgcgagatcctgctgttcgaagcacgtgagcagaagcccgacgtcgaagtcggcgagtatgtcgaggaacccgttccgtcgatcgagttcggtcgcatcggcgcgcaggccgcgaagcaggtgatcctgcagaaggtgcgcgacgcggagcgcgagcagatcctgaacgactacctcgagcgtggcgaaaagatcatgacgggtacggtgaagcgcctcgacaagggcaacttcatcgtcgaatcgggccgcgtcgaggcgctgctgcgccgcgatcagctgatcccgaaggaaaacctgcgcgtgggcgaccgcgtgcgtgcgtacatcgcgaaggtcgaccgcaccgcgcgcggcccgcagatcgagctgtcgcgtacggcgcccgaattcctgatgaagctgttcgagatggaagtgccggaaatcgaacagggcctgctcgagatcaaggcggctgcccgcgacccgggcgtgcgcgcgaagatcggcgtcatcgcatacgacaagcggatcgatccgatcggcacctgcgtcggcatccgcggttcgcgcgtgcaggccgtgcgcaacgagctcggtggcgaaaacatcgacatcgtgctatggtcggaggatcccgcccagttcgtgatcggcgcgctcgcgccggcagccgtccagtcgatcgtcgtcgatgaagaaaagcattcgatggacgtcgtcgtcgacgagaacgaactggctgtcgcgatcggccgcagcggtcagaacgttcgccttgccggcgaactgaccggctggcagatcaacatcatgacgccggacgaatccgccctgaagcagggtgaagagcgcgaccggctgcgtgcactgttcatggcgcgcctcgacgtcgacgaagaagttgccgacatcctgatcgacgaaggcttcacgagcctcgaagagatcgcgtacgtgccgctcaacgaaatgctcgaaatcgaagcgttcgacgaggacaccgtgcacgaactgcgcaaccgcgcacgcgacgcgctgttgacgatggccatcgcgaacgaagaaaaggtcgagaacgcagcgctggatctcaagagcctcgacggcatcacgccggagctgctcgcgaagctggccgaacacgccgtgcagacgcgcgacgatctcgccgagctggctgtagatgaactggtcgacatgaccgggatggaagaggatgccgctaaggcgttgatcatgaaagcacgtgaacactggttccag

SEQ ID NO: 11566 - DNA, 723 bp, Burkholderia cepacia
atgactgccccgaacgcgctcagcgccatcgaactcctgcaaagccagtcgctcgcgatgatcgtccaggacatgctcgagcgcgcgatcgtctccggcgaatacgcgccgggcgaaaagctcaacgaagtcgagatcgcgacccggctgaacgtgtcgcgcggcccggtgcgcgaagcgttccgcgcgctcgaacaggccggcctgctgcgcaacgagaagaatcgcggcgtgaccgtgcgcgtcgtgccgctgcgcgaggccgaggaaatctacgaagtgcgcgcgatgctcgacgagtcggtcgcgcgcgcgctcgcgaagcgtatctcgcccgagacgctgaaggtgctgaagggcatcatccagtcgatgaaggacgccgcgaagacgcatgacgtcacgcgctataccgagctgaacgtgcagttccacgacgcgatggtcgtcggcgtcggcaatacccatctcaccgatacctaccggcggctcgtgcgccagctcggcctgctgcgccaggcggcgatcgaggccgaggaggatgcgatcgcggtgtcggcggccgagcacgacaagatcgtgcaggcgctcgcggccggcgacgaggacaaggccgtcgcgctcgtgcgcgagcatgtcgcgcacggcctcgcgcggatgcgccgtacgcacgagcaggggctgcctgcgacgggcaaggcggcgcgggagaaggccggcgca

SEQ ID NO: 11567 - DNA, 1665 bp, Burkholderia cepacia
gtgcggtcggcagtttctccgacacctgctaaaatacacggttttccgtcgatttctctcttaacgggacctgccgtgctttctactgccaacatcacgatgcaattcgggccgaagcccttgttcgagaatatctcggtcaaattcggcgagggcaaccgctacggtctgatcggcgcgaacggctgtggcaagtcgaccttcatgaagatcctcggcggcgacctcgagccgagcgccggcaacgtcgcgctggagccgaacgtccgcctgggcaagctgcgccaggaccagttcgcgtacgaagacgtgcgcgtgctcgacgtcgtgatgatgggccacaccgagatgtgggccgcgatgaccgagcgtgacgcgatctacgcgaacccggaagccaccgacgacgactacatgcacgcggccgagctcgagggcaagttcgccgaatacggcggctacgacgccgaagcgcgcgcgggcgcgctgctgctcggcatcggcatcgaggagaagttccacaacggcacgatggccgacgtcgcgccgggctggaagctgcgcgtgctgctcgcgcaggcgctgttctcgaagccggacgtgctgctgctcgacgaaccgaccaacaacctcgacatcaactcgatccgttggctcgagcacacgctcaacgagtacaactcgacgatgatcatcatctcgcacgatcgtcacttcctgaactcggtgtgcacgcacatggccgacatggatttcggcacgctgaaggtctggccgggcaactacgacgactacatgctcgcgtcggcccaggcgcgcgagcgtcaggctgcggcgaacgcgcgtgcgaaggagcgcgtggccgaactgcaggacttcgtgcgccgcttctcggcgaacaagtcgaaggcgcgccaggccaccagccgcgcgaagcagatcgacaagatcaagatcgaggaattcaagccgtcgtcgcgccagaacccgttcatccgcttcgagttcgagaagaagctgcacaacgtcgcggtggtcgccgaagagatcacgaagaagtacgagcgcacgatcttccagaacttcaacctgtcggtgcagccgggcgagcgcatcgcgatcatcggcgagaacggcgcgggcaagacgacgctgctgcgctcgctgctcggcgcgctgccgctcgatcacggcacggtgaagtggtcggagaacgcgaacgtcggctacatgccgcaggacacgtacgaggagttcccgaacgacatcacgctgatggactggatcgaccagtaccgcaaggacggcgacgacgaaacgatggtgcgcggcacgctgggccgcctgctgttctcgtcggacgacatcaagaagtcggtgaaggtgctgtcgggcggcgagaagggccgcatgatctggggcaagctgatgctcggccgccacaacgtgctgctgatggacgagccgaccaaccacatggacatggaatcgatcgagtcgctgcagatcgcgctcgagcagttcgaaggcacgctgattttcgtgtcgcacgaccgtgagttcgtgagcgggctggcgaaccggatcatcgaagtgaagacggatggcacgctgttcgacttcggcgggaattacgaggagttcctgacgagtcaggggcaggag

SEQ ID NO: 11568 - DNA, 825 bp, Burkholderia cepacia
atgcgaccgccggaaaggccgcacggtgcgtcgagcgcatatgagtcgcggcgcccgtgcgcggccgcaaggcggttgcccgcgccggaaacgcatggcactaaagaagtgcgccgcgcggtcgttaacgcgagagagaccagtccgtacacggcatgccacaaagccgtcagttattgtaacgcgcaaggtcatccgatccacaaggtctacctgcgaaaaaaaagagatcacgccgcatacgacgcgttcgtcgaacgctggcgcgcgccgtcgcaggagccgggcctcgaggtcgcgcccgccgcagcgaaaacgcccgagcgcgccgacaccgagatcgacgtcgcgggctttcgcgccgcgtgggacgcgatgaccgacacgcaccagttcttcggcatcacgcaacgcttcggcgtgagccgcatgcaagcgctgcgcctcgccgatccgcgctacgcatatccggtcgaaaccgcgcatgcgttgcgccacgtgctcgaacaggccgcgaaaagcggccagccgatcatggtgttcgtcggcaacgcggggatgatccagatccatacgggccccgtcgcgaacgtgcgcgaggtcggcgcgtggatcaacgtgctcgatccgggcttcaacctgcatgtgcgcgaagacctgatcgccgccgcgtgggtcgtgaagaagccgacgagcgacggcatcgtcacgtcgctcgaactgttcgaccggcagggcgaccacgtcgcgctgctgttcggcgagcgcaagcccggcaaggtcgagcgcgacgactggcgcgcgctcgtcgcgacgctgccggcg

SEQ ID NO: 11569 - DNA, 624 bp, Burkholderia cepacia
atggcgatcgaaaaggaaatcaagctcgcgctgccggccggccaggccgacgccgcgcgccgcttcttcgagacgctgaccggcgaacccggccacgcgatcacgctcgcgaacgtctattacgacacgcccgatctcgcgctggcgcgctcgaagagcgccgtgcgcgtgcgccgcacgccggacggctggctgcagacgttcaagaccgtcggcagtgcggaaggcggcctgcaccgccgccacgaatgggaactgccggtcgccggcgacgcgctcgaaatcgacgcgctcgtcgcggcttgcgacgtgccggaagccgccgccgcgctgaatgacgcggccggcgccctgtacgcgctgttccgcacggatttttcgcgtacgctgtggcgcatcgcaatcggcggcgcaacggtcgaagccgcggtggacctcggcgagatcgtcgtccaggcggagcgcgacacgcgccgcgaaccgatcagcgaaatcgaactcgaactgatcgacggcccggaaacggcgctcgcgacgctcgccgccgaactgcagcaggcgctgccgggcctcgttcccgaaaacatcagcaaggcgcagcgcggctaccggctgcgcgcgcaa

SEQ ID NO: 11570 - DNA, 681 bp, Burkholderia cepacia
atgaccgacgccctgccgctgaccaccgatcccgaatccggcctgcagtaccgtttgcgcccggccgccggccgcgccgccgcccgcctgttgctgctgcacggcgtcggcggcaacgaaaccaacctgctgaacgtggccgacgcgatcgatccgcgcatcgaaatcgcgttcctgcgcggcccgctcacgttcgggcccagtcagcatgcgtggtttccggtgcgtttcggcccgaacggccctgaaatcgatgcggcgcgcgcggacgagagccgcgtgcaactggtcacgctgctgcacgccttccgcgcacaggatggcgcggcgcccgcgttgccgaccgtgatcgccggcttcagccagggcggcatcatgagcgcgagcgtcggcctcacgtcgccgggcgacgtgagcgcgttcgccgtgctgtgcgggcgcatcctgccggaaatcgatccgctgatcgcgccgcgcgacgcgctgcgcccgcttcacgcgctgatcatgcatggccgcttcgacgacaagctgcccgtctcgtgggcggacaaggccgatgcgacactcgcggcgctcggcgtcgcgcacgacacgcggctgtatgcggccgggcacgagctgaccgcggagatggccggcgatttcggccgatgggtcggcgagcgcaccgggttgaac

SEQ ID NO: 11571 - DNA, 1824 bp, Burkholderia cepacia
atgacccgcgcccttcgcaatatcgccatcatcgctcacgtcgaccacggcaagacgacgctcgtcgaccaactgcttcgccagtccggcaccttccgcgacaaccagcaagtcgccgagcgtgtgatggactcgaacgacatcgaaaaggaacgcgggatcacgattctcgcgaagaactgcgcggtcgaatacgaaggcacgcacgtcaacatcgtcgacaccccggggcacgcggacttcggcggcgaagtcgagcgcgtgctgtcgatggtcgactcggtgctgctgctcgtcgacgcggtcgagggcccgatgccgcagacgcgcttcgtcacgaagaaggcgctcgcgctcggcctgaagccgatcgtcgtcgtcaacaagatcgaccgcccgggcgcgcggatcgactgggtgatcaaccagaccttcgacctgttcgacaagctcggcgcgaccgaggagcagctcgactttccgatcgtctacgcgtcgggcctgaacggctacgcgtcgctcgacccggcggcccgcgaaggcgacatgcgtccgctgttcgaggcgatcctcgagcacgtgccggttcgcccggccgatccggaagcgccgttgcagctccagatcacgtcgctcgactattcgacgtacgtcggccggatcggcgtcggccgcatcacgcgcggtcgcatcaagccgggccagccggtcgtgatgcgcttcggcccggaaggcgacgtgctgaaccgcaagatcaaccaggtgctgtctttcaagggcctggagcgcgtgcaggtcgagtcggccgaagcgggcgacatcgtgctgatcaacggtattgaagacgtcggcatcggcgcgacgatctgcgcggtcgacacgccggaagcgctgccgatgatcaccgtcgacgaaccgacgctgacgatgaacttcctcgtcaactcgtcgccgctcgccggccgcgaaggcaagttcgtgacgagccgccagatccgcgaccgcctgatgaaggagctgaaccacaacgtcgcgctgcgcgtgaaggataccggcgacgaaacggtgttcgaagtgtcgggtcgcggcgagctgcacctgacgattctcgtcgagaacatgcgccgcgaaggctacgagctggccgtgtcgcgtccgcgcgtcgtgatgcaggaaatcgacggcgtgcgtcacgagccgtacgagctgctgacggtcgacgtcgaggacgaacaccagggcggcgtgatggaagagctcggccgccgcaagggcgaaatgctcgacatggcgtcggacggccgcggccgcacgcgtctcgaatacaagatctcggcgcgtggcctgatcggcttccagagcgaattcctgacgctcacgcgtggcacgggcctgatgagccacatcttcgactcgtacgcaccggtcaaggacggttcggtcttcgaacgtcgcaacggcgtgctgatctcgcaggacgacggcgcggccgtggcctacgcgctgtggaagctgcaggatcgcggccgcatgttcgtgaagccgggcgacgcgctgtatgagggcatgatcatcggcatccacagccgcgacaacgacctcgtcgtgaacccgatcaagggcaagcagctgaccaacgtgcgtgcgtcgggtaccgacgaagccgtgcgcctcgtgccgccggtccagatgtcgctggaatacgcggtcgaattcatcgacgacgacgagctcgtcgaagtgacgccgcagtcgatccgcctgcgcaagcgctttctgaaggaacacgaacgtcgccgcgcgagccgcgaaggcgcggtcgac

SEQ ID NO: 11572 - DNA, 576 bp, Burkholderia cepacia
gggaggagacagtgtggccatcgttacgccattcgtgcaggtcggaacttacccgacaaggaatttcgctaccttaggaccgttatagttacggccgccgtttaccgggacttcaatcaagagcttgcaccccatcatttaatcttccggcaccgggcaggcgtcacaccctatacgtccactttcgtgtttgcagagtgctgtgtttttattaaacagtcgcagccaccagtttattgcaaccccttcaccctcctggcgcaggccagtcaagctacaagggcgtaccttatcccgaagttacggtaccaatttgccgagttccttctcccgagttctctcaagcgccttagaatactcatctcgcccacctgtgtcggtttgcggtacggtcatcgttagactgaagcttagaggcttttcttggaaccacttccaattgcttcgctcccgaaggagctcgcgccacacccttgaattacgcgcccggatttgcctaagcgccttctccaatgcagcgaccgggacttccaacacccggacaaccttccgcgatccgtccccccatcgcatcta

SEQ ID NO: 11573 - DNA, 465 bp, Burkholderia cepacia
  misc_feature (211)..(211): n=g, a, t or c
atgcgccggcccctggcgcagacactgaggaggggggacgccgaaaaaaggaggcgaatcgtcggcaaccaggtactggcgctactccgcgtgggcaccgcggaggggatgtcgatgatcgccggcgtcgaggcgaagctggaaaagcaccagggcaacttgacccgcgcgcccgtcgagctcgggaaggactggcgcaccgaccggatgntgcgccgcctcgaggcgatgctgatcacggccgatgccaccaccacgctcgtgatcaccggcaacggcgacgtgctcgaccccgaaggcggcatctgcgcgatcggctcgggcggcgcgtacgcgcaggccgcggcccgcgcgctcgtcgagaacaccgacctgtcgccgcgcgaaatcgtcgagaagtcgctcgggatcgccggcgacatgtgcatctacacgaaccacaaccgcatcatcgaaacgatcgag

SEQ ID NO: 11574 - DNA, 987 bp, Burkholderia cepacia
atggacctccgccagctccccgcgctgaacgcgattcgcgcgttcgaagccgccgcgcgccacgagaacttctcgcgcgccgccgacgagctgttcgtcacgcacggcgcggtcagccaccaggtgcgcgcgctcgaggaagagctcggcgtgcagctgttcacgcgcaacggcaagcggctgtgcctgaccgacgccggcatgcggtacgcgcagcagatccgcaccgcgctgatggtgatcgccgacgcgacgcgcgacgtacgcgcgagcgaccgcgaccggcggctggtggtgtcgatgctgtcgtcgttcgccgcgcgcttcatcacgccgcgcatcggcacgttcatcgagcggcatccggaaatcgacgtcgagctgcagtcgaccaactcgctcaccgatttcgcgcgcgacgacgtcgatctggcgatccgcttcggcttcggcagctatccggggctgcacgtggagccgctgttcgaggaggtgttctttccggcctgcgcgccgacgctgaatggcggcaagctgccgcagacgcccgccgatctcgtgcactacccgctgctgcgctcggacgacgagctgtggcggccatggttcgacgcggccgggctcgatacgctgaccgagccgaaacgggggatcctgtaccaggattcgtcgaacctgctgctggccgcgatcgagggccagggcatcgcgctggtgcgccgctcgctcgcggtccacgacctgctcgacgggcgcatcgtgcgcctgttcgacatcgacgggccgagcccgtggcactattttttcgtgtgtccgccgccgctgctcaacacgccgcgcgtgcaggcgttccggacctggttgttcgaggaggtcgccgaatacaagcggctgtgcgacgagctggacgcgcggcgcgcggcgggaaaatgccccgccgagtgcgcgctggagggaggatggaaagggatcagcggccgtttgcgc

SEQ ID NO: 11575 - DNA, 399 bp, Burkholderia cepacia
atgagattgcttgacgccctggtcgaacaacgtattgccgccgccgccgcgcggggcgagttcgacgatttgccgggtaccggcgcgccgcaggcgctggatgacgacctgctcgtgcccgaggaggtgcgggtggccaaccgtatcctgaaaaacgcgggcttcgtgccgccggccgtcgagcaactgcgcgcgctgcgcaatctgcacgacgaagtgcaggcggtcagcgaccgtgccgcgcgttgccggctgcaggcgaagatcctcgcgctcgacatggcgctggaatcgctgcgcggcggcccgatggtgatgccgcgcgactactgccggcgcatcgcggaacgcctgtgcgagcgcgggctcgacgatgcgtccgccgaagcggggacgatg

SEQ ID NO: 11576 - DNA, 1461 bp, Burkholderia cepacia
atgacggaactcttcatcgacggcgcctgggtcgcaggctcgggccccgtcttcgcttcgcgcaacccgggcaccgacgctgtggcctggcagggcgacagcgcgtcggcggccgacgtcgaccgtgcggtcgcgagcgcgcgccgcgcgttcgccggctggtcggcgctcgacttcgaggcgcgctgcgaaatcgtcaagcgcttcgccgcgttgctcaccgaacgcaaggaagcgatcgcgaccgcgatcggccgcgagacgggcaagccgctgtgggaagcgcgcaccgaagtcgcatcgatggccgcgaaggtcggcatctcgatccaggcgtatcaggagcgcaccggcgagaagcgccaggacatggccgacggcgtcgcggtgctgcgtcaccgcccgcacggcgtcgtcgcggtgttcggcccgtacaacttccccggccacttgccgaacggtcatatcgtgccggcgctgatcgccggcaacacggtcgtgttcaagccgtccgaacttgcgccgggcgtcgcgcgcgcgacggtcgaggtgtggcaggcagccgggttgccgcccggcgtgctgaacctcgtgcagggcgagaaggacaccggcatcgcgctcgcgaatcatcggcagatcgacgggctgttcttcaccggcagttcggacaccggcacgctgctgcacaagcagttcggcggccgtccggaaatcgtgctcgcgctcgagatgggcggcaacaacccgctcgtgatcggcgaggtcgaggacgtcgacgcggccgtgcatcacacgatccagtcggcgttcctgtcggctggccagcgctgcacgtgcgcacgccgcatcttcgtgccgcagggcgcgttcggcgaccgcttcctcgcgcgtttcgccgacgtcacgtcgaagatcacggccgacgtgttcgacgccgatccgcagccgttcatgggcgcggtgatctcggcccgcgcggccgcgaagctggtcgacgcgcagtcgcgcctcgtcgagcagggcgcgaagccgatcatcgcgatgacgcagcgcgatccgcgcctgggcttcgtgaacgcggcgatcgccgacgtgacgggggtcgcgaacctgcccgacgaagaacatttcggcccgctcgcgcaggtcgtccgctacacgacgctcgacgacgcgatcgagcgcgcgaacgacacggcgttcggcctgtccgccggcctgctggccgacgacccgaaggtgtgggagcacttccgccgcacgatccgcgccgggatcgtcaactggaaccgccccactaacggcgcatcgtccgccgcgccgttcggcggcacgggccgctccggcaaccatcgcccgagcgcgtactacgcggccgactattgcgcgtatccgatggcgtcggtggaaagcacgcaactgactttgcccgcgagcctgtcgccgggcctgcatttc

SEQ ID NO: 11577 - DNA, 1341 bp, Burkholderia cepacia
ttgttacagatcttcgcgctcatcggcgcgttgttcctggtggccctgaacgggttcttcgttgcggccgaattcggcctcgtcaaactccgcgcgacgcgcgtcaagaccctcgcccgcaagcacggcatgcgcgggcgcatcctcgccgtcgtccacggccggctcgatgcgtatctttccgcgtgccagctcggcatcacgctcgcgtcgctcggcctcggctgggtcggcgaaccggcgttcgcgcaactgatcggcccgctgctcgacctgatcggcgtgcagtccgaacgcgtcgtgcatctgatctcgctggtgttcgcgttctcgctgatctcgttcctgcacatcgtcgtcggcgaactggcgccgaaatcgatggcgatccgccagtcggagaaggtcggcctgtgggtcgcgctgccgctctacgcgttctactgggcgatgtatccggcgatctgggtgctcaataccagcgccaacgcggtgctgcggctcgcggggctgtcggccgaccacggcggcgacgcgcactattcgaccgacgagctgaagctgatcctgcgcagccgccgcagcgcggccggcaatgcggcccagccggcgcgcggcacgtacagcaacgacgaatggaacacgctcgcgcattcgctcgatttttcgtcgatgaccgtgtcggacctgatgcggccggcccatgaaatgatcggcctgcggcgcgacctgccgctgcccgacaacatggagatcgtcgcgcggcaccgtttcagccgctatccgctgttcgaggatgcgtcgcgcgaacaggtgagcgggctgatccacctgaaggacctgctgctcgcgcgtcacgcgggcgccgcgctcgacgatctgtccgactacgtgcgcccggttcagtacgtgaagcccgacacgccggcgctggagctgttccgccgcttccgcaagggcgccccgcacttcgcgctggtcggcaacaagggcgagaagccgatcggcttcctgacgctcgacaacctgctcggcgcgctggtcggccagatccacgacgagttccgccagggcgatgcggactggagccgcctcgacgacggcacgctgatgggcaagggcagcctgcccgtcgtgtcgctcgagcaggcgctcggcatcgacatcgacgaaggccgcgcggaatcggtcggcggcctcgtgatccaggcgttgagcgacctgccgaccgaagggcagcgcgtgtcgttcgaccgcttcgacgtcgtcgtgaagaagatgaacgggccgcgcatcgtgctcgtgcgcgtctatccgaagatcgcgaaagaggccgacgaa

SEQ ID NO: 11578 - DNA, 3492 bp, Burkholderia cepacia
gtgcacgccacccctgtcgtccctatgccagataacgcttccaccccgtccgcttcacccgttgcccgcgtcaagcccggccagcgtttcgccttcgacggcgcgcacggctccgccgacgcgctcgccatcgcccgttatctcgccgacaaccgccaggacgtgccgctcctcgcggtgatctgcgcgaacgcggtcgatgcacagcggctgtcgcaggaaatccgctacttttcgcccgatgcgcgcgtgcgcctgctgcccgactgggaaacgctgccgtacgacaccttctcgccgcatcaggacctggtgtccgagcggctcgcgacgctgcacgacctcggcgagggccgctgcgacatcctgctcgtgcccgcgaccaccgcgctgtaccggatgccgcccgcgtcgttcatggccgcgtacacgttcgcgttcgcgcagggcgagcggctcgacgaggcgaagctgaaggcgcaactcacgctggccggctacgagcacgtgagccaggtcgtgcggcccggcgaatactgcgtgcgcggctcgctgatcgacctgtacccgatgggctcgccgctgccgtaccggatcgacctgttcgacgaccaggtcgattcgatccgcgcgttcgatcccgatacgcagcgcagcctctacccggtgcgcgacgtgcggctgctgcccggccgcgagtttccgttcgacgaagccgcgcgcacggcgtttcgcagccgctggcgcgaaaccttcgaaggcgacccgagccgcgcgccgatctacaaggacatcggcaacggcgtgccgtcggccggcatcgagtattacctgccgctgttcttcgacgagacggccacgctgttccactacctgccgcaggacgcgcacctcgtgttcaccggcgacctcgaggcgtcgatccgccgcttcacggccgacacgaagcagcgtcacgcgttcctcgcgcacgatcgcgagcggccgatcctcgagccgcagcggctgttcctgtccgacgaggatttcttcgcgttcgcgaagccgttcgcgcgcgtcgtgctgcccgcgcagccggccggcggctgggcgaccgccctgcccgagctcaccgtcgaccgccatgcggacgatccgctcgcgtcgctgcgcacgttcgtcgaatcgtcgggcaagcgtgtgctgctgacggtcgaatcggccggccgccgcgagacgatcctgcaactgctggccgaacaccacctgcgccccgcgtcgaacgacgacttcgcgagctggcttgcaagcgacgaacgcttcgcgctcggcgtcgcgccgctcgcgaacggcttcgcggtgccgggcgaaggctatgcgatcgtcaccgagaccgagctgtacggcgcgctcggccgccgcgcgggccgtcgtcggcaggagcaggcaagcaacgtcgacgcaatggtgcgcgacctgtccgagctgaaggtcggcgacccggtcgtccacgcgcagcacggcatcggccgctacatgggcctcgtgtcgatggatctcggcgaaggcgaaaccgaattcctgcatctcgaatactcgggcgacagcaagctctacgtgccggtcgcgcaactgcacgtgatctcgcgctacagcggcgccgatcccgacagcgcgccgctgcatgcgctcggctccggccagtgggagcgcgcgaagcgcaaggccgcccagcagatccgcgatacggccgccgagctgctgaacctgtacgcgcgccgcgcggcccgcgaaggccacgcgttctcgctcgacccgcgcgactacgtgaaattcgcggaaagcttcggcttcgaggaaacgcccgaccaggccgcggcgatcgcggccgtgatcggcgacatgacgagcggcaagccgatggaccgcctcgtgtgcggcgacgtcggcttcggcaagaccgaggtcgcgctgcgcgcggcgttcatcgcggtgctgggcggcaagcaggtcgcgctgctgtcgccgaccacgctgctcgccgagcagcacacgcagaccttcgccgaccgcttcgcggactggccggtgcgcatcgtcgagctgtcgcgcttcaagaccgcgaaggaagtgaatgcggcgatcgcgcagatcaacgaaggcagcgtcgacatcgtgatcggcacgcacaagctgctgtcgtcggacgtgcagttcaagcgtctcggcctcgtgatcatcgacgaggaacaccgcttcggcgtgcgccagaaggaagcgctgaaggcgctgcgcgcggaagtccacgtgctgacgctcaccgcgacgccgatcccgcgtacgctcgggatggcgctcgaagggctgcgcgatttctcggtgatcgcgaccgcaccgcagaagcggctcgcgatcaagaccttcgtgcgccgcgaggaggaaagcgtgatccgcgaggcgatgctgcgcgagctcaagcgcggcggccaggtgtacttcctgcacaacgaagtcgagacgatcgagaaccgcaaggcgatgctcgaggcgctcgtgcccgaggcgcgcatcgtgatcgcgcacggccagatgcacgagcgcgagctcgaacgcgtgatgcgcgatttcgtcgcgcagcgcgcgaacgtgctgctgtgcacgaccatcatcgagaccggcatcgacgtgccgagcgcgaacacgatcatcatgcaccgcgcggacaagttcggcctcgcgcagcttcaccagttgcgcggccgcgtcggccgctcgcaccaccaggcctacgcgtacctgctggtccacgatccgcagtcgctgaccaagcaggcgcagcgccgcctggaagcgatccagcagatggaggaactcggctcgggcttctatctcgcgatgcacgacctcgagatccgcggcaccggcgaagtgctcggcgacaagcagtcgggcgaaatccacgagatcggcttccagctctatacggacatgctgaacgacgcggtgaaggcgctgaagaacggcaaggagcccgacctcaccgccccgctcgccgcgacgaccgaaatcaacctgcatgcgcccgcgatcctgccggccgactactgcgcggacgtgcaggagcggctgtcgctgtacaagcggctcgcgaactgcgagcacggcgacgcgatcgacggcatccaggaagagctgatcgaccgcttcggcaagctgccgccgcaggcgcacgcgctcgtcgagacgcaccggctgcggatcgccgcgaagccgctcggcatcgtgaagatcgatgcgagcgaggtcgcgatcgggctgcagttcgagccgaatccgccgatcgatccgatgcggatcatcgagatggtgcagaagcatcgccacatcaagctcgcgggccaggacaagctgcgcatcgagacgcgctcgcccgatctcgcgatccgcgtgtcgacgatcaaggaaacgctgcgcgcgctcggcccgaaacagggggcggccgtcgcggcccgc

SEQ ID NO: 11579 - DNA, 1320 bp, Burkholderia cepacia
ttggctggccggcgcttattgcgactgagcctcgccagcggcgggctgcagcgcgccgctcgcttccatctgcgctttcacggcctcgccgagctggtacacggtgagcgcgtagaagaagctgcggttgtagcgcgtcagcacatagaagttcttcaggccgagcatgtattcggtcgcgcgccccggcgtcggcaggtcgaccacggtcaccggcgtgccggcttcggtcgtgatgttgaccgtcggctcgttcagcgtcatgcccgcgcgcagcagttgcgacagcgcccagtgcggttcgggctggccgtcggcggcggcctgtgcgatgcccaggctgcccgtgtcgggcgtgatctgccagaccaccgggcggtcggtttcccagccgtgctgcttcaggtagttcgcgacactgccgatcgcatcgacaggactgctgcgcagatcgacatggcccgtgccgtcgaagtcgaccgcatattcgcggatgctgctcggcaggaactgcggaatcccgatcgcgccggtgtacgagccgagcacggtggtcgggtcgagctggttgtcgcgggtccagaccaggaagtcttcgaggttcttgcggaaggttgcctggcggctgtcgcgattcggcgtgtccgggtagtcgaacgtgagcgtcgtcagcgcgtcgagcacgcggaaattgcccatgtagcggccgtagatggtctcgacgccgatgatgccgacgatcacctcgggcggcacgccgaactgctcggatgcgcgctgcagcgtcgcctggttcgccttccagaacttcacgcccgcgttgatgcggatcggctcgatgaagcgcgagcgatacacgcgccagttcttgaccgtcggcgacggggccggcctcacgagcttgacggccgtcgccgagtagctgacgcgcgagaacagcgcatgcaggctcgccgaatcgaagccgttgcgactcaccatctcgtcgatgaacgcgtcgaccttcgcgttgctcgcgtaacgctgtggaacgatttcctcttcgaaggtctgaccttgcggtgtcggctgctgcggctgggcctgggcgacgagcgtgccggcggacttcgcaggctgcgtctgcgccatggcaggcgcggtgccgagagccgcggcgatggcagcgacgacgagcggagcgcgaacacggaacagcgcggagagaagggcggcaggcttgctggaattcatgtcgaagcgggcggacagggcgatggtgttcggcgcagtatacccgacgcatccggcgcgccgggacgaagctggcccccgttgtgg

SEQ ID NO: 11580 - DNA, 1659 bp, Burkholderia cepacia
gccggcgcgggcaagcgcaaacgcgcgcccgcgcgggcgaacaccgccccgcgcgcaccggcggctgccggcgacgcggccgcacagcaccacgagatccagaacaaagcgatgccgggcgcaagcaccggcacgccccccggaacggccgccgctgggcccgccgattccggctctcgcagcgtttcacccagcgcatccaccttgatccagatgaggagtttcatgcagcgcgccaccaagatagtcgccacgatcggcccggcttccagttcgccggagattctgctgcagatgatgcaggcgggcctcgacgtcgtgcggctcaacttttcgcacggcacggccgacgatcaccgccagcgcgccgaaatggtgcgcgaggccgcccgcaaggttggccgcgagatcgcgatcatggccgacctccagggcccgaagatccgcgtcggcaagttcgagaacggcaagaccacgctcgtgcccgggcagccgttcatcctcgatgcgggctgcgaactcggcaacgacgagcgtgtcggcctcgactacaaggaactgccgcgcgacctgaagccgggcgacctgctgctgctgaacgacggcctgatcgtgctgaccgtcgagcgcgtgctcggcgacgagatccacacgatcgtcaaggtgggcggcgagctgtcgaacaacaaggggatcaaccgccagggcggcggcctgtcggcgccggcgctgactgcgaaggacatggaagacatccgcaccgcgatgtcgctcggcgcggacctcgtcgcggtgtcgttcccgaagaatgcgaccgacatggaaatggcgcgccagctcgcgaacatcgcgggcgcgccgtacggcatcaagccgaagatgatcgcgaagatcgagcgcgcggaggcgattccggcgctgcagagcatcctcgacgcgtccgacggcatcatggtcgcgcgcggcgacctcgcggtggaagtcggcaacgcggccgtgccggcgctgcagaagcgcatgatccggatggcgcgcgagtcgaacaagctcgtgatcaccgcgacgcagatgatggaatcgatgatccacgcaccggtgccgacccgcgcggaagtgtcggacgtcgcgaacgcggtgctcgacggcaccgacgcggtgatgctgtcggccgagacggccgccggcaagtacccggtcgtcacgatcgagacgatggcggccgtgtgcgtcgaagcggaaaaatccgaagaagtcgagctggacaaggatttcctcgaccggacgttcacgcggatcgaccagtcgatcgcgatgggcgcgctgttcaccgcgtaccacctgggcgcgaaggcgatcgtcgcgctgaccgaatcgggcgcgaccgcgctgtggatgtcgcgtcactacacgcacgtgccgatcttcgcgctgacgccgcgcgtcggcagcgagcgcacgatggcgctgtaccgcaacgtgacgccgctgcacgtcgacttcaacagcgaccgcgattcggcactgcaggcggcgctcgagatcgtcgtcaagcagggttacgtgcagcatggcgacatggtcgtgctgaccgtcggcgagccgatggggcaggcgggcggcaccaacacgctgaagatcgtgcgggtcggcgagcactat

SEQ ID NO: 11581 - DNA, 1029 bp, Burkholderia cepacia
atggcattcaacgtcactctcaagcaaagcggccggcaattccaggtcgagtcggacgaaaccgtgctggcggccgcgctgcgccagaacgtccatctgccgtacggctgcaagaacggcgcgtgcggctcctgcaagggccagatcgtgtcgggccagatcgaacagggcccgcacgccgcgtcggcgctgtccaacgacgaacgcacgcgcggcctggcgctgctgtgctgctcgaaggcgcaatgcgacctcgagatcgacgtgcgcgagatcgccggcgtcgacggcgtgcaggtcaagaagctgccgtgccggatcgccgcgctcgaacgcaaggcggacgacgtgatggtcgtgaagctgcagttgcccgccaacgaacgcctgcagtacctcgcgggccagtacgtcgaattcatcctgaaggacggctcgcgccgcagctactcgatggcgaacgcgccgcacgaggaaggcccgatcgagctgcacatccgccacatgccgggcggcaagttcaccgaccacgtgttcggtgcgatgaaggagcgcgacatcctgcgcttcgaaggcccgctcggcacgttcttcctgcgcgaagactccgacaagccgatcgtgctgctcgcgtcgggcaccggcttcgcgccgatcaaggcgatcatcgagcatgtgaagcattcgggcatcacgcgcccgatgacgctttactggggcgcgcgccgcaagaaggacatctacctcgccgagctcgccgagcagtgggcgcgcgagatcccgaacttcaagtacgtgccggtgctttccgagccggacgacgccgaccagtggacgggccgcaccggcttcgtccatcgcgcggtgatcgaggatctgcccgacctgtccggccaccaggtgtacgcgtgcggcgcgccggtgatggtcgaatccgcgcagcgcgacttcacgcagcaccacgcgctgtcggccgacgagttctacgcggactcgttcacgagcgccgccgatctcgcgcatccggtc

SEQ ID NO: 11582 - DNA, 822 bp, Burkholderia cepacia
atgcgcgccatgacatcgaaccaggcgaacaccgcgaatcagaccggcgcaggcggcccagggcagccgggcgcgggcgatcccgcagcctcgcccgcggcctccgcgtcgccgacgttcagcccgttataccagcagattaagtcattgatcacgcaaagtctcgaatccggcgagtggaagccgggcgagatcatccccagcgaagtggagctcgcggcccgttacaaggtcagccagggcaccgttcgcaaggcgatcgacgagctggccgccgaaaacctcgtggtccggcggcagggcaagggcacttttgttgcaacgcacaacgaagatcgcgcgcagttccgcttcctgcggctgctggccgacgacggtgccgagcacccgcacgtgagccgcctgctcgaatgccggcgcctgcgcgcgccggccgagatcgcgcggcagctcgacctgaagccggccgatcccgtcgtgcaggtgcgccgcctgctggagttcgagagcgaagcgacggtgctcgacgagatctggctgccgggcgcgatgttccgcgggctcacgttcgagcggctgagcgaatacaaggggccgctctacgcgatgttcgagacggagttcggtacgcggatgatccgcgcgacggagaagatccgcgcggtcgcggcggatccggcggtggccgacctgctgcacgtgccggcgggtttcccgctgctgtcggtggagcgcgtgtcctatacgtacggggaccggccggtggaagtgcgacgcggctggtatgtcacaaccgggtactactatcagaatgacttgagt

SEQ ID NO: 11583 - DNA, 1029 bp, Burkholderia cepacia
atgcggggcatgacagacgccacctccgctcccgcttctcccgccagcccgccgttcgccggcctcacgcccgaatgcgtgctcgacgcgctcgacagcgtgctgatgccggccggcctgcgcaccgacgggcgcttgcttgccctcaacagctacgaaaaccgcgtctaccaggtcggtatcgaagacggcccgccggtcgtcgcgaagttctatcgcccggcgcgctggtcggacgacgcgattctcgaagagcatgcgttcgtcgccgaactcgccgcgcgcgagattccggcggtgcccgcgcgatcgttcgacggccgcacgctgcacgcgttcgacggtttccgcttctcgatcttcgagcggcgcggcgggcgcgcacccgatctcgaccgcagcgacacgctcgaatggctcggccgcttcatcggccgcattcatgcggtcggtgcgacgcagccgtatgtcgcgcgtcccgtgctcgacatcggcacgttcggctacgagccgcgcgactacctgctcgcgcacgatttcattccggatgacgtaagaccggcgtacgagaccgcggtcgcgctggcgctcgaaggcgtcgaggcggcgttcgagcgcgcgggcgagattcgcctgctgcgcacgcatggcgactgtcatccgagcaacgtgctgtggaccgatgccggcccgcatttcgtcgacttcgacgacagccggatggcgccggccgtgcaggatctgtggttgctgctgccgggcgatcgcgaaggcgcgtcgcgcgcgctggcggacctgctcgccggctacgaggatttctgcgaattcgagccgcgcgagctgtatctcgtcgaagcgctgcgcacgctgcggctgatccactacgcggcgtggctcgcgcggcgttgggacgatccggcgtttccggccgcgttcccgtggttcaacacgcatcgttactgggaagcgcgcgtgctcgaactgcgcgagcagatcggcgcgatgcaggaagggccgctctggcccgtg

SEQ ID NO: 11584 - DNA, 732 bp, Burkholderia cepacia
ttgctttggtcttcgacgatcgccttcagcgcttcgcgctttgctgcgaacttcgcgaccaggcgggcgcgcttcttttcacgttcgatcagtgccagtttagccacggtaacctcagtttctgaacgggaacttgaagctggcgagcagagcctttgcttcgtcgtcggtcttcgcagtcgtcgtgatgctgatgttcagcccacgcagtgcgtcgatcttgtcgtaatcgatttcggggaaaatgatctgctctttcacaccgatgttgtagttgccacggccatcgaaagcacgacccgacacgccgcggaagtcacgcacgcggggcagggcaaccgtcacgaaacggtcgaggaattcgtacatcgcgcggccacgcagcgtcaccatcgcgccgatcgggtaaccctggcggatcttgaagcctgcgattgccttgcgggccttcgtgacgaccggcttctggccggcgatcttcgtgaggtcgccaacggcgttctcgatgatcttcttgtcagcgatcgcttcgccaagacccatgttcagcgtgatcttggtgatgcgcggcacttccatgaccgacttgtaaccgaacttctcgatcaggccgggcacaaccttttctttgtaaaactcttgaaaacgagccattttttactccgctgcgtcaggcgctcagtacggcaccggtcgtcttcaggaagcgaaccttcttgccttcctcgacct

SEQ ID NO: 11585 - DNA, 2139 bp, Burkholderia cepacia
atgttcaacaaggtcgtgaaggaattccagtggggccagcacaaggtgcgcctcgaaaccggtgaagtcgctcgccaggcgagcggcgccgtgatcgtcgacgtcgaagacaccgtcgtgctcgcgaccgtcgtgggcgcgaagtcggcgaagccgggtcaggacttcttcccgctgaccgtcgactacctcgagaaaacctattcggccggcaagatcccgggcggcttcttccgccgcgaaggccgtccgtcggagcacgagacgctgacgtcgcgcctgatcgaccgtccgctgcgcccgctgttcccggaaggcttctacaacgaagtccaggtcgtgatccacgtgctgtccgtgaacccggaaatcccggcggacatccccgcgctgatcggcgcatcggctgcgctcgccgtgtcgggcctgccgttcaacggcccggtcggcgccgcacgcgtcgcgtacatcgacaacgcgtacgtgctgaacccgacgcgtgaccagatcaaggcatcgagcctcgacctcgtcgtcgcgggtaccgagcgcgccgtgctgatggtcgaatcggaagccgaccaactgtcggaagacgtgatgctgggcgcggtggtgttcggccacgagcagatgcagatcgcgatcgacgcgatccacgaactggtgcgcgacggcggcaagcccgagtgggactggcagccggcgccgaagaacgaggcgctgatcgcacgcgtgaccgagctggcgcagaacgatctgctcgccgcttaccagctgcgcgacaagcaggcacgttcggcgaagctgaaggaagtctacgcggcgacctcggcgaagctcgaggaagacgcgctggcggccggcacggtcgcggccgacaaggccaccgtcggcaatatcctgttcgacatcgaagcgaagatcgtccgctcgcagatcctgaacggcgagccgcgcatcgacggccgcgacacgcgcaccgtgcgcccgatcgaaatccgcaccggcgtgctgccgcgtacccacggctcggcgctgttcacgcgcggcgagacgcaggcgctggtcgtcgcgacgctcggcacgaagggtgacgagcagatcatcgacgcgctcgaaggcgaataccgcgagcgcttcatgcttcactacaacatgcccccgttcgcgaccggcgaaacgggccgcgtcggttcgccgaagcgccgcgaaatcggccacggccggctggccaagcgcgcgctggtcaagtgcctgccgagcgccgacgaattcggctactcgatccgcgtcgtgtcggaaatcaccgaatcgaacggttcgtcgtcgatggcatcggtgtgcggcggctgcctcgcgctgatggacgccggcgtgccgatgaaggcgcacgtcgcgggtatcgcgatgggcctgattctcgaaggcaacaagttcgcggtgctgaccgacatcctcggcgacgaagaccacctcggcgacatggacttcaaggtggccggcaccgagcaaggcgtgacggcgctgcagatggacatcaagatccagggcatcacgaaggaaatcatgcaggtcgcgctcgcgcaggcgaaggaaggccgcatgcacatcctcggcaagatgacctcggcggtgtcgggtgcgaacacgcaactgtcggaattcgcgccgcgcatgatcaccatcaagatcaacccggaaaagatccgcgacgtgatcggcaagggcggttcggtgatccgcgcgctgacggaagaaacgggcacgaccatcgacatctcggatgacggcgtcgtgacgatcgcgagcacgagcagcgacggcatggccgaagcgaagaagcgcatcgagcagatcacggccgagatcgaagtcggccaggtgtacgaaggcacggtgctcaagctgctcgatttcggcgcgatcgtgaacctgctgccgggcaaggacggcctgctgcacatctcggaaatcgtcaacgagcgcgtgaaggacatcaacgactacctgaaggaaggtcagcaggtgaaggtcaaggtgatccagacggacgagaagggtcgcgtgcgtctgtcggccaaggcgctgctgaatgaagcagcggctgcagcgcagtcggatacgccgccgcagcag

SEQ ID NO: 11586 - DNA, 1152 bp, Burkholderia cepacia
atgaccgccatttcaatgaaggacgtctcgaagcgctacggcgaccatgcgccggtgctgcgcgacgtgaacctcgagatcgcgtcgcacgaattctgcgtgtttctcggtccgtcgggctgcggaaaatccacgctgttgcggatgatcgccgggctcgaggacgtgaccgaaggcgagctgcggatcggcggcgcacggatgaacgacacgccacccgcggagcgtggcgtcgcgatggtgttccagagctatgcgctgtttccgcacatgactgtgttcgacaacatcggtttcgggctgcgaatcgccggcacgccgaaggacgaaatccgccgccgcgtgactgaggccgcgcgcgtgctgcagctcgaagcgctgctcgatcgcaagccgaaggcgttgtctggcgggcagcgccagcgcgtcgcgatcggccgcgcgatcgtgcgcgagccgcgcgtgttcctgttcgacgagccgctgtcgaacctcgacgcgacgctgcgcggccagacgcgcgtcgaaatcgcgcggctgcacgcgcgcttcacgcaatcgagttcggtctacgtcacgcacgaccagatcgaggcgatgacgctcgccgaccggatcgtgctgctgcatgcgggcgacgacgtcgcgcgcttcggcagcatcgcgcaggccggtgcgccgctcgagttgtatcaccggccggccaaccgcttcgtcgcgggcttcatcggctcgccgcggatgaattttctgccggccgtcgtcgacgcgggcgatgcgcacggctgccggctgacgctggaaggcaccggcgagacgctgacgctgcgcgatcgcgcgttgccgcgccacgtcggccgcggcgcgcgcgtgacgctcggcgttcgccccgagcacctgacgatcggggcggcaagcgacaccgacctgccggcgctcgtgcgcgacgtcgcgctcgtcgagcagctcggcgaagccgcatacgtccacctcgaccagcccggcggcgtgccgctgctcgcgaaactgccggggcaggcgacgttgcggcgcggcgagcggcatgcgttccacgtgccgccttcgcgctgccatctgttcgacgaagccggcatcgcggtgccggcgcttcacgccgaagcggcgttcgcc

SEQ ID NO: 11587 - DNA, 2097 bp, Burkholderia cepacia
atgaatcggccgctgaatcgtatcctgccgcgcgtgaccggtcccgcctcggtgtggacgtgggtcaagtggtccttgctcgccgcactgttgatcgcggtcgcgatcgtcgcacggctcgtgcagaccgagatcgaaacgtcccggttgcaggcgcactacctgtccgagctcacccgcgacgtcggctacacggtcgaggcggggccgagcgatcacatccgcttcccggcaaacggcccgtacgaccagcgcttcggctacgcgatgattcccgcgttccagcagcggctgctcgcacgcggcttcgtcgtcagcgagcaggcgcgcgattcgcagcggatgctgtcgctcggcgagcgcgggctgttcctcccttacgaagagaaagaccagacgggcctgatgctgttcgattcgaccggctcgccgctgttcgcgaccgtgtttccgcagcgcgtctatgccgatttcgacacggtgccgcgcgtgatcaccgattcgctgctgttcatcgaggatcgctacctgctcgatgcgaacgagccgaaccgcaacccggcgatcgactggggacgcttcagccgcgcgctcgccgaccaggcgctgcacgtcgtcaaccgccaccaggcgcgcccgggcggcagcacgctcgcgacgcagatcgagaagttccgccattcgcccgagggccgcaccgcgacgccgcccgaaaagctgcggcagatcgcctccgcgtcggtgcgcgcctacctgaacggtccgcagacgatgctcgcgcgccgcacgatcgtcgtgcgctacctgaactcggtgccgctcgccgcgcggccgcacgtgggcgaaatcaccggcatcggcgacggtctcgccgcgtggtacggccgcgacttcaacgacgtgaatcgcgtgctgtccgcgccgacgaccggcgacaacgtcgatcagcagggcaagacgttccgcgaggtgttgtcgctgctgatcgcgcagcgcgcgccgtcgtacttcctgaaccgcggctatccggcattgcagaagctgaccgacagctacctgcggctgctgtcgaacggcggcgtgatctcgcccgcgctgcgcgatgccgcgctcgccgcgcagatcgaacgcagcgcgccgccggccgccgcgcgcgtgcagtcgttcgtgtcgcgcaaggccgtcacgtcggcgcgcgcgtcgctgctgtcggcgctcggcatcagcgacctgtaccagctcgaccagctcgatctccaggcgaccagcacgctcgacaacggcgtgcagcaggcggtcgccgcgcggctcgcgcaagcgtcgacgcgtgaaggcgcacaggccgccggcctgtacggtttcgaaatgctcgcgccgaaggacgacccgtcgcacctcacgtacagcttcacgctctacgaacaccgcaacggcgcgaacctgctgcgcgtgcagaccgacagcgtgaaccagccgttcgacgtgaatcgcggcggccgcatcaatctcggctcgaccgcgaagctgcgcacgctgatcacgtacctgcagatcgtctccgacctgcatgcgcgctacgcgaacctgtcgaacgcggagctcgcgcgcgtgaagcccgatccgatcgacgggctgtcgcgctgggcgctcgactatctgtcgcatacgcgcgaccgctcgctgcaggcgatgctcgacgcctccgtcgaacgcaagtattcggcgagcccggacgtgttctacacgggcggcggcgcgcaggtgttctccaacttcgagaagtcggacaacggccgcatcatgacgctgcacgcggcattcgagcattcggtgaacctggtgttcgtgcggctgatgcgcgacatcgtccactacgagacgctgcaggcggccgggccgtcgtcgtcgtggctcaacgatcccgcgcagcgccagcactacctgcagcaattcgtcgacggcgaaagccaggtctacgtgaagcgctactacacgcgctatgcgggcaaggcgcccgacgacgcactcgcgctgatgctgcgcgacgtccgcaagtcgccgccgaagctcgcgacggtgctgcgcagcgtcgcgccg

SEQ ID NO: 11588 - DNA, 2064 bp, Burkholderia cepacia
atgcccccatccgtcacgcgactggcacgcatgttgcgttttcccgagcgccgtcaggaatcacatgaatgcatggagacacgcttgtccaagatcgaatcggttcttcacgaaacccgtcagttcgcgccgcccgcggcgctcgagaagacggcggccatttccggcatgccggcctaccgcgcgctcgtcgccgaggccgagcaggattacgaaggcttctgggcgcgtctcgcgcgcgaaggcctcacgtggcacaagccgttcacgaaggtgctcgacgagcgcaacgcgccgttctacacctggttcgacgacggcgagctgaacgcgtcgtacaactgtctcgatcgtcacgtcgaagccggccacggcgagcgcgtcgcggtgatcttcgaggccgacgacggcaccgtcacccgcgtcacctatgccgatctcctcgcgcgcgtgtcgcgtttcgcgaatgcgctgaagaaacgcgggatcggcaagggcgatcgcgtcgtcatctacattccgatgtcgatcgaaggcatcgtcgcgatgcaggcctgcgcgcgcatcggcgcgacccactcggtcgtgttcggcggcttctccgcgaaatcgctgaacgagcggctcgtcgacgtcggcgcggtcgcgctgatcaccgccgacgagcaggcgcgcggcggcaagacgctgccgctcaagagcatcgccgacgaggcgatcgcgctgggcggctgcgaagcggtcaagagcgtgatcgtctatcgccgcaccggcggcaagatcgactggcatgcagaccgcgacctgtggatgcacgagttggtggacggcgaatccgaccgctgcgagccgacctgggtcggcgccgagcatccgctgttcatcctgtatacgtcgggctcgaccggcaagccgaagggcgtgcagcacagcacgggcggctacctgctgtgggccgcgcagacgatgaagtggaccttcgactggaaacccgacgacgtgttctggtgcacggccgacatcggctgggtcacgggccacacgtacatcacctacggcccgctcgcatgcggcggcacgcaggtcgtgttcgaaggcgtgccgacgtatccggacgccggccgcttctggaagatgatcggcgatcacaaggtcaccgtgttctacaccgcgccgaccgcgatccgttcgctgatcaaggcggccgaagccgacgacaaggtgcatccgaagagctatgacctgtcgagcctgcgcatcatcggcacggtcggcgaaccgatcaatccggaagcgtggatgtggtaccacaagcacgtcggccacgagcgctgcccgatcgtcgatacgtggtggcagaccgagaccggcggccacatgatcacgccgctgccgggcgccacgccgaccgtgccgggttcgtgcacgctgccgctgccgggcatcacggccgcggtggtcgacgagacggggcaggacgtgccgaacgggcaaggcggcattctggtcgtcaagcgcccgtggcccgcgatgatccgcacgatctggggcgacccggagcgtttcaagaagagttactacccggaagagctcggcggcacgctctatctggccggcgacggcaccgtgcgcgacaaggagaccggctacttcacgatcatgggccggatcgacgacgtgctgaacgtgtcgggccaccggctcggcacgatggagatcgagtcggcgctggtgtcgcatgaactcgtggccgaggcagcggtggtcggccgtccggacgatacgacgggcgaggcggtcgtggcgttcgtggtgctgaagcgttcgcgcccggaaggcgacgaagcggcggcgctcgcgaagacgctgcgcgactgggtcggcaagcagatcggaccgatcgcgaagccgaaggacatccgcttcggcgacaacctgccgaagacgcgctcgggcaagatcatgcggcgcctgctgcgctcgctcgcgaagggcgaggcgatcacgcaggacacgtccacgctcgagaacccggccatcctcgagcagttgaaccgttcgatg

SEQ ID NO: 11589 - DNA, 1245 bp, Burkholderia cepacia
atgtttgacagagcccaaagcaccatcgcgaacgtcgatcccgaaatctttgcagcgatcgagcaggaaaaccgccgccaggaagatcacatcgagctgatcgcgtcggaaaactacacgagcccggccgtgatggccgcgcagggctcgcagctcacgaacaagtacgcggaagggtatccgggcaagcgctactacggcggttgcgagtacgtggacgtggtcgagcagctggcgatcgaccgcgtgaagcagctgttcggcgcggaagcggcgaacgtgcagccgaactcgggttcgcaggcgaaccagggcgtgttcttcgcgatgctcaagccgggtgacacgatcatgggcatgagcctcgcgcacggcggccacctgacgcacggctcgccggtgaacatgtcgggcaagtggttcaacgtggtgagctacggcctgaacgagaacgaagacatcgactacgacgcggccgagaagctggcgaacgaacacaagccgaagctgatcgtcgcgggcgcatcggcattcgcgctgaagatcgatttcgagcgtctggcgaagatcgcgaagtcggtcggcgcatacctgatggtcgacatggcgcactacgcaggcctgatcgcggcgggcgtgtacccgaacccggtgccgcacgcggatttcgtgacgacgacgacgcacaagagcctgcgcggcccgcgcggcggcgtgatcctgatgaaggcggaatacgagaagccgatcaactcggcgatcttcccggggatccagggcggcccgctgatgcacgtgatcgcggcgaaggcggtggcgttcaaggaagcgctgtcgccggagttcaaggaatatcagcagaaggtggtcgagaacgcacgcgtgctggccgaaacgctggtcaagcgcgggctgcggatcgtgtcgggccgtacggaaagccacgtgatgctggtggacctgcgcgcgaagcacatcacgggcaaggcggcggaagcggcgctcggcgcggcgcacatcacggtgaacaagaacgcgattccgaacgacccggaaaagccgttcgtgacgagcggcatccgtctcggctcgccggcgatgacgacgcgcggcttcgggccggcggaagccgagcaggtcggcaacctgatcgccgacgtgctggagaacccggaagacgcagcgacgatcgagcgcgtgcgcgcgcaggtcgccgagctgaccaagcgtttcccggtctatcgc

SEQ ID NO: 11590 - DNA, 891 bp, Burkholderia cepacia
atgctcgactacgcgttgctcgatgccctcgccgccgtgatccggcacggttcgttcgagcgggcggccaaggagctgaatgtcacgccgtcggcggtgtcgcagcgcgtgaagctgctggaggagcgggtcggcagcgtgctcgtcaagcgcgggcagccgtgcgtcgcgaccacgtcgggcgcgctgctgtgccggcataccgaacgcgtgcagttgctggaagccgaactgggcggccggatgcccgcgttgccgggccagatcgcgagcgcgtggccgacgctgcgcgtggccgtcaacgacgacagcgtcgcgacgtggttcatcgacgcggtcgggccgttctgcaccgagcgcgagacgctgctcgacctcgtgatcgacgatcaggattacacggcctcgcgcatccgcgacggcagcgtgcagggcgccgtgaccgcgcaggccgagcccatccagggatgccggtcggagcggctcgggcggatccgctatcgcgcggtgtgttcgccggcgttttacgcacgttatttcgacgcggggatcacgcgcgatgcgctgcgccgcgcgccgtgcgtgatgttcaatccgaaggacggcttgcaggcgcgcttcatccggcgcgtgacgcgcgcggatctcgatccgccgcagcactggataccgcacgtcgcgggctacctgcgcgcgtgcgaaacgggactgggatgggggatgtgcccggaccggatggtcgaccgccaactggcggcgggcgagttgatcgacatgtcgcgcgggcgaaccatcgacatcgatctgtactggcagagctggcgtctgtcgatcggctggctcgacgatttcagcgcggcgctgaaagcgcgtgccgcgctgtttctcgat

SEQ ID NO: 11591 - DNA, 816 bp, Burkholderia cepacia
atggcggaagcagcaacgaaagacgcgccactcaaccagtggacgaggaacatcatggaaatcgatctgaatgccgatctcggcgaaggatgcggatcggacgaggcgctgctcgacctcgtcacgtcggcgaacatcgcatgcggctggcatgcaggcggcgcgaacgcgatgcgcgactgcgtgcgctgggccgtgcagaaaggcgtgtcgatcggcgcacacccgagctttcacgatccggagaatttcggccgcaaggaaatgcagttgccggccggcgacatctatgcgggcgtgctgtaccagctcggcgcgctgtcggcgatcgcgcaggccgagggcggccgcatcgcgcacgtgaaaccgcacggcgcgctgtacaaccaggccgcgcgcgatccgctgatcgccgacgcggtggtgtcggcgatccacgacttcgatccgtcgctcgcggtgttcgggctcgcgaacagcgtgttcatcgcggccgcgcggcaggcggggctcgcggcggtggaggaagtgttcgccgatcgcggctaccgcgcggacggctcgctggtgccgcgcagcctgcccggcgcgctgatcgacgacgaagacgcggtgctcgcgcgcacgctcgacatggtgcgcaaccggcaggtgcgcgcgctgagcggcgaatgggtgccgctcaatgcgcagaccgtctgcctgcatggcgacgggccgcatgcgctggcgttcgcgaagcggatccgcgcggcgctcgaagccgccggcgtcgacgtcgtcgcgcccggcgcgctgcaggccgacgaaggcgcg

SEQ ID NO: 11592 - DNA, 1178 bp, Burkholderia cepacia
ctgccgatcctgtgcgcgggtctgctcaccgccgacccggtcgatctcgcaacgtgccgaacctgaaggacgtgcgcacgacgctgaaggtgctgaaccagatgggcgtgaagagcgagaccgacggctgccgcgtgcagctcgacgcgtcgcgcgtcgacaacctcgtcgcgccgtacgagctcgtgaagacgatgcgcgcgtcgatcctcgtgctcggaccgctgctcgcgcgtttcggcgaggcgaaggtgtcgctgccgggcggctgcgcgatcggcgcgcgaccggtcgaccagcacatcaagggcctgcaggcgatgggcgccgagatcagcatcgagcacggcttcatcgaggcgcgcgcgaagcgcctgaagggcgcgcgcatcgtgaccgacatgatcacggtgacgggcacggaaaacctgctgatggccgcgacgctcgccgacggcgagacggtgatcgaaaacgccgcgcgcgagccggaagtgagcgatctcgcacacttgctggtcgcgatgggcgcgaaaatcgacggcatcggcaccgatcgcctcgtgatccagggcgtcgagcggctgcacggcgcgcgtcatgcggtgatccccgaccggatcgaggccggcacgttcctgtgcgcggtcgcggcggccggcggcgacgtgatgctgacgggcgtgcgcccgcacatcctcgacgcggtgatcgacaagctgcgcgaagccggcgtgtcgatcgaggaaggcgacagctggctgcgcgtgaagatggatcgccgcccgtcggcggtgacgatccgcacgtcggaatacccggcgttcccgaccgacatgcaggcgcagttcatggccctcaatacggtcgcgacgggcaccgcgcaggtcgtcgagaccattttcgagaaccgcttcatgcatgtgcaggagctgaaccggctcggcgcgaacatcacgatcgacggcaacacggcgctcgtgacgggcgtcgacaagctgtcgggcgcgaacgtgatggcgaccgacctgcgtgcgtcggcgagcctcgtgatcgccgggctgcgcgccgacggcgaaacgctcgtcgaccgtatctatcacctggaccgcggctacgaccgcatggaagccaaactgaccgccgtcggcgcgaacgtgcgccgcctctccgggagc

SEQ ID NO: 11593 - DNA, 618 bp, Burkholderia cepacia
gtgcatgccggtgagcgtttcaacagcatttcccatctcgtcggcgcggtgctgtcggtggccggcctcgtcgcgctcgtgacgatgggcgcgctcgaaggcgacccgtacaaggtggtgagcttcagcgtgtacggcgcgatgctgatcctgctctacgcgatctcgaccgcgtatcacagcgtgcgcaacccgcgcctgaaggcgatcctgcagaaatgcgaccattcggcgatctacctgctgatcgccggcagctacacgccgttcacgctggtcacgctgcgcggcccgtggggctggtcgctgttcggcgtgagctgggggctcgccgtgttcggcatcgtgcaggaactgacgctcgggcgccgcacgcgcctgctgtcgatgatcctgtacgtgctgatgggctggctcgcgcttgtcgccgtgcgtccgctgatccatgcgctgccgccgatcggcaccacatggctcgtggccggcggcttgatctacagcgcggggatctacttcttcatcaacgacgaacgcattcgccacggccacggcatctggcaccttttcgtgctggccggcagcctgtgccagttcgtcagtgtcgcgatgtatgtcgcg

SEQ ID NO: 11594 - DNA, 545 bp, Burkholderia cepacia
gataccgaaccgagagaagcgtcatgttgatccgcgttgcgaccctggccgatgccataccgcttgccgaactgaaacgcgatacgtttcgcgaaacctttctgcaggacggcttcggcatcgactatccgccgaacgatctggccgagtacgaggcccgcacctactcggttgccgcgatcaccgaacagctcggcgacccgcagtgccggacgtgggtcgcggaaggcgacgacggcacgctggtcgggtatgcgcacgcggggccgtgcaagcttccgcacccggaagtggcggacggttcaggcgagatccatcagatctatctgcgccgcggcacgcagggaaccggcgccggacgcgcgttgttcgacgccgcgctcgagtatctcgccgcgacgcgccccggcccggtatggctgggcgtgtggtccggcaatgcgaaggccatcgcgttctacgagaaggccggcttcaagcgggtcggcacgtacgatttcaaggtcggcgcatcgaccgatctcgagttcatctaccgtcgctga

SEQ ID NO: 11595 - DNA, 1497 bp, Burkholderia cepacia
atggtcgcacgctacaatgcgcggtttgggatcgccgggccatccggcgactgcgatcccgccgtttgccgcatttgtttgccgcgcctgcttgccgattccgtaccgatgacacgaccccgttcttccgctccgacttcttccggccgcccggcgcgcctggctgcgctgcacctggcgcccgattcgctcggcttcgcgctcgacgcggccgcgcaggcggtcgatgcggtgcgacgcggcaccgcgttgccggcggcactgtcgacggtattcgcgcagatgccgtccggcgcgcaggcactcgcacgcggcgcgacgcaggacgtcgcctaccggacgatgcgtcgcctcggcagcgcggactggctgatcggcaagttcgtcagcaaggcgccgcccgcgcacgtgcacgcggtgctcgccggcgcgttcgcgctgctgctcgacccgcctgacgaagctgcgtacccggcgttcacggtggtcgaccaggccgtcaccgtcatcggtgcgcggcgcgaattcgcgttcgcgaaggggatggtcaacgcggtgctgcgccgtttcctgcgcgagcgcgacgcactcgtcgcggcgatgcaggacgatccggttgcgtgctggaactaccgtgcgtggtgggtcgatgcggtgaagcgcgcatggcccgacgcgtggcaggcgatcctcgcggccggcgagcgccaggggccgctgacgctgcgcgtgaacgcgcgtcgcgcgaacgtcgatgcgtatctcgacacgctgcgtgcgagcggaatcgaagcggtcgcgatcggccggcatgcggtgcggctcgcgtcggcgctgccggtcgaccgcattccgggcttcgccgacggcgtggtgtcggtgcaggacgccggcgcgcagctcgcggccgaatggctcggcgcgcgcgacggcatgcgcgtgctcgacgcgtgcgcggcgcccggcggcaagaccggccatattctcgaactcgccgacgcggaagtcgtggcgctcgaaagcgacgcgacgcgcgcggcgcgcatcggcgagaatctcgtgcgcctgtcgctcgcggcgaacgtgtgcgtcggcgacgcgggcgcgccggacgcgtggtacgacgggcgtccgttcgatcgcatcctggccgacgtgccgtgctcggcgtccggcatcgtgcggcggcaccccgacatccgctggctgcgccgcgaggccgacatcccggcgctggtcgcggagcagcgtcgcatcctgtcggcgctgtggccgctcgtgaagccgggcggcgaactgctttacgtgacctgttcgatcttccccgaagaaggcgaagggcaggcccgctggtttgaagcggcctgtgaagatgcggtacgattggacgcccccggccaactgctgccgggcggcgtgcagggacgggcggccgccggcgcactcgaccagaacaccgatcacgacggatttttctacgcgcggtttcagaaacgg

SEQ ID NO: 11596 - DNA, 4020 bp, Burkholderia cepacia
gtgtcgttcgatgtgcggggcgcgttcgatgcagacgcattcgcccgcgcattcgacgcggtgctcacgcatcacgatgcattccgccagcgcttcgcacgcggcgccgacggcacgtggcacgcgagcgatgcggcgaaaccgtacgatgcgctgccgttcgtggaagtcgccgcacgcgacgacgccgacgcgctggcacgcttcgacgcgctgcagcgccgtctcgacctcggcaacgggccactcgcgtgcgcgtgcgcggcacggctgccggacggttcgacccggctttatctcgcgattcaccacgcgatcgtcgatggcgtgtcgtggcgcatcctgctcgacgacctggacagcgcctatcgcgccgcatgcgagcgcacgccggttcgcctgtcgcagcccggcctgcgcgcggacgcctgggccgcacggctcgcccgcgcggcaacggaaccggcgtcgccgttcgcggccgaagccgcctactgggccggcatggctcagggcgacgacatcgtggccgatcaccccgacgcggcggcgacgaacgccgatgcgtccgtcgtcgtgcagacgatcgacgcggcattgacgcgcgccgcgctgaccgacgcgcacgcggcctatcgcacgcaggcgatcgagctgctcggcgcggcgctcgcgctggcgctggccggtgcacgcggcgccgcatcgtgccgggtcgaactggaaggacacggccgcgaagcgctgttcgacgatgcggatgccagccgcacgatcggctggctgacgagccattacccggtgacgctgccggtcgcagcgacggcacgcgacacgctgtgcgcggtcaaggacacgctgcgcgcggtgccgcacaaggggctaggcttcggcgtgctcgcacactatggcgatgcagccacgcgcgcggcgctggccgccgtgccgcgcccgcgcgtcacgttcaactatctcggccagttcgacgcgccgcgcgatgcgacgctcgtgccgcgtttcggcggcaccggcaccgagcgcgatccgaacggaccgctcggcaacacgctcgcgatccatgcgtacctcgacacggacggcgacggcgcgcgcacgctgaaggtccattgggtctacggtgcgccgcaattcgaacgcgcgacgatcgacgcattcgccgaacgcttcgcggccgcgctgcgcgaactcgtcgacgcctgcgcgtcacgcgtcgcgcatcgcggcgccggcgcgacgccgggcgatttcccgctcgcgcaggccgccggcctcacgcagggcgcgatcgaacgcgcgccgctcgactggcgcacgatcgacgacgtgtatccgctgtcgccgatgcagcagggcatcctgttccatgcgctgttcgcgcccggccacgcgagctacgtgaaccagctcgtcgcgaccgcgacggcgctcgacgccgaccggctcgcggccgcgttcgacgcgtccatcgcgcgtcacgacatcctgcgcacgagcgtgatgccggacgaagccgcgccgctgcagtgcgtgcatcgtcacgcgcgcatgccggtcgaacagctcgactggcgcacgcgcggcgacacgctcgacgccgatttcgacgcctggctcgcggccgaccgcacgcgcggcttcgactggcgcgagccgccgctgatgcggctcacgctgatccgcgtgacggacgacgcgtggcgggtcgtctggacgcgtcaccacgtattgctcgacggctggagcaccgcgcgcctgctcgccgacgtgctgcgcgactatcgcgacccggacgccgtgtcgccgttcgcgagccgtccggcattgcgctatcgcgatttcatcgcatggctcggcacgcgcgaccgcgatgccgacgagcacttctggaccgggcgcctggcgcggctcgacgcaccgacgctgatcgcggaacgcgcggccgaccgcgcggaagccgagatggccacgtggcgcgcgacgctcgatgccgacacgatgacgcgcgtcgcgcagaccgcccgcgcgctgaagctgaccgtcaacacgctggtgcagggcgcgtgggcgctcgcgctgcaacggatgacgcaccagccggccgtcgcgttcggcgcgaccgtcgcgggccgtcccgatgcgctcgcggacgtcgattcggtgctcggtctcttcatcaacacgctgccggtcatcaccgcgccggcgccgcagcaacgtgcggccgactggctgcacacgctgcagcgcgagaacgcggccgccgccgaacacgcgcacacgccgctcgccgacatccagcgctgggcgcgcggatcgggcggcgcactgttcgacacgctggtcgtgttcgagaactatccggtcgacgagtcggtgcgcgacgccgatccgcgcgcgctggcgttgagcggcgtgcgcagcatcgaagcgaccgatttcgcgctgacgctcgtgatcgagagcggcgccgaactgacgatcgactacgggtacgacaccgcacgcgtcgatgcgcgtcaagtcgagacctggcatcgcgcgtttgcctgcgcgctcgatgcgctggcccgcacgccggacgcgcggctcggcacgttgtcgatcgccgatgaggcgacccgcgacgcgctggtacgtgcgcaggacaccgcgcggatctggccgcccgggcaacggcagccgctgcacctgcaattcgtttatgcggcacgcgcgacgcccgacgcgatcgcactcgagtacgcggacactcacggccgcgtgcagcgcgcgacctatcgcgaactcgacgccgccacgtcgcgcatcgcggccgcgctgcgccggcgcggcgtgcggcccgacacaccggtcgcgctgtgcgtcgagcgttcgttcgacatggtgatggcgctcgtcggcgtgctgaaggccggcgccgcgtacctgccggtcgatcccgactatccggccgagcgcatcgcatacctgctgcgcgacgcgcggccggccgtcgcgatcacgcaggcgcatctgcgcgagcaggtcgaggccgcgctgggcgagggcgccgacacgcaactgctgacggtcgcggatctgctggccgacgaagcgggcgatgttgccgatgaaaccgcggcgatcgacgacgcgcagctcgcgtacctgatctacacgtccggctcgaccggcaagccgaagggcgccggcaacacgcacggcgcgctcgcgaaccggatcgcgtggatgcagcatgcgtaccggctgacgcgcgacgacgtcgtgctgcacaagacgccgttcggcttcgacgtgtcggtgtgggaattcgtgtggccgctcgcgatcggtgcgaagctcgcgatcgccgcgcccggcgaccaccgcgatccggcgcgtctggctgccgcgatccacgcgcacggcgtgacggtgctgcatttcgtgccgtcgatgctcgccgcgttcgcagcgcatctcgacgatttctcggccgccgcgcaatgcgacagcgtgcgcctgatcgtcgcgagcggggaggcgctggcccccgagctcgtcgcgaagatggcgcgcctgttgccgaacgcgacgctcgtgaacctgtacgggccgaccgaggccgcgatcgacgtgtcgcactggacctgcgggcccgacgacgcgcaagcggtcgcggtgccgatcggccatccgatcgcgaacctgcaactgcacgtgctggatgccgcgtggcagccggtgccggccggcgcgaccggcgaactgtatctcgcgggcgcgggcctcgcgcgcggctatctcggccgtcccgcgctgaccgccgagcggttcgtacccgatccgttcgtgccgggcgcccgcatgtaccgcaccggcgacctcgcgcgccggcgcgcggacggcgcgctcgactacctcggccgggtcgacacgcaggtgaagctgcgcggccagcggatcgagccgggcgagatcgaggcgctgctgcgcgcggcgccgggcgtcaacgatgcg

SEQ ID NO: 11597 - DNA, 1014 bp, Burkholderia cepacia
atgagtgagccgcagccgtctaacggcgcagagacgaatgccgcgaagccggcaccggcgggactggaatcgctggcggcggtcggcagccggctggcgcagcttcgggagacgaagggctggtcggtcgacgacgtgtcggcgcgactcaaggtcgcaccgcaaaagctccgggcgctcgaggccggcgacatcagccatttgcccggcgtgacgttcgcgctcggggtcgtgcgcagctatgcgaagatgctcggcgtcgatccggaaccgttcgcgcaggcgctgcgccgcgagcgcggggtgccggaagtcgacctgtcgatgccggcgtcgtcgggcacggatctgccgcgcggccgcgtgtcgattccgctcggcggctcgtcgcgtcaccatccgtggctgtgggggacggggatcgtcatcgtcgcggtggtcgccgtactgatgtggcacactggcggcgattcgtcgagcctgctcgcacgcttcaagggcggcgacgccgagcatgcgtcggccgcgagcgcggcgacggcatcgtcggctgctgaagaagcggccacgaacgccgcgtcgggcgcggtgacgaatgcggttccggccccggctgctgcatcggctgccccggcgcaggcgatcgcgtcggctgttccggcgcccgcggcgccggtcgcgactgccgctgcgtcgcagcccgtggcggccacggcggcggcaagcacggccgcgccggcccagccggccagcgtcgtggtggcggccggtcagtcgatggtcgaactgaaggtcaagcaggattgctggttcagcgtgcgcgacaagaacggcaaggagctgttctcggcgctggtgcgcgccggcgaaacgaagcaggtggccggtgacgggccgttcaaggtcacgatcggcaacaaggccggcctcgacgcggttgcgttcgacggaaaaccggtcgatccggcaaaatattcggcagcgcggggtaacgtggcgcggttcacgttgccc

SEQ ID NO: 11598 - DNA, 1665 bp, Burkholderia cepacia
atggaaatcgtcttcaccgtcctcattctgctgctgaccgtcgcgctgtccggcgccgtcacgcgcctcctgccgttgcaactgccgctgccgctgatgcagatcgcgttcggcgcgatgctcgcgtggccgaagctgaacctgcacgtcacgttcgatcccgagatcttcatgctgctgttcattccgccgctgctgttcgcggacggctggcggattccgaaacgcgagctatacctgcagcgccgcgcgatcctgatgctcgcgttcgggctcgtgttcatgacggtactcgcagtgggctacttcgcccactggctgattcccgagttgccgctgccgatcgcgttcgcgctcgcggccgtgctgtcgccgaccgatgcggtcgcgctgtcgggcatcgccggcaagggtcgcatcccgccgcaactgatgcacatcctcgaaggcgaggcgctgatgaacgacgcgtcgggcctcgtcgcgctgaagttcgcgatcgcggccgcgctgaccggcgtgttctcgctgcgcgccgcgtcggtcacgttcgtgatcgtcgcggccggcgggctcgcgacgggcgcgatcgtgtcctggctgttcagcgcgctgtcgacacgcttcctgaacgccgaacaggaaggcgacccggcgcccggcatcgtgatgacgctgctggtgccgttcgcggcctacctgttcgccgagcacctcgacctgtcgggcgtgctcgcggccgtgtcggccgggatgatgatgaattacacgagcttctcgcgcaaaagcaccgtcgcgtcgcgcgtgcgcgccgaaagcacgtgggcgatgatcgagttcgtgttcaacggcatggtgttcatcatgctcgggctgcagttgccgcacatcatcggccgcgcgctcgtcgacgcgcaccatacgagcgacgcgctggtcggccgcatgatcttcaacgtgtgcgcgatgatgctcgcgctgtatgcgatccgcttcctgtgggtatggctgctgcgctggttcgcgagccgccgcgccgcgcgccagggcctcgccggcacgatggccggcgtgcgcacgatcgcggtgatgacggtcggcggcgtgcgcggcgcggtcacgctcgccggcgtgctgtcgatcccggtcgcgctgtccgacggcgcgccgctgcccggccgcgacaccgcgatcttcatcgcgtcggccgtgatcctcggctcgctgatcgtcgcggtgatcggcctgccgctgctgctgcgcggcgtgcgctcgtcgcgcaacccgctcggcgacgaggagcgcatcgcgcgctcggccgccgcgcaggccgcgatccgcgcgatcgattcgtcgcacgacgcgatttcggccgatctcgacgaatcgggcgcggcgcgctgcgcggacatctccgcacgcgtgatggaccagtatcgccgccggctcgccgcgctggccgaggacggccccacgccgcgcgcggaagcgaagcaggccgaaacgatggagctgcagatgcggatcgcggccgtgcgcgcggagcgctcggcgctgtaccggctgcgcagcgacagcaagatttccgacgagacgctgacgaagctgattcgcgagatcgacctgtcggaaaccgcgctgtcgacgcgcaagaaaggcattctt

SEQ ID NO: 11599 - DNA, 1092 bp, Burkholderia cepacia
ctgactgtgcagctggtgtcggtcgcgtgtttcatcgcgtggccgctgcgcttcggcttcgagcgacccgacgcgggcggcgtggccggtgcgctgttcacgctgctgatgggtttcgacaagccgttcaaccaggcgccgtcgctgcatatcgggttgctggtcgtgctgtgggccgtctatgcgaagcatctgcgcggcacgttcgcccgcgtcgtgctgcatttgtggttcgcggcaatcggcgtgtcggtgctgacgacctaccagcatcacgcgatcgacgtgccgaccggggcggccgtcggctgtctcgcactgttcctgtttccgttgcgcgatgccgcgggccgattgccgggcgccgaggcgtcgccatccgcagccggccgcgcgctcgcgcgccgctacgcgtgcggcgccgcactggtcgcactcgcggcgctggcgtgcgtgccgcgcgcgccgggctgggcgctggcggcagggtgggtcgcgctggcgctcgcctgcgtcgcatgggcttatcgacgtggcgcgcccggcgcgttccagaaggatgcgcacggacggttaccggtcttcatcggctggctgctcgcgccgacgatcgccggcgcgttcgtcaattcgcggctgtggacgttccggcagccggcgccggtgcggatcgacgagcgtgtgtcgatcggccggacgccgacgacgcgcgacatccggcgcgacggcttcaccgcgctggtcgacctgaccgccgagatgccgcgctgggcggcggccgatgcagcgctcgcgtatgcgtcggtgccgcagctcgatctcgtcgccccgaccgcggcgcagctcgcgcaggccgtcgcggcgctcgaacgcctgcacggcgaggggcgcgacgtactggtctgctgcgcgctcggctatggccgcagcgtgctgtgcgcggccgcgtggctcgccgcgcggcgcgggctggccgatgcgcgcgacgcgctggccgcggtgcgcgcggtccggccgcacgcggtgtggtcggatgacggcgtggccgtgctgcagcagtggatcgatcgccgtcgcgatgcggggcgcgtg

SEQ ID NO: 11600 - DNA, 3863 bp, Burkholderia cepacia
  misc_feature (1282)..(1282): n=g, a, t or c
  misc_feature (1291)..(1291): n=g, a, t or c
  misc_feature (1315)..(1315): n=g, a, t or c
atgacgagtttcccgactgcgctgcatcaccgaatccgcgaactggcgcgcctcgcgcccgacgcacccgccatcgcggtgcctttccagaacgacctgcgcctgtcgcgcggtgcgctcgacgcacgtgcatcgcagctcgcgcggcaactgcgcgcggccggcgtcggcgccgaagtgcgggtcggcgtgtgcgtcgagcgttcgggcgaactgttcgtcgcgctgctggccgtgctgaaggcgggcggcgtattcgtgccgctcgatccgcgccatccggccgcgcgcctcgactggatcgtgcaggatgcgcaactgcggcacggcatcgtcgacgccgccggccgcgcggcgctcggcacgccgttcgaacacgcgttcgacgcgaccgccgacgcatcgggcgtcgcgcaggatcacgcgttcgatgacgacaccgtggccgtgcacccgcgttcggccgcctacatgatctatacgtcgggctcgaccggcacgccgaaggcggtggtcgtcgagcacgggccgctcgccgcgcactgcgacgcgcttgccgccgcgctgccgatcgaggccggcgaccgtctgctgcatttcgcgtcggtcaacttcgacgccgcgcacgaatgctggctcgcgccgctcgcggtcggcgccggcatcgtcgtcgcgccgccgcagccgttcgcgccggacgccgcgcatgcgctgatggtgcgcgaagccgtgaacgtcgcggcgtttccgccggcatacctgcgtgaattcgcggccgtcgccgcgcgcgacggcgtgccgccggcattgcgcgtgctcgcgttcggcggcgaggcgctgccgcagcaggcattcgaattcgtgcgccgcacgttcccggccgtgcgcctgatcaacggttacgggccgaccgaggccgtgatctcgccgatgctgtggccggtcgcgccgggcgagatgccggtgctggccgcggacgacgcgtatgcgtcgttgccgatcggtagcgtgatcggcccgcgggccgcacgcatcgacggcgcggcagccgatggcgtgggcgagctgccgctcggcggtgtgtgcgtcgcccgcggttatcacggccgcccggcgctcacggccgaacgtttcgttcccgatgcggacggtgagcccggcgcgcgcgtttatcgcaccggcgacctcgcacgcctgcgcgacgacggcgcatacgattatctgggccgcctcgacgatcaggtccaggtgcgcggcgtgcgcgtagagccggcggaaatcnccgcgtgcntgcgctcgcacccggccgtggcgnacgcggccgtcatcgccgaaaccgccaacgggccgacgcggctgatcgcatgcgtcgcgctgcgcgcggcggccgacgatgtcgcgttgaaggcgcacgtggccgcgcagttgccggctgcgtggcagccgcaccggttcgtgcgttgcgatacgctgccgtacacgctgaacggcaagctcgaccgtgccgcgctgcgcgagcggattgccgccgcgcgcgatacgacgcaagccgccggcgatgcgccgcgcacgccgaccgaacggcagatcgccggtctctggcaaacgctgctgggcctcgacgtcatgccgtcgcgcgacgatcgttttttcgcgctgggcgccgattcgctcgccgcgatgcagttgcacgccgcgattcgtgcggccgttcgtgtgaatctgcggctcgatacgctgttcgccgatccggtgctcgccgagttggccgacacggtcgaccgtgcggaacgcgagaccggcgaaccgctcgccacgattaccgcgcgccgtgcgccggccgccgtggccgcgccgtacgtcgatcgcgcggcatcgctcgcgcagcaacgtttctgggtgctcgcgcaaacgcgcgacgcaagcgccgcgtatcacattgccgcacactggacgatcgacggcgtgctcgaccgcgacgcgctgcagcgcgcgctcgatcacgtgatcggccgtcacgaagcgtggcgcacgacgctcgtcgacaacgacgacggcgtcgtgatgcagcggattcatgcgcatctgccggtgtcgatcgccacggtcgacctgcgcgatcaaccgccggccgcccgcgacgcgcacgccgcgcgtctggccgagcgcgatgcggccgagccgttcgacctcgcacgcggcccgctgctgcgcgcgacgctggtcgtgctcgccgacgaccgtcaccggctgctgctgaccgcgcatcacgcgatcaccgacgggtggagctcgcgctgcgcgttcgacgaactgtcggccgcgtattgcgcgtatgccgacgggcgcgagccgtcgctgcccgatctgccgatccagtacgccgactacgcggactggcagcgcgacatgctggccggcggcgagggcgaacgtcagctcgactactggcgcggcgcgttgcgcgacgtgccgggcccgctcgcgttgccggtcgaccgccagccgggcgccacgcgcacgctgcagggcgcccgcgtgtcggtgcgcctgcccgatgcggtcgcggccgacgtgcggcaactcgcacgggacgcccaggcgaccgtcttcacggtgctgctggccgcgctcgacgcgtggctgtcgcgcctgaccggtgaaacggacgtcgtcgtcgcggtgccggtcgcgcatcgccagcgccccgaaacgcgtgcattgctgggtctgttcctgaatacggtcgcgctgcgggtacgcgtggcgccgacgctgccgttccgcgcgctcgtcgacgcggcgcgcaccgcggcgctcgatgcggtcgcgcaccaggacgtgccgttcgagcgcgtcgtcgatgcggtgaagccgcccgtcaagcgcggcgacgaatggctgcgcgtgaaattcgcgcagcagttcgacgcacggcacgacagcgtgctgccgcgcgccacggcggtcgcgacgccggggcccgatctcgccgcgcgcttcgacttcgcgctggatttcaccgacgatgcgaacgggatcgaactggtcgcggcctatgcgaccgactgcatcgatgccgataccgcgcgtgcgtggctcgacagctatgcggcgctcgtcggcgcggccgcgcacgctccgcagcatacgacggccgcgctgccgtgcgatgcgtcggctgcatcgcgccagccgcgcgacggtcgcgcgctgcgtatcgagcatgccgacatcgtcgccgcatttgcgcggcaggcggccgcctatccgcatcgcgtcgcgctgtcggacgcatcgacttcgctgacgttcgcggaactcgacgacgcatcgaaccgcatcgcgcgggcactggcgcaacgcggcgtggccgccgaagcggccgtcgtggtctgcatcgagcgctcgacacggttcgtcgtcggcctgctcggcgcgctgaaagccggcgcgctcgccgtgctgctcgatcccgcccagcccgccgcgcgtctcgccgcggctgccgccgactgcggcgcgcgctgggcgctcgtcgcggaaccggccgcgtggccggccggcatcgacgcgcagccgctcgacgtcgacgcgctcgcgcaggacgcgacgctcgctcatgcggccggcgtgcgcgttgcgccgcacccggaacagggtgcatacctgatctatacgtccggctcgaccggcacgccgaagggcgtcgtcgtatcgcatggcgcgctggccgactacgtgcaggggatgctcgacgaactcgcgttcgcgcccgatgcgtcgttcgcaatggtgtcgacggtcgcggccgatctcggccacacgacgctgttcggcgcattgtgcgcgggccgtacgct

SEQ ID NO: 11601 - DNA, 969 bp, Burkholderia cepacia
atgagcacgctgcatcaggacagcatcatcatcgacggactgaacatctcgaagttcgagaagccggtgttcgaggacatgcgccgtggcggcatcacggccgcgaactgcacggtgtcggtgtgggagaacttcaccaagaccgtcgacaacatcggcgtgatgaagaagaagatccgcgacaacggcgagctgctgacgctcgtgcgcacgacggacgacatcttccgcgcgaagaaggaaggcaagaccgggatcatcctgggcttccagaacgcgcatgcgttcgaggacaacctcggctacatcgaagcgttcgccgacatgggcgtgcgcgtcgtgcagctttgctacaacacgcagaacctggtcggcaccggttgctacgagcgcgacggcggcctgtcggacttcggccgcgaagtgatcaccgagatgaaccgcgtcggcatcatggtcgacctgtctcacgtgggcggcaacacgtcgtcggaagcgatcgcgttctcgaagaagccggtgtgctattcgcactgcctgccgtcgggcctgaaggagcatccgcgcaacaagagcgacgcgcagctgaaggagatcgccgatgcgggcggcttcgtcggcgtgacgatgttcgcgccgttcctgaagcgcgggatcgaagcgaacatcgacgactacatcgaggcgatcgactacgtcgtgaacctgatcggcgaggacgcggtcggcatcggcacggacttcacgcaggatttcgcgaaggaattcttcgacatgctgacgcatgacaagggccgctatcgccagctgacgaacttcggcaaggtgatcaacccggacggcatccgcacgatcggcgaattcccgaacctgaccgcggcgatggaacgccacggctggaaggagtcgcgtatccgcaagatcatgggcgagaactgggtgcgcgtgttcaaggacgtgtggggcgcg

SEQ ID NO: 11602 - DNA, 1893 bp, Burkholderia cepacia
caccgaattaatacgccgaaggcgctgcaggagccgacgctgcacaccgtgatccgcgcggtggaggcgagcgcgaagccggtcgtcgcggcgctgcacagcgtcgtgatgggcggcggcctcgagctcgcgctcggcgcgcattaccgcgtcgcggcgccgggcgcgcaggtcgcgctgcccgaggtgaagctcgggctgctgccgggcgcgggcggcacgcaacgcctgccgcgcgcggtcgggctcgaaaccgcgctgaacatgatcgtgtcgggtgcgccggtgccgtcggagcagctcgcgaagagcgggctgttcgacgaaatggccgacggcgacctgctcgacgcggccgtggcgttcgcccgcaaggtcggcgcgcagaaggggccgcatccgcgcgtgcgcgatcgcaagatcgtccacgacaacgcggccggcttcatccagttcgcgcgcaattccgcgcgagccgccgcgccgaactaccccgcgccgcacaagtgcatcgacgcgatcgaggccggcgtgctgaacggtttcgacaagggcagcgtcgccgagcgcgagggtttcgtcgcgctgatgatgacgccggaaagccgcgcgctgcgccacgcattcttcggcgagcgggcggcgagcaagattcccgacgtgccggccgacacgccgctgcgcgagatccgccgggtcggcgtgatcggcgcgggcacgatgggcggcgggatcgcgatgaacttcatcaacgccgggctgcccgtcacgctgctcgagacgaagcaggacgcgctggagcgcggcctcgcgacgatccgcaagaactacgacgcacaggtgaagaagggcaagctcacgcaggagaagctcgatgcgcgcatggcgctgatcacgccgacgctgtcctacgacgacctgaaggacgccgacctgatcgtcgaagccgtgttcgaggaactcggcgtgaaggagcaggtgttcaagaagctcgacgaagtcgcgaagcccggcgcgatcctcgcgtcgaacacgtcgacgctcgacgtcgacaagatcgccgcgtttacgaagcgtccgcaggacgtcgtcggcatgcacttcttcagcccggcgaacgtgatgaagctgctcgaggtcgtgcgcggcgcgcaaaccgcgaaggacgtgctcgcgaccgtgatggcggtggcgaagaagatccgcaagacggcggtcgtgtcgggcgtgtgcgacggcttcatcggcaaccggatgatcgagcagtacatccgccaggcactgttcatgctcgaggaaggcgcgctgcccgcgcaggtcgatcgcgcgatcgagaaattcggcttcgcgatggggccgttccggatgagcgacctcgccggcaacgacatcggctgggcgatccgcaagcggcgctacgtcgagcagcccggcctgcagtattcgaagatcgccgaccgtctgtgcgaacagggccgtttcggccagaagacgggcgccggctggtacgactacgtgccgggcgaccgcaaggcgaagccgtcgtcgctcgtcgacgagatggtcgtcgcgtactcgaaggagcgcggcgtcgagcggcgcaagatcggcgacgacgagatcgtcgagcggctcgtgttcgcgctcgtcaacgaaggcgcgaagatcctcgaagagaagatcgcgtcgaaggcgtccgacatcgacatggtctacctgaccgggtatggcttcccgctgtggcgcggcggcccgatgctgtacgcggatacggtcggtctctacaacgtcgagcgcgcgattcgccgttatgcggccgcgccgaacggcgacgcatggcaactcgcgccgtcgatcgcggaactggcgaaggccggccgcgggttcaacggc

SEQ ID NO: 11603 - DNA, 1521 bp, Burkholderia cepacia
atgaccgtcatcaaacaggaagacctgatccagagcatcgcggattcgctgcagtacatcagctactaccacccgctcgactacatccaggccctcggccgcgcgtacgagctggaagagagtccggcggcgaaggacgcgatcgcgcagatcctcacgaacagccgcatgtgcgcggaaggccgccgcccgatctgccaggacaccggcatcgtcacgatcttcgtgaaggtcggcatggacgtgcgctgggacggcgcgacgatgggcctcaccgacatgatcaacgaaggtgtgcgccgcggctacacgcacccggacaacgtgctgcgcgcgtcgatcgtcaatccgccggaaggcgcccgcaagaacaccaaggacaacacgccggccgtgatccactacgagatcgtgccgggcgacaaggtcgacgtgcaggtcgccgcgaagggcggcggctcggagaacaagtcgaagttcgtgatgctgaacccgtccgattcgatcgtcgactgggtgctgaagacggtcccgacgatgggcgccggctggtgcccgccgggcatgctcgggatcggcatcggcggcaccgccgagaaggcgatgctgatggcgaaggaatcgctgatggagccgatcgacatccaggaaatcatcgcgcgcggcccgaaggactggatcgaggaactgcgtgtcgaactgcacgagaaggtcaacgcgctcggcatcggcgcgcagggcctcggcggcctcgcgaccgtgctcgacgtgaagatcatggcggcgccgacgcacgcggcctcgaagccggtcgcactgatcccgaattgcgcggccacgcgccacgcgcacttcgtgctcgacggctcgggcccggccaagctggaagcgccgtcgctcgacgcttggccgaaggtgcagtgggaaccgaacacggaaaccagcaagcgcgtcgacctgaacacgctgacgccggaagaagtcgcgagctggacgccgggccagacgctgctgctgtcgggcaagatgctcaccggccgcgacgccgcgcacaagcgcatcgccgacatgctcgcgaagggcgagaagctgccggtcgacttcacgaaccgcgtgatctactacgtcggcccggtcgatccggtgcgtgacgaagtggtcggcccggccggcccgacgacggccacgcgcatggacaagttcaccgagacgatgctcgctcagacgggtctgatctcgatggtcggcaaggccgaacgcggcccggtcgcgatcgacgcgatcaagaagcacaaggcggcctacctgatggcggtcggcggcgcggcctacctcgtgtcgaaggcgatccgcggcgcgaaggtgctcgcgttcgaagacctcggcatggaagcgatctacgagttcgacgtgcaggacatgccggtgacggtcgccgtcgattcgtcgggcacgtcggtgcaccagacgggtccgaaggaatggcaggcgaagatcggcaagatcccggtcgccaccgct

SEQ ID NO: 11604 - DNA, 894 bp, Burkholderia cepacia
atgaatcccggctatcgcggccgcttcgcgccgtcgcccaccggcccgctgcacttcggctcgctggtcggcgcgctcgcaagctggctcgacgcccgcgcgcacggcggcacatggctcgtccgcatcgaggatctcgacggcccgcgcacggtccccggcgcggccgacgacatcctcgcgaccctcgcgcatttcggcatgacgcccgacgaaccgcccatctggcagagtacgcgcgatgcggcctacacggccgcgctcgagcggctcgtcgcggcggggctcgtctatccgtgcggctgcacgcgcaaggaaatcgccgattcgctgcgcgccgcccatgaacgccatacgacgctcgcgtacccgggcacctgccgcaccggcctgcacggcaagcccgcgcgcgcatggcggctgcgcgtgccggacggcaacgatgcggtcgtcacgttcgacgatcgctggcagcacgcgcaatcgcagaacctcgcgaccgaagtcggcgatttcgtgctgaaacgcgcggacggccaatgggcgtatcagctcgcggtcgtcgtcgacgatgccgatgccggcatcacgcacgtcgtgcgcggcgccgacctgctcgattcgaccgcgcgccagatctacctgcagcgctgcctcggcgtgccgactcccgcgtacctgcacgtgccggtcgtcgtcgatgccaacggcgaaaagctcagcaagcagacgggcgcgacggcactcgaacgcgacgatccgctgccggcgctgcgggccgcggccgcgcatctcggtctggcggccgatggcgatcggccggtccatacgatcgacgcgttctacgcggccgcgaccgatgcatgggcgcgtcgcttcgggccgcgtgccggt

SEQ ID NO: 11605 - DNA, 1122 bp, Burkholderia cepacia
atgacgctcgccggcacgctggagatcgtcgacgagctgcgcgcgggccgcatggtcctgctcgtcgatgaagaggatcgcgagaacgaaggcgacctggtgatcgccgccgatcacgtgacacccgacgcgatcaatttcatggcgcgcttcgggcgcgggctgatctgcctgacgctgaccgccgaacgctgcgcgcaactgcggttgccgccgatggccgaccacaacggcgcgccgttcggcaccgcgttcaccgtcagcatcgaggcggccgaaggcgtgacgaccggcatttcggccgccgatcgcgcacatacgatccgcgtggccgtgcgttcgggcgcacgccccgacgatctcgtgcagcccggccacgtgtttccgatcgccgcgcggccgggcggcgtgctcgtgcgcgccgggcacaccgaggccggttgcgatctcgcggcgctggccgggctcacgcccgcgtcggtgatctgcgaggtgatgaacgacgacggcacgatggcgcggctgccggagctgaaggcgttcgccgcgcatcacgggctgaagatcggcacgatcgccgacctgatccattaccgccgcgagcatgagtcgctcgtcgaacgcgtcggcgagcgaccgctgcatacgccgtggggacggttccgtgcgatcgagtatcgcgacgccgtgcacgacgcgccgcatctggcgctcgtgcggggcgaacccgatccggcgacgcccgtgctggcgcgcgtgcacgaatgccattcgctgctcgacctgctcgacgcggagccctccgcgcattcgtggccgctgcacgccgcgctgcagcgcatcgatgcggccggctgcggcgtggcggtgctgctcgattgcgacctgcgtggcgacgcgccgcggatgccggccggtacggcgcgccgcgacggacgcgtgacgggaatcgggtcgcagatcctgcgcgacgtcggcatgcggcggctgaacgtgctgtcgagcccgttccggctgccggcgttgtcggggcacgacctggagatcatggcgttcattccgctcggcgacgacgatccggaaggcgcgcgggcgatgccggcgaattcattgcgggcggcg

SEQ ID NO: 11606 - DNA, 585 bp, Burkholderia cepacia
tcttcaggcgccgaagtccgccagcacatcctgaacatcgcgaagccgatcatgctccacaaggggttttcggcggtcggtctgaacgagattctcgccgcggcgggcatcccgaagggctcgttctaccattacttcggctcgaaagaggcattcggcgaagcgctgctcgaatcgtatttcgaaggctatctcgcgcatctcgacaacctgctcaagcaccaggccggcacgggcgccgagcgcctgatgacgtactggggcaattggctgcacacgcaatgcgcggacgatccggaaggcaagtgcctcgcggtgaagctcggcgcggaagtgtcggatctgtcggaagcgatgcgcgcggtattgcggcgcggcaccagccagatcatcgagcggctcgcgggcggcatcgaaggcgggctcgccgacgggtcgctgagcggcgtcgacgatccgtcgtacacggccgcgatcctgtacgagctgtggctgggcgcgacgctgctggaaaagattcaccgcaaccgcaaaccgctcgaaagggcgatggccgaaacgcggcgcatgctgaacctgccgccg

SEQ ID NO: 11607 - DNA, 390 bp, Burkholderia cepacia
atgaatctgatcgcaaaacttgagcaggaagaaatcgagcgcgcgctcgccggcaagacgatccccgatttcgccccgggcgacacggtgatcgtgaacgtgaacgtggttgaaggtaaccgcaagcgcgttcaggcttacgaaggcgtcgtgatcgcgattcgcaatcgtggtctgaactcgaacttcatcgttcgcaagatctcgtcgggcgaaggcgtcgagcgtacgttccagacgtactcgccgctgctggcaagcatcgtcgtgaagcgtcgcggtgatgtgcgtcgtgcgaagctgtactacctgcgcgagcgttcgggcaagtcggctcgtatcaaggaaaagctggtgtcgaaggatcgcgccgcagcagcttcccaagag

SEQ ID NO: 11608 - DNA, 810 bp, Burkholderia cepacia
gtgcagcaagccaactacgacaacaccggtgcaaccggcaccaatgctctcgccgccggcgtgaacgccagcgcggcgggcgcgagcagcgtggcagtcggcgacggctcgaacgcgcagacggcaggcgcggtcgcgatcggccagaacgcatcggcaacgggcggcaaggcagtatcgatcggctccggcaacacggcatccggcgatggcgcggtcgcgatcggcgatccgaacgtggcgacgggtaccggcgccgtggcgatgggtgcgaacaatacggcgaccggcgacggcgcggtgtccctcggcaaccagaacacggcaaccggcgccagcgcgctcgccctcggcagctcgaaccaggccaccgcggacaacacgatcgcgctgggcagccaggccacggccagcgccaccggcgcacaggcctacggctcggccgccaaggccacggccgccgacgcgctcgccttcggcacgaacgcgcaagcgaacgtcgcgaactcgatcgcactcggcgcgaactcggtcacggccgcggcggtcggcacctcgagcgccacgatcggcggcgtcacgtacccgttcgcgggcggctcgccggtcggcgtggtgagcgtcggcgcaccgggccaggaacgccagatcacgaacgtcgccgcgggtcggatctcggccacgagcacggacgcgatcaacggcagccagctgaacgcgacgaacaacgcgatcaacgcgctgtcgacgtccaccgcgtcgaacgtcgcatccctgtcgaccggcatcaactcgctgtcgaccggcatg

SEQ ID NO: 11609 - DNA, 711 bp, Burkholderia cepacia
atgattcacgacggcatgatcagcgtcggatctgctcacgtcactgcaccgggccaaaccgccgaagcggtgttccgccgtccctgtgacgtcctccatctcttttttgaagactcgtttcttgatcattgcggcagtgagacgataaggttgctatcgcgcgcggaggcgcgtccacaaccatgcattcagcacgatcctgcgatcgcgaaactcgcgttcgcgttgaccgatgcaacccatatcgaatcatcctacagcgagttgtataccgagagcctgagcttggctatcgttacccgattgctcgcgcgggcgactggaggaactgtcgatacaaccgtatcgcgtggcctcagtcgacatagactcaatctcatattcgaatacattgacgctcacctcgaccaccaactctcattggcggagatgtcgcgcgtggtcgggttgaccagcatgcacttcgcggctcagttccgtctcgccacgggctcccgtcctcacgaatacctcctgcggcggcgcatcgaatacgctcaggacatgttgcgtcgatccgacgcacctttacccgatattgcactctcggcgggatttcgcaatcaatcgcatttcactgcggtgttcaaacgctttacgggcgatacgccaggacgatggcgaaacatgcatgcagccagcgtagcgatgacgccgaatgcgacatgcgtc

SEQ ID NO: 11610 - DNA, 2337 bp, Burkholderia cepacia
gtggaagaaaggcgacacggggctgcagcagcgcgtgtcggtgtcgggcggcgcgtacaacgagcgcggcttcggcaccagcccgttgtggagcgcgcgtctcgagcacgcgtggacgttcaagcacgacatcacgctgagctacggcgtcgaggtcagcagccacgcatacgacggccagcgcgagcgctccgaaaccggcttcctgtcgctcaacctgccgttttagcaaggagatcggcaatgctgcaatccagacggaccttcatgtgcggatgcctcggcacgtttgccgcctgttcgctgttcccgggcgtgaccaacgccaagatgatcgacctgctgccgccgtccgatccggccgacggcaagacgttccgcgtgatctgcatgcacgacgtgcgcgacaacctgatggcgtcgttttcgtcgccgacggcgatcatcgatccgttcgcggtcgataccggcacgctcaccgcgatcttctcgtggctgcagaccaacaactaccacaccatcacggtcaagcagatcgaggaatcgcggcacggcggcaagccgctgccgccgcgctcggtgctgctcacgttcgacgacggctttcgcagccactacacgaaggtgctgccgctgctcgagcgcttcaagtatccggccgtgatgggcctcgtcaccgcgtggatcgataccccggcggatacgccgatccgcatcagcgacaaggtgcaggtaccgcgcgactacttcctgtcgtgggacgaggtgaagaagctcgggcagtcggaattcgtcgagctcggctgccacacccacaatctccaccacggtgcgatcgcgaatccgcaaggcaacgagttaccggcgaccacgtcgcatctctacctgcaagaccagaaacgctatgaaaccgacgccgaattccacgcccgcgtgcacgacgacctgcagacgtgcgtgcggcagatccgcgaacgcaccggcctcgtcgcacgctcgatggtgtggccgtacggcgcggaaaaccagccggtgcgccagatctcgacgtcgctcggcatggacatccagttcagtctcgacgccggcccgaatacgccggacgtgccgctggaccggctgagacggatcctgatgatgtacgacgtcgatatcggcgggttcgagcgctcgatgcgcgagccggcgtccaaccgcggcgacgtcgacgtgcccgagcgcaccgtgcaggtcgatctcgaccaggtctacgaccccgatcccgcgcgacaggaagcgaatctcggcaagctgatcgagcgcatctaccggatgcagccgaaatcggtgtacctgcaggcgtatgcggacccgaagggcacgggcgtggccgaagcggtgtatttcccgaaccggcacctgccgatgcgttccgacctgttctcgcgtgccgcgtggcagctcaatacgcgcgccaacgtacaggtgtacgcatggatgccggtgctcgcgtttcgcccgcccgccgacaagctccgctcgctcgaagccgtcagcgcattcggcggcgcgccggcccgcgagaacggcacgcgcgtgttccggctgagcccgttcgatcccgatgcacgcctgatgatccagcagatctacgaggatctcagcaagcacgcgtcgttcagcggcatcctgttcagcgacgacgcggtgctcgacgactacgaggatgggggccggcatgcgctgcgcacctattcgcaatgggggctgccggccgacatcggcaagatccgcgagaaccccgacctgatgaagcgctggacacaccagaagacgcgctacctgatcgacatgacccggcagctcgagcagatcgtgctggcccaccagaacgtcggcgacgtgctgaccgcgcgcaacatcttcgcgatgccggtgctcaagcccgaatcggaagcatggttcgcgcagaactacgacgatttcctcgccgcctacgactacgtcgcgctgatggcgatgccgtacatggaacaggcgaaggaccccgacggctggctcgaccagctcgtgaaggcggtacgcacgaagcagcgcgggctgcagcgcaccgtgttcgaactgcaggcgtacgactggcacgggcagaaggcggtgccggccggcacgctgctcgcgcagatgcggcggctgcgcagcgaaggcgccgtgaatttcggctactaccccgacaacttcctgaacggccagcctgaactcgacgcgatgcgcgacgtgatgtcgctgaagtcgcgcctcgaccccacctcgatcaacgcgctgatgcagatgcagcagtcgcacggaaccaagacgcca

SEQ ID NO: 11611 - DNA, 492 bp, Burkholderia cepacia
atgatcctgctaactggcgtcggggttttcctcgcgtgggcggtgctcgtcgcgctcgaggacatccgtcataggcgtataccgaattcactggtgatcggtggattcgtatctgcatttgtgctcgccgggcataatccattcggcatatccgtgaatcaggcgctcattggcgcactggtcggctttctcagtcttttcccgttttttgtgctgcgcgtaatgggtgccgcggatgtcaaggtattcgcggtgctgggcgcgtggtgcggcccgtatgcgttgctgtggctctggatcattgcgagcctgctggcattcgcgcatgccggcacgctggtcttcgccacccgtacgccggtgtcggcgttgtggcagcggcgttccccgacgatgcagattgccggtttccgcgcgtcgccgtatgccgcgtttctcgtgatcccggcggcgctgtggtgcctgtaccggatcgcggtgggggggatgcaa

SEQ ID NO: 11612 - DNA, 1149 bp, Burkholderia cepacia
atgagtgagatccggcattacgacgtcgcgatcgtcggcggcggcctcgtcggcgcgtcggccgcgctcgcgctgacgcgccgcgggctgcgcgtcgggctgttcgaacggcgcgactgcggcgcgcaggcgagcggcgtgaactacggcggcgtacgctgccaaggccgcccggccgagcaactgccgctcgcgctgcgcgcgcggcatatctgggatcggctgcccgagctgatcggcatcgacggcgaattcgtcgtgtccggccacttgcggctcgcgcgcagccatgacgatctcgacgcactcgacgcgtatgcggcgctcgccggcgcacacggcttgccgctgcaggtgatgcgtggcgatgcgttccgccgccgctacccgtggctcggccgcgcggcgctcggcggctcgctgtgcgagaccgatggccatgccaacccgcgcctcgtgtcgcccgcgttcgcgcgcgcggcccgcgcggcgggcgcggacgtgttcgagcacacgcccgtcgacgcggtccatcacgatggcacgcgctttcacttgcaggcgggcggccgcgcgcacaccgcgacgtggctgatcaattcggccggcgcgtgggcgaacacgatcgcggaacgcttcggcgaagcggtaccgatggagccgatctacccgaacatgtgggtaaccgaaccgttgccgccattcatcatgcacaacctcggcgtgtacggcggcggcgtgtacgcgcgccaggtcgcgcgcggcaactgcgtgatcggcggcgggcgcggccgcggcgacggcgaattcggccagccgtcggtcgatacgacgcgcgcggtgatgcgcgacgcgtgcgcgctgctgcccgcgttgcgcgacgcgctgctgatccgcacgtggagcggcgtcgaaggctgcacgcccgaccacaacccgatcatcggcatgagccgcacgacgccgaatctgctgcacgcgttcggcttttccgggggcggtttcctgctcgcgccgggcgtcggcgacgtgctcgccgatctcgtcacgaccggcgaaaccgccacgccactcgacgcattctcgatcggccgctttttccgccaagccgcgccgaccgcccctttccgtcaagaggagccccacaat

SEQ ID NO: 11613 - DNA, 750 bp, Burkholderia cepacia
gcgcgtccgctcgtgctgcatgaacagaattcgatcgcgggcctcacgaacaaggtgctcgcgaaactcgcgaagcgcgtgctcgtcgcattccccggcgcgctgccgcacgcggaatggacgggtaacccgattcgcgcggaactcgcgcacacggaaccgccccaggcacgctatgcgtcgcgcggcggcccgctgaacgtgctggtcgtcggcggcagcctcggggcggccgcgctgaacgaagtcgtgccgcgcgcgctggcgctgctggcgccgggcgagcgtccgcgcgtcgtgcaccaggccggcgtgaagcacatcgaggcactgaaggcgaattacgaagcggccggtttcgcggccggcgaggacgtgcggctcgtgccgttcatcgacgacatggcggccgcgtatgcggcggcggatctggtgatctgccggtcgggcgcgatgacggtgtcggagatcgcggcggtgggcgtggcggcgctgttcgtgccgttcccgcatgcggtcgacgatcaccagacgaccaacgccgcgtttctcgccgatgcgggcgcggccgtgctggtgcaacaacgcgacctgtcggcggaactgctcgccgactggctgcgcggccagtcgcgggcctcgctcgcggacatggcggaacgttcgcgctcgctcgcgaagcccgaggctaccgacgaagtcgcgcgcgtctgcgcgaaggcggccggcgcgaacctggaacaactgcaa

SEQ ID NO: 11614 - DNA, 1041 bp, Burkholderia cepacia
atgaattcagcagaaaagaagctttacatctcggacgtcacgttgcgcgatggcagccatgcgatccgtcatcaatacagcgtcgaccatgtcagggcgattgccgcggcgctcgacgatgccggcgtcgacagcatcgaggttgctcatggggacgggctccagggatcgagcttcaactacggattcggcgctcacaccgatgtcgaatggattgcggcggcggcgcaaagcgtcaagaaggcgaagatcgcgacgctgctgattcccggcatcggcacgacccatgatctccggcatgcgttcgatgccggcgcacgggtcgtacgcgtggctacgcattgcacggaagccgatgtatcccgccagcatctcgattttgctcgtgagctgggtatggatgcggtggggttcctcatgatgagccacatgaccaccccgcagaagctggctgagcaggcgaagatgatggaaacgttcggcgccacctgtgtttatgtggttgattcgggtggtgcgctcggcatgaatgaggtacgggacaggtttcgcgcgcttaaggcggtgttgaaatccgacactcaaaccgggatgcacgcacaccataacctgagcctcggcgtggccaactcgctggttgccgtggaggaggggtgcgatcgcatcgatgcgagcttggccggcatgggtgcgggcgccggcaatgcgccgctcgaagtgttcattgcggcggcacagcgacagggctggaatcacggctgcgatttgtaccggctcatggacgcggctgacgatcttgtgcgaccgcttcaggatcggccggtacgcgtcgaccgcgaaacgcttgcgctcggtttcgccggcgtttattcgagcttcctgcgtcatgcggaagttgccgccggcaaatatgggctgaagaccgtcgacattctggtcgaactcggcaggcggaagatggtcggcggccaggaacacatgatcgtcgacgtcgcgctggatctgttaaagcgccaacagccgatcatgagcgacgcgcat

SEQ ID NO: 11615 - DNA, 660 bp, Burkholderia cepacia
gtgagtatggggaagttgaaaaggcgggggggagcaaaaaacgggggggggtataggcaaggagggggagaaagaggaggggcaagggggtgggaggagaggagaaaaagtggggaggggggggtacagaatgggaaaaaggggggggaaaaaaaaggggggagggggggggggaaaaaggagaaacgggggaaaggggggggggggaaggtagggggaaataaaaaagggggggggaaaagagtggggggaggaagaaacagagggaaggtgaaaggaagaggaagaagaaaaaaaaagagggaaaaaagagtgcgggaaagggggggagaaaatggaaaaaggcggataaaaggggggggggggggaagacagtcgtcagtccgcccggcgcagaccgccgagcgttgccgcgagccagtcgacgaagatccgcacgcgcggcgcgagatgccggccggtcggaaacaccaccgatacgggcagcggcccggcacgccattccggcagcacctcgaccagcgagccgtcggcgagcagcggcgcgagcccgtcgcgcggcgcctggatcagcccgaggcccgcgaggcagcacgcgagatacgcttgcgaactgttgaccgacacgacgctgtgcatcttcaccgtatgcatctcgcc

SEQ ID NO: 11616 - DNA, 2862 bp, Burkholderia cepacia
atgtcagatgtaatgaagcagtttcagctgaactcctatctgttcggcggcaatgcttcgtacgttgaagaactgtacgatgcatacctcaacaatccggcgtcggtgccggagaactggcgagagtatttcgacgcgctgcagaacgtgcctgcaacggacggctccaacgccaatgacgttgcgcatttcccgatcgtcgaatcgttcgccgagcgtgctaaggccaatgccttcatcccgcgcgaaagcaccagcaatctcgcgaccgcacgcaagcaggtgcacgtccagtcgctgatcagcgcctaccgcttcctcggctcgcaatgggccaatctcgatccgctgaagcgccgcgaacgcccggccattcccgagctcgaacccgcgttctacgacttctccgaaggcgacctcgaccagacctacagcgcaagcaacctgtacttcggcttcgaccaggcttcgctgcgcgatatcgtcaagggtctgcgcgacacgtactgcggcacgatcggcgccgagtacatgtacatcagtgatccggaacagaagcgctggtggcaggagcgcctggagtcgacccgcgcgacgccgtcgttctcgatcgacaagaagaagcacatcctgaatcgcctgacggccgccgaaggcctcgagcgctacctgcacaccaagtacgtcggccagaagcgcttctcgctcgaaggcggcgagagcttcatcgcggcgatggacgaagtcgtccagcacgcgggcaagagcggcgtgcaggaaatcatcatcggcatggctcaccgcggccgtctgaacgtgctggtcaacacgctgggcaagatgccggccgacctgttcgccgaattcgaaggcaagcacgtcgacgacctgccggccggtgacgtcaagtaccacaagggcttctcgtcggacgtgtcgacggaaggcggcccggtccacctgtcgctcgcgttcaacccgtcgcacctcgaaatcgtgaacccggtggtcgaaggttccgcgaaggcgcggatggaccgtcgcggtgacgaagacggcctgcaagtgctgccggtgcagatccacggtgacgcggccttcgctggccagggcgtcgtgatggaaacgctgaacctcgcgcagacgcgcggttacggcacgcacggcacgctgcacatcgtcatcaacaaccagatcggcttcacgacgtccgacccgcgcgatgcgcgttcgacgctgtactgtaccgacgtcgtcaagatgatcgaagcgccggtgctgcacgtgaacggcgacgatccggaagccgtcgtgctcgcgatccagatcgcgatcgactaccggatgcagttccacaaggatgtcgtgatcgacatcgtctgcttccgcaagctgggtcacaacgagcaggacacgccggcggtcacgcagccgctgatgtacaagaagatcgcgcagcacccgggcacccgtgcgctgtacgccgagaagctcgtgcagcagggcgtgatcaccgccgaagacgccgacaactacgtgaaggcgtaccgcaaggcgatggacgacggccaccacaccgtcgatccggtcctgtcgaactacaagagcaagtacgcggtcgactgggttccgttcctgaaccgcaagtggacggacgcagccgacacggccgtgccgctcgccgaactgaagcgcctgggcgaacgcatcacgaccgtcccggaaaacttcaaggtccacccgctcgtcgagcgcgtgatcaacgaccgccgcaacatggcgcgcggcgaccagccgctcgactggggcatgggcgaacacctcgcattcgcgtcgctcgtcgcatcgggctactcggtgcgcctgacgggccaggactcgggccgcggcacgttcacgcaccgtcacgcggtgctgcacgaccagaaccgcgagcgctggaacgacggcacgtacgtgccgctgcagaacatcgccgaaggtcaggcgaagttcacggtgatcgactcggtgctgtcggaagaagcggtgctgggcttcgagtacggttactcgaccgccgagccgaacacgctcgtgctgtgggaagcgcagttcggcgacttcgtcaacggcgcgcaggtcgtgatcgaccagttcatctcgtcgggcgaagtgaagtggggccgcgtgtcgggtctcacgatgctgctgccgcacggctacgaaggccaaggtccggaacactcgtcgacgcgtatcgagcgtttcctgcaactgtgcgctgaccacaacatgcaggtcgttcagccgacgacgccggcgcagatcttccacctgctgcgtcgccagatgatccgcctgttccgcaagccgctgatcgtcgccacgccgaagtcgctgctgcgtcacaaggaagccgtgtcggacctgtccgaactggcgaagggttcgttccagccggtgctgggcgaaaccgacggcggcatcgacgcgaagaaggtcaagcgcgtgctggtatgctcgggccgcgtgtattacgacctcgttgcacatcgccgcgaagcgaaggcgaacgacgtcgcgatcatccggatcgagcagctgtatccgttcgcgcacaagcagttcgaagccgaaatgaagaagtacgagaacgcgactgaagtggtctgggtgcaggacgagccgcagaaccagggcccctggttctacgtcgagcaccatctgaaggaaggcatgaaggaagggcagaagctggcatacagcggccgtccggcttcggcctcgccggcggttggctactacgcgaagcactacgagcagcagaaggccctgatcgaaggggcattcggccgcctgaagagcgcatcgatcgcgaaa

SEQ ID NO: 11617 - DNA, 825 bp, Burkholderia cepacia
atgtcgaacagcagacagcaccaaggccatttcgcgcgcaagcgcttcgggcagaacttcctcgtcgatcacggcgtgatcgattcgatcgtcgcgacgatcggccccgcgcgcggccagcggatggtcgagatcgggcccgggctcggcgcgctgaccgagccgctgatcgagcgtctcgcgacgcccgagtcgccgctgcacgcggtcgagctcgaccgcgacctgatcgggcgcctgcagcagcgcttcggcgcgctgctggaactgcacgcgggcgatgcgctcgcattcgacttccgctcgctcgcggcgcccggcgacaagccgtcgctgcggatcgtcggcaacctgccgtacaacatttccagcccgctgctgtttcatctgatgacgttcgccgatgcggtcgtcgaccagcatttcatgctgcagaacgaagtcgtcgagcggatggtcgcggagccgggcacgaaggcgttttcgcggctgtcggtgatgctgcagtaccgctacgtgatggaaaagatgctcgacgtgccgccggagtcgttccagccgccgccgaaggtcgattcggcgatcgtccggatgattccgtacgagccgcacgaactgccggacgtcgatcccgtgctgctcggcgaaatcgtctccgccgcgttctcgcagcgccgcaagatgctgcgcaatacgctcggcgactaccgcgagacgatcgatttcgacgcgctcggcttcgatctcgcgcgccgtgcggaggacgtgagcgtggccgagtacgtcggcgtcgcgcaggcgcttgcggcggtgcgcaaggccgga

SEQ ID NO: 11618 - DNA, 3555 bp, Burkholderia cepacia
gtgcggccccgtccgtttcacaccttcttcacatccgataccgccgtgcgtctgagctcgatcaaactcgctggcttcaaatccttcgtcgatcccacgcatttccaggttccgggccagctcgtcggcgtggtcggcccgaacggatgcggcaagtccaacatcatcgatgccgtgcgctgggtgctcggcgagtcgcgcgcgtccgagctgcgcggcgaatcgatgcaggacgtgatcttcaacggttcgaccgcccgcaagcccggcagccgggccagcgtcgaactgatcttcgacaactccgacggccgcgcggccgggcagtggggccagtacggcgagatcgccgtcaagcgcgtgctgacgcgcgacggcacgtcgagctactacatcaacaacctgccggcgcgccgccgcgacatccaggacatcttcctcggcaccggcctcggcccgcgtgcgtacgcgatcatcgggcagggcatgatcgcgcggatcatcgaggcgaagcccgaagagctgcgcgtgttcctcgaggaggccgccggcgtgtcgaagtacaaggaacgccgccgcgaaaccgagaaccgcctgcacgacacgcgcgagaacctgacgcgcgtcgaggacatcgtgcgcgaactcggcgcgaacctcgagaagctcgaggcgcaggcggtggtcgcgaccaagtacaaggaactcgtcgccgacggcgaggagaagcagcgcctcttgtggctgctgcgcaagaacgaggcggccggcgagcagcagaagcagcagcgcgcgatcgaacaggcgcagatcgacctcgaggcgcagacggcgaagctgcgcgaagtcgaggcgcagctcgagacgctgcgcgtcgcgcattactcggcgagcgacgcgatgcagggcgcgcagggtgcgctctacgaggcgaatgccgaggtgagccgcctcgaagccgagatcaagttcatcgtcgaatcgcgcaaccgcgtgcaggcgcagatcgccgccctcaacgcgcagcgcgagcagtggcgcgcgcaggccgagaagtcgcaggacgagctcgaggaagccgaagaggcgcgcgcgatggccgacgaaaaggccgcgctcgccgaggacaacgcggccgcgaagcacgatgcgctgccggcgctcgaagcgaagtggcgcgacgcgcaggcgcagctcaacgacgagcgcgcgcggatcgcgcagaccgagcagtcgctgaagctcgaagccgcgcatcagcgcaacgccgaccagcagctccagcagcttcagcagcgccacgagcgcctgaagagcgaagcgggcgggctcgacgcgccggacgagacgcaactcgaagagctgcgcatgcagctggccgaacaggaagagatcctcgcggaagcccaggcgcgcctggcggacgcgcaggaaacggtgccgcgtctcgacggtgaacgccgcgccgcgcaggagcgcgtgcaggctgaagccgcgcagatccaccagctcgaagcgcgcctcgccgcgctgaagcaactgcaggagaacgtgcagaccgaaggcaaggtgcagccgtggctcgacaagcacgagctcggcgcgctgccgcgtctgtggaagaagctgcacgtcgaggccggctgggaagcggcgctcgaggccgtgctgcgcgagcgtctcgccgcgctcgaagtatcgaatctcgactgggtgaaggccttcgcgagcgatgcgccgcccgcgaagctcgcgttctacgcgccgcccgcggccggtgagccgcctgccgcggtggccgggctgcggccggtgctgtcgctcgtgcgcatcgacgacgcgggcatccgcgcggtgctgaacgactggctcggcaacgtctatgtcgccgacgacgtcgcgcaggcgctcgcgacgcgcacgcagctgccggcaggcggcgcgttcgtcgtcaaggccggccatatcgtcacgcgtgtcggcgtgcagctgtacgccgccgattcggagcaggccgggatgctggcccgccagcaggaaatcgagaacctggcgcgccaggtgcgggcgcaggcgctgctcgccgacgaggcgcgcacggccgccgtgcgggcggaagccgcgcacacgcaggccacgcaggcgctcggcgacgtccgggcccaggccgaacgggcgacgcagcgcgtgcatgcgctgcagatggacgtgctgaagctcgcgcaggcgcatgaacgctatacgcagcgcagcacgcagatccgcgaggagctcgaggaaatcggcgcgcagatcgaagagcagcgtgcgctgcgcgcggagtcggaagcgaatttcgagcgcttcgacggcgagctcgccgaactgcaggcgcgtttcgaggacaaccagctcgcgttcgagtcgctcgacgaatcgctgacgcaggcgcgtcaggaagcgcgcgacctggagcgcggcgcgaacgacgcgcgcttcgccgcccgcaatgcggtgacccggatcgacgagctcaagcgcacgatccaggtggcgcacgaacagagcgagcgcgtcgccgcgtcgctggaagacgcgcgcgccgaactcgagacgatcaacgagcagaccgcgcacaccggcctgcaggacgcgctcgagattcgcgcggtgaaggaagaggcgctgcaggccgcgcggatcgagctcgacgacctgaccgcgaagctgcgcgcgtcggacgagcagcggctcgtcgccgagcgttcgctgcagccgctgcgcgaccgcatcaccgagctgcaattgaaggagcaggccgcgcgtctgtccgtcgagcagttcgccgagcagctcgcgaccgccgaggtcgacgaggccgcgctggccgcgaagctcacgccggatctgaagccgtcgtacctgcagggcgaagtcacgcgcctgaacaacgcgatcaacgcgctcggcccggtgaacatggccgcgctcgacgagctgaaggccgcgagcgagcgcaaggtattcctcgacgcgcaatcggccgacctgatcgacgcgatcacgacgctcgaggatgcgatccacaagatcgaccaggaaacccgcacgctgctgcagggtaccttcgacgaggtcaatcgtcatttcagcgacctgttcccgcgcctgttcggcggcggccaggcgaagctgatcatgacgggcgacgagatcctcgatgccggcgtgcaggtgatggcgcagccgcccggcaagaagaacgcgacgattcacctgctgtcgggcggcgaaaaggcgctgaccgcgaccgcgctggtgttcgcgatgttccagctgaacccggcgccgttctgtctgctcgacgaggtcgacgcgccgctcgacgacgcgaacaccgagcggttcgcgaatctcgtgcgcgcgatgtccgacaagacgcagttcctgttcatctcgcacaacaagatcgcgatggaaatggcgcagcaactgatcggcgtgacgatgcaggaacagggcgtgtcgcggatcgttgcggtggacatggaaaccgccgcgggttttgcccagaat

SEQ ID NO: 11619 - DNA, 801 bp, Burkholderia cepacia
atgcgcgccggccttttcccagatcacatcatgttcacgagactgcgcgaagacgttgcaacgattcgcgagcgggatcccgccgctcgcagtgcgtgggaagtgctgacctgttatccggggctgcatgcgctcgtgctgcaccgtttcgcgcacgcctgctggcgcgcgaagcgctactggctcgcgcggttcgcgtcgcaggccggccggttcctgaccgggatcgagatccaccccggcgcgacgatcggccggcgcgtgttcatcgatcacggcatgggtgtcgtgatcggcgagacggcgatcatcggcgacgactgcacgatctatcagggcgtgacgctgggcggcacgtcgctcacgcgcggcgcgaagcgccatccgacgctcgaggccggcgtgatcgtcggcgctggcgcgaaggtgctcggcggtttcacggtgggcgcgggcgcgaagatcggctcgaacgcggtggtcgtcaagccggtgccgcccggcggcacggcggtcggcaacccggcgcgcatcgtgatgccggcgcagccgaagccgcaacccgagcgcgcggcattctgcgcgtacgggatcacgccgaacgccgacgatccgatgtcgcttgcgattcacgggctgatcgatcacgcggcgaaggaaagccgtcgcgtcgacgagatcgtcgcggcgctcgaacggctcggtacgcatctggaaacgctgcagggcgccgatgcggcgcgcctcgacctgcgcaggctgtccgcggtgctggaaggcaagacggtcgaacgccagatg

SEQ ID NO: 11620 - DNA, 1281 bp, Burkholderia cepacia
atgagtgcaatcgtagatatcatcggccgcgagattctggattcgcgcggcaaccccaccgtcgaatgcgacgtgctgctcgaatcgggcacgatgggccgcgcggcggtgccgtcgggcgcgtccaccggctcgcgtgaagcgatcgaactgcgcgacggcgaagccggccgctacaacggcaagggcgtgctgaaggcagtcgagcacatcaacaccgaaatctccgaagccatcatgggcctcgacgcgtcggaacaggcgttcctcgacaagacgctgctcgagctggacggcaccgacaacaagtcgcgcctgggcgcgaacgcgatgctggccgtgtcgatggccgtcgcgaaggcggccgccgaagaggccggcctgccgctgtaccgctacttcggcggttcgggcgcgatgcaactgccggtgccgatgatgaacatcgtcaacggcggcgcgcacgcgaacaacagcctggacatccaggaattcatgatcgtcccggtcagccagccgacgttccgtgaagcgctgcgttgcggcgcggaagtgttccacgcgctgaagaagatcctgagcgatcgcggcatgagcacggccgtcggcgacgaaggcggtttcgcaccgaacttcggcagcaacgacgaatgcctgtcgacgatcctgcaggcgatcgagaaggccggctaccgtgcgggcgaagacgtgctgctcgcgctcgactgcgcggcatccgagttctaccacgacggcaagtaccagctcgcgggcgaaggcctgcaactgtcgtcggccgaattcaccgactacctcgcgacgctcgccgacaagttcccgatcgtgtcgatcgaggacggcatgcacgaaagcgactgggacggctggaagctgctgaccgaccgcctcggcaagaaggtacagctggtcggcgacgacctgttcgtcacgaacacgcgcatcctgaaggaaggcatcgagaagggcatcgcgaactcgatcctcatcaagatcaaccagatcggtacgctgaccgaaacgttcgcggcaatcgaaatggcgaagcgcgcgggttacacggccgtgatctcgcaccgttcgggcgaaacggaagattcgacgatcgcggacatcgcggtcggcctgaacgccggtcagatcaagacgggttcgctgtcgcgcagcgaccgtatctcgaagtacaaccagctgctgcgcatcgaggaagatctcggcgacatcgcgagctacccgggcaaatcggctttctataacctgcgc

SEQ ID NO: 11621 - DNA, 1068 bp, Burkholderia cepacia
ttgcgacggcttcccgcggcatgccgcgggttttttgcgtggggcggcgtgcggggcgatcacgaaccgcggcacgcgtattccatcggcgcaatggggttgccggcgcgcgtgccggtgctggtttacaatcgatcgattgatcggcctcgtactcacggtatacccatggcttacaaaactatcgaagacacgatcggcaatacgccgctcgtgcaactggtccgcctgccggacgacgagattcgcgctcgcaacaacgtggtgctcgcgaagctcgagggcaacaatccggccggttccgtgaaggatcgcccggcgctgtcgatgatcagcaaggccgaggcgcgcgggcgcatcaagccgggcgatacgctgatcgaggcgacgagcggcaacacaggcatcgcgctcgcgatggccgcagcaatccgcggctacaagatggtgctgatcatgccggaggatctgtcggtcgagcgccgccagagcatggcggcttatggtgctgaaatcatcctgacgccggtgaagggcgggatggaactggcgcgcgacctcgcggagcagatgcagcgcgaaggcaagggcgtgatcctcgaccagttcggcaaccccgacaatccgatcgcgcactacgaagcaacggggccggagatctggcgcgataccgaagggcgcgtcacgcacttcgtgtccgccatgggcacgacgggcacgatcatgggcacatcgcgctacctgaaggagcagaatgcggcgatcgagatcgtcggtgcgcagccggaagacggctcgcgtattccgggcattcgcaagtggccggaagcctacatgccgaccatcttcgatcgcagccgcgtcgatcgcgtcgaaaacgtgagccaggccgcggcggaaacgatggcgcgccggctcgcggcggtcgaaggcatcttcgcggggatttcatcgggcggcgcatgcgaagtcgcgatgcgcatcgcgcgtcaggtcgagaatgcgacgatcgtgttcatcgtctgcgatcgcggcgaccgttacctgtccacgggcgtgtttccggct

SEQ ID NO: 11622 - DNA, 2832 bp, Burkholderia cepacia
cgcgcggtcgtgcgccacttcctctctaccaacggcctgatggcgactcctgtgaacgcactgggtttcacgtccagttatgtgtggtcgacgatcgaagggcagccgcgggtcgtcgcaacgcgcaccagcgagggcgaggactggtcgttcgaatacgacgtcgacggccggcagacgcgcgtccggcacgccgatggtcgcaccgcgcactggcgcttcgacgcacagtttcagattgtcgagtacaccgacttcgacgagggactctaccggatcaagtacaacgacgccggcatgccggtgatgctgatgctgcccggtgagcgcacggccgagttcgagtacgacgacgcgggccggatcgtcgccgagactgatccgctcggccgcacgacacgcactcgctatgacggcaacagcatgcggcccgtggagattgtcgggcctgacggtggtgcctggcgtgcagaatacgatccgcagggtcggctgctggtgagtcaggatccgcttggccgcgaaaaccgctacgagtatccgaaagggctgacctcgctcccgctcgcgcacattgatgcactgggggggcgtaagactctggagtggaataggctcggtgagctcgtcgcgcgcactgactgttccggcaaagcgacgcgaaccacttttgatccgttcggtctgccggttatgcgtgagaacgcgcttggtcagcgcatcacgtaccatgtgcgtccgaccggcgagccgctccgcattacctatcccgacggaagttcggagaccttcgaatacgatgcagccgggcttatggttcggcacgttggcctcggcggaagggtccgacagtcgctgcgcaatgcgcgtggccaagtcgtcgagataagcgatccagcagggcgccgaacccgttatcggtacgatgccgacgggcggcttcgagagctactgcaggaccgcgcatgctatgcgttcacgtacagtgccggcggtcggctcttgaccgagacgcgaccggacggcgtggaacggcggttcgggtacggggacgctggcgaattgctcacgcttgacatcgtaggggccccggtcaatggcgctaatgcgaaccgcccgattcgcactattcgctttgagcgcgaccggatgggcaatctgaaggtccagcatacgccgaccgaggtaacccgctttgagcgcgacaagggcgaccggacggtgaaggttgagcgtacgccaactccagccggtattgcgcttggcatcactcctgacgtcgtgagcttcgaatacgacaaagcgggtcgccttatggccgagcacggcgtgaacggcacagtcgaatatgtgctcgatgcgctcgacaacgtgacaacgctagcgctgccgcacgcccagaccttgcagatcctgcggtatggttcaggccacgttcaccagatccgctgtggcgatcaggtggtgagtgacttcgagcgtgacgatttgcatcgtgaagtgatgcgcacacaggggcggttgactcagcgttccgcatacgatccgcttggtcggaaagtctggcagtcggcaggattccaacccgaagcgctgggtcgtgggcgcgggcacttgtggcggaattacgggtacgacgccgctggcgagctcatcgagatgagcgacggcctccgtggcagtacgcagtacaactacgatcctgccgggcagttgacccggcgggttaacacgatggatcggcaagttgaagaattcgcgtgggacggcgccggcaacctgcttgacgatgcgcagcgcagcagccgggggtacgtcgaaggcaatcgcctgctcatgtggcaagatctccgtttcgagtacgatccgttcggcaatctgacgacgaagctgcgcggagcgaaccagacgcagcggttcacctacgacgggcagaaccgactgatcgcagtccgaacgcacgacgcgcgtggcacggtcgaatctcggttcgaatacgacccgatcgggaggcggattgcgaagacggataccagttacgacctgcgtggcgtaaaactgcgcagcgagacgaagcggttcgtatgggaggggctacggctcgcgcaagaggtgcgcgagactggcgtgagcagttacatatacagtccagatgcgtcgtactctccagcggcacgcgttgatgcggttatcgcgaacgcactggcggcggcagcgatcgacacggcgaagctggcgtcgcggatataccacttccatacggacctggtgggcgccccattggaagttacagacgaagctggagaactagcgtgggcggggcaatatacggcgtggggcaaggtcaagccgaacagtcgagaactgacttcggcacgcacggatcagccgctccgctatgccggacaatatgccgatgaaagcacgggccttcactataatactttcaggttctacgaccctgatgtaggccggttcattaaccacgatccgatcgggctgctaggtggcgacaatttgtatgcgtatgcccccaatcctaccggatggatcgatccgtggggctggtttggggagaagccgttgaactctccggatgtgacgaaatggcttgaaaaaggtggtaccgttcacgtcgaggtggagtcggggacgtgggtatataccaatgcaaaaggtacggttgtccgttatccaaatgggtatcctgatttcaagccgtatgaggtcagatctgtagacgttgaggggctgaaaggaaatcacagtagggcgccagcaggggactttggattggcggatgcgaaggcaggaagccccgccgactactca

SEQ ID NO: 11623 - DNA, 1173 bp, Burkholderia cepacia
atgaagcacgtcactacccgcctgcggcgcctgttcgcgccgatcggcctgcactggtatctcgccctcctgctcgcgctcgatgcactcatggtgctgcgccccgtcgtcgaacacgcgcggctcgggctgcatcgcgcctggctcgccgatgcgctgaacctcgtcgacaacatggggctcgtcgtgctgccgcaggtcgtcgtcgcggccggcctcgcgacgatggccatcggcatcgtgctgcgcgcccgcgtcgcgtgggtgctgtcgatcctgctgctggtcgcggcggccgccatcagcgtgctcggcggctatcgcagccacgcggtgttcgtctatacggccgtgctggtcgtcgcgctgctgtactactggcggcacttcgaccgcgcgagcatcgccgccagcagcctgttcgcgttgctgagcatcgtgtcgctgctgatctacgcgaccttcggcgtgctctatctcggcgacgaattcacgccgcccgtccacgatctcgccaccgccgtctatttctccatcgtatcgatgtcgaccgtcggctacggcgacatcgtcccgcacgcgccgaccgcacgcctgttcaccgcgtcggtgatcgtgctcggcatcacggtgttcgcgacgtcgatcagcgcggtcgtcggcccggtgatcggcggcaatctgaaacggatcgtcaagggaggcatttcgaacgtgatccgcaagcatcatttcctgatcgtcggcgcgacgcccgtcgcgcatgcggtgcacgacgggctgcgcaagcgcggctacgcggtgaccgtcgtcgtgccggccggcgtcgagcacaactatccggccgcgaccgacctgatcgtcggcgatgcgaccgaccatgcggtgctggagagcgccggcgcggcgaccgcccgcgcggtgctcgcgctgcgttcggacgacgccgaaaacgcattcatcatcctcgcgattcgcgagatcgcaccgtcggtgcgcacggtcgcgctcgtgaaccagcagcgcaacctcgaacggctgcggctgttgaagcccgacatggtgttctcgccgcagcagctcgcgggcgaactgctcgccagcacgctcaacgacgaaccggtcgacaagtcggtgatctcgcacctgctgttcggcacgacggatgccgca

SEQ ID NO: 11624 - DNA, 666 bp, Burkholderia cepacia
gtgggaataaaggggggggtggggggcagtatatgtgatgatgcgggggtcagatacggtgaatcagggggcgttaaatgtaagacggggaaatatatacggagaggggggggtgcgggagagagggttggtagaaagaagtgggggggggagaggagggcggggttagtaaagaaaacacaagaaaaaaagaaagcaagaagggtaagagagaaaagttcgggcggatgtagaagatgggaattgaggggaggagaggggttggaggaagaagcggccgaagcgccatggtatacgcactaccggatggagtcgtacgtgacgggcgagctgcgcgagctcgtcgcggccgaactgccgataaacggcgcgcggctgggtcatatcagcccgactgccatgcatgtggcccgaaaagccgatcgccgcgacctgcgcgcgctcgtcggccggcagccgcgcggccgcgcgcaccagcgcctgccaccaggtgtcgggcgcgatttccgcccagcccggctgcggcgacgacaacgcataaggttcgctcgcgaccgcccgctcgacgccgtcggcatcgagcgtgacgagtttgacggagccggtgccgaggtcgattccgagcaggcgcatgacgtgagggggattcgtatgaacggatgtcga

SEQ ID NO: 11625 - DNA, 918 bp, Burkholderia cepacia
atgaccgacgatccgatcgccgcctacctgtcgaacctgaagcacgtcaggcagctgtcggaacacacgctgcgcgcgtacacgcacgaactcgacgaactgaagaagctcgcggccggccggccgctcgacgcgctgaccgccgccgacatgcgcggcgcggtcgcccgcgcgcatgcgggcgggctgtccgcgcgctcgatctcgcaccggctctccgcgtggcgcgcgttctaccgctggctcgcgcaacgcatcgagatgcccgcgaacccggtggccgcggtgcgcgcgccgaagcgcccgaaaacgctgccgaaggcgctgtcggtcgacgacgcatccgcgctgatggacgcgccgctcgccggcacgaccgaaggcatccgcgatcacgcgatcctcgagctgttctattcgtcggggctgcgcctcgccgagctgatcgggctggacgtgacgtacacgcaggccgacggctaccgctcggccggctggctcgatctcgccgaagccgaagtcaccgtgcgcggcaagggcaacaaggagcgcaaggtgccggtcggccgcaaggcgatcgacgcgctgaacgcgtggctcgcggtgcgcggcgaattcgtgaagcacgatccgcatccgctgttcgtgtcggtgcgcggcaaccggatgtcgccgggcgtcgtgcgcgagcgcgtgaagcgcgcggcgctcgccgccggcatccccgccaacgtccacccgcacgtgttgcgccactcgttcgcgacgcacgtgctgcagtcgagcggcgacctgcgcgcggtgcaggaactgctcggccacgcgagcgtcgccgcgacgcaggtctatacgtcgctcgacttccagcatctcgcgaagatttacgacagcgcgcatccgcgcgcgaagaagcgcgac

SEQ ID NO: 11626 - DNA, 2010 bp, Burkholderia cepacia
atgcgcgtgaccgtcgagaacggcaaggcaatcaaggtcacgggcgatcccgaccatccgccgacacagggcgtcttgtgtacgaaagtcagccgatacgcggatcgcgttcatcatcccgatcgcctcactgtcccgctcaggcgtatcggcgaaaaaggggaagggcgcttcgtgccgatcagttgggacgaggcgttcgacgagatcgggcgtcgcctcggtgagatcgccgcgcgcgcgccggaagcgatcgtgccgtacagctatgcgggaacgatgggactcgtacaaggcgagggcattgcccagcgcttctttcacaagctcggtgcgtcgcggctcgagcgtgcgatctgcgcggcggccggtgccgcggggctgcgatacacgtatggcggcagtgtcggcatgcacctcgagcacttcgaggaaagcgaactgattctgatatggggcgcgaatccgatcgcatcgagtctgcacttctggacccgcgcgcaggaagcgaagcgccgtggtgcgcgtcttgtcgcgatcgacccgtatcgttcgctgaccgcggagaagtgccatcagcacatcgccctgaagcccggtaccgatggcgcgtttgcgctcggcatgatgcatgtgctgattaccgaaaacctgctcgatcacgactacatcgccgaccatacgctcggcttcgacgaactgaaggcgcgcgccctgacctatccgccggaacgtgtcgcgcagatctgcggcatcgacgcgtcggagctggtcgatcttgcccgtcgctacggcgccacccgcaaggcatcgatccgcctcaactacggcatgcaacgcgttcgcggcggcggcaatgccgtgcgcgcgattgccagcctgccggcgttgacgggggcgtggcgcgatcgggcgggcggcttgctgctctcgtcgtcggagtccgcgccggtcaaccaggccgcgctgctacgtccggacctgatgccgggttggccgaacaagttgccgcgcatcatcaacatgaacgcgatcggcgacgcgctgctgcatccgggcgatgcgacgttcgggccgaaagtggaagcgctgatcgtgtacaactcgaatccggtggcggtcgcgcccgattcgtcgaaggtcgccgcgggcttcgcgcgtgacgatctgttcacggtcgttctcgagcacttcaagacagatacggtcgatttcgccgacattgtattgccggcaaccacgcagctcgaacatctggatatccataagtcgtacggccatacctatgtgatggcgaatctgccggtgattccgccggtgggagacgcgcggccgaacacggagatctttcgcgggatcgcgcgcagcatgggactcgacgagcccgcgctctatcacagcgacgaagcggtcgcgcgcgcggcgcttcgctgggacgatccggtgctcgacagcgactgggacacgctgaagcaggccggctggctgaaactcaaactgccggaggcgccgttcgcgaatggcggtttccgcacgccatcgggaaagtgcgagttctacagcccgcggctcgagcagatgggcatggaccccgttcccgactatctgccgccgttcgaatcagtcgaagccgcgcccgaactcgccgcacgctatccgctggcgatgatttcgccgccggcccgtcacttcctgaacagcacgttcgtgaacgtcgacagcctgcgttcgacggaaggcgagccgcacctcgacatgcacccgtccgacgccagcgcgcgcggcatcgcggagggcgacgtcgtccgtatcttcaacgatcgcggctcgatgcaggcgcttgcgcgtattaccgatcgggcgcgcgccgggctggtcgtcggattgtcgatctggtggaagaagttgtcgccggacggcaggaacgcgaacgaagtgacgagccaggcactgaccgatctgggcaattcggcgacgttttacgattgtcttgtggaagttgagcgcatt

SEQ ID NO: 11627 - DNA, 1008 bp, Burkholderia cepacia
atgttcagattcgtgttgcgccgcgtggggatggtgatcccgactttcatcggcatcaccatcctggcgtttgcgctgattcacctgataccgggcgaccccatcgaagtgatgatgggcgagcgcggcgtcgatcccgcgatgcacgcagaggcgatgaagcgcctcgggctcgaccagccgctgccgctgcagtacctccactacgtcggccgtgcgctgcatggcgacctcggcacgtcgatcatcaccaacacgagcgtcggcggtgaattcttcgcgcgcttcccggcgaccgtcgaactgtcgctgtgcgcgctcgtgttcgcgctcgcggtcggtttgccggccggcgtgatcgccgcgctgcggcgcggctcggtcatcgaccacggcgtgatgggcaccgcgctcaccggctactcgatgccgatcttctggtgggggctgatcctcatcatggtgttttcgtcgtatctcggctggacgcccgtgtccgggcgcatcgcggtcgaatacgatttcccgcacccgaccggcttcatgctgatcgacgcgctgctcgcgccggacgaaggcgcgttcaagtcggcggtgagccacctgatcctgcccgcgatcgtgctcggcacgattccgctcgcggtgatcgcgcggatgacgcgctcgtcgatgctcgaagtgctgcgcgaggactacatccgcaccgcccgcgcgaaggggctgtcgcccgtgcgcgtggtcgtcgtgcatgcgctgcgcaatgcgctgatcccggtcgtcaccgtgatcggcctgcagatcggcacgctgcttgcgggtgcggtgctgaccgagacgctcttttcgtggcccggtgtcggcaagtggctgatcgatgcgatcggccgccgcgactatccggtcgtccagggcggcatcctgttgatcgcgacgctcgtgatcgtcgtgaacctggtcgtcgacctgctgtacggcgtgctgaatccgcgcatccgccacacgagg

SEQ ID NO: 11628 - DNA, 2595 bp, Burkholderia cepacia
atgagaatcgacaagctcaccaccaagttccaggaagcactcgcggacgcgcaaagcctcgcggcaggccgcgacaatcaatacatcgaacccgttcacgtcctcgcggcgctggtcgcgcaacaggacggctcggcccgctcgctgatgtcgcgtgcgggcgtgcacgtgcaggcgctgcaaggcgcgctgaacgaagccatctcgcgcctgccgcaggtgacgggcacgggcggcgacatccagatcggccgtgagttggccgggctgctgaaccaggccgacaaggaagcgcagaagctcaacgacacgttcatcgcgagcgagatgttcctgctcgcggtgtcggacgacaaaggcgatgccggcaagctcgcgcgccagcacggcctcacgcgcaaggcgctggaagccgcgatcgccgcggtgcgcggcggctcgcaggtgcacagccaggatgcggaaagccagcgcgaggcgctgaagaaatacacggtcgacctgaccgagcgcgcccgcgcgggcaagctcgatccggtgatcggccgcgacgacgaaatccgccgctcgatccagatcctgcagcgccgcaccaagaacaacccggtgctgatcggcgagccgggcgtcggcaagacggcgatcgtcgaagggctcgcgcagcggatcgtcaacggcgaagtgcccgagacgctgaagggcaagcgcgtgctgtcgctcgacatggccgcgctgctcgccggcgcgaagtatcgcggcgagttcgaggagcgcctgaaggcggtgctcaacgacatcgcgaaggacgaaggccagacgatcgtcttcatcgacgagatccacacgatggtcggcgcgggcaaggccgaaggcgcgatggacgcgggcaacatgctgaagccggcgctgtcgcgcggcgagctgcactgcatcggcgcgaccacgctcgacgaataccgcaagtacatcgagaaggacgccgcgctcgagcgccgcttccagaaggtgctcgtcgacgagccgagcgtcgaggcgacgatcgcgatcctgcgcgggctgcaggagaagtacgaactgcaccacggcgtcgacatcaccgacccggcgatcgtcgccgcggccgagctgtcgcaccgctacatcaccgaccgcttcctgcccgacaaggcgatcgacctgatcgacgaagccgcttcgaagatcaagatggaaatcgattcgaagcccgaagagatggacaagctcgaccgtcgtctgattcagctgaagatcgagcgcgaagccgtgaagaaggagcaggacgaagcgtcgcagaagcgcctgcagctgatcgaggaagagatcgaacgcctcggccgcgaatatgcggacctggaagagatctggaccgccgagaaggccgcggtgcagggcagcgcgcagctcaaggaagagatcgagaaggtgcgggcggacatcgcgcgcctgcagcgtgaaggcaagctcgagaaggtcgccgagctgcagtacggcaagctgccgcagctcgagtcgcaactgaagcaggtcacgcaggccgaagagcaggagcagcacaacccgacgcgcccgcgcctgctgcgcacgcaggtcggcgccgaggaaatcgcggaagtcgtgtcgcgttcgacggggattcccgtgtcgcggatgatgcagggcgaacgcgagaagctgctgcacatcgaggaaaagctgcatgagcgcgtggtcggccaggacgaggcgatcagcgcggtggccgatgcgatccgtcggtcgcgcgcgggtctcgccgatccgaaccgtccgtacggctcgttcctgttcctcggcccgacgggggtcggcaagaccgagctgtgcaaggcgctggcgtcgttcctgttcgattcggaagagcacctgatccgcatcgacatgagcgagttcatggagaagcacagcgtcgcgcggctgatcggcgcgccgcccggctatgtcggctacgaggaaggcggctacctgacggaagccgtgcgccgcaagccgtacagcgtgatcctgctcgacgagatcgagaaggcgaatccggacgtgttcaacgtgctgctgcaggtgctcgacgacggccgcatgacggacgggcaggggcgcacggtcgacttcaagaacacggtcatcgtgatgacgtcgaatctcggctcgcaggtgatccaggccatgaccggctcgccgcaggacgagatcaaggacgccgtgtggctcgaggtgaagcagcatttccgccccgagttcctgaaccggatcgacgacgtcgtcgtgttccatgcgctcgaccgcagcaacatcgagtcgatcgcgaagatccagctggcgcgcctgcacgaccggcttgcgaagctggacatggcgctcgacgtgtcgcccgctgcgctcgaacagatcgcgaaggtcggctacgatccggtgttcggtgcgcggccgctgaagcgcgcgatccagcaggagatcgagaacccggtcgcgaagctgatcctcgccggccgcttcggtccgaaggacgtgatcccggtcgacgtcaacgacggccagttcgtgttcgaccgcgtcgtgcac

SEQ ID NO: 11629 - DNA, 1071 bp, Burkholderia cepacia
atggcacgcatggaggttgcgccgcagcctgccggattccctgaaaggagtatcgagatgaaagccgttggactcacccgttatctgccgatcgacgacccgcaagcgttgctcgacgtcgaactgccacaacccgtgccgggcccgcgcgatctgctcgtgaaggtcgaggcgatttccgtgaacccggtcgacaccaaggtgcgggcgccgaagccgcaggtcgaggagacgccgcgcgtgctcggctgggacgcggccggcacggtcgtcgcggtcggcgccgacgtcacgctgttccggcccggcgacgaagtgttctacgcgggcagcatcacgcggcccggcgcgaacagcgaattccacgcggtcgacgaacggatcgccgcgctgaagccgcgcacgctcgatttcgcggcggcggccgcgctgccgctcaccgcgctcaccgcgtgggaagcgctgttcgaccggttgcgcgtgtcgccgcagggcgcggacgccggcaagtcggtgctgatcatcggcggcgcgggcggcgtgggctcgatcgcgatccagctcgcgaagacgctcggcaagctgcacgtgatcgcgaccgcgtcgcggccggcgtcggccgactgggtgcgctcgctcggtgcggatgcggtggtcgaccatttcggcgacctgccggcgcagttgcgcgaggccggccatccgagcgtcgactacgtgctgatcctcaacgataccgaccatcatttcccggccgcggcggaagtcattcggccgcagggcggcatctgcacgatcgtcgagaacgggaagcccgtgccggtcgaattgctgaaggcgaagagcgccgcgtttcactgggaattcatgttcacgcgggcgatgttcgagacgccggacatgatcgagcagcaccggatcctcggcgaagtcgcgcggctcgtcgatggcggcacgctgcgtacgacgctcggcgaacagctcggcacgatcaatgccgagaacgtgcggcgcgcgcaccggatgctcgaggccggacgcgcgatcggcaagctcgtgctgagcggcttc

SEQ ID NO: 11630 - DNA, 1359 bp, Burkholderia cepacia
atggaagatgagattcgggtgctggtcgtcgaggacgatgaaaacgtccggatcggcgtcgagcaggccgtcgcgctcgccgggttcccggtcgacgcgttcgcgtccgccgccgacgcgctcgcgcacgtcgcgcccggcgcgccggtggtgatcgtgtcggacgtgcggatgcccggcatcgacgggctgcagctgctcgaccgcgtgatggccatcgacgcgcagatcccggtcgtgctgatcagcggccacgcggacatctcgacggccgtcggcgcgatgcaggtcggcgcgtacgacttcatcgagaagccgttttcgtcggacgtgatcgccggccgcgtcgcgcgcgcggtcgagaagcgccgcctgacgctcgaggtgcaggggctgcgcgcggcgctgaacaactggcagggcatcgaggcgttcgtgctcggcaagtcgcccgcgatggccgacgtgcgcaagaagatcctgcgcctcgccgatacgtcggtgtcggtgctgatcaccggcgagacgggcaccggcaaggagttgatcgcgcgcagcctgcacgacttcggcggccgccgcgacgcgcatttcgtcgcgctgaactgcggcggcctgcccgagcaggtgttcgagagcgagctgttcggccacgaggccggcgcgttcaccggcgcgatcaagaagcgcatcggcaagatcgagtgggcggacggcggcacgctgttcctcgacgagatcgagacgatgccgatcgcgctgcagatcaagatgctgcgcgtgctgcaggaacgcgtggtcgagcggctcggcgcgaacgacctgattccggtcgactgccgcgtggtggccgcgtcgaaggcggatctcgccgaactcgcggccgacggacgttttcgcgcggatctgctgtatcgcctcaacgtcgcgcagatcgagctgccgccgctgcgcgaacggcgcgaggacgtgccgctgctgttcgagcatttcgtgctcgcggccgcgcggcgcttcgggcagccggcgccggtcgtcaccgccgcgcaggtatccgaactgatgacgcacgcgtggcccggcaacgtgcgcgagctgcagaacgtggccgaccgcttcgtgctcgggctgaccggcgacagcctgctgtcgtccggcggcacgccgacggccggcagcacgctcgcggagcagctcgcgtatttcgagcggatgctgatcgaggacatgctgcggcgtcaccacggcaacgtcgcggacgcgagcgaggcgctcggcatgccgaagaaaacgctctatcacaagctgcgcaacctccggattcccgcgcgcggcgacgccgcggccgacggcggcgaa

SEQ ID NO: 11631 - DNA, 369 bp, Burkholderia cepacia
atgtctgcgattgaatcggttcttcacgaaacccgtcagttcgcgccgcccgcggcgctcgagaagacggcggccatttccggcatgccggcctaccgcgcgctcgtcgccgaggccgagcaggattacgaaggcttctgggcgcgtctcgcgcgcgaaggcctcacgtggcacaagccgttcacgaaggtgctcgacgagcgcaacgcgccgttctacacctggttcgacgacggcgagctgaacgcgtcgtacaactgtctcgatcgtcacgtcgaagccggccacggcgagcgcgtcgcggtgatcttcgaggccgacgacggcaccgtcacccgcgtcacctatgccgatctcctcgcgcgcgtg

SEQ ID NO: 11632 - DNA, 390 bp, Burkholderia cepacia
atgctcggcatctgccgggtgctcggcggcgaccaggggcttgatccggccggcatgctgcgcaacgtcgcggacaatccgctcagctacgggctggcgttcgtcggcgcgctgatctgggccggctattgcacggtcaccgcgcgcatcgccgacggcaagaacggcgtcacgccgttcttcatgctggtggccgcggtgctctggatcaagttcgcgatcgaaggcggcggcggcatgacgttcagtttgcacgcggtcgggtatctcgtgctggcggcgtcggcgctcggcttcggctatgcggcctggaacaccggcatcatgcacggcaacgtgacggtcatcgtcggcgcgtcgtatttcacgccggtgctcgccgccgccgca

SEQ ID NO: 11633 - DNA, 3141 bp, Burkholderia cepacia
atggctgaattctttatccgccgcccggtgtttgcgtgggtgatcgcgctcttcatcatcctgaccgggctgatcgcgatcccgcaactgccggtcgcgcgctacccgtcggtcgcgccgccgtccgtcacgatcaccgcgaactacccgggcgccacgccgcagacgatgaacgacggcgtgctgagcctcatcgagcgccaattgtccggcgtcaagaacctgctgtacttcgaatcgtcggccgacacgtccggcagcgcgcagatcaccgtcacgttcaagccgggcaccaatccggagatggcgcaggtcgacgtgcagaacaagatcaagtcggtcgagccgcgcctgcccgccgccgtgcgccagaacgggctgatcgtcgaatccgcgtcgtccggcttcctgatgatcgtcagcctgcgctcggacaacggtcgcttcgacgaaggcgcgctcgccgactacatggcgcgcagcgtgtccgaggaactgcggcgcatcgacggcgtcggccgtgtgctgcagttcggctccgaacgcgcgatgcgcatctgggtcgatccgcagaagctgatcaatttcggcctgtcgatgagcgatctgacgaccgcgatcggccagcagaacgtgcagatcgcaccgggcagcctcggtgcgctgcccgcgctgccgggccagcgcgtgaccgtgccgctcaccgcgcaaggtcagctcgcgacgtcggaagaattcgcgaaggtcgtgctgcgcgcgaacgcggacggctcgaaggtcgtgctcggcgacgtcgcccgcgtcgaactcggctcgcaaaactacacgttcgtgagccgcgagaacaacaagccggccactctcgccggcgtgcagctcgcgccgggcgccaacgcggtgaagacggcggacgcgatccgcgcgcgcatggcggaactgagcaagtcgatgccgtcgggcatgagctactcgatcccgctcgacacgtcgccgttcgtgaagatctcgatcgagaaagtgctgcacacgctgctcgaagcgatggtgctcgtgttcctcgtgatgtacctgttcctgcagaacgtgcgctatacgctgatcccggccatcgtcgcgccggtcgcgatgctcggcacgttcacggtgatgctgctgaccggcttctcgatcaacgtgctgacgatgttcggcatggtgctcgcgatcggcatcatcgtcgacgatgcgatcgtcgtcgtcgagaacgtcgaacgcctgatggccgaggaaggactgtcgccgaaggacgcgacgtcgaaggcgatgaaggagatcaccggcgcgatcgtcggcgtcacgctggtgctgaccgcggtattcctgccgatggcgatggcgagcggctcggtcggcgtgatctacaagcagttcacgctgtcgatggccgtgtcgatcctgttctccgcgctgctggcgctgacgctcacgccggccctgtgcgcgacgatgctcaagccgctcgcaccgggccatcacgagaagcgcggcttcttcggctggttcaaccgccgcttcgaccgcctgacgaaatggtacgagacgcgcgtcggccgcctggtcggtcgcacgggccgcgtgatgctggtgttcgtcgcgatttcgggcgcactggtgctcggtttccgcagcctgccgtcgtcgttcctgccggacgaagaccagggctacttcatcaccagctttctgctgcccgcggacgctaccgccgagcgtacgcacgacgtggtcaaaacgctggagaagcatcttgcttcacgtccggcaatccagtcgagcatttccgtgatcggctacggcttctcgggccagggtccgaacgcggcgatcaactggtccgtgatgaaggactggaagaaccgcggcggcgcatcgaccctcgaggaaggcatgctcgcgcagcaagcgatggccggcgtgaccgaaggcacggtgatgagcctgctgccgccggccatcgacgaactcggcaacagctcgggcttctcgatgcgcctggaagaccgcgccaaccagggcacggcggcgctcaaggcggccgaagcgaagctgctcgaactcgccgcgcaaagcaaggtcgtgaccggcgtgtaccccgacagtctgccggccggcacgagcattcgcctcgagatcgaccgcgcgaaggcgcaggcgctcggcgtgtcgttcacgacgctcagcgacacgctgtcgaccgcgatgggatcgacctacgtgaacgacttcccgaacgcgggccgcatgcagcaggtgatcatccaggccgacgcgccggcacgcatgcagatcgacaacgtgatgaagctgtacgtgcgcaacgcggccggcggcatggtgccgctgtccgaggtggtgcgccccgtgtggaccgacacgccgctgcagatggtgcgcttcaagggctatccgtccgcgcgcatttccggcaacgcggcgcccggccagtcgagcggcgcggcgatggccgagatggaacggctcgccgcgcaactgccgccgggcttcgcggtcgagtggaccggccagtcgctgcaggaacgccagtcggcgtcgcaggcgccgatgctgatggtgctgtcgatgatcgtcgtgttcctggtgctcgccgcgctgtacgaaagctggtcgatcccgctgtcggtgatgctggtggtgccgctcggcctgatcggcgcgatcggtgcggtgctgctgcgcgggatgccgaacgacgtgttcttcaaggtcgggatgatcaccgtgatcggcctgtccgcgaagaacgcgatcctgatcgtcgagttcgcgaagcagttgcgcgaggaaggcagggggttgatcgaagcggccgtgcaggcgtcgaagctgcgcctgcgcccgatcctgatgacctcgctcgcgttcggcctcggcgtcgtgccgctgatgatcgcgaccggcgccagcgccgagacgcagcacgcgatcggcaccggcgtgttcggcggcatggtgaccgccacggtactggccattttcttcgtccctgttttctttgtgttcgtgatgagtatccaggagcgcatcggcgcatggcgggcgtcccgcacgcagccggccaccccgactcacggacaggaaggt

SEQ ID NO: 11634 - DNA, 2421 bp, Burkholderia cepacia
atgtcaggcacccaacttctcccgccggaacgcatcacgctcccgctgctgccgctgcgggacgtcgtcgttttcccgcacatggtcattccgctcttcgtgggccggccgaaatcgatcaaggccctcgaagcagcgatggaaggcggcaagcacatcatgctcgtcgcccagaaaaccgcggccaaggacgaaccgaccgaaaaggacatgtacgaggtcggttgtatcgccaacatcctgcagatgctgaagctgccggacggcaccgtgaaggtgctcgtcgagggcctgcagcgtgcgaaggcattgtccatcgaagaacaggagacccaattctcctgcgaagtgatgccgctcgagcccgatcacgccgacagcgccgaaacggaagcgctgcgccgtgcgatcgtgtcgcagttcgatcagtacgtgaagctgaacaagaagatcccgccggagattctcacgtcgctgtcgggcatcgacgaagcaggccgcctcgccgacatgatcgccgagcgcctgccgctgaagctcgaccagaagcagcacatcctcgagatgttcccggtcatcgagcgcctcgagcacctgctcgcgcaactcgaagccgagatcgacatcctgcaggtcgaaaagcgcatccgcgggcgcgtgaagcgccagatggaaaagagccagcgcgagtactacctgaacgaacaggtcaaggcgatccagaaggaactgggcgaaggcgaagaaggcgcggatctcgaggagctcgagaagcgcatcaacgccgcgcgcatgccgaaggaagccaagaagaaggccgacgccgagctgaagaagctgaagctgatgtcgccgatgtcggcggaagccaccgtcgtgcgcaactacatcgacacgctgatcggcctgccgtggcgcaagaagagcaaggtcaacaacgacctgtcgaacgccgagcaggtgctcgacgaggatcacttcggcctcgagaaggtcaaggaacggatcctcgagtacctcgcggtgcaacagcgcgtggacaaggtcaaggcgccgatcctgtgcctcgtcgggcctccgggcgtcggcaagacctcgctcggccagtcgatcgcccgtgcgacgaaccgcaagttcgtcaggatggcgctcggcggcgtgcgtgacgaagccgagatccgcggccaccgccgcacgtatatcggttcgatgccgggcaagatcctgcaaagcctcgcgaaggtcggcgtgcgcaatccgctcttcctgctcgacgaagtcgacaagatgggcatggatttccgcggcgatccgtcgtcggcgctgctcgaagtgctcgatccggaacagaaccacacgttcgccgaccactacatcgaggtcgacttcgatctgtcggacgtgatgttcgtcgcgacgtcgaactcgctgaacatcccgccgccgctgctcgaccggatggaagtgatccgtctgtcgggctacacggaagacgagaaggtcagcattgcccagcgttacctgctgccgaagcagaagaagaacaacgggctgaaggaaggcgagatcgacgtcaccgagcaggcgatccgcgacatcatccgctactacacgcgcgaagccggtgtgcgttcgctcgagcgggaagtgtcgaagatctgccgcaaggtcgtgaagatgctgctgctgaagaaggcatcgggcgcgatcaaggtcgatggcgaaaatctcgacacgttcctcggcgtgcgcaagtacgacttcggcctcgcggcgaaggaaaaccaggtcggtcaggtgacgggcctcgcgtggacggaagtcggcggcgatctgctgacgatcgaagccgcggtgatgcccggcaagggcaacgtgattcgtacgggttcgctcggcgacgtgatgaaggagtcggtcgaggccgcacgttcggtcgtgcgctcgcgttcgcgccgtctgggcatcaaggacgaagcgttcgagaagcaggacatccacatccacgtgccggaaggcgcgacgccgaaggacggtccgtccgccggcggtgcgatgacgaccgcgctggtatcggtgctgacgggtatccccgtgcgtgccgatgtcgcgatgacgggtgaaatcacgttgcgtggcgaagtgctgccgatcggcgggctgaaggaaaagctgctggctgcgcatcgcggcggcatcaagctcgtgctgatcccggaagaaaacgtgaaggatctcgcggacattccggacaacgtgaagaacgcgatcgagatcgtgccggtccgctggatcgacaaggtgctggagctcgcgctcgagcgttcgccgacgccactgccgccggaagaagaagcgaaggcagcagcgccggtcggtgaggcggcgaaggatgccggctcgaccgaagtggtcaagcac

SEQ ID NO: 11635 - DNA, 1813 bp, Burkholderia cepacia
atgaaagctctgctcgatctattcaagcaagtccaacaggaagaagttttcgacgcgatcaagatcggtctggcctcgcccgacaagatccgttcgtggtcgttcggcgaagtgaagaagccggagaccatcaactaccgtacgttcaagccggaacgcgatggtctgttctgcgcgaagatcttcgggccgatcaaggactacgagtgcctgtgcggcaagtacaagcgcctgaagcaccgcggcgtgatctgcgagaagtgcggcgtcgaagtgacgctggcgaaggtgcgtcgcgaacggatgggccacatcgagctggcctcgccggtcgcgcacatctggttcctgaagtcgctgccgtcgcgtctgggcatggtgctcgacatgacgctgcgcgacatcgaacgcgtgctgtacttcgaagcgtacgtggtgatcgaaccgggcatgacgccgctgaaggcgcggcagatcatgaccgaggaggattactacaacaaggtcgaggaatacggcgacgaattccgtgccgaaatgggcgcggaaggcgtgcgtgaactgctgcgcgcgatcaacatcgacgagcaggtcgagacgctgcgcaccgagctgaagaacacgggctcggaagcgaagatcaagaagtacgcgaagcgcctgaaggtcctcgaggcattccagcgttcgggcatcaagcccgagtggatgatcctcgaagtgctgccggtgctgccgccggaactgcgtccgctcgtgccgctcgatggcggccgtttcgcgacgtcggacctgaacgacctgtatcgccgcgtgatcaaccgtaacaaccggttgaagcgtctgctcgagctgaaggcgcctgaaatcatcgtccgcaacgaaaagcggatgctgcaggaagccgtcgactcgctgctcgacaacggtcgtcgcggcaaggcgatgacgggcgcgaacaagcgcccgctgaagtcgctcgccgacatgatcaagggcaagggcggtcgtttccgtcagaacctgctgggcaagcgcgtcgactactcgggccgttcggtcatcgtggtcggcccgacgctgaagctgcaccagtgcggcctgccgaagctgatggcgctcgagctgttcaagccgttcatcttcaacaagctggaagtgatgggggtagctacgaccatcaaggctgcgaagaaggaggtcgagaaccagacgccggtggtgtgggacatcctcgaagaggtgatccgcgagcacccggtgatgctgaaccgtgcgccgacgctgcaccgtctcggtatccaggcgttcgagccggtgctgatcgaaggcaaggcaatccagctgcacccgctcgtctgcgcggcgttcaacgccgacttcgacggtgaccagatggccgttcacgtgccgctgtcgctcgaagcgcagatggaagcgcgcacgctgatgctcgcgtcgaacaacgtgctgttcccggccaacggcgatccgtcgatcgtgccgtcgcaggatatcgtgctgggtctgtactacgcgacccgcgaagcgatcaacggcaagggcgaaggcctgtcgttcacgggcgtgtcggaagtcatccgcgcgtacgagaacaaggaagtcgagctggcctcgcgcgtcaacgtgcggatcaccgaaatggtccgcaacgaggacacgtcggaaggcgcgccggaattcgtgccgaagatcacgctgtacgcgacgaccgtcggccgcgcgatcctgtcggagatcctgccgcacggcctgccgttctcggtgctgaacaagccgctgaagaagaagg

SEQ ID NO: 11636 - DNA, 432 bp, Burkholderia cepacia
atggaattgaataacctgaagccggcagctggcgccaagcacgccaagcgtcgcgtcggtcgtggcatcggttcgggcctcggcaagacggctggccgtggtcacaagggtcagaaatcgcgttcgggcggcttccacaaagtcggtttcgaaggcggtcagatgccgctgcaacgtcgtctgccgaagcgcggcttcacgtcgctgacgaaggaattcgtcggtgaagtgcgcctgggcgacctcgagaagctgccggtcgacgagatcgatctgctcgcactgaagcaagccggcctggtcggcgagctgacgaagagcgcaaagatcatcgcgacgggcgaactgaagcgcaagatcgtcgtgaagggtctcggtgccaccaagggtgcgcgcgctgcgatcgaagcggctggcggttcgttcgccgag

SEQ ID NO: 11637 - DNA, 1116 bp, Burkholderia cepacia
atgactgcactgaatcacactccgctcaacgccgcgcaccgcgcgctcaatgcccgcatggtcgacttcggcggctgggacatgcccgtcaactacggctcgcagatcgaagaacacgctgccgtgcgcaccgacgccggcatgttcgacgtgtcgcacatgtgcgtcgtcgatttcaccggcagccgcgtgcgcgcgttcttcgagcatgcgatcgcgaacaacgtcggcaagctcaagacgcccggcaaggcactctactcgtgcctgctcaacccgcaaggcggcgtcatcgacgatctgatcgtctactacttcaccgaagaattcttccgcgtggtcgtcaacgccggcaccgccgacaaagacatcgcgtggttcaaccagctgaacgagcaaggcggctacggcctgacgatcgcgccgcgccgcgatttcgcgatcgtcgccgtccagggtccgaacgcccgcgaaaaggtctgggcgacggtgccttccgcccgcgccgccaccagcgaactcaagccgttcaacgccgcgcaggtcgccggcacgccgttcggcgatctcactatcgcccgcaccggctataccggcgaagacggcttcgaagtgatcgtcccggccgtgcacgtcgaagtgctgtggaatgcgctgcagcaacacggcgtgcgtccgtgcggactcggcgcgcgcgacacgctgcgcctcgaggccggcatgaacctgtacggccaggacatggacgacaccgtctccccgctcgacgcgggcctcgcatggaccgtcgacctcgccgcgccgcgcgacttcgtcggccgcgccgcactcgaagccaacggcacgcgcgccgcgttcgtcggcctgatcctgcagaaggaaaacggcaaggcgggcggcgtgctgcgcgcgcaccagaaggtcgtcacgccgcacggcgaaggcgagatcacgagcggcacgttctcgccgtcgatgcaggaatcgatcgcgttcgcgcgggtgccggcggccgtccagatcggcgacaccgtccaggtgcaaattcgagacaagaatcttcccgcgcgcgtggtaaaactgccgttcgtgcgcaacggcaaggtcctcgctgcg

SEQ ID NO: 11638 - DNA, 1548 bp, Burkholderia cepacia
atggaaggagacaacggcgtgcaactggaagccatccaccgcacgggcctcgggctcggcgcggacgacgcatcgcatcgaaccgacacggccgcgcgcgatcccgcgctgagcccgcggctgcataaccccgatctcgcgccgacccgggccgagggccggacatggggccgctacagcatctttgcgctgtggaccaacgacgtgcacaacatcgcgaactactcgttcgcgatcgggctgttcgcgctcggcctgtcgggctggcagatgctcgcgtcgctcgcgatcggcgcggtgctcgtgtactgcttcatgaacctgaccggctacatgggccagaagaccggcgtgccgttcccggtgatcagccggatgagcttcggcatctacggcgcgctgctgcccgcgatgatccgcgcggtgatcgcgatcgcatggttcggcatccagacctatctcgcatccgtcgtgctgcgcgtgctgctcaccgcgatctggccgggcctcgccgcgttcgaccagaatgcgatcttcgggctgtcgacgctcggctggatcacgttcgtcgcgatctggctggtgcagatcggcatcctcacgtacgggatggaaatggtccgcaagtacgaggggctcgccggcccggtgatcctcgtcacgacgctgtcgctcgccgcgtggatgttcagccgcaccggcggccagctcgcgatgtcgatcggcaagccgatgaccggcctgaaaatgtggacagaaatcttcgcgggcggctcgctgtggctcgcgatctacggcacgctggtgctcaacttctgcgacttcgcccgttcgtcgccgagcgcgaagacggtgcgcgtcggcaacttctggggcctgccggtcaacatcctcgtgttcgcgacgatcagcttcgtgctcgccggcgcgcagttcaagctgaacggccacatcatccacagcccgacggaaatcatcgcgacggtgccgaacaagctgttcctcgtgctcggctgcctcgccttcctgatcgtgacggtggccgtgaacatcatggcgaacttcgtcgcgccggccttcgtgctgacgagcctcgcgccgcaccgcctgtcgttccgccgcgcgggcctgatcagcgcgacgatcgccgtgctgatcctgccgtggaacctgtacaacagcccgatcgtgatcgtctatttcctgtccggcctcggtgcgctgctcggcccgctgtacggaatcatcacggtcgactactggctggtgcgcaagcagcgcgtgaacgtgcccgatctctacaccgaagcgccgaccggcgcctacttctacacgcgcggcgtgaaccgcaaggcgctcgcggcgctcgtgccgtccgcgctgatctcgatcacgctcgccgtcgtaccggccttcagtgcgatgacgccgttctcgtggctgctcggcgccgcgatcgcgggcagcgtgtactggctgctggccgatcgcacacggcactacgaagaacgttcgggcgagcacatcgcggtcgcctgcgcgcaacac

SEQ ID NO: 11639 - DNA, 235 bp, Burkholderia cepacia
ttgtcgcgctccggcacggtgggcctgcaaatggcgaccggccgcacgctcaagaacatcttaggcgcgctgggccacgtcgccgaaggcgtgcgatgcgctcaggcagtgctggcgctcgcgcgcgcacaatcgatcgaaatgccgattgcggaagcgcgtgtgcgcgatgctttccgaccgcatcgatgcgcgggagcccgtgatcggcctggtcagcccgaatgcgcgcgca

SEQ ID NO: 11640 - DNA, 1212 bp, Burkholderia cepacia
atgagcgccgcccgcagttcccatccggcgcatcagcagatcgcagccgcgctcgcgtggctgcgtcagcatgtggcccccgcggcgcaactgcatgccgacacgcgcagcctccaggctggcgacgtgttcgtcgcgtatgcggtcgacggggcggataaccgcgctttcatggccgacgccgtcgcgcgcggtgcggccgccgtgctgtatcagccggacgggctgaccgatgcgccggccgtccccgtcgcgctcgcggtgccggcgctcgaccagctcgcgggcgagatcgccagcggctggtacggcgatccgagcgacagcctgctcgcggtcggtgtcacgggtacgaacggcaagacgtcgtgcacgcagtggatcgccaccgcgctgacggcgctgcatcagccgtgcgcggtgatcggcacgctcggcaccgggatgcccggccagctcgtgccgaccggcttcacgacgcccgacgcgccgcaactgcagcgcagcctcgcgcaattgcgtgcggcgggcgcgcaggccgtggcgatggaagtgtcgtcgcatgcgctgcaccaggggcgcgtgaacgggaccgcgttcgacatcgcggtgtttacgaacctcacgcaggatcacctcgactatcacggcacgttcgacgcgtacgaggccgcgaaggcgaagctgttcgcgtggcgcggtctgcgcgcggcggtgctcaaccgcgacgatgcggctggccgccgcctgctcgagaagctggccggccgcgtgcgcacgatcgcgtacgggatcggcgacgcaccggcgcccgacgccgatcgcgaactggtcgcgctcgacgtgcgcgccaccgcgacgggtaccgccttccgcctgcgttcgtcgtggggcgacgcggacgtcgaggttggcacgctcggcacgttcaacgtcagcaatctgctcgccgtgctcggctcgctgctcgcggccgacgtgccgttcgacgcggccctcgccgagatcgagcggctcgagtcggtcaatggccggatgcagcggctcggcggccggctgcagaacgacgaaccgctcgtcgtgatcgattacgcacatacgcccgacgcgctcgacaagacgctcgacgcgctgcgcccgatcgccgcggcgcgcggcggccggctcgtctgcatgttcggctgcggcggcgatcgcgatgcgacgaagcgc

SEQ ID NO: 11641 - DNA, 2298 bp, Burkholderia cepacia
atgagtttcgccccgaatggcggtattccggccggttccggcggaaatctgttgggctcgctgagcgcgcttggcggccttgccgggccggtcgcatccacggtggcaggacagattggcccgctcgccggcgtcgcaagtcatatcgacaccgtgcaacgcgcggttcagcttgcgcagaccggcttctcgctgatgaacaaaacgccggccgcgattgcggacgcgctcaacaatgcggccggtggcgttgctcggctgactcagctaaatcgatacgtgaccatcgactcgccgcttggtccggacgtgctgctggtcagcaccgcggtcatcgacgaacatgtcaatcggttgccggagattcacctcgatttgctgtcacaccagcatgacctggtgcctgatcagctgatcgggcaaccgatcaagattcgattcgaccagagcgcgcggcagtccacacttgagcgcatcgtctcgtcaggcggggcagacagcatccgttacttcgacggctacgtcacgtcgttcgaccgggcgggtaacccgggcaaggtgacgcaatatcaaatgacggtggcgccgtggttctggtttttgacgcgctcgaccgactgccggattttccagaacaagaccgctcaggacatcctcaccgagattttccaggatcacgggttcaccgatttcgagttcgacatccggaccgcgcagaagccgctcgaatacatcgtgatgtaccaggagtcttattacaacttctgtgcgcgtctgatggagcaggaaggcctgatctggacgcaccgcttcgagaaggaaaagcacttccttgtcatcggcgatacgaatttcgttttccgcccgatcgacgggctggccaacttgccgtataacgccagcgcggcgagtgaagacaacggtatcgaccagttgcatgaaggccggcgttttggcgtcggcaagatcgcctttcgcgacttcaatcaccagaatccgtcgtcgccgctgatgctggcgcaggccgagccggagaatctccggcatgcggggctcgaaacgacagagcgtttcgaacatcagtcgttgttcgaccacggcgatgacggtgaccgttacgcacgcattgcgatgcaagcagaagaagcgagcgcacatcggtatacgggcagcggctatgcgtggcggatgagcgctgcaggcagcgtgacggtgaccaaccatccagtgatggccaacaatcaggaatacgcagtcctgcacgttcgtcacgaggccgtgaacgattacacggaacacaacgccaaactgccgtaccgcaatacattttctctgcttccaaagaagtttccgtatcgttcgcccagaaatacgccgaagcccgtcattcacggcacgcagtcggcaatcgtggtcggcccaaagggcgaagaaattcacacgaacggcagtgccgtgaaggtgcacttcctgtgggatcgccgcggcaagttggacggctcggattcgatgtggatccgcgtgtcccaaccttgggcgggcgacgggtggggggcggccgccatcccacggatcaatcaggaggtcttggtcgcgtttaatcaaggggaccccgacaatccggtcattgtgggccgcgtctacaacggcgagcagggcaatccttatcacggggctgccgggcagaccatggggatcaagagccagacgcacaagggcgccggctcgaacgaactgcggttctccgatgtgaacggcgcgcaagaggtctttctgcacgcgcagaaagacatgaacacggttatcaaggattcggaaacgcatacggtcgaagccggcgggcgcacggtgtcgctgctcaagggcagcgagacgaagcagatcgcgcagggcggattgaaggaaaccatcgcgctgacgcgcgacaccacggcgaacgtgatcaatacgaaggccatcgcaagcaaggccgggcccggcatgcaaagccatcaggcgagcgacggcatcgagcatcgtgtcggcgatggcgtcgtgacgatgacgccggacagcatcaagctgaccttcggtccgtcaacgatcgtcatcaacgcgaacggcatctatctcgacgggccggtcatccatctgaatcgcggcagtgcgcaatccgcggaacaggcgcttgcgctcgaatgggcggcagagcaggcgacgatcgcgaaggggctggcgagccccgatcccgggacgcgcgcgggggcgggccaactggcgagcttcgttaaggggcagcaactggggaaactagaggga

SEQ ID NO: 11642 - DNA, 633 bp, Burkholderia cepacia
atgaacttgcatacgtggtggcttttcgtggcgacggtgttcgtcgtgtcggcgattccgggcccgaacatgctgctcgtgatgacgcacggcgcgcggcacgggctgcggcgctcgtccgcgacgatggccggctgcctgagcgcgctggtgctgatgctcgcggtatccgcggcgggcctcggcgcggtgctcgaggcatggccggcgatgttcaatgggttgcgcttcgcgggcgcggcctacctgatctatctcggcgtgaaggcatggcgcgcccgcgtggacgacacgccggcggccgacgtcgatgccgtgtcgcacggggcgtcggcgtcgcgcgcggtgctgttccgcaatggcttcctggtcgcgggcagcaacccgaaggcgatcctgttcgcggccgcgctgctgccgcagttcatcaacgcggccgagccgacgctgccgcagttcggcatcctcgtcgtcacgttcgcggtgatcgaggtgagctggtatctcgtctacgcgtcgttcggcacgcgcatcggcgccacgttgaagagccagagcgtcgccaaggtgttcaaccggctgacgggcgggctgttcgtcggcttcggcgcgatgatggcgctggtccgtcac

SEQ ID NO: 11643 - DNA, 930 bp, Burkholderia cepacia
atgacgaatgcagcaccccaacgtccgcgcgtgccccggcgcgtgctggacggcgttctcctgctcgacaagccggtcggcctgtcgagcaacgatgcgttgattcgcgcaaagcgcctgcttctcgcgaagaaagccggtcacaccggcacgctcgatccgctggcttcgggcctgctgccgctgtgcttcggcgaggcgacgaagttctcgcaggacttgctcgacgccgacaagacctatgaagcgacgatgcgcctcggccagcgcacggctaccggtgacgcggaaggcgacgtgatcgacacgcggccggtcgaatgcgatcgtgcggcggtggaagccgcgctcgtgcgcttcaccggcgacatcgtgcaggtgccgccgatgtattcggcgctcaagcgcgacggcaagccgctgtatgaatatgcgcgtgcgggccagaccgtcgagcgggagggccgcaacgtgacgattcatgcgctcgaactgctcgcctgcgaactgcccgacgtgacgtttcgcgtgacctgcagcaagggcacgtatgtgcgcacgctggcggaggatatcggcgaggcgctgggttgcggcgcgcatctgacgatgctgcgtcgcacgggcgtcggcgcgctgacgctcgagcatgcggtgacgctcgatgcgctgtcggacgctgccgaagcggcgcgcgatgcatggctgcagccggtcgatgcgttgctgtcgacgttcccggccattcggctcgacgacgcgtccgcgaagcggttcctgcatggtcagcgcctgccgctgtcggcgctggagccgatcgacgcggccgatggcgagcgcgtgcgtgtgtatgacgcgacgcggttgctcggcgtggcgcgcaaggcgaatggcgtgctcgccccggaacggctggtcgtgacggcgcaa

SEQ ID NO: 11644 - DNA, 1941 bp, Burkholderia cepacia
tttttctttgtgcacgcgcgccgcccccgcaacgaccagagcggcggcgacggcaagccacccaaccgaacgaccaatcaggacgcgccggcgccggcgtggccggcccgcatgttgatcgtccacgagcgggtcgcgcggcgtgacgaacgcgtcgacggctacctgtccgccaaacccgacacctggctgcacgatctgttctcggcgcaatggaaggtattgctcgatctcggcgccggctcgctgtttggcaatctgctcgcgatcgcgacgtcgctgttcgcgatgcaggtgtgggatcgtgtggtcccggcgcgggcgacgcacacgctgtgggtgctggcttcaggcgtcgtgctcgcgctcgcgctggaactgctgctgcgtaccgcccgcgtatcgatcgccgatcatttcggcaagcaggcggacctcaagctgtccgcgatgttcttcgcgcgcgtgctcgatatccgcaacgacgcgcggccgcgctcgccgggcacgctggtcgcccagcttcgcgacctcgaacagctgcgcgagctgctgacgtcgagcacgatgggcgtgctgatcgacatcccgttcgtcatcacgttcctgttcatcatctggctgctcggcgggccgctcgcgttcgtgccgctcgcggcgatcccgctgctgatcctgccgggcgtgctcgcgcaaatcccgctggcgaagctgtcgaaccaggggctcgaggaatcggcgctgcgcaacgcgatcctgatggaggccatctatcgcgcggaggacatcaaggcgttgcaggcggagccgcgattccggcagctgtgggcgcggacgaatcgcgtgaatgccgatatcggcttgcaacaacgccggctggccggtctgctggtcaatctcgcgcagacggtgcagcagcttgcgtacgccggcgtactggtcgccggcgtgtacggcatcctggacgcgagcctgtcgttcggcgccgtgctggcctgttccatcctgacgagccgcacgatcgccccgctgggccagattcccgccgtgctgtcgcgcatccagaacgtacgcgcgggcaagaaggggctcgacaacctgctcgcgctgccggtcgatcatgatccggcggtcgatgcgtatcacaagccggcgctcgtcggccgatatcgcttcgagcaggtcggatacagcttcgatccgcaggcaaagccggtgctcggtattccgaatctgtcgatcgagccgggcgagcggatcgcgattctcggccgggtcggtgcgggcaaatcgacgctgctgcggctgctcggcggactcgcgacgccggtgcaggggcgcatcctgttcaacgacacgccactgccgctgatcgacgtcgctgacgtccgtcgcgacgtcgggatgctgctgcaggaatcgagtctcttctacggcacgctgcgagagaacctgctgatcgcgaatccgctcgctaccgacgatgcgatgctcgcggcgatgaaggtcgcctgcgcggaccagttgctgttgcggcagccgcacggcctcgacctgaaactgcgcgaaagcggcctcggcctgtccggcggccagaagcaggcgctgatgctggcccgcgtgattctgcgtgcaccgaacgtgttgctgctcgacgagccgaccgcgtcgctcgacgaggcgaccgagcgcgcgatcgtcgagcgcctgcggcagtggctcggccatcgcacgttgatcgtcgcgacgcatcgttatccggtgctgtcgatcgtcgatcgcatcatcgtgctcgatggcgggcgcgtggtgcgtgacggtccgaaagacgaggtgctggcagcgttacgcggtgccggcacgccggagccggcggcggcttcgcgcgcgccggctggcgagtcgagcccgttgccggcgcagatggcgggagaggcacga

SEQ ID NO: 11645 - DNA, 283 bp, Burkholderia cepacia
gtggccggcgaacgcgcgctgttcgagatcccggtgctcgcgatcgtcaacgaagtctatttccgcaacacgcagcgcgagcccgactatcgcgaaggccgcgaacggctgcgcgagaagatcaagctgctcggcgcgaagcccgagttcgccgactgcaagatcgccgattacggcacgcgccggcgcttctcgaaggtctggcacgaggaagtcgcgctcacgctgcgtgacgggctcggcccgcagttcgcgggcacgagcaacgtgctgtacgcgataa

SEQ ID NO: 11646 - DNA, 1242 bp, Burkholderia cepacia
atgccactgaccgacacgaccatccgcaacacgaagccggccgagaagcccgtgaagctgttcgacggcggtggcctgtttctgttggtcacgccggccggacagcgctattggcgactcaagtaccgcgctgccggtaaagagaaacttctggcgctcggcgtctatcctgacgtgacgctagcggcggcgcgccgtaagcgcgacgaggcccgggaaaagctggccgctggcatcgatccaggcgaggcaaaaaaggccgaaaagcgtacggccaggctgagtgccgaaaattcgttcgaggctgtcgcgcgcgagtggcatatcaagtatgcgcccacctggtcggaaagccacggctcgcgaatcctgcgccgcctagaggtagacgcctttccgtggattggcagcaagcccattgctgagctcgccccaccagacgtgctcgaagtgctgcgccgggtggaaaagcgcggcgcactcgagacggcgcatcgcctgcacgcgaacgtcagccaggtgtgtcgctatgctgtcgcgaccggccgcgcccaacgagacgtgacggccgatctccgcggagcccttccgccagtgcaacaagaacacatggcagcggtcaccgacccgaaacaggtcgccgagctgctgcgctccatagacggctatcagggcacattccccgtgctgtgcgcgttgcgcctcttcccactgctcttccagcgtcccggtgagctgcgcgccgccgagtggtccgagttcgacctagacgcaagcacgtgggaaattccgagcgagcggatgaagcgcaccaagcaaggcaaagcgtccggcggcgcgcacatcgtcccactgtcggcacaagcggtcgctatcctgcgcgatctgcacgccttgacgggcaacagccggttcctgtttccgagtgtgcggacgaaggaccgccccatgtccgacaacaccatcaacggtgcgctgcgccggctcggctacgatggcgacacgatgaccggtcacggcttcagggcgatggctcgaacgattctcgatgaagtgctcggcgtgccggttgcgattgtggaggcacaactggcgcacgccgtgaaggatccactcggccgtgcgtataaccgcaccgctcacctgccccagcgccgcgagatgatgcagcgctgggccgactacctcgaccagctcaaggcaggtgccgaaatcatccccatcacggccgcgatgggcaaa

SEQ ID NO: 11647 - DNA, 815 bp, Burkholderia cepacia
atcgcggcgcttgccgcattcctcgattgcggcttcgcaccggtcgacgcgctggttctcgcgctggcgtggcgcgacggcgacgagacgcacgccgccgacgcatggccggtcgatgccgagcgattcccgtgcgtcgccgggctgccgcccgcgccggagccggcgttcccgccgtgccccgcgcaactcggcctctatccggtcgtgccgagcgccgaatgggtcgaacgcgtgctcgatggcggcgcgcgaaccgtgcaattgcgcgtgaaagatgcgacgccggacacactccgtcaagaaatcgcgcgcgcggtcgcggccgggcgccgctatcccgatgcgcgcgtgttcatcaacgatcactggcagatcgccgcagaagaggggcgtacggggtacatctcggtcaggaggacctcgaaacggccgatctggccgcgatcgcgcgcgcgggcctgcggctcggactgtcgagccacggttattacgagatgttgcgggcgctgcacgaacggccgagctacctcgcgctcggccccgtgtacgcgaccgcgaccaaggccgtcgccgcgccgccgcagggtttggcgcggattgcccgctacgcgcgcttcgccggcgcgcgggcgccgctggtcgcgatcggcggggtggggctcgacgcgctgccggccgtgctggcgacgggcgtcggcagcgtcgcggtggtcagcgcggtcacgggcgcggccgactatcggacagcgcttattgcactgcagcagtgctttgccggacaatttgacaatcgttgaccggagggcccggaa

SEQ ID NO: 11648 - DNA, 986 bp, Burkholderia cepacia
atcggcatcgtcaacgacctcccgcttgccgtcgaggcgatgcgccgcgcgatcgcgcgacggcccgagcaccgcgtgctgtgggtcgcgaccgacggcgcgcagccgtcgaactgtgcgccgcgcagccgcccgacatcgtgctgatggacctgatcatgccgaaattcgacgggatcgaagcgacgcggcggatcatgcgctccgaacgaccatgcgcgatcctgatcgtgacgagctgcatcggcgcgaacgcgtggcgcgtgttcgaggcgatgggcgccggcgcgctcgacgcggtcgacacgccgcggctcggcgacggcgcggccgacgacacgacgaaactgctgctcgcgaagatcgaccagatcggccgcctgctcgacgcgccgaggagaacaccgcgcatcgccggcacggccgcgcgcaacggcggcggcccgctggtcgcgatcggcgcatcggccggcggccccggcgcgctcgcgtcgatcctcggcagcctgccggccgatttcaatgcgccgatcgtgatcgtgcagcacgtcgatcgcgcgttcgccgaaggcatggcgcaatggctcgacggccagacccggctcgccgtgcgcgtcgcccgcgaaggcgatcgaccgcagccgggcgtcgcgctgctcgccgcgaccgacgatcacctgcgcatcacgcgcgccggcacgctcgaatacacgcgggagccggccgccacgccgtatcgtccgtcggtcgacgtgttcttcaacagcctgaccgaacactggcccggccgcgtgatcggcgtgctgctgacggggatgggccgcgacggcgcgatcggcctgaaggcgctgcggatgaagggctaccatacgatcgcgcaggacgaggcgaccagcgcggtatacgggatgccgaaggcggccgcgacgctcggcgcggcgcgtgcgatcctgccgctcgggcgcatcgcgggcgaactggcggcg

SEQ ID NO: 11649 - DNA, 1080 bp, Burkholderia cepacia
atgaagacgagcatgcaacgcaagctcgaccagctgtccacacggctggccgaactgaacgacctgctgagccgcgaaaacgtcacggccgacctcgaccagtaccgcaagctgacgcgcgaacatgcggaactcggcccggtcgtcgagcaatacgcgttatggcgccaatcgcgcagcgacgaggcggccgcgcaggaactgctcgccgatccgtcgatgcgcgatttcgcggaagacgaaatccgcagcgcacgcgagggcatggcgcgcctcgagaccgagctgcagaagatgctgctgccgaaggatccgaacgacgaccgcaacatcttcctcgaaatccgcgcgggcacgggcggcgacgaatcggcgctgttcgcgggcgacctgctgcgcatgtacctgcgcttcgcggaacgccagcgctggcaggtcgaaatgatgtcggagagcgcgtcggatctcggcggctacaaggaagtgatcgtgcggatcgcgggccagggtgcgtattcgcggctgaagttcgaatcgggcggccatcgcgtgcagcgcgtgccggccaccgagacgcaggggcgcatccatacgtccgcgtgcacggtcgcggtgatgccggaagccgacgagatcggcgaggtcgagatcaatccggccgacctgcgcatcgacacgttccgcgcgtccggcgcgggcggccagcacatcaacaagaccgattcggcggtgcgcgtcacgcacatcccgaccgggatcgtcgtcgaatgccaggacgatcgctcgcagcacaagaacaaggatcgcgcgctgaaggtgctcgccgcgcgcatcaaggacaagcagtatcacgagcagcatgcgaaggaagccgcgacgcgcaagagcctgatcggctccggcgaccgttcggaacgcatccgcacgtacaacttcccgcagggccggatgaccgaccaccggatcaacctgacgctgtaccggctcgaggcgatcatggacggcgatctcgacgaactgatcggcgcgctcgtcaccgagcaccaggccgagctgctcgcgtcgctcggcgaagccgac

SEQ ID NO: 11650 - DNA, 378 bp, Burkholderia cepacia
atgccaaccatcaaccaactggttcgcaaaggccgtcagtcggaaacgacgaagagcaagagcccggccctgcaggactgcccccagcgtcgcggcgtgtgcacccgtgtgtacacgacgacgccgaagaagccgaactcggcactccgtaaggtcgccaaggttcgtctgacgaacggcttcgaagtgatttcgtacatcggcggtgaaggccacaacctgcaggaacactcggttgtgctgatccgcggcggccgtgtgaaggacttgccgggtgtgcgttaccacatggttcgcggctcgctggatacccagggcgtcaaggaccgtaagcaagcgcgctcgaagtacggcgcgaagcgtgcaaaggctgccaag

SEQ ID NO: 11651 - DNA, 813 bp, Burkholderia cepacia
atgacctatctccaggaatcgagccggcctgccgtgacggtacccaagctgcaggcaatgcgcgacgccggcgagaagatcgcgatgctcacctgctacgacgcgagcttctccgcgctgctcgatcgcgccggcaccgacgtgctgctgatcggcgattcgctcggcaacgtgctgcagggccacacgaccacgctgccggtgtcgctcgacgacatcgcgtaccacaccgcgtgcgtcgcgcgggcccagccgcgcgcgctcgtcgtcgccgatctgccgttcggcacgtacggcacgccggccgaggcgttcgcgaatgcagtcaagctgatgcgcgccggcgcgcagatggtcaagctcgaaggcggcgaatggctcgccgatacgatccgcttcctcgtcgagcgctcggtgcccgtctgcgcgcacctcggcctcacgccgcaatcggtgcatgcgttcggcggcttcaaggtccagggcaagaccgaagccggcgccgcgcagctgctgcgcgatgcgcgcgcgatcgaggatgccggcgcgcaactcgtcgtgctcgaagccgtgccgacgctcgtcgcgtccgaagtcacgcacatgctgaagattccgacgatcggcatcggcgcgggcgtcgactgctcggggcaggtgctcgtgctgcacgacatgctcggcgtgttccccggcaagcggccgcgtttcgtgaaggatttcatgcaggggcagccgaacattcaggcggccgtcgaagcctacgtgcgcgcggtgaaggatcggtcgttccccggccccgaacactcgttc

SEQ ID NO: 11652 - DNA, 1375 bp, Burkholderia cepacia
gaggaaacggacatgttgagcgtgctggcgagagtcatcgatatcgcgatggtggtgacgggcgcgctgatcgcggccgcgttgcacgacggcagcatcgggctcagcgacctgcagcgcacgacggtgctgttcgactgcctgctggtcgtcgtgttctttccggccgtcggcatctaccagtcgtggcgcggcaagcgtctcgtcgggctgatggggcgcgtcgcgttcgcgtggctcgcggtcgagctcgcgggcatcctgatgagcttcagctttcaccagtcgggcgacctgtcgcggctgtggctgggttactgggcgctggtgacgatggcgctgctcgccggctcgaaggcctgcgtgcacgtcgtgctgcggcagttgcgccgcggcggctacaacctgaaggcggtcgcgatcgtcggcggcgcggcggctgatcgcgcagatgcgggcgcggccggaggccggcttcaacccggtgtgcgtgtacgacgaaagcgaggcgccgggcgaagtcgcgctcgacgacgtgcgcatcgagcggcagttcgaatcgctggtgtggctggtgcgcagccgcgcgatcagcgagctgtggctcacgctgccgatcacggaggagcgccggattcaccagatcgtgacggtgttccgccacgacttcgtgaacatccgcttcattccggacgtgcgcacgctgtcgttcttcaaccaggaagtggtcgaggtgctcggcgtgccggcgatcaacctcgcggcgtcgccgatcaccgacgtgcggatcctgccgaagttcgtgttcgaccggctgttcgcgctggcggcgctcacggcgctcgcgccggtgatggtgctgatcgcggcgctgatcaagctgacctcgcgcgggccggtgttctttcggcagaagcgcaagggcatcgacgggcacgagttcgagatctacaagtttcgctcgatgaaggtgcatcaggaagtggccgggcaggtcacgcaggcaaccaagaacgactcgcgcgtgacgccggtcggccggttcctgcgccgcacgagcctcgacgagctgccgcagttcatcaacgtgctgaagggcgagatgtcggtggtggggccgcgcccgcatgcgctcgcgcacgacgacatctacaaggatctggtcaagggctacatgttccgctaccggatcaagcccggcatcaccgggtgggcgcagatcaacggctttcgcggcgaaaccgaccagatcgagaagatgatgggccgcgtgaagctcgacctgtactacatgcagaactggtcgttctggctcgacatcaagatcgtcgtgctgacgctgtggaaagggttcaccggcagcaacgcgtactga

SEQ ID NO: 11653 - DNA, 1120 bp, Burkholderia cepacia
cctgccgagcctgcccgcgcacgaagcggcggccggccgccgcacgtggcgtccgggcccgggcgccgcgcccgcgaacggcggcgaagccgattcgatgtacgaacgctcgaagctgaacccggtgctcacgttcgacaacttcgtgaccggtaaagccaaccagctcgcgcgcgcggccgcgatccaggtcgcggacaatcccggcatctcgtacaacccgctgttcctgtacggcggcgtcggcctcggcaagacccacctgatccacgcgatcggcaaccagttgctgctcgacaaggccggcgcgcggatccgctacatccacgccgagcaatacgtgtcggacgtggtgaaggcgtaccagcgcaaggcgttcgacgacttcaagcgctactaccactcgctcgacctgctgctgatcgacgatatccagttcttctccggcaagtcgcgcacgcaagaggaattcttctacgcgttcgaggcgctcgtcgcgaacaaggcgcaggtgatcatcaccagcgacacgtatccgaaggagatttcgggcatcgacgatcgcctgatctcgcgcttcgattcgggcctgaccgtcgcgatcgagccgcccgagctggaaatgcgcgtcgcgatcctgatgcgcaaggcgcagtcggaaggcgtgaacctgtcggaagacgtcgcgttcttcgtcgcgaagcacctgcgctcgaacgtgcgcgagctcgaaggcgcgctgcgcaagatcctcgcgtattcgaagttccacggccgcgagatctcgatcgagctgaccaaggaagcgctgaaggacctgctgaccgtgcagaaccggcagatttcggtcgagaacatccagaagaccgtcgccgacttctacaacatcaaggtcgcggacatgtactcgaagaagcgtcccgcgaacatcgcgcggccgcggcagattgcgatgtacctggcgaaggaactcacgcagaagagcctgccggaaatcggcgagctgttcggcgggcgcgatcacaccaccgtgctgcacgcggtgcgcaagatcgccgacgagcgcagcaaggacgcgcagctcaaccacgagctgcacgtgctggaacagacgctgaag

SEQ ID NO: 11654 - DNA, 1371 bp, Burkholderia cepacia
atggataacgaacaaaagcccacgcccccttcgaaagaccccgcgcccgccgccgcacggcgcccgcgccgcacgctgctgctcggcaccgtcgcggtcgtcgtcatcggcggcctgctgtggtggcatccgtggaaccgcacgcccgcggcaggcagttcagcgcaaggcgcgggcgccagcgcggccgctggcagccatcgcggccgcggcggccccgccgcgatggcgaacgttccgcagccggtgcaggtcgccaccgcgacgcagggcgaaatgccgatcgtgctgtccgcgctcggcaccgtcacgccgctcgcgaacgtgacggtgaagacgcaactgtcgggctatctgcaatcggtgtcgttccaggaaggccagatcgtcaagaagggcgacgtgctcgcgcagatcgacccgcgtccgtaccaggtcgcgctcgagaacgccgaaggcacgcatgcgcgcgacgcggcgctgctcgcgacggcccgcctcgacctgaagcgctaccagacgctgctgtcgcaggactcgatcgcgtcgcaaaccgtcgatacgcaggcgtcgctcgtcaagcagtacgaaggcgcggtgaagaccgaccaggccgcgatcgattccgcgaaactgaacctcacgtatgcgcgcatcacggcgccggtgtcgggccgcgtcggcctgcgccaggtcgaccccggcaactacgtgacgccgggcgacaccaacggcatcgtcgtgatcacgcagttgcagccgatgagcgtgatcttcacgacgtcggaagacaacctgccgcagatcctcaagcaggtgaacgcgggccggaagctgtcggtcaccgcgtacaaccgcaacaacaccgtgccgctcgagacgggttcgctcgcgacgctcgacaaccagatcgacacgagcaccggcacggtcaagctgcgcgcgaacttcgataacaaggaaggcatgctgttcccgaatcagttcgtgaacacgcgactgctcgtcgacgtgctgcgcaacgcgacgatcgtgccgacctccgcggtgctgaccggctcgatcggccagttcgtgtacgtcgtgaagcccgacaacacggtgaccgtgcgcaaggtcacgatcggcccggtcgacggcgaacgcacgagcatcgtcagcggcgtgatgctcggcgagcgcgtggtgaccgacggctcggaccgcctgcgcgaaggctcgaagatctcgattccggccgacaagccgaaaggcgcctcgggcgcgcacggcgccggcgcggcgtcgggcgcatcggctgcgtccggtgcagccggccatcgcggcggacaccggcacggcgcgtcgcaagccgcggcccccgcggcccag

SEQ ID NO: 11655 - DNA, 441 bp, Burkholderia cepacia
gtgcccgcagccacccccgccacgctgagattttccaccgacaagcgcgaactcgacatcgacgcgatcttcgatttcctgcatcgcgacgcgtactggtcgcagggcattccgcgcgacgtggtcgagcgcgcgatcgacggttcgctgtgcttcggcgcgtacgtcggcgaccggttcgtcgggttcgcgcggctcgtcaccgatcaggcgacgttcgcgtacctgtgcgacgtgttcgtgctgccggccgaacgcggcaacggctacggccgcgcgctgatcgaccatatattcgcgcaggagatggtgcggcggctgcgccgcatcatgctcgcgacgactgatgcgcacgcgctgtaccggccggtcggtttcggtccgccggcgaaccccgagcggctgatggagatccgccgccccgacatctacacgacacgc

SEQ ID NO: 11656 - DNA, 1407 bp, Burkholderia cepacia
atggcacagactctctacgacaaactgtggaacacccacgtggtccacaccgaggaagacggcacgaccctgctctatatcgaccgtcagctgctgcatgaagtcacgagcccgcaggcattcgaagggctgaagatggcgcagcgcccggtgtggcgcatcagcgcgaacctggccgtgtcggaccacaacgtgccgaccacggaccgcagccacggcatcgccgatcccgtctcgaagctgcaggtcgacacgctcgacgcgaactgcgacgcattcggcatcacccagttcaagatgaacgacgtgcgccagggcatcgtccacatcatcgggccggaacagggcgcgacgctgccgggcatgacgatcgtgtgcggcgattcgcatacgtcgacgcacggcgcgttcggcgcgctcgcgcacggcatcggcacgtcggaagtcgagcacgtgctcgcgacgcagaccttgctgcagaagaagagcaagaacatgctcgtgaaggtcgacggcgcactgccgcgcggctgcaccgcgaaggacatcgtgctcgcgatcatcggcaagatcggcaccgcgggcggcaccggctacgcgatcgaattcggcggctcgaccattcgcgcgctgacgatggaaggccgcatgaccgtctgcaacatggcgatcgaagccggcgcgcgcgcgggcatggtcgcggtggacgacacgacgatcgactacctgaagggccgtccgttcgtgccgaccggcgcggaatgggatcaggccgtcgaatactggcgccagttcaagtcggacgacggcgcgcacttcgaccgcgtggtcgagctgaacgcggcggagatcgttccgcaggtcacgtggggcacgtcgccggaaatggtcacgtcgatcgacggtcgcgtgcccgatcccgagcgcgagaaggatccggtcaagcgcgacgcgatggagcgcgcgctggcgtacatggcgctcgagccgaacacgccgatcgaatcgatcaaggtcgacaagatcttcatcggctcgtgcacgaatgcacggatcgaggatatccgcgcggccgcgtatgtcgtgaagaaactgaaccgtcgcatcgcgtcgaacgtgcggctcgcgatggtcgtgccgggctcgggcctcgtgaaggcgcaggccgagcgcgaagggctcgacaaggtgttcaccgacgcgggcttcgaatggcgcgagccgggctgctcgatgtgcctcgcgatgaacgccgaccggctcgatccgggcgagcgctgcgcgtcgacgtcgaaccgcaacttcgaaggccggcagggcgcgggcggtcgcacgcacctcgtgagccccgcgatggcggcggccgcggcgatcgaaggccacttcgtcgacattcgccagctgggg

SEQ ID NO: 11657 - DNA, 1188 bp, Burkholderia cepacia
atggccaaggaaaagtttgagcggaccaagccgcacgtgaacgttggtacgattggtcacgttgaccacggcaagacgacgctgacggcagcgatcacgacggttctgacgaagaagttcggcggcgaagcgaaggcgtacgaccagatcgacgcggcaccggaagaaaaggcgcgcggcatcacgatcaacacggcacacgtcgagtacgaaacggctaaccgccactacgcacacgtcgactgcccgggccacgctgactatgtgaagaacatgatcacgggcgcggcgcagatggacggcgcgatcctggtttgctcggcagcagacggcccgatgccgcaaacgcgtgagcacatcctgctggcgcgtcaggttggcgttccgtacatcatcgtgttcctgaacaagtgcgacatggtggacgacgctgaactgctcgagctggtcgagatggaagttcgcgaactgctgtcgaagtacgacttcccgggcgacgacacgccgatcgtgaagggttcggcgaagctggcgctggaaggcgacacgggcgagctgggcgaagtggcgatcatgagcctggccgacgcgctggacacgtacatcccgacgccggagcgtgcagttgacggcgcgttcctgatgccggtggaagacgtgttctcgatctcgggccgtggtacggtggtgacgggtcgtgtcgagcgcggcatcgtgaaggtcggcgaggaaatcgaaatcgtcggtatcaagccgacggtgaagacgacctgcacgggcgttgaaatgttccgcaagctgctggaccaaggtcaggcgggcgacaacgtgggtatcctgctgcgcggcacgaagcgtgaagacgtggagcgtggccaggttctggcgaagccgggttcgatcacgccgcacacgcacttcacggctgaagtgtacgtgctgagcaaggacgaaggcggccgtcacacgccgttcttcaacaactaccgtccgcagttctacttccgtacgacggacgtgacgggctcgatcgagctgccgaaggacaaggaaatggtgatgccgggcgacaacgtgtcgatcacggtgaagctgatcgctccgatcgcgatggaagaaggtctgcgcttcgcgatccgcgaaggcggccgtacggtcggcgccggcgtcgtcgccaagatcatcgag

SEQ ID NO: 11658 - DNA, 474 bp, Burkholderia cepacia
gtggacggcctggcgaagcgcgggctcaagcgcaccgcaaggccggaagatctggcgcaggcagtggcagaggcgcgccggatcgccgatcaagagggcaagcgccgccagctccagtacgtcggccgcgtgatgcgctcgctgaccgacgacgaaacggccgcgctgcgtaccgcgctcgacgcgcaacgcggcgtgaacaaggccgcgacagcccgcctgcactggatcgagcgcacgcgcgagcagctgctcgcgagcgacgacgcactgaccgaattcctgcgccagcaccccgacgccgacatccaggaaggccgcacgctgatccgcaacgcgcgcaaggaagcgcagcaaggcaagccgccgcgctatttccgcgagctgttccagtggatcaaggccgcgggcggcgcatccgacagcgacgacgaagcggccggcgacgccggagacgaccatgacgacgaagcg

SEQ ID NO: 11659 - DNA, 1872 bp, Burkholderia cepacia
atgacgaagggttcgccccgggccgccgccgcgcgcgcccgcctcggcgtgctgcgggccgccggccgcgtggccgcggtgctggcgctgcacgcggcgctggccgtgccggccgcgcacgcggcctacgccattgcgcagtacggcgagccgaagtatccgccgggcttcaagcatttcgactatgtgaaccccgacgcgccgaagggcggcacgctggtgctcgcgaacccgaaccggctgacgtcgttcgacaagttcaatccgttcacgatgcgcggcaacgccgcgcccggcatcgacatgctgttcgagagcctcgcgaccggcagctccgacgaaccggcgtccgcgtacgggctgctggccgacgacatcgccgtggcgcccgaccgccgttcggtcacgttccacctgaatccgcgcgcacgcttttcgaacggcgatcgcgtcacggccgacgacgtcaagttttcgttcgacacgctgaagagcaagcaggccgcgccgcagttcggcgcgtatttcgcggagatcgcgaaggccgtggtcgtcgatccggcgaccgtgcgcttcgagttccgcagcgcgaatcgcgagttgccgctgatcgccggcggcgtgccggtgttttcgcgcaagtggggattgcgcgcggacggttcgcgcatcccgttcgaccagctcgcgttcgagcagccgatcggcagcggcccgtacctgatcgagcgttacgacaacggccgcacgatcacctatcggcgcaaccccgcgtactggggcgccgacttgccggtacgggtcggcaccaacaacttcgagcggatcgtgtacaagctgtacggcgacggcgtcgcgcggctcgaggcgttcaaggccggcgaatacgacgtgctcgtcgagtacatcgcgcgcaactggacgcggcgcgacgtcggcaagcgtttcgatagcggcgagctcgtcaagcgcgaattccgccaacataacggcgccggcatgcagggcttcttcatgaacttgcgccggccgctgtttcgcgacgtgcgcgtgcgccaggcgctcgacctcgcgttcgacttcgaatggctgaaccgccagctgttctacagcgcgtatacgcgcctcaacagttacttcgccgacaccgacctgcaggcgaccggtacgccgggcgagggcgagctgaagctgctggagccgctgcgcgcgcagctcgatccggccgtgttcggcccgatggtcacgcagccggacacccatccgccgggctcgctgcgtgcgaacctgctgaaggcgcgcgcgctgctcgcgcaggccggctggacctatcgcgacggcgcgttgcgcaatgcgaagggcgagccgttcgcgttcgagatcctcgacgatgcaggcggcgcgatggaaggcgtcgtgaccgcctaccagcgcaacctcgcgaagctcggcatcgccgtgcggttccgcacggccgactacgcactgctgcaaaagcgcctcgatgcattcgactacgacatgacgacgatccgcctgccgggcgtgcaggtgccgggcgccgagcaatactcgcgttacgcgagcaagttcgccgacgagccgggctccgacaacttcatcggattgaaatcgccggccgtcgacgcgttgctgcgtgcgctcggcaccgcgcagacgcgcgaggaactgctcgacgcgacgcacgcgctcgaccgcgtgctgatgcatggctactatgcggtcccgcagtggtacagcacgacgcatcgcatcgcgtacaagcgcacgctcgcctatccgcagacgctgccgctgtactattcggccgagggctgggtcgtgtcgacctggtgggcgaagcccgatcac

SEQ ID NO: 11660 - DNA, 1125 bp, Burkholderia cepacia
gttactcaacgaaggaactctatgcaactggtcaagaccgaacgagacaccctcctcaggccgctgcaaacggtcagcggcatcgtcgaacgccgccatacgttgccgatcctcgccaacctgctgatcaccaagaacggcccggacgtttcattcctgtcgaccgacctggagctgcagatcaccacgcgcgccgatttcggcgtcggcggcgaccagatcgcgaccaccgtcgcggcccgcaagctgctcgacatcctgcgcgcgatgcctgacggccaggtcacgctgtcgctcgccgacaagcgcctcaccgttcaatcgggcaagagccgcttcgcgctgcagacgctggcggccgacgagttcccgaccgtcgcgcaggcgaaggatttcggcgccacgctcaccgtcccgcagaagtcgttccgccagttgctcggcatggtgcacttcgcgatggcgcagcaggacatccgctactacctgaacggcatgctgctcgtcgtcgacggcgaccagctgatggccgtggccaccgacggccaccgcctcgcgttctcgtcgatgaagctcgaaggcggcacgttcggccgccaggaagtcatcgtgccgcgcaagacgattctcgagctgcagcgcctgctcgaggacatcgacgacaccgtcaccatcgacatcgcgcagacccaggccaagttcacgttcggccaggtcgagctcgtgtcgaaactcgtcgagggcaagttccccgacttccagcgcgtgatcccgaaggcgcacaagaacacgttcgagatcggccgtgaagagctgcagcgttcgctgcagcgcgcggcaatcctgacctcggacaagttcaagggcgtgcgctgcatcatcgcgccgggccagctgaagatcatgtcgaccaacgccgatcaggaagaggcgcaggaagaactcgaaatcgcctaccagggcgataccgtcgacatcggcttcaacgtcacgtatctgctcgacgtgctcgcgaacctgaaggtcgacaccgtgcaggtgagcctcggcgacgccagctcgagcgcgctgattaccgtgcccgagaacgacgagttcaagtatgtcgtgatgccgatgcgcatc

SEQ ID NO: 11661 - DNA, 1145 bp, Burkholderia cepacia
tacaagcgcatcgcattcgcgctgttcctcgccggcttttccactttctcgctgctgtactgcgtgcagccgctgctgcccgcgttcgcccgcgagttcaacgtcggcgcggcgtcgagttcgctctcgctgtcgctgtcgaccgggatgctcgcggtgtcgatcctgtgcgccggcgcgctgtccgaacgcgtcgggcggcgcgggctgatgttcgtctttttgacgctggccgcgctgtttatcctggtggccgcgtggtcgccccaactggcacctgctgctggtctggcgtgcgctcgaaggcttcgcgctgggcggcgtgccggcggtggcgatggcgtatctcgcggaagaaatcgcggcggacggcctcggcttctcgatggggctctatgtcggcgggaccgcgttcggcggcatgatcgggcggatcgggatgagcgcgctcgaagagcacttctcgtggcgaaccgcgatgctgtcgatcggcgtcgtcgacctgctcgcggcgatcgcgttcgtgatgctgctgccgccgtcgcgacgcttcgtgaagcgcaccgacctgacgctgcgtcaccacctgcggctgtggcacgcgcaattgcagcacgggcgcctgccgttcgtattcgcgatcggcttcctcgtgatgggcgcgttcgtgacgatctacaactacgccgggttccggctcatggccgcgccgttcaacctgagcccaaccgcatgcgggctgatcttcggcgcgtacctgttcgggatggtgtcgtcgtcgagcgccggcgcgctcgccgatcgtctcgggcgggcgccggtcctcgtcagcggcatcgtcgtgttcgcggcgggcctcgcgctgacgctgtcgcactcgctcgccgcgatcgtcgtcggcatcgtgctcgtgacgatcggcttcttcgtcgcccactcggtcgcgagcggctgggtcggcgcgctcgcgggcgccgcgaaggggcatgcggcttcgctgtatctgctcgcctactacgtcgggtcgagcgtgctcggctcggtcggcggcgcgttctggcaacgcggcgcgtggaccagcgtcgccgcgtactttttttgtgctgctcgtcatcgcattgctggcggcgcggcggttgatcctt

SEQ ID NO: 11662 - DNA, 2364 bp, Burkholderia cepacia
atgagcaccaccccatcgtccgcctccgcggattcgaccaccgaagccacggcccagtcgcctgcgcgccagtacatcgacgcggtcctcgaacagtccttccggcatctgttcgggccgaccgccacgccggagcagccgcgcaagcacggcgtcgtttcgatcgcgaaactgaccgccgcgcttgccgagtatctcggtccggacgaaatcaaagaggtcaaggcggcgttccacttcagcgacgaagcccacctcggtcaatatcgccagagcggcgagccctacatcacccatcccgtcgccgtcgcggaaatctgcgccggctggaagctcgacgcgcaggccgtgatggccgcgttgctgcacgacgtgatggaagaccagggcgtgaccaagaacgagctggccgagcgattcggcccgaaggtcgccgagctggtcgacggcctgtcgaagctcgacaagatggaattccgcagccgcgaggaagcgcaggcggaaaacttccgcaagatgctgctcgcgatggcgcgcgacgtgcgcgtcattctcgtcaagctcgccgatcgcctgcacaacatgcgtacgctcggcgcggtgccgatggaaaagcgccgccgcgtcgcgcgggaaacgctcgacatctacgcaccgatcgcgcaccggctcggcttgaacaacacgtatcgcgagctgcaggacatgagcttcgcgaacttcaacccgcatcgctacgcgacgctcgagaaagccgtgaaggccgcgcgcggcaatcgccgcgaagtgatcagcaagatcctcgaggccgcgcagcgcgcgatggccgacgcgaagatcgacgccgagatcaccggccgcgagaaaaccatctacagcgtctatcgcaagatgcgcgacaagcagttgtcgttctcgcaggtgctcgacgtgtacggcttccgtgtcgtcgttgacagcccgctcgactgctacacgtgcatcggcgcgctgcatgcgctgtacaagccggtgcccggcaagttcaaggattacatcgcgatcccgaagatcaacggctatcagtcgctgcacacgacgctcgtcggcccgttcggcgcgccgatcgagttccaggtgcgtacgcgcaagatgcacgagatcgccgaggcgggggtcgccgcgcactggctgtacaagaacggcagcgcggatctcagcgacgtgcagaagcgcgcgcaccagtggctgaagtcgctgctcgacatccagagcgaggctggcgattcgagcgaattcctcgagcacgtgaagatcgacctgttccccgatgcggtctacgtgttcacgccgaagtcgaagatcatggcgctgccgcgcggcgcgacggcgctcgatttcgcgtattcgatccacagcgatctcggcaaccagtgcgtggccgtgaagatcaacaacgagctgctgccgttgcgcaccgagctgaagagcggcgacatcgtcgaggtgatcaccgcgccgtattcgaagccgaaccccgcgtggctgggcttcgtgcgtaccggcaaggcgcgctcggcgatccgtcactacctgaagacgatgcgcctgaacgagtccgtgcaactgggcgagcggctcgtcgaccagagcctgaagggctatggtctcgcgctggccgacgtcgagccggaagtgtgggagaagctcgtgcagtggacgggcaacaagagccgtcaggaaatcttcgcggatatcggtctcggccgtcgcgtcgccgcggtgatggccaagcgcatcgaggtgctgatgagcggccgcgatgcggacgacgatctgccgaagtccgagcggcatcccgcgcatcatgcgccgccggtcgtgatcaccggcaccgaagggatgtccgtgcagttgtccgcatgctgccggccgattccgggtgatgcgatcatgggttacatcggcatcggtctgggcatggcgattcatacgacggattgccgggtcgcgcagcgcatccatcgccgcgatccgggccgctggatcgacgtcgaatgggcgccgcagccgggccgtctgttcgatgtcgcggtgaaggcgctcgtgaagaatacgaagggcatcttcgcgcgcgtcgccgcggacatcacgtcggccgacgcgaacatcgtccatattgcgatggacgaggatctgacgcacgaatcgacggtgctgcgcttcgtgatccaggtcagcgaccgcgtgcacctcgcgaacgtgatgcggcgcgtgagaaccaatccggacgtgatgcggatcatgcgcgagcgctggactgacgacggtgcgcatgcgcgccatgacggcgggatgcgaatcgagcgcgagcggcaggattac

SEQ ID NO: 11663 - DNA, 1275 bp, Burkholderia cepacia
atgttcctgctcctggcgctgatcgtctatcgcatcggcgcgcacattcccgtgccgggcatcgatccggatcaactggctaagctgttccagagccaggcgggcggcatcctgggcatgttcaacatgttctcgggtggcgcgctttcccgcttcacgatctttgcgctggggatcatgccgtacatctcggcgtcgatcatcatgcagttgctggcgatcgtttcgccgcagctcgaggcgctgaagaaggaagggcaggcagggcaacggaagatcacgcagtacacgcggtatttcaccgtggtgctcgcgaccttccaggcattcggtatcgcggctgcgctggaaaaccagccgggcctcgtcaccgatcccggcatgctgttccgtctgacgacggtcgtgacgctggtaacgggcacgatgttcctgatgtggctcggtgagcagattaccgagcgtggtctgggcaacggtatctcgatcatcatcttcggcgggatcgcagcagggttcccgaatgccgtgggtgggttgttcgagctggtgcgtacgggttcgatgagcatcatttcggcgatcatcatcgtcgttctgatcgccgcggtgacttacctggtcgtgttcatcgaacgcggtcagcgcaagatcctcgtgaactacgcaaagcgtcaggtcggcaacaagatctacggtgggcagtcgtcgcatctgccgctgaagctgaacatgtcgggcgtgattccgccgatctttgcatcgtcgatcattctgttcccggcaacgattctcggctggttcagtaccggtcagccgacaggaagctggatttccaatacgttgcataacgttgcggaagcgctgaagccgggccagccggtctatgtgctgctgtacacgctggcaatcgtgtttttctgcttcttctacaccgcactggtgttcaacagcagggagaccgcagacaacctgaagaagagcggcgcgtttgttccgggcatccgtccgggcgatcagaccgcacgatatatcgaccgcatcctcacgcgtctgacgctggccggtgcgatctacatcgtcttcgtgtgtctgctgccggaattcctggtgctgcgctggaacgtgccgttttattttggtggaacgtcgctgctgatcattgtcgtcgtcacgatggactttatggcgcaggtgcagtcgtacgttatgtcgcaacagtatgagtcactgctcaagaaggctaacttcaagggcggcaacatcccgatgcgt

SEQ ID NO: 11664 - DNA, 1068 bp, Burkholderia cepacia
atggaagatagcaagaagggctccgggatgaccgccgagaagagcaaggcgctggcggccgcgctcgcgcagatcgaaaagcagttcggcaagggctcgatcatgcggatgggcgacggcgaagcggccgaggatatccaggtcgtctccacggggtcgctgggtctcgacatcgcgctgggcgtcggcggcttgccgcgcggccgggtggtcgagatctacggtccggaatcgtccggtaagaccacgctcacgctgcaggtcatcgccgagctgcagaagctgggcggcaccgcggcgttcatcgacgccgagcacgcgctcgacgttcaatatgccgcgaagctcggcgtgaacgtgccggagctgctgatctcgcagccggacaccggcgagcaggccctcgaaatcaccgatgcgctggtgcgctcgggctcgatcgacatgatcgtcatcgactcggtcgcggcgctcgtgccgaaggccgaaatcgaaggcgagatgggcgattcgctgccgggtctgcaggcccgcctgatgtcgcaggcgctgcgcaagctgaccggtacgatcaagcgcacgaactgcctcgtgatcttcatcaaccagatccggatgaagatcggcgtgatgttcggcaacccggaaaccacgacgggcggtaacgcactgaagttctactcgtcggtgcgtctcgatatccgccggattggctcgatcaagaagaacgacgaggtgatcggcaacgaaacccgcgtgaaggtcgtcaagaacaaggtgtcgccgccgttccgcgaagcgatcttcgacatcctgtacggcgaaggcatttcgcgtcagggcgagatcatcgatctcggcgtgcaggcgaagatcgtcgacaaggcgggcgcctggtacagctacaacggcgagaagatcggccagggcaaggacaacgcgcgcgaattcctgcgcgaaaatccggaaatcgcgcgcgagatcgagaaccgcatccgcgaatcgctcggcgtcgtcgcaatgcccgatggcgcaggcaacgaagccgaggcgatggacgaagaagag

SEQ ID NO: 11665 - DNA, 468 bp, Burkholderia cepacia
atgggtcttctttcgtttatcaaggaggcgggtgaaaaactgctgggtcacgccgatgcacaggcagcggaagatccgaatgccgcgaaccagaccgcggccgatgccatcaagaactacatcagctcgcaaggcctcgacacgtcgaacctgaccgtcgcgttcgacggcgcatcgcgcaccgtcacgctgtcgggcagcgtcgccgatctcgacacgaaggcgaaggtcaaggtcgcggccggcaacgtgcagggtgtcgcgggcgtcaacgacgacgatctgcagccggacgatccggaagtgcagtaccacgacgtgaagccgggcgacacgctgtcggcgatcgccaaggaagtgtatggcgacgcgaacaagtatccggtgatcttcgaagcgaacaagccgatgctgtcgagcccggaccggatctacccgggccagaagctcgtgattccgccgcagtcc

SEQ ID NO: 11666 - DNA, 474 bp, Burkholderia cepacia
atgacccatccgatcgcatcccgccgcaccttcctgaaactgtcggccgcgctggccggcaccgcgctgctccccgaaacgggcgcgttcgcggccggcggcgacgccgcgcgccgcacggtgatcatcgataccgatccggggcaggacgacgccatcgcgatcctgttcgcgctcggcgcgcaggaccggctcgacgtgcgcgcgctgacggccgtggcgggcaacgtgccgctcgacctcaccgaacgcaatgcgcggatcatccgcgactgggctggccgcacgaagacgctgccggtgtacgcgggctgcccgcgcccgctcgtgcgcgacctcgtgacggccgcgaacgtgcatggcaagacggggctcgaaggcgtcgaactgcacgcgccgcgcgcgccgctcgccgccggtcacgcggtgtcgtacctcgtcgatacgctgagccgcgcggcgccgaacagcgtg

SEQ ID NO: 11667 - DNA, 1563 bp, Burkholderia cepacia
cacgcgctgcaggtcgaaggacgtaccgacttcccgaacctgctgatgcagttctccgcgctcgcgttcggcttcatcatcctcgccgtctacggccgctacctgcgccagatgctcggcttccgctggcgccagtggctcaccgaccgctttctcggccagtggctcggcgatcgcgcgttctaccggatcgagcgtgaccgcctcgccgacaaccccgaccagcggatcaccgacgacctccagtcgttcgcgaccacgacgctcgcgctgtcgctcgacctgctgtcgacggtcgtcacgctcgtgtcgttcatcacgatcctgtggtcgctcgccggcgcgctgacgttcacgctcggcgcgacgccgatcgcgattcccggctacatggtgtgggcggccgcgctgtacgcggtgatcggctcgctgatcatccagaaggtcggtcatccgctcgtgtcgatcaactaccagcagcagcgcgtcgaggccgatttccgcttcgggctgatccgcgtgcgcgagaacgccgagcagatcgcgttctacgacggcgagaagaccgaggccggcaacgcgcagagcctcttcatgcgcatccgcgacaactggtggcgcgtgatgaagtacaaaaaacggctcacgttcgtgctgagcttctacgggcagatcgcgatcatcttcccgctcgtcgtcgccgcgccgcgctactttgccggtgcgttctcgttcggcgtgctgatgcagatctcgtccgcgttcggcaccgtcagcgattcgttctcgtggttcatcaacagctactcgaccctcgtcgaatggcgcgccaccgtcaaccgtctgcgcgaattcaagcgcgtgatgggcacgtcgcacctgaaggaaagcctgtcgcccgcgaccgagcacggcggcatcaacctgcactacatcgacgccgcgaagctgtccacgtcgtcgctcaagctcgcgctgccgaacggcaacgcgctcgcgaacatcggcgacgtcacgatcgagcccggctcgcgctggctcgtggtcggcaagtccggttccggcaagagcacgttcatgcgcgcgctcgcggggctgtggccgttcggcgacggcgcgatcgacgcgccggtcggtgcgcggatgatgttcgtgccgcaaaccagctatttgccgatcggcacgctgaaggccgcgctcacctacccggcgacgcccgacacgttcagcgacgaagcatgccgcgatgcgctgcgcgcgtgccgtctcgaggattacgtcgagcgcctcgacgaaaccgcgcactggacccgcgtgctgtcgccgggcgaacagcagcgtctggccggcgcgcgcgtgctgctgcacaagcccgacttcctgttcctcgacgaggcgaccagcgcgctcgacgccgacaacgaagcccgcctctatcacctgttcgccgaacggctgccgaaggccgcgatcgtcagcatcgcgcaccgcgaatcgctggccgcgttccacgtcggcacgatcaacgtcgagcgcgtgagcagcgacgacaaggtcgccgcg

SEQ ID NO: 11668 - DNA, 630 bp, Burkholderia cepacia
acggaggaacgaatgcggctgaaagtgggagaactggcgaaacgcagcgggctgaccgtccgcacgcttcatcactatcacgcaatcggcctgctgacgccttcggcgcgcgccgacaacggctaccggctgtacgaccgcgacgacatcgcccggctccaccagatccaggccctgcgtcgcttcggactgtcgctcgccgaaatcggcgactacctgaaccggcccggcaccccgctcgtcgatgtcgtcgcgaagcagatcgcgtcgctcgaccgccagctcgcgcaaaccgcgcagctgcgcgaacggctcgtgagcctgcatgcgcagctcacggcgggcaccgagccggaactggccgattggctcaccacactggagttgatgaccgtgtacgacaaatatttttccgaggaagaactcgcgcgcctgccgatgtaccagaagagccaggcgggcgacgcggaatggatcgcgctcgttgccgacgtgcgtgcgctgcacgaggcgggcgtgcccgccgaggacgagcgcgtccgtgcgctcgccgcgcgctggatggcgctgctggtgcgcgacacgaacaacgatccgcgcttgctcgcgaagctgaacctgatgcacgag

SEQ ID NO: 11669 - DNA, 1299 bp, Burkholderia cepacia
atgactccgtctgatgttaaagccacgctatcgttcagcgacaactcgccgagcgtcgaactgccgatctacaagggcacgatgggcccggacgtgatcgacatccgcaagctgtacggccagaccggcaagttcacgtacgacccgggcttcatgtcgacggcttcgtgtaattcggcgatcacgtacatcgacggcgacaagggcgaactgctgtatcgcggctacccgatcgacaacctcgcgcaaaacgcggacttcctcgaaagctgctacctgctgctgaagggcgaactgccgaacgccgcgcagaagaaggagttcgtcgacaccgtcacgaagcacacgatggtgcacgagcagatgcacttcttcttccgtggcttccgtcgcgacgcgcacccgatggcgatcctggtcgccgcggtcggcgcactgtccgcgttctaccacgactcgctcgacatcaacgacccgcgtcaccgcgaagtgtcggcgatccgcatgatcgcgaagctgccgacgctcgtcgcgatggcgtacaagtacagcatcggccagccgttcgtgtatccgaagaactcgctgtcgtacagcgcgaacttcatgcacatgatgttctcgaacccgtgcgaagagtacaaggtcaacgacgtgctcgtccgtgcgctcgaccgtatcctgatcctgcacgccgatcacgagcagaacgcatcgacgtcgacggtccgcctggccggctcgtcgggcgcgaacccgttcgcgtgtatcgcagccggtatcgcgtgtctgtggggcccggcgcacggtggtgcgaacgaagccgcgctgaacatgctcgagcagatcggttcgccggacaacatccccgaattcatcaagcaggtgaaggacaagaattcgggcgtgaagctgatgggcttcggccaccgcgtgtacaagaactacgacccgcgtgcgaagctgatgcgcgaaacgtgctacgaagtgctgaacgaactgggcctgcacgacgacccgctgttcaagctcgcgatgcagctcgagaagatcgcgctggaagacgaatacttcgtgtcgcgcaagctgtacccgaacgtcgacttctactcgggcatcgtccagcgcgcgctgggcatcccgacgtcgatgttcacgtgtatcttcgcgatggcacgtacggtcggctggatcgcacagtggaacgaaatgattgcggatccggaacagaagatcggccgtccgcgtcagctgttcatcggcgatacgccgcgcgaagcgaagccgctcaacgcacgt

SEQ ID NO: 11670 - DNA, 1143 bp, Burkholderia cepacia
atgaatttgctgaaacgttacgctgtgcccgttgcctgcgcggcggctgtcctcgctttggcggcttgctcgtcgtcgaaggacgcgcgccgcgtgccgacgccgctcaccgagttcaagcccgtcatggacgtgcaacaggtctggaaggcgagcgtcggcaagggcgggcgctacctgttctcgccggtggccgtgggcgacgccgtctatgcggcgggcgaaaacggttcggtcgagaagatcgacgcgaagacgggccagacgctgtggcgctcgaaggtcggttcggacctgtcggccggagtcggcagcgacggcaacctgaccgcggtcggtgcgttgaagggcggcgtgttcgtgctgggcccggacggcaagcagctgtggaagaccagcgtgcagggcgagatcttctcgccgccgctcgtcggcaacggcctcgtggtcgtccgcacgatcgacggccaggtgatcgcgttcaacgcgcagacgggcgagcagaagtggaactaccgcaatcgtgcggtgccgctgaacctgcgcgtgtcggcgggcatgacgtttgcgggcgacgcggccgtgctcgcgggcttcccgggcggtggtctagtcgcgatcaacctgcagacgggcgagccgttctggcagaccccggtgtcgttcccgaagggcgtgaccgaggtcgagcgcatcaacgacgtcagcggtccgccgacgctcgtgggcgcggaaacctgcgcagtgacgttccagggtcagctcggttgcttcgatgcgaactcgggccggccactgtgggaaaagccgttctcgagccgcagcggcctcgcgcaggacgattcggtggtcgccggcggcgacgactggtcggtcgtcaccgcgtacgacgcggccacgggcaaccagctctggcgcaacgacaagctgaagagccgtgacgtcggcgtgccgtacctgctcgggcacgcggtcgtgatgggcgattacaagggcttcgtgcacttcctgtcgcgcgaggatggcagcttcatcgcgcggatgaagaccgacggcagcgcgatcacggcggcgccggtcctcgcgggcaatacgctcgtcgtgcagacgaaggacggtggcctgtacgggttccgtccgcgc

SEQ ID NO: 11671 - DNA, 1185 bp, Burkholderia cepacia
atgaccgaaggttcatcccacgatacgcacgcccccgtgcaggaccgcccggccaacgggctcgaattcgaactgctgacgaccgacggccacgcgcgccgcggccgcgtgaagctcaaccacggcacggtcgagacgccgatcttcatgccggtcggcacgtacggcaccgtgaaggcgatccagccgcgcgagctgcacgagatcaaggcccagatcatcctcggcaacacgttccacctgtggctgcgcccgggcctcgacacgatcgacgcgcacggcggcctgcacggcttcatgggctggaacaagccgatcctgaccgactcgggcggcttccaggtgttctcgctcggcgacctgcgcaagatcaccgaggacggcgtcacgttcgcgtcgccgatcaacggcgacaagctgttcctgtcgccggaagtgtcgatgcagatccagaaggtgctgaactccgacgtggtgatgcagttcgacgaatgcacgccgtacgcgaccaacggcgtgccgacgacgcaccaggaagcggccgactcgatgcgcatgtcgctgcgctgggcgaaacgctcgctcgacgaattcaaccggctcgacaacccgaacgcgctgttcgggatcgtccagggcgggatgttcgaggacctgcgcgacgaatcgctcgcgggcctcgcggaactcggtttccacggcctcgcgatcggcgggctgtcggtcggcgagccgaaggaagacatgatgcgcgtgctgcgccacgtgggcccgaagctgccggccaacaagccgcactacctgatgggcgtcggcacgccggaggacctggtcgaaggcgtcgcgaacggcgtcgacatgttcgactgcgtgatgccgacccgcaacgcgcgcaacggctggctgttcacgcgcttcggcgacgtgaagatccgcaacgcgacgcacaagaactcgctgaagccgctcgattcgacctgcacctgctacacgtgccagaacttctcgcgcggctacctgcatcacctgcaccgggtcggcgaaatcctcggcgcgcagctgaacacgatccacaacctgcactactacctgcagctgatgagcgagattcgcgaggcaatcgagacgcacacgttcgacgcattccggcaacgcttcgcggaggatcgcgcgagaggggtcgac

SEQ ID NO: 11672 - DNA, 1188 bp, Burkholderia cepacia
atggatctcacgcaagtttcctcttcccgtacggcgtcggccccggcgccggcatcgtcgccgttgttcgacgagcgtccgttcctcgcgcgcctgtcgctgttcgactggctgttcgccctggcgctcgtggcgggcgcgggctatgcgctcgtgcactacaacgcgcacatggattactacgacaaggcggtgatgatcggcaccgtgccggcgctcgtcgcgctcggctggcgctggaagcccgcgcggctgatgatggcgtcgatctccgtgctgtcgctgttgtcgatccagatctaccagggcgatctcgcccgcgccgattcggcgttcttcctcaagtacttcctgtcgagccagtcggcgatcctgtggatgagcgcgatgttcgtgctcgcgacgatcttctactggatcgggctgctcgcgcgcgccgaaacgggcgccgcgatcggccagaagctcacgtgggtcgccgtgctgatgggcttcacggggctgatggtgcgctggtacgagtcctacctgatcggtgcggacgtcgggcacatccccgtatcgaacctctatgaagtgttcgtcctgttcagcctgatcacggcgctgctttatctgtattacgaaggccactacggcacgcgttcgctcggcgcgttcgtgctgctggtcatcagcgcggcggtcggcttcctgatgtggtactcggtcgcgcgcgatgcgcagcagatccagccgctcgtgccggcgctgcaaagctggtggatgaagatccacgtgccggcgaacttcatcggctacggcagcttcgcgctgtcggcgatggtgtcggtcgcgtacctgatgaaggagcgcgggatcctcgcggatcgcctgccgacgctggaggtgctcgacgacgtgatgtacaagtcgatcgcggtcggtttcgcgttcttcacgatcgcgacgatcctcggcgcgctgtgggcggccgaagcgtggggcggctactggagctgggacccgaaggaaacctgggcgctgatcgtgtggctgaactacgcggcgtggctgcacatgcggctgatgaagggcctgcgcggcgcggtggccgcctggtgggcgctcaccggcctgctggtcacgacgttcgcgttcctcggcgtcaacatgttcctgtccgggctgcacagctacggcaagctg

SEQ ID NO: 11673 - DNA, 309 bp, Burkholderia cepacia
atgtccgaccgtcaggaatccgccgtagctgcgcccgaagcgggacctccgaagcacgatcatccggtcctgcgtcgcgtgttcagggtgacgctggcagtcgggatcggcacctacttcgtcgcgtccggcgccttcctcgggctgcgctacgtgctgctgccccgcatcgacgaattccgcccgcgcatcgagcgcgcggtgtccgacaagctccacgcgcagctttcgatcggcaagctttccccgaactggtccggcatgcagccgggcgtcgaactcacgaacctgacgatccgcggccgtacg

SEQ ID NO: 11674 - DNA, 1947 bp, Burkholderia cepacia
atgtcgctctattccattaccggcgcgcagctcgcgttcggtcacgtcgcgttgctcgatcacgcggatttctcgctggaagccggcgagcgggtcggcctgatcggccgcaacggcgcgggcaagtcgtcgttgctgaagatcgtcgccgatctcgcgaagcccgacgacgggctggtcacgcgccagcaggagctcgtgacggtctacgtgccgcaggagcccgaattcgagccgggcgcgacggtgttcgacgcggtcgcgtcagggctcgcgcatacgcgcgaactgctcgaagaatacgattcgatcgcgcaccgcctcgcggagatcccggaaggcgccgagcacgatgcactgctcgcgcggatgaacgcgctgcagtcgtcgctggacgcgcacgacgcgtggaactggcgtacgcgcgtgtcgatgacgctggcgcagatcggcctgcagggcgtcgacgcaagcgtcgacgcgctgtcgggcgggatgcagaagcgcgtcgcgctggcgcgcgcgctggtgctgcagcccgacgtgctgctgctcgacgagccgaccaaccacctcgacttcgacggcatccgctggctggaagagctgctcgtcgcgcagcgcgcgggcctgctgttcatcacccacgatcgcgcattcctcgaccgcgtcgcgacgcgcatcgtcgagctcgatcgcggccggctgctgtcgtacccgggcaatttttccgcgtaccagacgcgcaaggcgcagcagctcgaagtcgagcgcgtggagaacgagaagttcgacaagctgctcgcgcaggaagaagtgtggatccgcaagggcgtcgaagcgcgccgtacgcgcagcgtcggccgcatcgcacggctcgtgcagatgcgcaacgagcgcgcggagcgccgcaatgcgcagggcaacgtgaagctggacgtcgcgcagggcgagaagtccggcaagatcgtcgcggagctgaccgacgtgacgaagcgttacggcggccgcacggtggtcgaccgcttctcgacgacggtcatgcgcggcgacaagatcggcttcgtcggcccgaacggcgccggcaagaccacgttgctgaaactgatcctcggcgacctgaagcccgatgaaggcacggtgcgcaccggcacgaacctgcaggtcgcgtatttcgaccagatgcgcgcgcagctcgaccaggagaagagcctcgcggatacgatcagccccggcagcgaatgggtcgagatcggcggcgtgcgcaagcacgtgatgagctatctcggcgatttcctgttcgcgccggaacgcgcgcgttcgccggtgaagtcgctgtccggcggcgagcgcaaccggctgctgctcgcgcgcctgttcgcgcgcccggccaacgtgctggtgctcgacgaaccgaccaacgacctcgacatcccgacgctcgaactgctcgaagagctgctggccgactacgacggcacggtgctgctcgtcagccacgatcgcgcgttcctcgacaacgtcgtgacgtcggtgatcgcggcggagggcgacggcaagtggcgcgaatatgtcggcggcttcaccgactggcagatccagagcgagcgctcggagcagctcgcgcagcaggaagcggcgaagcgcgcggtcaaggaagcggcgcccgcgaaggacgagccggcgaagagcgcggccggccgcaacgcgcagcgcacggtgaagctgtcgttcaacgagcagcgcgagctcgattcgctgccggagaagatcgccgcgctcgaagccgagcagaagacgatcaatgcgcaactcgaggacggctcgattttcgcgaaggacccgcaggaaggcacgcgcctgaccgagcggttcgcggcgatcgacgacgaattgctcgccgcgctcgaacggtgggaaacgctcgaggcgaagcgcaagccagtg

SEQ ID NO: 11675 - DNA, 1815 bp, Burkholderia cepacia
atgtgcggcattgtcggcgcagttgcgcaacgtaatatcgttccggtgctgatcgaaggtctgcggcgcctcgaataccgcggctacgactcgtgcggcgtcgccgtgctcgagccgggcgccccgaagcgcgcgcgcagcgtcgcccgcgtcgccgatctcgatacacaggtgcaggaatcgcacctcgaaggcacgacgggtgtcgcgcacacgcgctgggccacgcacggcgcgcccgtcacgcacaacgcgcacccgatcttctcgtcgaacgcgctcgcgctcgtgcacaacggcatcatcgagaacttcgagccgctgcgcgaaacgctgcgcgcgaagggctacgaattcgtgtcgcagaccgacaccgaagtgatcgcgcatctcgtgcacagcctgtatcgcggcaacctgttcgacgcggtgcgcgaagccgtgcagcaactgcacggtgcctacgcgatcgccgtgatccacaaggaccagccgcacaccgtcgtcggcgcgcgccagggctcgccgctcgtcgtcggtcacggcgacggcgagaacttcctcgcatccgatgcgctcgcgctcgccggcagcaccgaccgcttcacgttcctcgaggaaggcgacgtgtgcgagctgtcgctcgacggcgtgacgatcgtcgaccgtcacggcgccaccgtgcagcgcgaaatccgcgtcgtcagcgcgtacggcggcgcggtcgagcttggaccctatcgccacttcatgcagaaggaaatcttcgagcagccgcgcgcgatcggcgacaccgtgccgcagacggacgccttcgacgcgacgctgttcggcgatgcggcccccgccgcgttcgcggagatcgacagcctgctgatcctcgcgtgcggcacgagctactactcgggcctcaccgcgaaatactggctcgaatcgatcgcgaagatcccgacccaggtcgagatcgccagcgaataccgctaccgcgagtcggtgccgaacccgcgccagctcgtgctcgtgatctcgcagtcgggcgagacggccgatacgctcgcggcgctcaagcatgcgcagtcgctcggccacacgcatacgctcgcggtgtgcaacgtcgcgacgagcgcgatggtgcgcctgaccgaaatgcagttcctcacgcacgcgggcaccgagatcggcgtcgcgtcgacgaaggcgttcacgacgcagctcgtcgcgctgttcgtgctggccgcgacgctcggcaagctgcgcgggcacgtcgacgccgcgcaggaagcgcaattcctgaaggagctgcgccacctgccggccgcgctgaacagcgtgctcgtgctcgagccgcagatcatcgcgtggtcggaggaattcgcacgcaaggaaaacgcgctgttcctcggccgcgggctgcactacccgatcgcgctcgaaggcgcgctgaagctgaaggaaatctcgtacatccacgccgaggcctatccggccggtgaactgaagcatgggccgctcgcgctcgtcacggaagcgatgccggtcgtcacggttgcgccgaacgacacgctgctcgagaagctgaagtcgaacatgcaggaagtgcgcgcgcgcggcggcgagctgtacgtgttcgccgatgccgatacgcagatcgtcaacgacgacggcctgcacgtgatccggatgccggagcactacggccaactgtcgccgatcctgcacgtcgtgccgctgcaactgctcgcgtatcacaccgcgtgtgcacgcggcaccgacgtcgacaagccgcgcaacctcgcgaaatcggtgacggtggag

SEQ ID NO: 11676 - DNA, 1677 bp, Burkholderia cepacia
atgacgacccgccatctgcacaacgagtcgcgcggctacgagccgcgcccttccggcgacgacacggccggtcctgccgcaccgcagcaacacgggcaggccgaaccgtcgccgccggccgccgacttgcccggttccgggcaaaaggaagcgcgtatgaacgttgccgaacgcaagccgctgccgtgcccgtccgactggacgttcgaattgctcgaggaatacgacacgcacatctcgcaggtcgccgaacaatacgagctcgacatctacccgatccagctcgaactgatcagcgccgagcagatgatggatgcgtatgcgtcggtcgggatgcccgtcaactaccgtcactggtcgttcggcaagcactttctcgcgaccgagaagagctatcgtcgcggccagatgggcctcgcctacgaaatcgtcatcaattcgaacccgtgcatcgcatatctgatggaagagaacacgatgacgatgcaggcgctcgtcatcgcgcacgcggcgtacgggcacaactcgttcttcaagggcaattacctgttccgcttgtggaccgacgcgcacgcgatcatcgactacctcgtgtacgcgaagaactacgtcgcggaatgcgaggagcgctacggcctcgatcgcgtcgaggaactgctcgactcgtgccatgcgctgatgaattacggcgtggaccgctacaagcggccgcagaaaccgtcgctgtcgaaggaagcggcgctgcggcgcgagcgcgaggcgtacctgcagtcgcaggtgaacgaactgtggcgcacgctgccgggcaagaagcccgagctcacggaggagcaggaggaccgctatccgcccgagccgcaggagaacctgctgtatttcgcggagaagaatgcgccgctgctcgaaccgtgggagcgggaagtgatccgcatcgtgcgcaagatcggccagtatttctatccgcaacggcagacgcaggtgatgaacgaaggctgggcgacgttctggcactacacgctgctcaatacgctgtacaaccaggggaagctggaagacggcttcatgatggagttcctgcactcgcacagcaacgtggtctaccagccgcccgtcacgaagccgtactacagcgggatcaacccgtatgcgctcggtttctcgatgatgagcgacatccgccggatctgcgaagcgccgacggaggaagactacaagtggtttccggagatcgcgggcacgccgtggctgccggcgatgcactacgcgatgcgcaacttcaaggacgagagcttcatcgcgcagtacctgtcgccgaacctgatccgcgagatgcggctcttctcggtgctcgacgacgacatgcgcgattcgctcgaggtatcggcgatccacgacgattccggctaccagtacgtgcggcaggcgttgtctcggcagtacgacatccatcaccgcgagccgaacatccaggtgtgggccgtcaacacgcgcggcgaccgcagcctcacgctgcgccacttcatgaccgacaaccgccatctgtcgaacgacagcgacgaagtgctcaagcacatggcgcggctctggcagttcgacgtgtacctggagagcgtcgacgaggccggcaccgtgcgcaagcgctacgagtgccgctacgtgccgccggaagtgcgcgtg

SEQ ID NO: 11677 - DNA, 318 bp, Burkholderia cepacia
atgcaccatgccgattggtgcatccgcatctgccgcccgcggcgtccgcttgcgatcctgtccactcggcggtgcggcgcaggggcgcggcgtcgccggctctcccccaaaccatcgcaggagatgaccatggacaggaatcgcgtcgaaggcaagctcaaacaggtcaagggttcggtcaaggaagcactcggcaaggtgacgggcgaccgcgaaaccgaagcggaaggcctggccgaacagcaggccggcaagcttcaggagaaggccggcgaggcggccgatgcgatgcgcaagcatacgggcaccgatcggcac

SEQ ID NO: 11678 - DNA, 1431 bp, Burkholderia cepacia
atgaatgtgcggatcgccatcgtcggtacgggctacgtcggcctggtcagcggcacatgccttgccgagctcgggcatgacgtcgtctgcatcgacaacaatcgcggcaagatcgacgcgctgaacgaaggccgcatgccgatctacgaaccgggtctcgacgccgtcgtcgcccgcaacgtcgaacgcggcacgctgcgcttcagcaacgacctcgccgccagcgtgcgcgatcgcgatgcggtgttcatcgcggtcggcacgccgacgctgcccggcaccgaccacgcggatttgcaatacgtcgaggcggccgcgcgggaaatcgcggcgaacctgaccggcttcgcggtgatcgtcaccaagtcgacggtgccggtcggcaccaaccggatcgtcgcgcagatcgtcgactgctgcgcgccggacggcgtcgacgcggcgatcgcgtcgaatccggaattcctgcgcgaaggctcggcgatcgacgatttcatgcatcccgatcgcatcgtgttcggcgccgagcatccgcgtgcgatcgagatcatgaaggcgatctacgcgccgctggaagcggccggccatctcgtgctcgcgaccgagatcgagacggccgaactcgtcaaatacgcggcgaatgcgtttctcgcggtgaagatcagctacatcaacgagatctccgacctgtgcgaagcggtcggcgccgacgtcgagctggtcgcgaacgggatgggcctcgaccggcgcatcggcgcgtcgttcctgaaagccggccccggctggggcggctcgtgcttcccgaaggacacgcgcgcgctgaaggcgacggcctcccagcatgcggtgccgctgcgcatcgtcagcgcggcgatcgaatcgaacgcgctgcgcaaggagcagatcctccggcgcatcgagaacgcgtgcggcggctcgatcaagggcaagcgcatcgcggtgctcggcctcaccttcaaaggccagaccgacgacgtgcgcgaaagcccgagcatcgacgtaatccagttgctcgtcggcgccggcgcacatatccgcgcgtacgacccggcgcgtccgcacgaggcgtcgcggctgctgccgcaggtgttcatggaaggctccgcggtcgatgcggtacgcagcgccgatgccgtcgtcgtgatgaccgaatgggaggcgttcgagacgctcgatctcgccgacctcgcggatcacatggccgaccccgtgatgctcgacatgcgcaacctgttcagcgaacggctggccgccgacagcggctttcgccgctacgaacgcgtgggccgctcgtgcggcgagcgctcgccggcagacccggccgcggaacccgcgaacgcgagcgcggacacccggacgcagcgcggtctgcttaacactgatggtgcgaccttgacgggagatcaccat

SEQ ID NO: 11679 - DNA, 1193 bp, Burkholderia cepacia
atgaacccgctgctcgatctcgtccgccgtcacaagcagtcgtcgcgtcacgcgccggccggcacacccgcgatcggcatcccgtccgtgtgctccgcgcatccggtcgcgatcgccgccgcgctgcgcgaatgcgcggcgcgcgaacgccccgcgctgatcgaggcgacctgcaaccaggtcaaccaggacggcggctatacgggcatgacgccgcacgacttccgtcgccacgtattcgacatcgccgcgcgcgaacgcgtgagccccgatgcgatcctgctcggcggcgaccatctcggcccgaacgcatggcgccggctgccggccgcgcacgcgatggacaaggccgagacgatggtcgcgcagtacgtggcggccggcttccgcaagctgcatctcgactgctcgatgtcgtgcgcggacgatccgcagccgttgcccgaagccgagatcgccgcgcgggcggtgcgcctgtgccgcgccgccgaggccgcgtgggcggccggtgcgccgcgcggcgacgcgcccgtctatgtgatcggcaccgaggtgccggtgcccggcggtgcgcacgagacgctcgacgcggtcgcggtcaccacgcccgaagcggccggctcgacgctcgcgctgcaccgcgacgcgttcgcgcgcgccggcctcgacgatgcgtggtcgcgcgtgatcgcgatggtcgtacagccgggcgtcgagttcgatcatcacaaggtgatcgactacgacgccggcaacgcgcgtgaactgagcgcattcatcgaaacggaacccgcgctcgtgttcgaagcgcattcgaccgattaccagacgcccgacaacctcgcgcaactcgtgcgcgaccacttcgcgatcctgaaggtcggccccggcgtgaccttcgcgatgcgcgaaacgctgtggtcgctcgccgcgatcgagcgcgaatggctcggcggcgacgacgggttcatcgcgaccgtgctcggcgtgatgcgcaacgaaccggcgcactggcgcgattactacccggccggcgcgcaactcgaactcgatctcgcgtacaggctgagcgaccgcatccgctactactgggcccatcccgttatgccacgcccctgccccgacctgctcgcgcgcctcgatgcttgccgccgccgcttacgctcgtttgcctgcctctgccgccccagccc

SEQ ID NO: 11680 - DNA, 1482 bp, Burkholderia cepacia
atgaacacccgattccttgcgcgcggcgccgtcgcggtcgccgtggcggccgccctgtcggccggctatttcgccggcacccgccgcgccgatccgcagatcatcacgcccgcgcaggcggccgcattgatgccggccgaagctgccgccaagaccggcattcccgatttctccgggctcgtcgagacctacggcccggcggtcgtgaacatcagcgcgaagcatgtcgtgaagcaggtggcgcggcgtgcgccgcagccgcaactgccgatcgatccgagcgacccgttctaccagttcttcaagcacttctacggccaggtgccgggcatgggcggcgacgcgcagccggacgaccagccgagcgcgagcctcgggtcgggcttcatcgtcagttccgacgggtacatcctcaccaatgcgcacgtgatcgacggcgcgaacgtcgtcacggtcaagctgaccgacaagcgcgaatacaaggcgaaggtcgtcggctccgacaagcagtccgacgtcgccgtgctgaagatcgacgcgagcggcctgccgatcgtgaagatcggcgatccggcgcagagcaaggtcggtcagtgggtcgtcgcgatcggctcgccgtacggcttcgacaacacggtcacgtcgggcatcatcagcgcgaagtcgcgcgcgctgccggacgagaactacacgccgttcatccagaccgacgtgccggtgaaccccggcaactcgggcggcccgctgttcaacctgcagggcgaggtgatcggcatcaactcgatgatctactcgcagacgggcggcttccagggcctgtcgttcgcgatcccgatcaacgaggcgatcaaggtgaaggacgagctcgtgaagacgggccacgtgagccgcggccggctcggcgtggccgtgcaggggctgaaccagacgctcgcgagctcgttcgggctgcagaagccggacggcgcgctcgtcagctcggtcgacgccaacggtccggccgcgaaggccggcctgcagccgggtgacgtgatcctgtcggtcaacggttcgccggtcgccgattcgacgtcgctgcccgcgcagatcgcgaacctgaagccgggttcgaaggccgacctgcagatctggcgcgacaagtcgaagaagtcgatcaccgtgacgctcggcgcgatggccgacgcgaagctcgcgtcgaacgacggcgggccggtcgaacagggccgcctgggtgtcgcggtgcggccgctgtcgccgcaggaacgcagcgccgacaacctgtcgcacgggctgatcgtgcagcaggccggcgggccggccgccaacgcgggcatccagcccggcgacgtgatcctcgcggtgaacggccgtccggtcacgagcccggagcagttgcgcgacgcggtgaagggcgcgggcaacagtcttgctctgttgatccagcgcgataatgcacagatcttcgtgccggtcgacctgagc

SEQ ID NO: 11681 - DNA, 1113 bp, Burkholderia cepacia
ttgggcggttccatcatgtccggcaataccctcggcacgcttttcactgtcacgaccttcggcgaatcgcacggtcccgcgatcggctgcgtgatcgacggctgcccgccggggatggggctgaccgaagccgacatccaggtcgagctcgaccgccgcaagccgggcacgtcgcggcacgtgacgcagcggcaggaggccgacgaggtcgagatcctgtcgggcgtgttcgagggcgtgacgaccggcacgccgatcgcgctgctgatccgcaacaccgaccagcgcagcaaggattacggcaacatcgtcgagacgttccgtcccggccacgcggactacacctactggcagaaatacggcatccgcgactaccgcggcggcggccgctcgtccgcgcgcctgaccgcgccgatcgtcggcgccggcgcggtcgcgaagaagtggctgcgcgagcgcttcggggtcgaggtgcgcggctacatgagcggcctcggcgaaatcgacgtgccgttcgtcgactggtcgcacgtgcacgagaacccgttcttctcgccgaatgcagcggtcgtgccggaactcgaagcgtacatggatgcgctgcgcaaggagggcgattcgatcggcgcgcgcatcgacgtcgtcgcgtcgggcgtgccggtcggctggggcgagccggtgttcgaccggctcgatgccgatatcgcgaaggcgatgatgagcatcaacgcggtgaagggcgtcgagatcggcgcgggcttcgacagcgtcgcgcagcgcggctcggtgcacggcgacgaactgacgccggccggtttcgtcggcaaccacgcgggcggtgtgctcggcgggatttcgacggggcaggacatcaccgtgtcgatcgcgatcaagccgacctcgagcatccgcacgccgcgccgctcgatcacgaagtccggggaagaggcgacggtcgaaaccttcggtcgccacgatccgtgcgtcggcattcgcgcgacgccgatcgcggaatcgatgctcgcgctggtgctgatcgaccatgcgttgcgccatcgtgcgcagtgcggcgacgtcgagacgcccacgccgaagatcgccggcagcgcgacc

SEQ ID NO: 11682 - DNA, 377 bp, Burkholderia cepacia
caggcggccatcgccccgcgctacaagctgttcaccatcaatcgagtgttatcgatcgaccgaatattaccttatctctaaggcatgtgagatttttttgatagctttggtgcacttgtgatggcggaaaattctgattcagtatggttcataggtacacaccgccgtggaacgtcccaacactgttgtatcaaatgtcgaacttatatcatcactggcaccctttgaaatgcgctccgttgaacatcaggcggttatgttccctcgccttatgaggtgatcgaactgctgcgccagcactcttgtccatatgtgttatcgaacacgctcacgccgagcatcccctcgtgtccctgaaagtgctagaactgcttgga

SEQ ID NO: 11683 - DNA, 1050 bp, Burkholderia cepacia
gtgctaaacgcgccgcccgcggccagcgtaccgccagcgcccgcgcaaccggctgcgccggccgtcgtgatgaccgtcacgccgaccaacgacggccgcgacgaagtcgtcgagacggtcgagatcgtgccgccgccgctgcaggacgcgtccgcgaagaagtcgtggctcgcgcgcctgaaaaaaaagctcgcgaagacgggctcgagcatcaccggcgtcttcgtcaacacgaagatcgacgaggatctgtacgaggagctcgaaaccgcgctgctgatgtccgacgcgggcgtcgacgcgaccgaatacctgctcggcgcgctgcgcgaaaaggtgcgcgcgggccggctgaccgatccgcagcaggtgaaggctgcgctgcacgacctgctcgtcgagctgctgacgccgctcgagaaatcgctgatgctcggccgcgcgcagccgctcgtgatgatgatcaccggcgtgaacggcgcaggcaagacgaccagcatcggcaagctcgcgaagcacctgcagagcttcgaccagtcggtgctgctggctgccggcgacacgttccgcgcggccgcgcgcgaacagctggcggtctggggcgagcgcaacaacgtgacggtcgtgcagcaggagagcggcgatccggccgcggtgatcttcgacgcggtcagcgccgcgcgcgcgcgcaagatcgacgtgatgatggccgacacggccggccgcctgccgacgcagctgcatctgatggaggagctgaagaaggtgaagcgcgtgatcgcgaaggcgcacgacggcgcgccgcacgaagtgctgctggtgatcgacgcgaacaccggccagaacgcgctcacgcaggtgaaggccttcgacgacgcgctgggcctgaccggcctgatcgtcacgaagctcgacggcaccgcgaagggcgggattctcgccgcgatcgcgcggcaacggccggtgcccgtctacttcatcggcgtcggcgagaaggtcgaggacctgcagccgttcagcgcggtggaattcgcggacgcgctgctcggc

SEQ ID NO: 11684 - DNA, 1548 bp, Burkholderia cepacia
atgaatctattccgagccctgctgacggtcagcggcttcacgctgctgtcgcgcgtgaccggactggcccgcgagacgctgatcgcccgtgcgttcggcgccagtcaatacaccgacgcgttctacgtcgccttccgcattccgaacctgctgcgccgcctgtctgccgaaggcgcgttctcgcaggcgttcgtgccgatcctcgccgagttcaagaaccagcaggggcacgatgcgacgaaggcgctcgtcgacgcgatgtccaccgtgctcgcgtgggcgctggccgtgctgtcggtcgtcgggatcgccggtgcgtcgtgggtcgtgttcgcggtcgcgtccggcctgcacagcgacggccaggcgttcccgctcgcggtcacgatgacgcggatcatgttcccgtacatcgtgttcatttcgctgaccacgctcgcgtcgggcgtgctgaacacgtacaagagcttctcgctgcccgcgttcgcgccggtgctgctcaacgtcgcgttcatcgccgcggccgtgttcgtcgcgccgcacctgaaggtgccggtctacgcgctcgcgtgggccgtcatcgtcggcggcgtgctgcagtttctcgtgcaactgccgggcctgaagaaggtcgacatggtgccgctgatcggcctgaatccgctgcgcgcgctgcgtcatccgggcgtgaagcgcgtgctcgcgaagatggtgccggcgacgttcgcggtgtccgtcgcgcaactgtcgctgatcatcaacaccaacatcgcgtcgcggctcgggcagggcgcggtgtcgtggatcaattacgccgaccgcctgatggagttcccgacggcgctgctcggcgtcgcgctcggcacgatcctgctgccgagcctgtcgaaggcgcacgtcgacgccgactcgcacgaatattcggcgctgctcgactgggggctgcgcgtcacgttcctgctcgcggcgccgagcgcgctcgcgctgttcttcttcgcgacgccgctcaccgcgacgctgttcaactacggcaagttcgacgcgcataccgtcacgatggtcgcgcgcgcgctcgcgacgtacggaatcggcctcgtcggcatcatcctgatcaagatcctcgcgccgggcttctatgcgaagcaggacatcaagacgccggtgaagatcgcgatcggcgtgctgatcgtcacgcagctctcgaactacgtgttcgtgccgctgatcggccacgcggggctcacgctgagcatcggcgtcggtgcgtgcctgaactcgctgctgctgttcctcgggctgcgcaagcgcggcatctaccagccgtcgccgggctggctgcgctttttcgtgcagctcgtcggcgcggcgctcgtgctcgcgggcctgatgcactggtgcgcgatcaatttcgactggaccgggatgcgcgcgcagccgctcgatcgcattgcgctgatggccgcgtgcctcgtgctgtttgctgcactatatttcggtatgttgtgggtgatgggcttcaaatacgcttacttcagaaggcgcgccaag

SEQ ID NO: 11685 - DNA, 1374 bp, Burkholderia cepacia
ttgctcgtgcttcgtctgccggcgcatcgcgaagtgcgcgacgatgatgaagatccacacgatcatcacgaacgcgccgctgctcttcgcgagcatcaggaacaggtcgccgccgctcacgaagtgaatgccgaggatcgacacgcagatcgcgaggcacagcacgagcgcgttcatcggcacgcccttcgcgttggtgcggccgaacaccgccggcgcgtggccgcgctggctcagcgagaacagcatgcgcgagttcgagaacaggaacgagttcatcaccgacatgaacgacacgaacagcacgatcttcatcgcgacggcggcctccgtgaagcctgccatgccgaacagcgatacgtacggcgatttcaggttggccttgtcggtccacggcatgcacaggatcaggatcgacaccgagccgacgtagaacaccatcacgcgcacgatcacgctcttgatcgcgcggatcacgttcctgctcgggttttccgattcgcccgcggccactgccgcgatctcgctgccgccgagcgagaagatcacgaccatcacgccggcgagcacgggcgagatgccgttcggcatgaagccgccgtgatccgtgaggttcacgagccccggcgcgggaatgcgcggctggaagccgagcaggatcgacgcgccgagcgccatgaacacgatgatcgtcgcgaccttcgcgaacgacagccagtattcggcttcgccgaacgagcgcaccgaatacgcgttgctcgcgatcagcgtgacgagcatgaacagcgcgccgccccagatcggcagccacggcaggaaatcgtggaggatcgcgccgagcaggatcgcttcgacggtgatcgtcatcatcgacttgaaccagtacagccagccgaccgcgaagccggcccattcgccgagatagctgctcgcatacgtggagaacgatccgctgtcgggattgcgggacgccatttcgccgagcatgaacatgaccagcgtgacgatcacgccgccgatcaggtacgacaggatcgccgcggggccggccgttgcgatgatcgcgccggagccgacgaacaggcccgcgccgatcacgccgccgagcgcgatcatcgtgatgtgccgttgcttgaggctttgcctcaacgagttgtcctgcatctcctacctctagttattgttggccgggaacgtatcgggcggcgcggcggcaagcgttctgccgctgcggggcgccgatgtcgagggagcgtgtgtgacgcgatgtgcggggccgccggcggtgaatcgaaatggcggccacggtgtgccggtcggtgcccgcgagagggcgatgatggcgacaaaccggattgtcggcggacaccgccg

SEQ ID NO: 11686 - DNA, 891 bp, Burkholderia cepacia
atgaattttgcgctgattctttttgtgctcgtcgtcgtgacgggcgtagcgtgggtgctggacaaactggtgttcctgccgcggcgtcgcaaggcggccgactcggcgatcgaggagttcgatcgccagcagtcgcgcatcgacaagcgtttcgcggacgaaaacgccgcgcagacgcgttcgaagctgcgtgacgaaaagctgcgccagccgtggtggctcgagtacaccgcgagcttcttcccggtgatcctggccgtgttcgtcgtgcgttcgttcgtcgtcgagccgttcaagattccgtcgggctcgatggtgccgacgctgctcgtcggcgacttcatcctcgtcaacaagttcgagtacgggctgcgcctgccggtcaccaacacgaagatcacgcagggcagcccgctgtcgcgcggcgacgtcgtcgtgttccgctatccgaaggacgagtcggtcgactacatcaagcgcgtgatcggcctgccgggcgacacggtcgcgtaccaggacaagcagctcacgatcaacggccagccggtgcccgaaacgccgctgcccgatttcttcgacgacgagcgccagaattacgcgaagcagttcgaggaaacgatcggcaacaagaagaacgcgatcctcaacaacccggccgtgccgccgttcgtgatgggcgcatacgactatccgtatcgcgacaactgcacgtacaacagccgcggcgtgatctgcaaggtgccgcccggccactacttcatgatgggcgacaaccgcgacaacagcgcggacagccgctactggggtttcgtgccggaccagaacatcgtcggccgcgcgttcttcatctggatgaacttcagcgacctgaagcgcatcggttccttcaac

SEQ ID NO: 11687 - DNA, 1035 bp, Burkholderia cepacia
ttgcggcatcccaccgcccattcccccgacgctgcatccgctatcgtgaaagtcttccgcggcctgcccaacgccgagagccgcgccccgtgcgcgctgacgatcggcaacttcgacggtgtccatcgcggccaccaggccctgctcgcgcgcgtgcgcgcggcagcggacgcgcgcggcctgcccgtgtgcgtgatgacgttcgagccgcacccgcgcgaattcttcaatccggccggcgcgccgccgcgcatcgcgatgctgcgcgacaagctcgaagcgctgcgcgatcacggtgtcgaccgcgtcgtcgtcgagcacttcaaccacaccttcgcgagccagtcgccgcaggcgttcgtcgagcgcacgctggtgaacgggctgcatacgcgctggatgatggtcggcgacgatttctgctacggcgcgaagcgcgcgggcaccttcgacacgctgaaggcggccggcgagcagcacggcttcgaggtcgagcagatgggcacggtggccggcagcgacggcacgcgcatttccagctccggcgtgcgcgcggcgctcgccgcgggcgatctcgacgcggccgctcaggcgctcggccacggctacgcgatcagcggccacgtcgcgcacgggctgaagctcggccgcgatctcggcttcccgacgctgaacctgccgatcgcgcacaagcggccggcgctcgcgggcatcttcgtcgtgcaggtgcacggcctcggccccgagccgctgccgggcgtcgcgagcctcgggctgcgcccgaccgtcgacgattcgggccgcgtgctgctcgaagttcacctgctcgactggcacggcgatgcgtacggcaagctgatccgtgtcgaattcctgaagaagctgcgcgacgaggcgaagttcgacgatctcgaggcgctgtcgcgcgcgatcgcgctcgacgtcgcgaatgcgcgcgcgtacttcatcgaacgcgaccgtgcgccgggcagccgcgcgacgggcttcgcgacgtcggctaccgaccgaattagc

SEQ ID NO: 11688 - DNA, 669 bp, Burkholderia cepacia
atgaacgacaacgaccatcgcccggtgcgcttcggcatcgtcggtgcaggcagcattgcgcgccgcttcgcgcaaagcctcgcgtacgtgccgggcgccatgctggccggtgcctgggcccgccgcgccgacgcaacggccgccttctgcgagacatacggcggcacgcctgccgcgagccccgacgcgctcctcgcgagcgatctcgacgccgtctacatcgcgacgctccatgacagtcacgcgcagtacacgctggccgcattggccgccggcaaggccgtgctgtgcgagaaacccgcggcgctgaacgccgcgcaactcgacacggtgctgcacgcggcgcgcgatgccgggctgctcttcatggaggcgatgaagccgccgttcttcccgctgtaccgtcagctacgtgcgcatctgcgcgacgatccgatcggcgagatccggctcgtgcgggcgggctgcgcatcgtcgtcggtgccggaggatcattccgtctatcgcctggatcgtgcgggcggcgcattgctcgatatcggcatctacgaggcgttcctggccgtcgactggctcggcgcggcgcgcgacgtgcagacgctcggccgcgtcggcgcgaccggcgtcgacctgttcgcgagcctgaacagcgtgcatgcgaacggcgag

SEQ ID NO: 11689 - DNA, 1314 bp, Burkholderia cepacia
atgcccttcctccccactaccgccaccgcccctttctgcccgtcggaagtaaagggcagcatcacgatcgacgccgccgcgccgcgctggcagaagctcagacgtttcttcggccccggcctgctggtcgcgatcggctacatggaccccggcaactgggcgaccgatatccaggccggctcgcagttcggctattcgctgctgtgggtcgtcgcgttctcgagcctcgcggcgatcttcctgcagatgctcgcggcgcggctcggtctcgtcgcgggcaaggatctcgcgcaggccagctacgaccgctacggccggttcggccgcgtcgtgcagtggatcacggccgaagtgtcgatcatcgcgtgcgacatcgcggaagtgctcggctgcgcgctcgcgttcaagctgctgctcggcgtgccgctcgcgtggggcgtcgtgctgaccgcgctcgacacggtgatcgtgctcggcctgcagggcaagggtttccggcagatcgaggcgatcgtgctcgggctgatcgcgacgatggcgttctgcttcgtcgcgcaggtggcgatcacgccgcccgactggcatgcggtggtgagcggcctcgtgccgggcgacccgggccacgaccgcaaggatgcgatcgtgctcgcgctcggcatcgtcggcgcgacgatcatgccgcataacctgtatctgcattcgtcggtcgtgcagacgcggcacgtcgtcggcggtgcgcgcggcgtgatccgcgacacgctggcgctggtgcgcatcgatacctgcgtgtcgctgttcgtcgcgatgctcgtcaacgcggcgatcctcgtcgtcgcgggcgcggcattccatgcgacgggccagcacaacgtgaccgacatcgagcaggcgtaccggctgatcacgccgatcgcgggcggtgcggccgcgctgttgttcggcatcgcgctgctcgcgtcgggtcaaagctcgacgctgaccggcacgatcgccggccaggtcatcatggacggtttcctgcatacgaagatcccgtgttaccagcgccggctgatcacgcgcgggctcgcgctcgtgccggcgctgatcggcgtgctgtggctcggcgacggctcggtcgggcaactgctcgtgtggagccaggtgctgctgagcctgcaattgccgttcgcgatgtggccgctgatccgctcggtcagcgatcgccgcacgatgggcgagcacgcgatcgggcgcgggatgcaggtggccgcgtggacgctgttcgccgtgatcaccggcacgaacctgctgttgattaccggtgtcgccggt

SEQ ID NO: 11690 - DNA, 267 bp, Burkholderia cepacia
atgcttcaacaagaaaccaccatcgtcaataaattggggctccatgcgcgcgcatcggccaagcttacgcaactggccggcaacttccagtccgaagtctggatgacacgcaacgggcgcaagatcaatgcgaagagcatcatgggcgtgatgatgctggcggccggcatcggcagcaccgtgacgatcgaaaccgaagggcccgacgagcgggaagcgatggacgcgctgctgaagctgatcgccgacaagttcggcgaaggccag

SEQ ID NO: 11691 - DNA, 1065 bp, Burkholderia cepacia
atgagcttgttcgatacgatcaacgcgggcggggcccagcttctcggcttcgcgtggccgacggtgtgggcagtcgtgcgcatcctcgtcgtctccgtcgtcatcctgctgtgcgtcgcgtacctgattctgtgggaacgcaagctgatcggctggatgcacgtacgtctcggcccgaaccgcgtcggccccggcggcctgctgcagccgatcgccgacgtgctgaagctgctgctgaaggaagtcatccagccgaccgccgccagccgctggctgtacctgatcgcgccgatcatgaccgtcgtgccggcgttcgccgtgtgggcggtgatcccgttccaggccgaagccgtgctcgcgaacgtgaacgcgggcctgctgtacgcgatggcgatctcgtcgatcggcgtgtacgcggtgattctcgccggctgggcgtcgaactcgaagtacgcgttcctcggtgcgatgcgcgccgcggcacagatggtgtcgtacgaaatctcgatgggcttcgcactggtgctggtgctgatgacggccggcagcctgaacctgtcggaaatcgtcggctcgcaacagcacggcttcttcgccggccacggcgtgaacttcctgtcgtggaactggctgccgctgctgccggcgttcgtcgtctacttcatctcgggcatcgccgaaacgaaccgtcacccgttcgacgtggtggaaggggagtcggagatcgtcgcgggtcacatgatcgattactcgggtatggcgttcgcgctgttcttcctcgccgagtacatcaacatgatcgtgatctcggcgctggctgcgacgctgttcctcggcggctgggacgccccgttcgaattcctgtcgttcatcccgggcatcttctggctggtgctgaaggtattcgcactgctgtcggtgttcatctgggtgcgcgcgacgttcccgcgcttccgttacgaccagatcatgcgtctgggctggaaggtgttcctgccggtcacggtgatctgggtggtcgtggtcggctgctggatgatgtcgccgctgaacatctgggtgaag

SEQ ID NO: 11692 - DNA, 834 bp, Burkholderia cepacia
atgctgtctactgccctgatcgtctttcgtgaagtgctcgaggccgcgctggtggtctcgatcgtgatggctgccacgaagggcgtgccgcggcgcggctggtgggtgggcggcgggctggtcggcggcgtggtcggcgccggcctgatcgcggcgttcgccgacgtgatctcgcaatgggcgtccggcatgggccaggaagtcttcaacgcgggcgtgatgttcgtcgcgacgctgatgctcgcgtggcactgcatctggatgagccggcacggtcgcgaaatggcgctgcacatgggcgaggtcggccgcgcggtcgcggccggcagccggccgctgacggggctcgcgatcgtggtcggcgtcgcggtgctgcgcgagggctccgaggccgtgctgttcctgtacgggatcgccgcgggcgatccgggccagacgccgcagatgatcgccggcgggctgctcggcgtgctcggcggtgcggggctcggctatgcgatgtacgcaggcctgctgcagattccgttgaagcgcctgttctccgtcaccaacgggctgatcgtgctgctcgccgcgggcatggcgagccagtgcgtcggcttcctgctggcggccgggctcgtgccgtcgtggggcgatgcggtctgggacacgtcgtggctgctcaaggaaacgagcatcgtcggcaaggcgctgcatacgctgatcggctataccgcgcgcccggcggggatccagatcgccgcgtacgtcgcgacgctggtggcgatcctcgtgctggcacggttcgtcggccggccgcaggagacggtgaggccgccgcgcgccgcggcg

SEQ ID NO: 11693 - DNA, 786 bp, Burkholderia cepacia
atgaccgaaaccgccacacgcatgaccgaagccaccaccaccgcggccgtgccgcgctttttcgtcgacgccgcgctgcgcgccgacgccacgctcgcgttgccggccgacgtcgcgcgccacgtgcaagtgctgcgcctgcagcccggcgacgtgctcgcgctgttcgacggcacgggcggccagtaccgcgcgcggctcgtcgaggtcgacaagcgcagcgcgctcgtgcaggtcgattcgttcgagcccgccgaggccgagccgccctatcgcgtgacgctcgcgcaggggatcgccggcggcgacaagatggactgggtgatcgagaaggccgtcgagctcggcgtcgcagcggtcgtgccgctgtcgaccgcgcgtggcgtcgtgaagctgtccggcgaacgcgcggacaagcgcgtcgcgcactggcgcggcgtcgtgcgcgcgtcgtgcgagcaatgcggccgcaaccgcgtgcccgacgtcgcgccggtcatcggcttcagtgcatggctcgacgcgctgccggccgcgccggccgacggcgaactgcggctgctgctgtcgccgcgcgcgagcatcccgttcgcgtcgctgcccgacgcgccgcccgcggccgccgtcacgctgctgatcggacccgaaggcgggctgtcgcccgacgaggaaaatgcagctcgcgcacgcgggttcaccgcgctgtcgctcgggccgcgcgtgctgcgtaccgagacggccggcgcggccgtgctcgcggcgttggcggcgcgctggggcgggtgg

SEQ ID NO: 11694 - DNA, 2499 bp, Burkholderia cepacia
gtggccccgcagaaccggaagatatccatgagtgaacagcacaattcgcaacccgataacagcagctacggcgcctcgtcgatccagatcctcgaaggtctggaagcggtgcgcaagcgccccgggatgtacatcggcgacacgtcggacggcaccggtctgcaccacctcgtgttcgaggtgctcgacaactcgatcgacgaagcgctggccgggtactgcaacgacatccacgtgacgattcacgccgacaactcgatttccgtgaccgacaacggccgcgggattccgaccgacgtgaagatgaacgacaagcacgagccgaagcgcagcgccgccgagatcgtgatgaccgagctgcacgccggcggcaagttcgaccagaacagctacaaggtgtcgggcggcctgcacggcgtgggcgtgtcgtgcgtgaacgcgctgtcgagctggctgcgcctcaccgtgcgccgcgacggcaagaagcgtttcatggagttccaccgcggcgtcgcgcaggatcgcgtgatcgaggtggtggacggcgtggaagtgtcgccgatgctcgtgaccggcgacaccgagaaccgcggcaccgaagtgcacttcatggccgacccgaccattttcggcacggtcgagtatcactacgacatcctcgcgaagcggatgcgcgagctttcgttcctgaacaacggcgtgcggattcgcctcaccgacctgcgttcgggcaaggaagacgatttcgcgttcgccggcggtgtgaagggcttcgtcgaattcatcaacaagacgaagagcacgctgcacccgacggtgttcttcgcaaacggcgagaaggacggcgtgggcgtcgaagtcgcgatgcagtggaacgacagctacaacgaaaacgtgctgtgcttcacgaacaacattccgcagcgcgacggcggcacgcacctgaccggcctgcgcgccgcgatgacgcgcgtcatcaacaagtacatcaccgacaacgaaatcgcgaagaaggcgaaggtcgagacgaccggcgacgacatgcgcgaagggctgtcgtgcgtgctgtccgtgaaggtgccggagccgaagttcagctcgcagacgaaggacaagctggtttcttccgaggttcgtgcgccggttgaggaagttgtggcgaaggcgctcgaagagttcctgctggaaacgccgatcgacgcgaagatcatctgcgggaagatcgttgaagctgctcgggcgcgtgatgctgcgcggaaggcgcgtgagatgacgcgccgcaagggcgtgctcgacggcgtcggcctgccgggcaagctcgcggactgccaggagaaagacccggcgaagtgcgaaatctacatcgtcgagggtgactcggcaggtgggtcggccaagcaagggcgtgatcggaagttccaggccatcctgccgctgcgcggcaaggtgctgaacgtcgagaaggcgcgctacgacaagctgctgtcgtcggagcagatcgtcacgctcgtgaccgcgcttgggtgcgggatcggcaaggaagactacaacctcgacaagctccgctatcaccgcatcatcatcatgaccgacgcggacgtcgacggtgcgcacatccggacgctgctgctcacgttcctgtatcgccagatgccggacatgatcgagcgcggctatgtgtatatcgcgcagccgccgctttacaagatcaaggcgggcaaggacgagcggtatctgaaggatgacgtggagctcaacgcgcacatgctgcggttggcgctgcaagggtcggagctggtgccgggtgagaatgcggcggcgatttcgggtgatgcgcttggggagctggcaaggtcgtatctgctgtcgcagagcgtgatcgagcggttgagccggttgtatgacccggcggcgctggaagcggtcatggacggggtggtgatcgatctttccaacgaagagtcgaccgaggcttcggcgaaggcgctgcacgctgcgttgcatgatgaagcgctgaagaacgaagtgcgggttgtgccttcgtatgacccggttcgcgaacagcgggcgctgcatgtcgagcgaacgcaccacggcaacgtgcgcgtttcggtcattgaccaggagttccagcacacggcggattatcagcaactcgtgaccaccgcgaatacgttcaaggggcttattggggaaggggcggtcatcaagcgcggtgagcgcagcatggccgtggcggacttcaagagcgcgatgaagtggctgctggcggatgcggagcggaatgtgtcgaagcaacgctataagggcctcggcgagatgaaccccgagcaactgtgggaaacgacgatggatccggcagtgcggcgtctgctgcgtgtgcagatcgaagatgcgatcgctgcggatgggatctttaccaccctcatgggggatgatgtcgagccgcggcgggcgtttatcgagtcgaatgcgttgcgggcggggaatattgacgtt

SEQ ID NO: 11695 - DNA, 199 bp, Burkholderia cepacia
gtgcgtgagctcaggcagtgtcatccggtagctgcgctcctgaaggcggcaggcctggcgcgcagcacgttctattaccagctcaaggcattggctgccggcgatcggtatgcggatctcaaagcgaagatccagaccgtatacgaccaccacaagggccgttacggctatcggcgaatcacggcggcgatccggcaga

SEQ ID NO: 11696 - DNA, 723 bp, Burkholderia cepacia
atgcgctgcgcgtccgcccgggtcgcacaggacatgaacgatttcgacaccacgatccagatcttcctcacccacgtgacgttcggcccgttgatgaatcacgcgatccgcgtgatcgcgggcctctacacgttcaagggcttcgtgctcgttcccgtgctgtgctggctgtggttccagcccggccctaaccgcgaacggcaacgcgaacgggtcgtcgccaccgtcgcgagcgggctcgtcgcgctcgccgtcggccgcgtgctcgcccaggtgctgccgttccgcgtacggccgatctacaaccccgacctgcacctgcactttccgtcggccggactgcgcgcggcgacgctgcagacatggagttcgtttccgagcgatcacgcgatgctgtggatggcgatcgcgaccggcatcttcatcatcgcgcgccgcgtcggcatcgtcgcgctgctgtattcggtcgtgttcatctgcctgccgcgcgcgtatctcggctttcactatccgaccgacctgatcgcgggcgcggcgatcggcatcgcgatcgcgtggctgctgacgcgcgacgcgatccggtcgcgcttcgcgccgcgggtgctggagatgatccggcgcttccccgcgcccgcctatacgctcgcgttcctgctgtgcttcgagctgatcacgcagttcgacgaactgctgacgctcgcgcagtcggccacgcgcacgatg

SEQ ID NO: 11697 - DNA, 2583 bp, Burkholderia cepacia
atgcttgaaaactttcgtgctcacgtggccgcccgcgccgcgctcggtattcctcccctgccgctgacggctcagcagaccgccgaactggtcgaattgctgacgaacccgcccgccggcgaagagcagacgctgctcgagctgatcacccatcgcgtgcccgccggcgtcgacgaagccgcccgcgtgaaggccggcttcctggccgccgtggccaagggcgagaccgcctgcccgctgatctcgcgtgcgcacgcgaccgagctgctcggcacgatgctcggcggctacaacatccagccgctgatcgagctgctgtccgacgaggccgtcgccgcggtcgccgccgacgcgctgaagaaaaccctgctgatgttcgaccagttccacgacgtgaaggaactcgccgacaagggcaacgcgcacgcgaaggccgtgctgcagagctgggccgatgccgaatggttcacgagccgtccggaagtgccggaaagcctgaccatcaccgtattcaaggtcacgggcgaaaccaacaccgacgacctgtcgccggcgccggacgccaccacccgcccggacatcccgatgcacgcgctcgcgatgctgaagaacgcgcgcccgggcatcacgccggaagaagacggcaagcgcggcccggtcaagttcatcgaatcgctgaaggaaaagggccacctggtcgcctacgtcggcgacgtggtcggcaccggctcctcgcgcaagtcggccaccaactcggtgctgtggttcaccggcgaagacattccgttcgtcccgaacaagcgcttcggcggcgtgtgcctcggcggcaagatcgccccgatcttctacaacacgatggaagacgccggcgcgctgccgatcgagctcgacgtgtcgcagatggaaatgggcgacgtggtcgaactgcgcccgtacgaaggcaaggcgctgaaggacggcaaggtcatcgccgaattccaggtcaagtccgacgtgctgttcgacgaagtgcgcgccggcggccgcattccgctgatcatcggccgcggcctgaccgcgaaggcgcgcgaagcgctcggtctcgcgccgtcgacgctgttccgcctgccgcaccagccggccgacagcggcaagggcttctcgctcgcgcagaagatggtcggccgcgcgtgcggtctgccggaaggccagggcgtgcgcccgggcacgtactgcgaaccgaagatgacctcggtcggctcgcaggacaccacgggcccgatgacccgcgacgaactgaaggacctcgcgtgcctcggcttctcggccgatctcgtgatgcagtcgttctgccacaccgccgcgtatccgaagccggtcgacgtgaagacgcaccagacgctgccgaacttcatcagcacgcgcggcggcatcgcgctgcgcccgggcgacggcgtgatccactcgtggctgaaccgcatgctgctgcccgacaccgtcggcaccggcggcgattcgcacacgcgcttcccgatcggcatcagcttccccgcaggttcgggcctggtcgcgttcgcggccgctaccggcacgatgccgctggacatgccggaatcggtgctggtccgcttcaagggcaagatgcagccgggcgtcacgctgcgtgacctcgtcaacgcaattccgctgtacgcgatcaagcacggcatgctgacggtcgccaagcagggcaagaagaacatcttctcgggccgcattctcgaaatcgaaggcctgcccgacctgaaggtcgagcaagcgttcgagctgtcggatgcgtccgccgagcgttcggctgccggttgcacggtgcgcctgaacaaggaaccgatcatcgagtacctgaacagcaacatcacgctgctcaagtggatgatcgcgcagggctaccaggatccgcgcagcctgcagcgccgcatcgcggcgatggaacagtggctggccgatccgcaactgctgtcgccggatgccgacgccgaatacgcggccgtcatcgagatcgacctcgccgacatccatgagccgatcgtcgcctgcccgaacgacccggacgacgtgaagacgctgtccgacgtcgccggtgcgaagatcgacgaagtgttcatcggctcgtgcatgaccaacatcggtcacttccgcgccgcgtcgaagctgctcgaaggcaagcgcgacattccggtcaagctgtgggtcgcgccgccgaccaagatggaccagaagcaactgaccgaagaaggccactacggtgtgttcggcacggccggcgcccgcaccgaaatgccgggctgctcgctgtgcatgggcaaccaggcacaggtgcgcgaaggcgcgacggtcatgtcgacgtcgacccgcaacttcccgaaccgcctcggcaagaacacgaacgtgtacctcggctcggcggaactggcggcgatctgctcgcgtctgggcaagatcccgaccaaggaagagtacatggccgacatgggcgtgctcaccgccaacggcgacaagatctaccagtacatgaacttcgaccagatcgaagacttcaaggaagtggccgacaccgtgcagatg

SEQ ID NO: 11698 - DNA, 1173 bp, Burkholderia cepacia
atgagcaagcgccgtgtagtggtgggcatgtcgggcggcgtcgattcgtcggtgaccgcgtggctgctgaaggaacagggctacgacgtggtcggcctgttcatgaagaactgggaagacgacgacgacggcgagtactgctcgacgcgccaggactggatcgacgtcgtgtcggtggccgacctgatcggcatcgacgtggaagccgtcaacttcgccgcggaatacaaggaccgcgtattcgccgagttcctgcgcgaatactcggccggccgcacgccgaaccccgacgtgctgtgcaatgccgagatcaagttcaaggcgttcctcgaccacgcgatgtcgctcgacgcggaaatgatcgcgaccggtcactacgcacgcgtgcgcgaacgcgacgggcgtttcgaactgctgaaggctttcgatcatacgaaagaccagtcgtacttcctgcaccggctgaaccaggcgcaactgtcgaagacgatgttcccgctcggcgagatcccgaagacgaaggtgcgcgagatcgccgcgcagatcgggctgccgaatgcgaagaagaaggattcgaccggcatctgcttcatcggcgaacggccgttccgcgatttcctgaatcgctacctgccgaccaagccgggcccgatgaagacgcccgacggcaaggtggtcggcgagcacatcggcctcgcgttctatacgttcggccagcgcaagggcatcggcctcggcggcagcaagagcggcagcggcgagccgtggttcgtcgccgcgaaggacatcgcgtcgaacacgctgtacgtcgtgcagggccacgatcatccgtggctgctgtcgcgcgagctcgtcgccggcaacgtgagctgggtcgccggcgagccgccggccgacggcttcgcgtgcggcgcgaagacgcgctaccggcaggccgacgcggcgtgcgtattcgggctggccgcgacaggcgccgaggccgccggcccggcaggcgaagcgcgcttctcgctcgcgttcgacgacgcgcaatgggccgtcacgcccggccagtcggccgtgctgtacgacggcgagatctgcctcggcggcggcatcatcgaatccgcggccaccggccagcccggtcaggccacgtcgacgggccacgcgccggcactcgccgaagcacgc

SEQ ID NO: 11699 - DNA, 624 bp, Burkholderia cepacia
atgagccacgacgaccccaacctgatcgtccgctacacgccgaacgagcgcacgaaccactggatcaccgcgatcacgttcgtgctgctcgcgctgtccgggctcgcgctgttccatccgtcgatgttctggctgaccgcgctgttcggcggcggccagtggacgcggatcctgcatccgttcgtcggtctcgtgatgttcgtgtcgttcgcgattctcgtggtgcggttctggcaccacaatgcgctcgatgcggacgatcgccaatggctgaagcagatcggcgacgtgctgaccaaccaggaagacaagctgccgccggtcgggcgctataacgccggacagaagctgctattcttcacgctggtggcgtgcctgttgctgctcctgctgtcgggaatcgtgatctggcggcgctatttctcgttctacttcccgatcggggtgatccgcgcggccgctgtcgtgcatgccgtggcggccttcgtgctgatcgcgagcatcatcgtgcacatttacgcggcgttgtgggtgaagggttcgatcggcgcgatggtgcgcggcaccgtcacgctgggctgggcccgcaagcatcacccgaagtggttccgtgaaagcgtgaaa

SEQ ID NO: 11700 - DNA, 507 bp, Burkholderia cepacia
atgaagcattccttttcccgttctttcccgcggcgcgcgctgggcgtgttcgcgaccgtcggcgcgatgctggcaggtgccgcccaggcggcgatcgtgcccgatcgcacgcgtgtgatcttcaacgaaggcgagcaggccgcgatcgtcacgatcaccaacaagagcacgacgtatccgtatctcgtgcagtcgtggctcgaggatgcgaagggcaacaagatcacgtcgccgctgatggtcgtgccgccgctgcagcgggtcgaggcgaacgagcgcaacgtgctgcggatcgcgaagctgcccggtgcgcaactgccggccgatcgcgagacggtgttctacctgaacatccgcgaagtgccgccgaagaccgacacgccgaacacgctgcagatcgcgctgcatacgcagatgaagctgttctaccggccgaaagccgcgcagcccgcgcgcgacgaggactggacgctgccgatgacgcttggggtcgatgccgacggggac

SEQ ID NO: 11701 - DNA, 216 bp, Burkholderia cepacia
atggccaaagacgatgtaatccagatgcagggtgaggtgattgaaaacctcccgaatgcgaccttccgcgtgaagctggaaaacggccatgtcgtgttggggcatatttccgggaagatgcggatgcactacatccgcatcctgccgggcgacaaggtgacggttgaattgacgccttacgatctgtctcgtgcgcggatcgtgttccgggcgaag

SEQ ID NO: 11702 - DNA, 1257 bp, Burkholderia cepacia
atgacgatcaagcattccgtcagcgttcgcagtctccgggccctcgactggctcaactttttcgttgcaaacgttcaaaccgggttcggtccgttcatcgcgtcctacctcgcgtcgcacaaatggacgcagggcgagatcggcatggtgctgtcgatcggcacgatcagcgcgatggtcagccaggtgccgggcggcgccgccgtcgatgcgctgaagaacaagaaaggcgcggccgcgtgggcgatcgcggccatcatcctgtccgcggtcctgctcgcgtcgagcccgacgatcgtgccggtgatcgccgcggaggtattccacggcttcgcgagctgcatgctggtgccggcgatggccgcgatctcgttctcgctcgtcggccgcgccgacctcggcgaccggctcggccgcaacgcgcgctgggcgtcgatcggcagtgcagtcgcggccgggctgatggggctgaccggcgaatacttctccgcgcgcgcggtgttctggctgaccgccgtgctggcgctgcccgcgctgttcgcgctcgcgatgatccagccgacgcaccaggtgatcccgcagtcgtcgaagccggacgacctcgacgaagccggcgagcgcgaaacgctgctcgaactgctgcgcgaccgccggatgctgatcttcgcggcctgcgtcgtgctgttccacctgtcgaacgccgcgatgctgaacctcgcggccggcgaagtcacggccgggatgggcgagaacgtgcagctcgtgatcgccgcgtgcatcatcgtgccgcaggcgatcgtcgcgatgctgtcgccgtgggtcggccgctccgcgcagcgctgggggcgccggccgatcctgctgctcggcttctccgcgctgccggtgcgcgcgctgctgttcgcgggcgtcagcagcccgtacctgctcgtgccggtgcagatgctcgacggcatcagcgcggccgtgttcggcgtgatgctgccgctgatcgcggccgacgtcgcgggcggcaagggccgctacaacctgtgtatcgggctgttcgggctcgcggccgggatcggcgcgacgctcagcacggccgtggccggctacgtcgccgatcacttcggcaatgcggtcagcttcttcggactcgcggccgcgggcgcgctcgcagtgctgctggtctggctcgtgatgcccgaaacccgcgtcgagaatggcgatgagtcggccgaggaactggccgccgcctcgcccgaacaggcgcat

SEQ ID NO: 11703 - DNA, 399 bp, Burkholderia cepacia
atggctaaggcttcgaacaccgcggcgcaacgcgttcgcaagaaggttaagaagaacgtcgctgaaggcgtggttcacgttcacgcgtcgttcaacaacacgatcatcacgatcaccgatcgccaaggcaacgctctggcatgggcgacgtcgggcggtcagggcttcaagggctcgcgcaaatcgacgccgttcgctgctcaggtcgcagccgagtcggctggccgcgtcgcgatggaatacggcgtgaagaatctggaagtgcggatcaagggcccgggcccgggtcgcgagtcggcagtgcgcgcactgcacggcctcggcatcaagatcaccgcgatttcggacgtcacccagattccgcacaacggctgccgcccgccgaagcgtcgtcgtatg

SEQ ID NO: 11704 - DNA, 1554 bp, Burkholderia cepacia
atgacgttctggaatctgtatttcatcctgaagttcgcgctgttcgcgaccgggcacctgcagccgttctggctcgcgaacctcgcattcgcggtggcgctggcggcgagcgcgccgctgcgcgcgcgtgcgtggcgcatcgtccggcaggtcgtggcgatcgcgattgcggtgccgctgctcgcgcgcgagctgcatgcgccgccgctcgcccgtctcgcggaggctgcgcgcgaagtcagcacgttccgcctcgactactggatggaactgctgccgcgtctgttgccgccggtgctggcgctgacgatcgtcggcgtgctgatcgtctatttcatcgtcaatcgctggctgcgcgtcgcgacgttcgtgctggccgcgctgatcgtgatgccgctgtggcaggccggcagcgggctgatggcgcgcgtcgtcgcgccggcccagccgcaggcgaacgtggcgggcgccacgcgcgtcgaccagcccgaggaccacaacgcggcgctcgcgacgttccgcgcgcaggagtcgcagcggcaggtcgcgttcggccatctcggcagcgatccggccgcgcagttcgacgtgatcgtgttgcacatctgctcgctgtcttgggacgacctcgatgcggcgaaggtgcgcaaccacccgatgctgagccacttcgactacctgttcacgaacttcagcacggccgcgagctacagcggcccggcggcgatccgcgtgctgcgcgcgagctgcgggcaggaagcgcatgcggacctgtacaagcccgcaccgcagcagtgccatttgttctcgcaactggcgggcgcgggctacaccgtgcagtcgctgctgaaccacgacggccatttcgacaacttcctgcaggtgatccacgacaacatcggcgtgcccgatgcgccgatgatctcgaacgcagccgcgcccgtcgcgatgcacgcgttcgacggctcggcgatcaaggacgactatgcgacgctcgcgaactggtacgcgcagcgtgcggcggtgccggggccggtcgcgctgtactacaacacgatcagcctgcacgacggcaaccgcgtcgtcggcagcgcgctgacgagcatcgactcgtatccgcagcgcgcgacgaaaatgatgaccgatttcgatcgtctcgccgacctgatcgcgcaatcgggccgccgcgcggtgatcgtgttcgtgcccgagcacggcgccgcgttgcgcggcgacaagaaccaggtcgcgggcctgcgcgagattccgacgccgcgcatcgtgcacgggccggtcggcgtgcggctcgtcggcttcgccggcaaccacggcgcgacgaccgtgatcgagcagccgaccagcttcctcgcgctcgcgcagttgctgtcgaacctcgtgtcgaacagcccgttcaagccgggcgcgacgctcgcgcaatacgcggccgatttgccgcgcacgcggatgatcggcgagaacgagggcacggtgacgatgcagacggccgcgggttacgcggtgaaaactccggatggcgtatggatcgacgaacag

SEQ ID NO: 11705 - DNA, 1230 bp, Burkholderia cepacia
atgagcaaagactacaaggatctgctggtttccctcgacatcggcacgtcgaaggtggtggccatcgtcgccgagctgaagggcgagggtcactacgaggtgatcggtctcggccagagcgagtcgaagggtctgaagaaaggtgtggtggtcaacatcgaggccaccgtgcagtcgatccagcgcgcgcttgaggaagccgagctgatggccgactgcaagatcaccaacgtgtttacggggatcgcgggcagccacatccgcagcttcaactcgagcgggatggtcgcgatcaaggacaaggaagtcacgcagacggacgtcgcgcgcgtgatcgagaccgcgaaggcgatcaacatcccgaccgaccagcaggtgctgcacatcctcacgcaggaattcatcatcgacggccaggaagacgtgcgcgagccgatcgggatgagcggcatccggctggaagtgaaggtgcacatcgtgacgggcgcggtgagcgccgcgcagaacatcgtcaagtgcgtgcgccgctgcgggctggaagtgaacgacctgatcctgcagccgctcgcgtcgtcgctggcggtgctgacggaagacgagaaggatctcggcgtggtgctggtcgacatcggcggcggcacgacggacatcgcgatcttcgccgaaggcgcgatccgtcatacggccgtgatcccgatcgccggcgaccagatcacgagcgacatcgcgatggcgctgcgcacgccgacgccggacgcggaagacatcaaggtcggctacgggatcgcgaagcaggcgctcgccgatccggacgaaatggtcgaagtgccgggcctcggcgaacgcggcccgcgcacgctgtcgcgccaggcgctcgcggcggtgatcgagccgcgcgtcgaggaactgttctcgctcgtgcagcaggtcgtgcgcgagtccggttatgaagaactcctgagctccggcgtggtcattaccggcggtgcctcgatgatgccgggcatggtcgagctcggcgaagacattttcctgaaaccggtgcgcatcggcgcgccggaatacgcaggcggcctgtccgacgtcgtgcgcaatccgcgctactcgacggcgatggggctgctcgtcgaaggcagtgcgcagcgcatgcgcggccgcaaggtcgccgtgcagtccggcaacgcggggcaggtgttctcgcggatgaaggaatggttcctgagcaacttc

SEQ ID NO: 11706 - DNA, 1119 bp, Burkholderia cepacia
atgaagcagaccacccgactcgcagccatcgcagggggcgccgcgctcgcatttgccagccagtacgcggccgcacaaagctcggtcacgctctggggcgtcgccgacgccagcatccgttacctgaccaacgccaacgccaagaacgacggcctgctgtcgatgagcaacggcgcgatcaccaacagccgcttcggcatctacggcacggaagacctcggcggcggcctgaaggccgtgttcaacctcgagagcggcgtgaacctgcagaacggcgcattcgccgacagcggccgcctgttcaaccgcgcggcgtacgtcggcctgcagagcccgtacggcacggtgaccctcggccgccagaagacgccgctgttcgacctgctgtcggatacgtacgatccgctcaccgtcggcaactacctcgaaaacgcgtggctgccggtcgccctcggcggcggcctgtatgcggacaaccagatcaagtacacgggcaagttcgagggcctgacggcgaaggcgatgtactcgaccggcaccaactacgaatcgaccggcgccggcggcttctcgggccagattccgggctcgctcggcaagggcaatgcgtggggcgtgtcgctgtcgtacgtgatgggtccgctcagcatcgcggccggcgcgcagcagaacagcgacaactcggcgcgcaagcagacgatctaccacgcgaacatcgtgtacgcgttcagcaaggcgaagatctacgcgggctacctgcgttcgaaggacgacacgggcttcgtcgacagcctgctcgcgcagcagacgattccggtcgcgaagggcacgggccgtatcgacgacggtccgttcgcgggtgtgagctggcaggtcagcgcgccgctgacgctgacgggcgcgttctactacgaccatatgcgcaatgcgatgaccacgaacggcacgctcgcgagcggcaaccgctacgcggtcgtcggcatcgccgagtacgcgctgagcaagcgcaccgaaatctacggcaccgtcgacttcaacaagacgaccggcgcggcgaacgtcgagctgcccggccgcagcaaccagacgggcatcgcgatcggcctgcgcaatatcttc

SEQ ID NO: 11707 - DNA, 690 bp, Burkholderia cepacia
atgttcggaacaacaacgaagcgactcttcgcagccgcctgcgccgccctgctcgtcgcgtgcggctccgcgcccgtcggccccgggttctatcgcgtcgagcgtggcgacacgctctacaagatcgcgcgcgacaaccgcacgtcggtacagagcatcgtgcgctggaaccagatgacgaaccccgatgcgatcgaagtcggccaggtgctgcgcgtcgcgccgccgcccggcacgaccaccgcatcgaccaccggcaccggcagcgcgggccgcgcacgcccggccccttccgcgccggtcgaatcggccgtgaagccggccacgagcattgcgctgatctggccggcggccggcaacgtggtacgcacgttcgacggctcgaaatcgaagggcatcgacatcgcgaattcgccgggcacgccggtcgtcgcggccgcgccgggtgtcgtcgtctatgccggtaacgggctgcgcggctacggcaatctgatcatcctgaagcacaacgccgattacctgacggcctacgcgcacaaccgcgcgctgctggtgaaggaaggccaatcggtcacgcaagggcaatcgatcgccgagatgggcaacagcgacagcgatcgtgtcgcgctgcatttcgagctgcgctatggcggccgctcgatcgatccgtcacgctacctgccggcgcgt

SEQ ID NO: 11708 - DNA, 1110 bp, Burkholderia cepacia
atgaagttcattgacgaagcacgaatcgaagtcatcgccggcgacggaggcgatggcagcgcgtcgatgcgccgcgagaaattcgtcccgttcggcgggccggacggtggcgacggcggccgcggcggtagcgtttacgcgatcgccgaccgcaacatcaacacgctgatcgactaccgttacgcgaagaagcacctcgcgcgcaacggcgaaaacggtcgcggctcggattgctacggcaagggcggcgacgatgtcacgctgcgcatgccggtcggcaccatcatcagcgacatggacacgggcgagctgatcgccgacctgaccgagcacgaccagcgggtgatgctcgcgcagggcggcgccggcggcctcggcaacctgcatttcaagtcgagcacgaaccgcgcgccgcgccagaagacggacggcaagccgggcgagcggcgcatgctgaagctcgagctgaaggtgctcgccgacgtcggcctgctcggcatgccgaacgcgggcaagtcgaccttcatctcgtcggtgtcgaacgcgaagccgaagatcgccgactacccgttcacgacgctcgcgccgaatctcggtgtggtgcgggtcggtccgagcaagagcttcgtgatcgccgatatcccggggctgatcgaaggcgcggccgaaggcgcgggcctcgggcatcaattcctgcgccacctgcagcgtaccggtgtgctgctgcatctggtcgatctcgcgccgttcgacgaaagcgtcgatccggtcgcggaagcgacggcgatcgtcggcgagctgcgcaagtacgacgaggcgctctacgagaagccgcgctggctcgtgctcaacaagctggacatggtgccggaagacgagcgcgaggcgcgcgtcgcggatttcctcgaccgcttcggctgggacggccccgtgttcgagatctcggcgctgacgggccagggctgcgaagcgctgtgctacgcgatctacgactacctttccgagcattcggacgcgcatcgcgcggcggaggcggaggatctcgcggccgacgtgcgtttccgcgatgcgccgccggcgaagggcggtgcgacgccgggcgacgacgcc

SEQ ID NO: 11709 - DNA, 321 bp, Burkholderia cepacia
gtgatcgcggtcggcacgacgtcgatgcgcgcgctcgaagccgcggcgcgctcggccgacgaagccggccgcccgctcgcggcgacgcaggccgaaaccgacatcttcatcacgcccggctaccgtttccgcgtggtcgaccggctcgtgacgaacttccacctgccgaaatcgacgctgctgatgctggtgtccgcgttcgcgggcgtcgagacgatccgcgccgcgtaccggcacgcgatcgaagaacgctatcggttcttcagctacggcgacgcgatgctgctcacgcggcgcgacacgccggaggcgccgggcgcg

SEQ ID NO: 11710 - DNA, 720 bp, Burkholderia cepacia
atgcgtctcacccaagtttccgccctgtcgttcgacctcgacgacaccctgtggccgttcgggccgtccgtcgtccgggccgaagcgacgcttcgtgcatggttgctcgagcacgcgccgaataccgagcgcgtgctgccgacgcaacaggcgctcagcgcgctccgtgaggaatacgaacgtttgtatccggatctcgccagcgactatcgcgcgatgcgaatcggctcgatccggctggcgctggaacgcgcgaacgaagatgcctcgctgaccgatcgggcctacgacgtcttctatgcggcgcgcaatcgcgtcgagttctatgaagacgcgctgccggcgctggcgtggttgagcgcccgctttccgttgatcgcggtcaccaacggcaacgcggatctccggctgaccggcggcggcgaattcttccgcacgacgctcagcgcgcgcgtattcggcttcgccaagccggaacccgaaatcttccatgcggcggcggacgcactcggcgtgcggccggccgaattgctgcatgtgggcgacgacttccacctcgacatcgtcggcgcgttgaatgcggggcttcaggccgcgtgggtcgtgcgcgaacctcgggcgggcggggaaccggctccgccgcaggcggcgacaccgcatctcacgttgcgcgatctggcgatgctgtgtcgtgcgctcggcgggcccgacacggtgtcg

SEQ ID NO: 11711 - DNA, 912 bp, Burkholderia cepacia
gtgctgttggatgaggcggtcgagtcgctcgtgacgcgaccggacggcgtgtacgtcgacggcacgttcgggcgcggcggccatagccgcgcggtgctcgcgcggctggcgccggccgcgcggctgatcgcgttcgacaaggatccgagggcgatcgagacggcgcagggcatcaaggatgcgcgcttctcgatcgtgcatgacagctttgcttcgatgcgcgacgcgcttgcggcgcgcggcgtcgagaaggtgtcgggggtgttgctggacctgggcgtgtcctcgccgcaggtggacgatccggcgcgcggcttcagtttccgtgccgatggtccgctggacatgcgaatggatccgacgcgcggcgagtcggcggccgaatggctcgcgcgggcttcggtgcaggaattgacggaggtgatacgggattatggggaagaacggtttgcttttcagattgcaaaggcgcttgttgctcgccgggcagagtccgaccgtcttgggcctctcgacaccacgggcgagcttgcccaaatcgtgggtcacgtcgtcaaaacccgtgagaagggcaaggatccggcaacccgcacctttcaggctatacggattcacgtcaatcaagagcttgcggacctgcaagtcgtactagacgcggcattgtcgttgctggagcaaggggggcggctggtggtcatcagctttcattcactcgaggaccggatcgtcaaacgattcatgcaggcgcacgcgagtgcgcctgcggtcgatcgtcgcctgccgatccgcgccgtcgacctcccgagcccgccgctcaagatcatcagccgccagtttccgagcgaagcggaagtcgccgcgaatccgcgcgcccgctcggccgtgatgcgcattgcggagcgcgtcacgcca

SEQ ID NO: 11712 - DNA, 1512 bp, Burkholderia cepacia
gtgctgcggcacgcagtcgccgcaatctgcgtggcactctccgcttcgccgtacgccgccgaactcacgcgcgacaccggcgcgcccgtcggcgacaaccagaattcgcagacggccggccccgccggcccggtgctgctgcaagactccgcgctcatcgagaagctgcagcgcttcgatcgcgagcgcattccggagcgcgtcgtgcatgcgcgcggcaccggtgcattcggcgagttcgtgccgagcgccgacatctccgacctgacgaaagcgaaagtcttcacgccgggcacccgcacgccggtgttcgtgcgcttctccaccgtgatgggctatcgcggctcgcccgaacaagcgcgcgacccgcgcggcttcgcggtgaagttctatacgcagcagggcaactgggacatggtcggcatcaactggccggtgttcttcattcgcgacggcatcaagttccccgacttcgtgcatgcgaacaaaccgagcgccgtgaccggcgtgcaggacccgaacctcgcgttcgacttcttcgcgcacacgcccgaagcgacccacatgctgacgaggctgtacacggacgagggcatgcccgattcgtatcgccacatggacggcttcgcggtgcatgcgttcaagttcgtcaatgcgcaaggcgacgtgcattacgtgaagttccactggaagagccggcaaggcgtgcacggcctgcgtccgcaagagatcgccgcatcgatcggccgcgactggaacatgatgacgaacgacctgtacggcgcgctgaaacagggcgatttcccgaagtgggacctgtacgtgcaggtgctcacaccgaaggacctgaaccgcttcgacttcaacgcgctcgacgacacgaaggtctggaccggcgtgcctgaacgcaagatcggcacgatgacgctcaatcgcgtgcccgacaactacttccagtcgaccgaggaatcggcgttcgcgccgtcgcggctcgtgccggggatcgagccgtccgaggaccggatgctgcaggaccgcctgttcgcgtacgccgacacgcagatgtaccggctcggcgcgaactacatggatctgccgatcaatcgccccgtcgtgccggtggtcaacaacaaccaggacggcaagatgaatgcgggcgaccgcaagggcgaggtgaactacgaaccgtcgacgctgaacgaactcgcgcaggacccgcagtacaaatcggtccgcatggcgctcgacggcacgacgcagcaggaagcgatccgcaagaagctgccgttccgtcaggcgggcgagtactaccgcagcctgtcgcagcaggacaaggacgacctcgtcaccgcgctgtccggcgacctcggccaggtgaagaacgcgcagaaccagtacgcgatgctgtcgtacttctacaaggccgacgccgattacggtacgcgtctcgcgcaggccgttcacgcgaacgtccagcaagtgcagtcgctcgcggcgaagctgagcgacaac

SEQ ID NO: 11713 - DNA, 393 bp, Burkholderia cepacia
atgcgccatcgtcatggtctgcggaaactgaaccgcacgagcagccaccgtctggctatgctccgtaacatgtccaactcgctgatcgagcacgaagtcatcaagacgacgctgccgaaggcgaaggaactccgtaaagtcgtcgagccgctgatcacgctcggcaagaagccgtcgctggcaaaccgtcgcctggcgttcaaccgcctgcgcgatcgtgactcggtggcgaagctgttcgacgtgctcggtccgcgtttcgcgaaccgtccgggcggctacctgcgcgtgctgaagttcggcttccgcgtgggcgacaacgcaccgatggcactggtcgaactgctcgaccgtccggaagtcgacgaaacggaaaacgtgcaagaagctgag

SEQ ID NO: 11714 - DNA, 1041 bp, Burkholderia cepacia
atgttcggttttttgcgcagctacttctccaacgatctcgcgatcgacctcggcaccgcaaacaccctgatctacatgcgcggcaagggcatcgtgctcgatgagccgtccgtcgtgtcgatccgccaggaaggcggccccaacggcaagaagacgatccaggcggtcggcaaggaagccaagcagatgctcggcaaggtgccgggcaacatcgaggcgatccgcccgatgaaggacggcgtgatcgccgacttcaccgtcaccgagcagatgatcaagcagttcatcaagacggcccacgagtcgcgcatgttctcgccgtcgccgcgcatcatcatctgcgtgccgtgcggctcgacccaggtcgagcgccgcgcgatcaaggaagccgcgcacggcgccggcgcgtcgcaggtctacctgatcgaggagccgatggcggccgcgatcggcgcgggcctgccggtctcggaagccaccggctcgatggtcgtcgacatcggcggcggcacgaccgaagtcggcgtgatctcgctcggcggcatcgtctacaaaggctcggtgcgcgtcggcggcgacaagttcgacgaggcgatcgtcaactacatccgccgcaactacgggatgctgatcggcgagcagaccgccgaggcgatcaagaaggaaatcggctccgcgttcccgggctccgaagtcaaggaaatggaagtgaagggccgcaacctgtcggaaggcatcccgcgcagcttcacgatctccagcaacgaaatcctcgaagcgctgaccgatccgctgaaccagatcgtgtcgtcggtgaagatcgcgctcgaacagacgccgccggaactcggcgccgacatcgccgaacgcgggatgatgctgacgggcggcggcgcgctgctgcgcgacctcgatcgcctgctcgcggaagaaaccggcctgccggtgctcgtcgcggaagacccgctgacctgcgtcgtgcgcggttcgggcatggcgctcgagcgcatggacaagctgggcagcatcttctcgtacgag

SEQ ID NO: 11715 - DNA, 207 bp, Burkholderia cepacia
aggacgtttacacccagctcacgtacttctttaaatggcgaacagccatacctttgggaccggatacagccccaggatgagatgagctgacatcgaggtgccaaacaccgctgtcgatatgaactcttgggcggtatcagcttgttatccccagagtactttttatccgttgagcgatggcctttccatacagaaccaccggatcaa

SEQ ID NO: 11716 - DNA, 1191 bp, Burkholderia cepacia
cgcgacagccacacggtggggccgggcgcgcgcgccacctggccgcgccgccgcggctcagcgggggcgcgggggagagcggagcggacgggtcggaaggagggtggggactgggtagggcatgcggccccgcaggaccgcttcttcaaacggctcggctcggcgcgcaaggagcgcatcgtgctgccgggcttctatcacgacacgctcggcgagcgcgaccgtgcacaggcgctcgcgccgctgcgcgcgttcgtgctgcgcgaattcgatgcgccgagcccgcgcgtgtcgctcgtcgatgccgaccggcgcggcgcgttccacgacgaatatgcggcgctcggccggccgccggccaacgtgttcgcgcgggcgtactgggcgctcacgcgcgccggcctgaaagccggcggcgcgctgtcggacggcatcgcgctcgggctgcggctcggcttcgattcgggctcgacgctcgactacgtgtaccgcaaccgcgcgcaggggcggctcggcatcggcgcgctgatcgaccgcacgtatctcgattcgcccggctgggtcggcatccgccagcgcaaggtgcatctgcaggaactgatcggcgcggcgatcggccgcctgcgcgggcacggctcgccggtgcggatcgtcgacatcgcggccggccacgggcgctacgtgctcgacgcgatcgcaatggccgccgagcgcgacggcgcggcgcccgacgacatcacgctgcgcgactacagcccgccgaacgtcgaggccgggcgcgtgctgatcgcgcagcgcggcctcgagccgatcgcgcgcttcgaacgcggcgacgcgttcgacgaggcgtcgctcgtgacgctcgagccgcggccgacgctcgcgatcgtgtcgggcctgtacgagctgttcggcgagaacgcgctgatcgagcgttcgctgcgcgggctcgcgcaggccgtgccaccgggcggctatctcgtctatacggggcagccgtggcatccgcagctcgaattcatcgcccgcgcgctgaacaaccaccgcggcgaatcgacctgggtgatgcgacgccgttcgcaggccgaaatggacgagctcgtcgcgcgggcgggcttccgcaagctcgaccagcggatcgacgagatgggcatcttcacggtgagcctcgctcagcgggtcgacgcgtca

SEQ ID NO: 11717 - DNA, 237 bp, Burkholderia cepacia
atggacaacatcgaacaacgtgtcaagaagatcgtcgctgaacaactgggcgtcgcggaagccgagatcaagaacgaagcttcgttcgtgaacgacctgggcgcggactcgctcgacacggtcgaactggtgatggctctcgaagacgagttcggcatggaaatcccggacgaagaagcagagaagatcacgaccgttcagcaagcgatcgactacgctcgcgcaaacgtcaaggcg

SEQ ID NO: 11718 - DNA, 444 bp, Burkholderia cepacia
atgagtttgaaagagcagatcagcgaagacatgaaggccgcgatgcgcgcgaaggacagcgagcgcctggcaacgattcgcctgctgatggccgcgatcaagcagcgcgaagtcgatgaccgggtcacgctcgacgacgcgggcatcacggccgtgatcgacaagatgatcaagcagcgcaaggattcgatcagccagttccaggcggccggccgcgacgatctcgtcgcgaaggagcaggccgagctgaccgtgctgggcggctacatgcccgcgcaactgtcggacgccgaagtggcggccgaagtccaggcggcggtcgcgcaaaccggcgcagccggcccgcaggacatgggcaaggtgatgggcgtgctgaaggccaagctcgccggccgtgccgacatgacggccgtttccgcgcaggtcaaggccgcgctcacgaag

SEQ ID NO: 11719 - DNA, 975 bp, Burkholderia cepacia
atggattacacgaagagcaacagctattcgattgccgacaacggcaatcggatgcatgacgaccgcaagcccgtcccaactgcagttgaggacacggacatgaacatggtgatctggagcctgatgcaggtcatcaaggccgcagcgctggaaggtaagtcgtttgacccggcgtcggaggaaacctacagcgtgttcctgaatgcgctgaagcagctgtttccgcttcgcgaagacatgacaggcgcggttcgctattacgcggcggtgccggcccagcgggccgagccggtgatctatgtgcccgcattcggcctgatggaatggcttgccgatcggaactattaccgatcactcgattgtggccagctcgtgttgagcggatcggccgcgcggcgcggaacagtggcggccgacggctcggccaagtcgaagaccgatctgcgcggactgtacgactgggcgggtgagaacgggctcatcgtcgcggccgccaactggtcacctggtgtctacgcgttctgcgacatcgacgccaatcagttccggttgccggacgtccgtggtgaagggctacgtctgtgggacaacggccgcggcgtcgaccaggcacgcactcttggctcttggcaaggcggtgccatcgagtctcacgggcacgcggcaaacagcggtgacgcgggcgcggttgcggatcgtcgaactggctccggtggcggccacaaccacaataacggcattttcacgcgcctgttgagggcgccctacgtaggttcgatcacaggcagcgacaccacaaacagcggagacgagcaggccgttgggggtggtgattcggctgacattgcggcggtcggagatcacgaccacctcattccgggcgtaggaccacaccgtcacgacatctcgatctccgcgaccggcggcaacgaaacgcggatgcgcaacgtcgccgtcgcagcgctcatcaaaatc

SEQ ID NO: 11720 - DNA, 1326 bp, Burkholderia cepacia
atgtccgctttcggtgctgcgcgaaaggccgcgcgcccacggggccagtgggaacgcgcaggactactcaatgcagcaggcgtcgccatgcgttttcacgaaaaaaagagcgccgcccgcccgattgcgtcgccccgcgatccgcacgatgcgcgttacccggcggccattgaagaaaaggacaaaaatatgtggaagcgtcatgtggtgaaaaagaacgaacgcgcgctgctgatgagcgagggcgacttcgtgaaggtgctggaaccgggcgtgttcaaggccttcgatccgttcaagcgcctgtcggtgcagaccgcgcgtctcgacgcgccgctcgccgacgacgcgctggccgactacctgcgtcacgacgcaccggacgtgctcgcgcggtatttcgtcgcgatggatctcgccgacgacgaagccggcctgcgctatgaagacgacgtgctcgtcgagattctggcacccggcacgcgccggctgtactggcgcggcctgaccgcgcatcggctggagcgcatcgacctcgcgcaggacagcatgctgcctgcggcgctggtgaagcgcatcgcgcaaccgtcgctgcgtgcgcgcggcgtggcggggctgacgggcgtgctcctggcgcaggtgccggcgtaccacgtcgccgtgctgaaggtcgacggcaagatcgagcggctgctggacgcgggtgcgtcggcgttctggcgcttcaaccgcgacgtcgcggtcgagctggtcgacctgcgcttgcaggcgatcgaggtcggcgggcaggaaatcctgacgcgcgacaaggtcgcgctgcggctgaacctgtcggcgacgtggcgctatgcggacgtgctgcatgcgttcggccagttgcagaagccggtcgaacacctgtaccgcgagttgcagttcgcgctgcgttcggcggtcggcacgcgctcgctcgacgagctgctggaggacaagcagtcgctcgacgaggtcgtgatcgcgcaggtgcgcgcccgtctcgacggttcgggcgtggacgtgcgcagcgtcggcgtgaaggatatcgtgctgccgggcgacatgaagacgattctcgcgcaggtggtcgaagcggagaaatccgcgcaggcgaacgtgattcgccgccgcgaggaaacggcggccacgcgttcgctgctaaacaccgcgaaggtgatggaagaaaacccgaccgcgctgcggctcaaggagctggaaacgctcgagcgcgtcgcggaacggatcgaccgcatctcggtgttcggcggtctcgaccaggtgctgaacgggctcgtcagcatcaagggcacg

SEQ ID NO: 11721 - DNA, 711 bp, Burkholderia cepacia
atgtccaatgcctataaacgcgtcctcctcaaactctccggcgaagcgctgatgggcgacgatgccttcggcatcaatcgcgcgacgatcgaacggatggtggccgatatcgccgaagtcgtgcgtctcggcacgcagctcgcggtcgtgatcggtggcggtaatattttccgcggtgtcgcgggcggcgcggccggcatggaccgcgcgacggccgactacatggggatgctggcgacgatgatgaacgcattggcgctgcaggacgcgatgcgccacgcgggcatcgaggcgcgcgtgcagtccgcgctgcgcatggaccaggtcgtcgagccgtacatccggccccgcgcgatccgtcagctcgaggaaggccgcgtcgtgatcttcgcggccggcaccggcaacccgttcttcacgacggataccgccgccgcgctgcgcggctcggaagtgggcgccgaagtcgtgctgaaggcgaccaaggtcgatggcgtatattctgccgatccgaagaaggatccgtcggccacgcgctacacgacgatcagcttcgacgaggcgatcagccgcaacctgcaggtgatggacgcgacggcgtttgcgctgtgccgcgaccagaagctgccgattcgcgtgttttcgatcaacaagccgggcgcgctcaagcgcatcgtgctgggcgaggacgaaggtacgctcgtccacgtg

SEQ ID NO: 11722 - DNA, 1995 bp, Burkholderia cepacia
atgacagtgaatgcgccccccttccggaccggaccggctccgcgccgcatccggccgcccgcccgatatgccgggctggccgcgctgctgacgctggcgctcggcctgacggcaacatttgcggcatcccgggtactggagaacaatgtccggcacgctacccaggtgagattcgagcaagccgccacccgcgcgacggccggcctgcggcgcagcctcctcgacgccgcagttatattgcgcggcacccgcgcgtttgcatcggcactgtcggcggagccatccggcgccgcatggctccgctatctcgccagtctcgatctggacgcgttgcaatcgccggtccgcagtctcggaagaatcgagccgagcgccgccgaggacaatcaggcaacgcgacaggcgctgcagcgggcggcagaaaccggcaaggtcgctttggccgcgaacgcgatacaggacagtatcgatacggcgttcgcccggacggaactaacgttgtatctgccgattggtgcaaaagcggaagacggcacatcgttcgaggcgcggcacgcgacggcgaccggatacgtttatgccgcactgaatccagaccgtctggtcgatccgtccctgctcgatcgactgcatctggaaatcgtcgccgacaccccagcggcgccggtctacaccgccggtttcagcggcgacgatgccaccgattcccgcaaagcgctcgagcgaactgattcgctcgtgttcggtggcacgccgctgtcgctgcactatcgcgcggcgtccgccgacacggcccgcaccgcaatggccgtgctgctgaccggcaccgtgctctcgctaacgttggccgcgctcgtgcggcagatcctctcgcaacgcacacgtgtcgccgagaccgccggcaacagtcaaccgacggaggcccggatgatgggcatcatccggtcgtcgatggaggctatcgtcacggtcgacgagaaccagacgatcgtgatcttcaaccctgccgccgaacacgtgttcggcgtttccgcgatggaggcggtcggcgcgccgctgtcccgcttcatccccgaacgctttcgtgccgcgcatgcgcggcacgtcgagcaattcggcgtgaccggtgtgtctgagcgccagatggggcgacaacgcgtgctgttcggcttgcgcggtgacggcaccgagtttccgatcgaggcgtcgatctcgcagattcgcgacggcgccggcaagctgtacacggtgatgctgcgcgacgtcaccgagcgggtgcgagcggaaaacgccctcaagcagtcgcgcgaggagttgcgcgacctgtccgccaacctgcagaacgtgcgcgaggaagaaaaaacacggattgcgcgcgaattgcacgacgacctcggccagcaactcacggcgcttaagatggacctgtccgccgtcgaactgggacttgcgggcgtcgtcgcgccccacaccggcgtgcgcgagcagttgggtgccatgcatcgcctgatcgattcgaccgttgcgtccgtgcgacgcatcgcggccgatctgcggccggtgatgctcgacgacctgggtctcatcccggcgatcgagtggcttgcaaacgatttcacgcgccgctaccggatcacggtcgaccgtgacatcgggccggtcgacaccaagtttaccggcgccggcgcgaccgcgttgttccgcatcgtacaggaggcgctgaccaacgtcgcgcgacattcggatgcgacgaatgtgacgctgaccttgaaaacggcagacggctattgcatgctgcgcgtcgcggacaacggccacggcgcgccgaaacacccccgcgacagtcaggatcgcccgtcgttcgggctgatcggcatccgcgagcgcgcgcacatgctcgacggcacggtgacgatcgacaaccggccgggctcgggattcacgatcaccgtggcgctgccgcttcacgccatccagcaaggagacgtgctgtca

SEQ ID NO: 11723 - DNA, 1575 bp, Burkholderia cepacia
atgacgacccgcatctacgttccgcgcgattcgtccgcgctggcgctcggcgccgacgcgctcgccgccgcgatcgtggccgaagccgaacggcgcggcgtcgcgatcgaactggttcgcaacggttcgcgcgggctgctgtggctcgaaccgctcgtcgaggtcgggacggccgcgggccgcgtcggctatgcgaacctgtcggccgccgacgtgccggccctgttcgacgccaactggctcgacggcggcacgcatccgagcagtgtcggcctcgtcgacgcactgccctacctcgctcgccagcagcgactcacgttcgcgcgcatcggcctgaccgatccgctgtcgatcgacgactatctgcaacacggcggcctcgccggcctgaagaacgcactggcgctcgacggcgatgccgcctgcgaaacgctgatcgaatcggggctgcgcggccgcggcggcgcggcgttcccggccggcatcaagtggcgtaccgtgcggcaagcacgcgccgcgcagaaatacatcgtctgcaacgcggacgaaggcgattcgggcacgttctccgaccgcctgctgatggagtgcgatccgtactgcctgatcgaaggaatgatcatcgcgggcgtcgccaccggcgcgacggtcggctacatctacgtgcgcagcgaatacccgcacgcgatcgccacgctcgaagccgcgatcgtccgcgcgcgtgaagccggctggctcggcgagcacgtgctcggctccgcgcatgcgttcgagctgcaggtcgcgaaaggcgcgggctcgtacgtgtgcggcgaggaaacggcgctgctcgaatcgctggagggcaagcgcggcgtcgtgcgcgcgaagccgccgctgcccgcgctcgcgggcctgttcggccagccgaccgtcatcaacaacgtgatcacgctcgcgacggcgccggtgatcttcgcgcgcggcgccgcgttctatcgcgattacgggatgggccgctcgcgcggcacgctgccgttccagctggcaggcaacatccgtcacggcggcctcgtcgagcttgcgttcggcgtcacgctgcgcgagctgctgttcgacttcggcggcggcacggccagcggccggccggctcgcgccgcgcaggtcggcggcccgctcggcacctacctgcccgaccatcagtgggacgtgccgctcgactacgaggcgtacacggcgatcggcgcggtcgtcggccacggcggcatcgtgctgcacgacgacacgtcgaatctcgccgagctggccgaatacgcgatgaagttctgcgcgatcgaatcgtgcggcaagtgcacgccgtgccggatcggttcgacgcgcggcgtcgagacgatcgcgcggattcgcgacggcgacacgtcggagcggcaggtcacgctgttgcgcgacctgtgcgacacgatgctcgccggttcgctgtgcgcgatgggtggcatgacgccgtacccggtgctgtccgcgctcgaccatttccccgaagatttcgggctcgcagccggcaaggatgccgcgtcgggcccggtcaaggctgcggcc

SEQ ID NO: 11724 - DNA, 1062 bp, Burkholderia cepacia
atgctgctgctgaaccccggcccggtcacgctcaccgaacgcgtgcgccgcagcctgctgcaacccgatctgtgccatcgtgaaagcgaattcttcgacctgcaggatgaagcgcgcacgcgcctcgtcgccgcgtacgaactcgatccggccgaatgggcggccgtactgatgacgggctcgggcacggccgccgtcgagagcatgatcgcggcgctcgtgccgcaggacggcaagctgctcgtgatcgagaacggcgtgtacggcgagcgaatcacgcagatcgcgacgcagtacggcatcgcgcatgacgtgttgaagcatgagtggatgcaggcgcccgatctcgcgcggatcggggcgaagctcgatgcgggcgggtattcgcacgtcgcggtgatccatcatgaaacgacgacgggccggctgaacgatctcggcgcgattgcagaagtgtgccgtgcgcgcggcgtgaagatgctcgtggacggcgtcagcagcttcggcgcggaagcgatcgacttcgccggcggcgtcatcgatgcggttgccgcgaccgcgaacaaatgcctgcacggcgtgccgggtgcggcgttcgtgatcgtgcgccgcagtgcgctcacgaaggccgcaagccggacttactacctcgatctcggtcggctcgcgaagctgcaggatcagcggaatacgccgtttacgccttccgtgcatgcgtattacgcgctcgtcgaggcgttgcgcgagtttgacgaggctggcggctggcgtgcccggcatgcgcattacaaggcgcttgccgatcaggcgcaggcagggcttgctgcgcgcgggatgccgctggtgctgccggaaggtgcgtcgtcggtcgtgctgcgtgcgtatcggttgccgcagggtgtcacgtacgagacgctgcacgacgggttgaaggcgcgtggcttcgtgatttatgccgggcaaggcgggctctcgaaggagctgttccggatctcgacgatgggcgcgattcaggcggccgatgtcgagcggttgctggaagggtttacggcgctgacgcgg

SEQ ID NO: 11725 - DNA, 2481 bp, Burkholderia cepacia
atcctgccgcacgccctcccgttttgggtgttgaccaagccgctgaagaagaaggaaatctcgcgcctgatcaacacggcattccgcaagtccggtctgcgcgcgacggtggtgttcgccgaccagctgatgcagtcgggtttccgtctcgcaacgcgtgccggcatctcgatctgcgtggacgacatgctcgtgccgccgcagaaggaaacgatcgtcggcgacgccgcgaagaaggtgaaggagtacgaccgccagtacatgtcgggtctcgtcaccgcgcaggaacgctacaacaacgtggtcgacatctggtcggcgacgtcggaagcggtcggcaaggcgatgatggagcagctgtcgacggagccggtgatcgatcgcgacggcaacgagacgcgccaggagtcgttcaactcgatctacatgatggccgactcgggcgcccggggttcggcggttcagattcgtcagctggctggtatgcgaggcctgatggcgaagccggacggctcgattatcgagacgccgattaccgcgaacttccgcgaaggtctgaacgtgttgcagtacttcatctcgacccacggtgcacgtaagggtctggctgatacggcactgaagaccgcgaactcgggttacctgacgcgtcgtctcgtcgacgtcacgcaggatctggtcgtggtggaagacgattgcggcacgtcgaacggcgtggcgatgaaggcgctggtcgaaggcggtgaagtcgtcgaagcgctgcgcgaccgtatcctcggccgcgtcgcggtcgcggacgtcgtgaatccggaaacgcaggaaacgctgtacgaatcgggcacgctgctcgacgaaacggcggtcgaggaaatcgaacgcctcggcatcgacgaagtgcgcgtgcgcacgccgctgacctgcgaaacgcgttacggcctgtgcgcagcctgctacggccgcgacctcggccgcggctcgctcgtgaacgtcggcgaagcagtcggcgtgatcgcggcgcagtcgatcggtgaaccgggcacgcagctgacgatgcgtacgttccacatcggtggtgcggcatcgcgtgcggcagtggcttcgtcggtcgaagcgaagagcaacggtatcgtccgcttcacggcgacgatgcgctacgtcacgaacgcgaagggcgagcagatcgtcatttcccgttcgggcgaagcgatgatcaccgacgacttcggtcgcgagcgcgagcgtcacaaagtgccgtacggcgcgacgctgctgcagctcgacggcgcgaccatcaaggccggcacgcagctcgccacgtgggatccgctgacgcgcccgatcatcaccgagtacggtggtacggtgaagttcgagaacgtcgaggaaggcgtgaccgtcgcgaagcagatcgacgacgtgaccggcctgtcgacgctggtcgtgatcgacgtgaagcgccgcggttcgcaggcttcgaagagcgtgcgtccgcaggtgaagctgctcgacgcgaacggcgaggaagtgaagattccgggcacggagcacgcagtgcagatcggcttccaggtcggcgcactgatcaccgtgaaggatggtcagcaggtgcaggtcggtgaagtgctcgcacgtatcccgacggaagcgcagaagacgcgtgacattaccggcggtctgccgcgggtggcggaactgttcgaagcgcgttcgccgaaggatgccggcattctcgcggaagtcaccggtacgacgtcgttcggcaaggacacgaagggcaagcagcgtctcgtcatcacggacctcgagggcaaccagcacgagttcctgatcgcgaaggaaaagcaggttctggttcacgatgcacaggtcgtcaacaagggcgaaatgatcgtggacggtccggccgatccgcacgacatcctgcgtctgcagggtatcgaggcgctgtcgcgctacatcgtcgacgaagtgcaggacgtgtaccgcctgcagggcgtgaagatcaacgacaagcacatcgaggtgatcgttcgccagatgctgcgtcgtgtgcagatcaccgacaacggtgatacgcgcttcatcccgggtgaacaggtcgaacgttccgacatgctggacgagaacgatcgcatgatcgccgagggcaagcgcccggcttcgtacgacaacgtgctgctcggtatcacgaaggcatcgctgtcgaccgactcgttcatctccgcggcatcgttccaggaaacgacccgcgtgctgaccgaagcggcgatcatgggcaagcgcgacgatctgcgcggcctgaaggaaaacgtgatcgtcggccgtctgattccggccggtacggggctcgcgttccacaaggcacgcaaggcgaaggaatcgtcggatcgcgagcgtttcgaccagatcgcagcggaagaggcattcgacttcggcacgccgagcgcgccggcggaagagccgcaacacccggcagccgag

SEQ ID NO: 11726 - DNA, 1344 bp, Burkholderia cepacia
atgcacgacaaaatcctgattctcgacttcggttcgcaagtcacccaactgattgcacggcgcgtgcgtgaagcgcacgtctactgcgaaatccatccgaacgacgtgtccgacgacttcgtccgcgagttcgcgccgaaggcggtgatcttgtcgggcagccacgcgagcacgtacgaagaccaccaactgcgcgcgccgcaggccgtatgggatctcggcgtgccggtgctcggcatctgctacggcatgcagacgatggccgtgcagctcggcggcaaggtcgagtggagcgaccatcgcgaattcggctatgcggaaatgcgtgcgcacggccatacgcgcctgctcgacgacatcgaggatttcacgacggccgaaggccacgggatgctgaaagtctggatgagccacggcgacaaggttgccgagctgccgccgggcttcgcgctgatggcgtcgacgccgagctgcccgatcgccggcatggccgacgaggcgcgcggctactacgcggtgcagttccacccggaagtcacgcacaccgtgaagggccgccagatcatcgaacgcttcgtgctgcagatcgccggcgcgaagcccgactggatcatgaagaaccacatcgaggaagccgtcgcgaagattcgcgagcaggtcggtgacgaggaagtgattctcggcctgtcgggcggcgtcgattcgagcgtcgcggccgcgctgatccatcgcgcgatcggcgatcagctgacctgcgtgttcgtcgaccacggcctgctgcgcctgaacgaaggcaagatggtgctcgacatgttcgagggccgcctgcatgcgaaggtcgtgcacgtcgatgcatccgaccagttcctcggccatctggccggcgtgaccgatccggaagcgaagcgcaagatcatcggccgcgagttcgtcgaggtgttccaggccgaggcgaagaagctgtcgaaggcgaagtggctcgcgcagggcacgatctacccggatgtggtcgaatcgggcggcaccaagacgaagaaggcgacgacgatcaagagccaccacaacgtcggcggcctgccggaaacgctcggcttgaagctgctcgagccgctgcgcgacctgttcaaggacgaagtgcgcgagctgggcgtcgcgctcggcctgccgccggagatggtataccgccatccgttcccgggcccgggcctcggcgtgcggattctcggcgaagtgaagcgcgagtacgcggacctgctgcgccgcgcggacgcgatcttcatcgaggaactgcgcggcacgacggcaaccgcgcaggatgcggctgccggcctgtcggcgaggccg

SEQ ID NO: 11727 - DNA, 1524 bp, Burkholderia cepacia
atgaccgaaccgacccaaacgcagcccgccgtcacggcggacgaaaaccagatcatcgccgagcgccgcgagaagctgcgcgcgttgcgcgagcaaggcgtcgcctacccgaacgacttccgccccgagcaccacgcagccgacctgcaggcgaaattcgccgattcggacaaggccgcgctcgaagcgaacccggtcgaggtgtcggtcgccggccgcatgatgctcaagcgcgtgatgggcaaggcgagcttcgcgacggtgcaggacggctcgggccagatccagttcttcgtgacgccgaacgacgtcggcgccgagacctacgacgcgttcaagaagtgggacctcggcgacatcgtcgccgcgcgcggcgtgctgttccgcaccaacaagggcgagctgtcggtccagtgcaaggagctgcgcctgctgtcgaaggcgctgcggccgctgccggacaagttccacggcctgtccgaccaggaaatgcgctatcgccagcgctacgtcgacctgatcgtcacgccggaaacgcgcgacacgttccgcgcccgcacgaagacgatcgcgtcgatccgcaagttcatggacaacgccgacttcatggaagtcgagacgccgatgctgcacccgatcccgggcggcgcggccgcgaagccgttcgtcacgcatcacaatgcgctcgacatgcagatgttcctgcgtatcgcgccggagctgtacctgaagcgcctgatcgtcggcggcttcgagcgtgtgttcgagatcaaccgcaatttccggaatgaaggcgtgtcgccgcgtcacaacccggaattcacgatgatggagttctacgccgcgtacaccgactaccgctggctgatggacttcaccgagcaactgatccgccaggcggcgatcgatgcgctcggcaccgcgacgatccagtaccagggccgcgagctcgacctcgcgaagccgttccatcgcctgacgatcacgcaggcgatccagaagtacgcaccggactacaccgacggccagctgtcggacgacgcgttcctgcgcaccgagctgaagcgcttcggcgtcgacgtgtcgcagccggcgttcctgaacgccggcatcggcgcgctgcaactcgcgctgttcgaggaaacggccgaagcgcagctgtgggaaccgacgttcatcatcgactacccggtcgaggtgtcgccgctcgcacgcgcatcggatacggtgccgggcatcaccgagcgtttcgagctgttcatgaccggccgcgagatcgcgaacggcttctcggagctgaacgatccggaagaccaggccgcgcgcttcaagaagcaggtcgagcagaaggatgcgggcgacgaggaagcgatgttcttcgacgccgactacatccgcgcgctcgaatacgggatgcccccgaccggcggctgcgggatcggcatcgaccgtctcgtgatgctgctgaccgacagcccgacgatccgcgacgtgctgctgttcccgcatctgcgccgcgaagac

SEQ ID NO: 11728 - DNA, 1788 bp, Burkholderia cepacia
gtgtggtcctcgatctggccctttcagcctgccattccggccggcgtggcacagcgagccatgcacaatcagatttttatgtccgacctgcaaacctccaacccgaataccgaatcctttgcggctctgttcgaagagtcgctgacccgccaagacatgcgcgccggcgaagtgatttccgccgaagtcgtgcgcgtcgaccacaacttcgtggtcgtcaatgcaggcctgaagtccgaggcttacattccgatcgaggaattcctgaacgatcagggcgaggttgaggtgcagtcgggcgatttcgtgtccgtcgcgatcgacgcactcgaaaacggctacggcgacacgatcctgtcgcgcgacaaggcgaagcgccttgcatcgtggctgtcgctggaaaaggcgctcgacaacaacgagctcgtcaccggcacgatcaccggcaaggtgaagggcggcatgaccgtgatggtcaacggcatccgcgcgttcctgccgggttcgctggtcgacacgcgtccggtcaaggacacgaccccgtatgaaggcaagacgctcgagttccgcgtgatcaagctcgatcgcaagcgtaacaacgtcgtgctgtcgcgtcgtgcagtgatcgaagcaacccagggcgaagagcgcgcgaagctgctcgagacgctgaaggaaggcgcgatcgtcaacggcgtggtcaagaacatcaccgactacggcgcgttcgtcgacctcggcggcatcgacggcctgctgcacatcaccgacatcgcatggcgtcgtgtgcgtcacccgagcgaagtcctgtcggttggccaggaagtcaccgcgaagatcctcaagttcgaccaagagaagaaccgcgtctcgctgggcatcaagcaactgggcgacgatccgtgggaaggcatctcgcgccgttacccgtcgggcacgcgcctgttcggcaaggtcacgaacatcaccgactacggcgcattcgtcgaagtggaatcgggcatcgaaggcctcgtccacgtgtcggaaatggactggaccaacaagaacgttgcgccgtcgaaggttgtccagctgggcgacgaagtcgaagtcatggtcctcgagatcgacgaagaccgtcgtcgtatcagcctcggcatgaagcagtgcaagccgaatccgtgggatgacttcagccgcaacttcaagaagggcgacaagatcacgggcgcaatcaagtcgatcaccgacttcggcgtgttcatcggtctgccgggcggcatcgacggcctggtccacctgtcggacctgtcgtggagcgaagccggcgaagaagccgttcgcaagtacaagaagggcgacgaagtcgaagcaatcgtgctcggtatcgacgtcgagaaggagcgcatttcgctcggcatcaagcagctcgaaggcgacccgttcagcaactacgttgcaatgaacgacaagggctcgatcgtcgacggcgtcgtgaagacggtcgatgcgaagggtgcggtcgtcacgctgacgggcgacgtcgaaggctacctgcgtgcgtcggaaatctcgcaggatcgcgtcgaagacgcacgcaacgtgctgaaggagggcgacaaggtcaacgcgatggtgatcaacatcgatcgcaagtcgcgcggcatcaacctgtcgatcaaggcgaaggattcggctgaacaacaggaagcgatccgcggcctgcagtcggactccagcgctgctgcgaccggtacgaccaacctcggcgcgctgctgaaggcgaagctcgacggccagaaccag

SEQ ID NO: 11729 - DNA, 1463 bp, Burkholderia cepacia
atgaccgccagtggaaccccgacgcgtgacgcccgagggcccacgcgcctccagaccatgttacgccagccgttcgcggccggcgtcgttgcgctgtgcgcgggcgccgtgctgtcgctcggcgtcgcgctgctggtgcgcgagcagtggcaaggcgccgttcacacacgtttcgaacgccgcacgtcgcacgtgaccgcgatgctgcgccacgaactgcaggccggtgtcgccgtgctcgaaggcgcgcgcggcgcgttcggcctcgtcccggacatgacgcccggccaatggcgccggtatgcggagacgctcgatctcgacagcggccgctcgccggtccggcagatcggctatgcgccgctgacgcccgcggcgcgcgccgcgctggccggcgcgaagccgctgccggccgatccgctcgcggctgcgacgctcagcgcgcccgtctcgaactcgccggtcgtgcgcttcggtgcgtccgacgcggcgccgctcacgcgcgcgctgcgcaccggcgatatcgcgctcggcgttcaccctgccgacgacgacacttcccgcgacgcccgtaccctgacgctgttcctgcccgtggcgtcttcgccgctggcggccgccaagccctccggcacgcgggaaggcggcgccgacgggatgctgttcgcggcgctgagcccgcggcgcctgatcgagcgggcgctcgatgcggagcgcggaatcgacctgtggatgaccgccggcggcgatgcgcgcgcgatcgccagcgtcgagacgacgaccgacgaagcatcggcgtcacccgacctgatgcggcgcaccgatgtgctgaatttcggcggcaccgcgctgacgctcgcctattccgcggacggccggccgagcgcgaccggcgcgcagcgtgcggccggcaccgtgctcgccgccgggctgatcgcgtcgttcgcgttcgcggcgctcgtccatgcgttgctgcgcgggcgcgccgacgccggtgcaagcagccgcggcatcctcaacgaggcgcggatgatgggcatcatccgttcgtcgatggaagcgatcatcacgatcgacgagaagcagacagtcgtgatcttcaacccgatggccgaacaggtgttcggcgtgtccgcgatggaagcgatcggcgcgccgctgtcgcgcttcattcccgaacggttccgcgccgcgcacgcgaagcacgtcgaccagttcggcgtgacgggcgtgtccgagcggcagatgggccgccagcgcgtgctgttcgggctgcgggccaacggcgaggaattcccgatcgaagcgtcgatctcgcagatccgcgacgcgtcgggcaagctgtatacggtgatgctgcgcgacatcaccgagcggcaacgggccgaaaatgcgttgaagcaatcgcgcgaggaattgcgcgaattgtccgcgaacctgcagaacgtgcgcgaggaggaaaa

SEQ ID NO: 11730 - DNA, 1203 bp, Burkholderia cepacia
atgcactacacggcgatggcggccgcgcatttcgccccggacgcgcggtgcggcgccgcgaacggcgtcgacgcgccgtggctggcgacgaccgtcgcgctgtttacgatggcaacgctggtcgtcacgctgctcgtgtgccgtttcgatgcgcgcaccactttcctgcgcggcatgaccgatacgctcgaacggctcgtgcgggtgcgaaccagcgaactcgaacgcgcgctgcacagctacgagcagacgacgcagatgctgcaacgcacgcgtgagaacatggcgaccgagatcgacgagcgcaaggccgcgcacgcgctgctcgaacaggagaaggacgagcagcgacgcctgctgcatgcgctcgaggaaacgcacgagcagttgctgcagtcggaaaaactcgcgtcgatcggccagctcgcggccggcgtcgcgcacgagatcaacaatccgatcggcttcgtcagcgcgaacctcaacacgttgaagacgtgggtgcgcagcctgctcgacgtggtcgcggcgcatgaagccgcgctgccgcagctcgatccggccacccgcgacgcgctgacggccgcgcaccgcgcggcggatctcgactacgtccgcgacgagatcgcgacgctgatcgacgaatcgatcgacggcgcgctgcgcgtgcggcgcatcgtgcaggacctgcgcgatttctcgcgcccggccagcgacgaatggagcgtggtcgatctccatgcgggcctcgagagcacgctcaacgtcgttcacaacgagctcaagtacaaggccgacatcgtgcgcgattacggcgacgtcccgcacgtcgaatgcctgccgtcgcagttgaaccaggtgttcatgaacctgctggtcaacgccgcgcaggcgattcccgagcgcggcgtgatcacgatccgcacgtcgagcgatggcgaacaggtgtcgatcgcgatcagcgataccggcgccggcatgacacccgacgtcgtgcggcggatcttcgatccgttcttcaccacgaagccggtcgggcagggcacggggctcgggctgtcggtctcgcacggcatcgtcgagcgtcatcgcggcgcgatcgacgtgaccagcgagccggggcgcggcacgaccttccggatacggttgccggttcggcgtgccggcgaccgcgcggacgccgcagcgctggagcagcgggtt

SEQ ID NO: 11731 - DNA, 2052 bp, Burkholderia cepacia
ttggcgcacgcggccgctgcccggctcacgcccccgccgcccgcccgcttccgccggcgccgcaggcccgtcggctgtgggataatcgcggagtttgcccagggcgcagctcaagaggttgttcgcacgggcgcgagagaggcctttattcccgtgcctccacccttttcccgcgatatttcttcagccatcaccatgcccacttaccgctccaaaacctctaccgccggccgcaacatggcaggtgcgcgctcgctgtggcgcgccaccggcatgaaagacgacgatttctcgaagccgatcatcgcggtcgtcaactcgttcacgcaattcgtgcccgggcacgtgcacctgaaggatcttggccagctcgtcgcgcgcgagatcgaggccgccggcggcgtcgcgaaggaattcaacacgatcgcggtcgacgacggcatcgcgatgggccacgacggcatgctgtactcgctgccgagccgcgacatcatcgccgactcggtcgaatacatggtgaacgcgcactgcgcggacgcgatggtgtgcatctcgaactgcgacaagattacgccggggatgctgatggccgcgatgcgcctcaacattccggtgatcttcgtgtcgggcggcccgatggaagccggcaagacgcgcctcgcgaacccggtcaccaagaccgtcgaactgaagaagctcgacctcgtcgacgcgatggtgatcgcggccgaccagtcgtattcggacgccgacgtcgccgaagtcgaacgctcggcctgcccgacctgcggctcgtgctcgggcatgttcaccgcgaactcgatgaactgcctgaccgaagcgctcggcctgtcgctgcccggcaacggcacggtggtcgccacgcacgccgatcgcgaacaactgttcaagcgcgccggccgccgcatcgtcgaactgacgcgccagcactacgagcaggacgacgaacgcgtgctgccgcgctcggtcggcttcaaggcgttcgagaacgcgatgacgctcgacatcgcgatgggcggctcgaccaacacgatcctgcacctgctcgcgatcgcgcaggaagccggcatcgacttcacgatgaaggacatcgaccgcctgtcgcgcaccgtaccgcagctgtgcaaggtcgcgccgaacacgaacaagtaccacatcgaggacgtccaccgcgcaggcggcatcatggcgatcctcggcgagctcgagcgcgccggcaagctgcacaccgacgtgccgaccgtccacgcgccgacgctgaaggatgcgctcgaccaatgggacatcgtcctcacgcaggacgacgcggtccgcacgttctacctggccggcccggccggcatcccgacgcaggtcgcgttcagccagaacacgcgctggccgagcctcgatctcgaccgcgccgaaggctgcatccgctcgtacgagcatgcgttctcgaaggaaggcggcctcgcggtgctgacgggcaacatcgcgctcgacggctgcgtcgtgaagacggccggcgtcgacgagagcatcctcgtgttcgaaggctccgctcatgtgaccgaatcgcaggacgaagcggtcgagaacatcctgaacgacaaggtcaaggccggcgacgtggtgatcgtgcgctacgaaggcccgaagggcggcccgggcatgcaggaaatgctctacccgaccagctacatcaagtcgaaggggctcggcaaggcgtgcgcgctgctgacggacggccggttctcgggcggtacgtcgggcctgtcgatcggccactgctcgccggaagcggcagcgggcggcgcgatcggcctcgtgcgcgacggcgaccggatccgcatcgacattccgaaccgcacgatcgacgtgctggtgtcggacgaggaactggcgcgccgccgcgaagagcagaacgcgaagggctggaagccggcgcagccgcgtccgcgcaaggtgtccgccgcgctgaaggcatacgcgaagctggtcatgtcggccgacaagggcgccgtgcgcgatctgtcgctgctcgacgac

SEQ ID NO: 11732 - DNA, 1650 bp, Burkholderia cepacia
atggcggtatttcaagattcttacggagtccccatgctttcaagacgctacctcgcgatgtggtgtgctgtcctgctgctcatcgccgcggccgcactcgcgtcgatccacgtgctttcgtggctgtggatcatcctccccgtcgccctcgtcgcgctcggcctgtacgacctgaaccaggaccgccacgcgatcctgcggaactacccgctctggggccacttccgcttcctgttcgaattcatccgacctgaaatccgccagtacttcgtcgaggacgacaccgacgagaaaccgttctcgcgtgcgcagcgcagcctcgtctaccagcgcgcgaagaacgtcgccgacaaccgcccgtacggcaccgagctgaacgtgaaggccgtcgcgcacgaatggatcagccattcgctcgcgccgacgaagctgccgaaccacgatttccgcatccgcgtcggcgcgagtcgcgcgcaaccgtacgacatttcgatcttcaacatctcggcgatgagcttcggctcgctgtccgcgaacgcgatccgctcgctgaacctcggcgcgaagaaaggcggcttcgcgcacgacaccggcgaaggctcgctgtcgaagtaccaccgcgagcacggcggcgacatcatctgggaaatcgcgtccggctacttcggctgccgcaacgacgacggtacgttcaatccggacaagttcgcgaagcaggccgccgatccgcaggtcaagatgatcgaggtgaagctgtcgcagggcgcgaagcccggccacggcggcgtgctgccggccgcgaagatcacgcccgagatcgccgagacgcgcggcgtgccgatgggcaaggactgcatctcgcccgcgacgcattcggaattctcgacgccgcgcgggctgctcgaattcgtcgagcggctgcgcacgctgtccggcggcaagccgaccggcttcaagctgtgcatcggccatccgtgggaattcttcgggatcgccaaggcgatgctcgagaccggcatcgtgcccgacttcatcgtcgtcgacggcgcggaagggggcaccggcgcggcgccgctcgaattcaccgaccacgtcggcgtgccgctgcaggaagggctgctgctcgtgcacaacacgctcgtcggaatcggcgtgcgcgatcgcgtgaagctcggcgcgagcggcaagatcatcaccgcgttcgacatcgcgcgcacgctcgcgatcggcgcggactgggtgaactcggcgcgcggcttcatgttcgcggtcggctgcatccaggcgcagcactgccacaccgaccgctgcccgaccggcgtcgcgacgcaggatccggtgcgccagcgcgcgctcgtcgtgcccgacaaggccgagcgcgtgtacaacttccaccgcaacacgctgcatgcgctgcaggaactcgtgcaggcggccggactcgcccatccgtccgagctgcgcgcgcatcacatcgtgcagcgggtcgcgccgcacgaggtgcgattgatgtcgcaactgctgaagtacctgaagcccggtgcgctgctcgacggccagacctgcggcttctcgctgtacgacaagtggtggccgatcgcgcgcagcgattcgttcacgctcggcgaagccgtgtacgcatcgatcgag

SEQ ID NO: 11733 - DNA, 1119 bp, Burkholderia cepacia
atgaaactaaagtcaggactactggcggttatggcggttgcgtcaacctcggcatcggcgcaaagctcggtgaccctatacggaatcatctcgaacgggctcggttatgtcagcaatcagggcgggcacagcaactggacaatgattagcggagccaatcagaacaatcgcctgggattcagattgaccgaagatctgggcggcggtctgtccgctatcggagtcctggagaacggcttcgatagcaacagcggcaaactggggcaaggcggccggatgttcgggcggcaggcgtttgtcgggctgtcgagtccgacgtacgggaaaattactttcggtcgacagtacgacgtgctgtgggattacctggatcgtatcgaaccacaggccatgggtccaggccttggcgtcagtgtcggcagcaacgacaatatcgaaggcaacttccgctacagcaacgccgtcaagtatacgagcccggtctggggcggcttcggattcgaatccctgtacgcgttcagcaacaaggccggcagcttccagcagaaccgtgcgttcagcgcaggcgtcaatttcgaccagcatacgcaacgatatgcgctggtctacgtcgaaatcgaccatccgggcacgggcaatccaaatggcgcggtgagcgacgactacgcaggtgctccgttccagctgttccataccagcccgctcagttcgtcggtgggcgtacggaaacagcgcgtgattgccgggggggccgagtacgagtccgaaaaactcagcctcggcgccatcgtttccgacgtgcgctacaactatctcgatagcacgagcctgcatctggacaaccttagcgtcgtcggcgtgtacaagctgacgccagccttgttcgcctcggctgcctacctgtacacgcacggcagctacggtggcgtcgtctcgaatccgcactggaaccagggacaagtgagcgtcgactatttcctttcgaagcgaacggacgtctatgcgtacgtcaactacatccgtgcctccggatccaacgcccccgccgtgttgttcctctcttcaaaatcgagcacgaatgcgcaaacggccgtggtggtaggggtgcgtcacaagttt

SEQ ID NO: 11734 - DNA, 600 bp, Burkholderia cepacia
gtgccagccgccctctccgagttttcgctgatcgaacgcttcttcacgcgccgcgccgcgcagggcgcgcgcgcgtcgacgctcggcatcggcgacgattgcgcactgattgcgccccgatccgggaaattgctggccatttcgacggacatgctggtggaaggccgacatttcttccccgacgtcgcgcccgacgcgctcggtcacaagacgctcgcggtcaacctgtcggatctcgccgcgatgggcgctgagccgcgcgcgttcacgctcgcatgcgcgctgccgcgcgccgatgcggcgtggctcgaggccttcagcaacgggctgttcgcgctggccgagcgatacggctgcgagctgatcggcggcgacacgacgagcgggccgctgaacctgtgcgtgaccgtgttcggcgaagtcgcgccggacgcggcgctgcggcgcgatgccgcgcgcgacggcgacgacgtgtgggtatccggcacgctcggcgacgcgcgcgcgggcctcggcgtcgcccgcggcgagtggacggccggcgcggacgaagccgccgcgtttcgggacgcgctcgagcggacgagccgcgctgtgcgt

SEQ ID NO: 11735 - DNA, 840 bp, Burkholderia cepacia
atgaaactgctgagatttggcgacaaacaccatgaaaaaccgggcctgctggatgcgcagggccacattcgcgatctgtccggcgtgatcgacgacatcgccggcgacgcgctgacgcccgcgtcgctcgcgcggctgcgcgacatcccgccgtcgtcgctgccgctcgtcgaaggcacgccgcggctcggcgcgtgcgtcggccgcgtcggcaagttcatctgcatcgggctcaactactcggatcacgcggccgaatcggggatggaggtgccgaaggagcccgtcgtgttcggcaagtggacgagcgcgatctccggcccgaacgacgacgtcgaaatcccgcgcggctccgagaagaccgactgggaagtcgagctcggcgtggtgatcggccagggcggccgctatatcgacgaagccgatgcgctgtcgcacgtcgccggttactgcgtcgtgaacgacgtgtcggagcgcgaataccagctcgaacgcggcggcacgtgggacaagggcaagggcaacgacacgttcggcccgctcgggccctggctcgtgacggccgacgaagtgcccgatccgcacgcgctgcggctgtggctggacgtggacggccaccgctaccagaacggctcgaccgcgacgatggtgttccgcgtgccgcacctgatcagctacctgagccgcttcatgagcttgcagccgggcgacgtgatctcgaccggcacgccgccgggcgtcggcctcgggcagaagccgcccgtctacctgcgcgccggacaagtgatcacgctcggcatcgacgggctcggcgagcaacgccagcgcaccgtgcaggcc

SEQ ID NO: 11736 - DNA, 258 bp, Burkholderia cepacia
atgaaacctggcattcacccggactaccgcgaagtcgtcttccaagacatgtcgaacggcttcaagttcatcacgcgctcgacgatccagacgcgcgaaaacatcgaactcgacggcaagacctacccgctcgccaagatcgaagtgtcgtcggaatcgcactcgttctacacgggtcagcaaaagatcatggacacggcaggccgtgtcgagaagttcaagaacaagttcggcgtacgcgccaacggcaaggcgaag

SEQ ID NO: 11737 - DNA, 798 bp, Burkholderia cepacia
atgggacagaaaattcatccgactggcttccgcctggctgtcagccgcaattgggcttcgcgttggtacgcgaacaacaacaatttcgcggcgatgctgcaggaagacatcggtgttcgtgaatacctgaagaagaagctgaagaacgcttcggtcggtcgggtcgtcatcgagcgtccggcgaagaacgcgcgcatcacgatttacagctcgcgtccgggcgtggtcatcggcaagaagggcgaggatatcgaacagctgaagacggaactgcaacgccgcatgggcgtgccggttcacgtcaacatcgaagaaatccgcaagccggaaaccgatgctcagctgatcgctgactcgatcacgcaacagctcgagcgccggatcatgttccgtcgcgcgatgaagcgtgcgatgcagaacgcgatgcgtctgggtgcccaaggcatcaagatcatgagcgcaggccgtctgaacggtatcgaaatcgctcgtacggagtggtatcgcgaaggtcgcgtgccgcttcacacgctgcgtgctgatatcgactacgcgacttcggaagcgaagacgacttacgggatcatcggcgtcaaggtgtgggtctacaagggcgatacgctcggccgcaacgacgcaccggtggtggaagaagtagccgaagacaagcgtccgcgtcgcaatgcgcgtccgggcgaccgtcgtccgcgccgtgacggcgaaggcggcgctccgggtgctcgtcgtggcgcaccgcgccgtggcgccggcaagcccgaagacggcaagactggagaa

SEQ ID NO: 11738 - DNA, 2753 bp, Burkholderia cepacia
gcggatctcgccgcgcgcatcaaggctgaacgcgatgcgttcgtccgcttccttcggaacggcgcatggcgcgacgatccggcgcaccggcacgaacggttcgcgctgacgccggtgcaggccgcgtatgtgctcggtcgccacgaatcgttcgagttcggcggcagcgcatgccacctgtacgtcgaatacgacgaaccgcaggatctcgactgcgtgcgcttcgaagccgcgtggaacgcgtgcgtcgcgcgccatccgatgctgcgcgcgatcgtcgaggacaacgcatggcaacgcgtgctgcccgacgtgccgtggcagccgctcaccgtgcacgacctgcgcgaggccgacgcgaacgccttcgacgcgcacctgaaccgcgtgcgcgaacgcctcgaccatgcggtgcatgcgctcgaccgctggccggtgctgcagccggaagtgagcctcggccaggaggcggcggtgctgcacctgtccgtggatttcacgctgatcgactacgcgagcctgcaattgctgctcgccgaatggcggcgccgttacgacgatccgcaatggcagcccgcgccgctcgacgcgacgtttcgcgactatgtgctgcatgaagcgcaggccggcacgcgtgcggaccatgcgcgcgacaaggcatggtggctcgctcgactcgacgagttgcccgcgcgtcccgatctgccggtcgtgcccgcgaggcgcaccgacgggcggccgcgcttcacgcatcggcatgcgcggctcgatcgcgcgcaatgggccgcgctgagcggccaggcgagccgtttcgggctgagcgcggcgagcgtcgcgctggccgcgttcgccgaggtcgtcggccgctggagccagacgccggcgttctgcctgaacctgacggtgctgaaccgtccgcccgtgcatccgcgcatcgatgcggtgctcggcgatttcaccgcgctgagcctgctcgccgtcgacgcgacgcacgggcgcgatttcgtcgagcgtgcccgcacgatcggcgcgcggatgttcgacgatctcgaccatcgcgcgttcaccggcgtcgacgtgatgcgcgaactcgcacggcggcgcggcaaggatgcggcgctgatgccggtggtgttcacgagcgggatcggcagtgtcgagcgcctgctcggcgagcacgcagggcacgcggcgcgcgccgcgccgccgcgcaccatgatcagccagacgccgcaggtgtggctcgactgccaggtgaccgaccagttcggcgggctggaaatcggctgggacgtgcgcgacgacctgtttccggacggcatgccggccgcgatgttcgacgcgtatgtcgcgctgctgggtcgtctggccgacgatgccgcatggtggtcgcgtgagggtgacatcgtgctgccgtccgcggcgcccgtcgccgacgtgcatccggatgccgatacgcatatcgcggccggtttcgccgcgcaggcgctgcgcacgcccgatgcgccggtcgtgatcgatgcacgggggccgcgcacgtaccgcgaggtcgcgcaacaggcggcggcgctgcgtaccgcgctcgaacaggcgggcgtcggcgtggacgataccgtcgcggtactgatgccgaagtgcgcgcaccagctcgcggccgtgctcgcgatcgtccaggcgggcgcgcgtacgtgccggtcgacagccgccagccggcgctgcggcagcaggccattctgcgcaatgcacgggtacgcgcggtcgtcagcgtgcaggcgctcgcattcgaccatgacggttgcgtgcgcatcgatatcgatgcggtgccgatcgatccgcaatggccgccgcgcgccgcatgcgacatcgctcccgatgcattggcttacgtgatctatacgtcgggctccaccggcgagccgaagggcgtgatgctgagccacgcggcggtgtgcaacacgctcgccgacatcagcgcgcggcatgcggtcggcgcgggcgacgtggtgctgggcctggccgaactgagcttcgacctgtccgtctacgattttttcggggcgaccgcgcgcggcgcgtgcatcgtgctgcccgatccggcgcgcggcaacgatccgtcgcactgggccgaactgatggcgcgccatcgcgtgacgctgtggaattcggtgcccgcacaggggcagatgctgatcgactacctcgaaggcgaaccggcgctcgacgtgccgggcccgcgccgcgtgctgtggtcgggcgactggattccggtgacgctgccggcccgctggtggcgtcgctggcccgacagcgcgctgttcagcctcggcggcgcgaccgaagcgtcgatctggtcgatcgaacatccgatccgtccggaagatacgcagctcgcgagcattccgtacggccgcgcgctgaccgggcagacgatggaagtgctcgacgcactcggccggccgtgcccgccgggcgtgcgcggcgagatccatatcggcggcgtcgggcttgcgacgggctacgcgaacgatcccgtgcggacagacgagcgtttcattcgtcatccggacgggcgcaggctttatcgcaccggcgatctcgggcgcgtgcgcgccgacggctcgctcgaattcctcgggcggcaggacgatcaggtgaagattcgcggctaccggatcgagctcgccgagatcgatgcggcgctgaccgcgcatccgctcgtcggcgcggcggccacgatcgtgctcggcgagggc

SEQ ID NO: 11739 - DNA, 579 bp, Burkholderia cepacia
atgaaggcagtctgcgtttactgcggttcgtcgtccggcgtgcggccggtctatgccgatgccgcgcgcgcgttcggccgcgcgctcgtcgacgcgggcctcacgctcgtgtacggcggcggccgcgtcggcctgatgggcgtgatcgccgacgaagtgatggcggccggcggccgtgcggtcggcgtgatccccgagctgctcgtcgacaaggaagtcggccatacggggctgtcggaactgcacgtcgtgcccgacatgcaccatcgcaagaaaatgatggccgacctctccgacgcgttcgtcgcgatgcccggcggcgccggcacgctcgaggagctcttcgaggtctacacgtgggcgcagctcggctatcaccgcaagcccgtcgcgctctacaacatcgatgcgttctacgatccgctgatcgcgctgctgcgccatacggtcgacgaaggcttcatgcggccggcctatttcgacgcgctgtgcgtcgaatccgaacccgtcgcgctgatcgagcggctgcgccgctaccagccgcccgcccgcgacaagtgggcgcccgacgcagcgaag

SEQ ID NO: 11740 - DNA, 1944 bp, Burkholderia cepacia
atggtgtcgaacgattcgcacgtcccgtcgttgccactcgtgtcggtggtgattccgtgttacaaccaggcgcagtacctgatcgagtctgtatcgtcagcgctggatgcgtatagcgggccgctggaaatcatcattgtggacgacggcagcaccgccgccagaacgggcgcgtatctgcgtgcggcagaagcgctgtcgcccgtcgtgcaggtgatttcacaacccaacgcaggcctgtctggcgcgcgcaatacgggcattgcggccgcaaaaggggagttcatccaactgctcgatgcggacgatctgatcattccgccgaagctcgacctacaggtcgcccatttccgggtggggaatgctctcgatgtgtcgatttcgaatttcctgctctgcgatgactcgcggaccgtgttttctaagcatgacgaagccatcgcgcattctacgctagatttgcaggacttcctctacaaatgggagcggggctttgccgttccgatccactgcgcgctgtttcggcgagcggcgctcccggagaatccatttgacacgtcggctcgtgcgaaggaagactggctcttctggtgcggactcagcgcgcgcggcgcacgcatggcctacgtcaatgcacataatgcgatctaccggcagcatgcgcagagcatgcgccggtcgtatgtgaggatgggaaagagctggctgcatgctgcggcgaagatcgatgcgatggtttcggcgcgcgagcccgctttttttgaatccgcggtcgattggttcgagaatttttatcgaaagcatcctgcctacgtcgaagaaattgcgcaactgcgtgacgaggtgggggtgggggcgtcgggcgtatccggtcggcaagctgaatcggaggagcagcactcgcagaagcttgagcggctgcaagttgctctcgccgagatgtctgcggaagcgccgcttgtcagcgtcgtgatcccagcatacaaccatttcgactacatcgacggttgcctgttgtccgtgatcgagcagaagggtgttgcgatcgagatcgtttgcgtcgacgattgttcaccagacaagcgtacgacggcgctgctgaccgccctacaagcgcgccacccgaatgttcggatcattctcaacgacgagaacaaaggcatttcgaacacgcagaacgaggcggtccagcacgcgaggggagaatacatcgcgttcgtcgattgcgacgatgcgctggtgcctggagcgcttgcgcgcgtcgtgcgagtgttggcggagatgccggaatgcgattatctgttcaccgaccggttcgatatcgacgaaaacggcgacgaagttcgtcgtgccgattatggcggctatccgaacatcgcgttcagggatgacatgaacatcaagaacgatctgcttgatggcatggtagcgtcgcatctaaaggtgattcgacgcagcacgtatctcaaggccggcggatccgacgacgccttttccggtatccaggattgggaactggccttgaagatcgcggagttcggccgatttcactacttgcacgagcctctctatcggcatcgagtccatacgcggtccgttacgtcgtcggatagtgtcggtcaattcaggaagaccaatatcgtccggcggcggtttactacccgttggttggccggcggacgtgaccggagcgggccggtattgcgtttttccagcgaggccgggcaaatgccgtcgatcgatgaactcaaagaggcgtggcgccagggccgacgatgtgagatgttgatcgcggcggatgcttccgtgcccgtgctcaactttatgcgggaattcaattcctacttcgaccggatcgagtgggtgagtgcagaagcgtacgcaagtctgctcggctatgtgccacccggcgtgctggctgcacaagcgccagagcggcacggc

SEQ ID NO: 11741 - DNA, 414 bp, Burkholderia cepacia
atgctgcaaccgaaacgcagaaagtatcgtaaagagcagaagggtcgtaacaccggcaaggcgacgcgcggcaacgcagtgtcgttcggtgaattcggcctgaaggcgatcggtcgcggtcgtttgaccgcacgtcagattgaagcggcgcgtcgtgcaatgacgcgtcacatcaagcgtggcggccgtatctggatccggatcttcccggacaagccgatttcgcagaagccggccgaagtgcgtatgggtaacggtaagggtaacccggagtactacgtcgccgagattcagccgggcaagatgctctatgaaatggacggcgtaaccgaagaactggcacgcgaagcgttccgtctggctgcagccaagctgccgctgaagacggcattcatcgtgcgccagctcggcgcc

SEQ ID NO: 11742 - DNA, 1624 bp, Burkholderia cepacia
gctaaagacgtcgtattcggcgattccgcccgttcgaagatggtcgaaggcgtgaacattctcgccaacgcagtcaaggtcacgctgggtccgaagggccgcaacgtcgtgctcgagcgcagcttcggcggcccgacggtcaccaaggacggtgtgtcggtcgcgaaggaaatcgagctgaaggacaagctccagaacatgggcgcgcaaatggtcaaggaagtggcttccaagaccagcgacaacgcaggcgacggcacgacgacggcaaccgtcctcgcgcaatcgatcgttcgcgaaggcatgaagtacgtcgcatcgggcatgaacccgatggacctgaagcgcggcatcgacaaggcagtcgcagcggctgtcgaagagctgaagaagatcagcaagccgtgcacgaccaacaaggaaatcgcacaagtcggctcgatctcggcgaacagcgattcgtcgatcggcgatcgcatcgctgaagcgatggacaaggtcggcaaggaaggcgtcatcaccgtcgaagacggcaagtcgctggccgacgaactcgacgtcgtcgaaggcatgcaattcgaccgcggctacctgtcgccgtacttcatcaacaacccggacaagcaagtcgccgtcctcgacaacccgttcgtgctgctgcacgacaagaaggtgtcgaacatccgtgatctgctgccggtgctcgagcaagtcgcgaaggctggccgtccgctgctgatcatcgcagaagacgtcgaaggcgaagcgctcgcgacgctggtcgtcaacaacatccgcggcatcctgaagaccgttgcggtcaaggcgccgggcttcggcgatcgtcgcaaggcgatgctggaagacatcgcgatcctgaccggcggtcaagtcatcgcggaagaaaccggcctgacgctcgagaaggcaacgctggcggaactgggccaggcgaagcgcatcgaagtgggcaaggaaaacacgacgatcatcgacggcgcaggcgaagctgcaagcatcgaagcacgcgtgaagcaagtgcgcgcgcaaatcgaggaagcgacgtcggactacgaccgtgaaaagctgcaagagcgcgtggccaagctggcagcgcggcgttgcagtgatcaaggtcggtgctgcgaccgaagtcgaaatgaaggaaaagaaggcccgtgtcgaagacgcactgcacgcaacccgcgcagctgtggaagaaggcatcgtggcaggtggcggcgttgcgctgatccgtgcacgcaccgcgatcgcaggtctgaccggcgcgaacgccgaccagaacgccggcatcaagatcgtgctgcgcgcgatggaagagccgctgcgccagatcgtcacgaacggtggcgaagaagcgagcgtcgtggtggcggcagttgcagcaggcaagggcaactacggctacaacgcagcaacgggcgagtacgtcgacatggtggaagccggcgtcgtcgacccgaccaaggtcacgcgtaccgcgctgcagaacgcagcttcggtggcaggcctgctgctgacgacggacgcagctgtcgcagaactgccgaaggaagacgcaccgatgccgggcggcatgccgggcggcatgggcggcatgggc

SEQ ID NO: 11743 - DNA, 531 bp, Burkholderia cepacia
ttgaaacgagacctgaacgacaagatcccgccccccgccgcgacgccgcggcaccgcccgttcgacgaggaagagccgcacgccgacgcggacgtgcacgcgcacgaaccgctcggccccgacgaccggctcgcgccgctgccgccgaacccgtacaagcgccaccgcggcatcacgcgcgcgtggttcgccctcaagcattcgctgaacgggtttcgcgtcgcgatccgcgaggaaagcgcgtttcgccaggagctcacgctcgccgcgctgatgctgccgatcggcgcattcgcgccggtgccggccgcgtcgcgcgcgctgctgatcggctcggtgctgctggtgctgatcgtcgagctgctgaactcgagcgtcgaagccgcgatcgaccgcatctcgctcgaacgtcacgaactgtcgaaacgcgcgaaggacctcggcagcgcggccgtgacggtcgcgctgttcgcgtgcgtgacgacctggggcttcgtgctcgggccggtcgtcgcacgctggctcggcttc

SEQ ID NO: 11744 - DNA, 612 bp, Burkholderia cepacia
atgatgaaattaatcggttcgctcagcagcccgtacgtccgaaaggcgcggatcgtgcttgctgaaaagaagatcgactacaagctggagctcgagaacgtgtgggcgccggagacggatattcatgcttcgaatccgctcggcaaggtcccgtgcctcgtgatggaggatggtgccgcggtgttcgattcccgcgtgatctgcgaatacgtcgatacgctgtcgccggtcggcaagctgattccgccgtcgggccgcgagcgcgtggaagtgcgctgctgggaagcactgggcgacggcgtgctcgacgcggcggtcgcgatccgtctcgaacacacgctgcgcgaagaagggcagcgcagcccgagctggatcgcgcgccagcaacgcaagatcgacgatgcgctcgtcgcgatgtcgcaggggctcggcggcaagacgtggtgcgtcggtaatcattacacgctcgccgacatcgcactcggctgcgcgctcggctacctcgacttccggatgcccgagctcaactggcgcgatcgccacccgaacctcgacaagcacttcgtgaagctgcagcagcgaccgtcgttcgccgatacgctgccgcagaac

SEQ ID NO: 11745 - DNA, 618 bp, Burkholderia cepacia
atggcgagcggtaaattcatcacgttcgagggcatcgacggggcgggcaagaccacccacctggcatggttctgcgaacgccttcagggccggctggctgcggccggccggcaggtcgtcgtgacccgcgagccgggcggcacgcagctcggcgagaaactgcgcgagatcctgctgaaccagccgatggatctcgagacggaagcgctgctgatgttcgccgcgcggcgcgagcacctcgcgctcgtgatcgagccggcgctcgcgcgcggcgactgggtcgtgtccgaccgcttcaccgacgcgaccttcgcgtaccagggcggcggccgcgggctgccgcgcgacaagctcgagacgctcgagcgctgggtgcagggcggtttccagcccgacctcacggtgctgttcgacgtcgcgccgcaggtcgcgagcgagcgtcgcggggccgcgcgcatgccggacaagttcgaaagcgagtccgacgcgttcttctcgcgtacgcgtgccgaatacctgcggcgcgcggaagaggcgccgcaccgcttcgcgatcgtcgatgcgacgcgatcgattcccgagattcgccagcagctcgaacgcgtgctcgccgcgctg

SEQ ID NO: 11746 - DNA, 3996 bp, Burkholderia cepacia
  misc_feature (302)..(302): n=g, a, t or c
gcgccgaaaaggagggcggcggagggagcgggcagagaagaggaagaagcggccaggccggccgggaaaaaacgaggaacagacgcacgaggccagggcacggcgacacagacagacgggaacagctacacgggcggcgccaacctgaacgccggcggcctggtgatcggcaacaattcggcgctcggcatcggcacgctgaacgtgaacgcgtcggcgtcgctcgacacgagcacgaacgtgacgctcggcaacacggtcaatctcgcctccggctcgacgctgtcgatcggcggcagcancagtaacgggctgaccggcgcgatcaacggaagcggcggcctcgtgaagaacggcgcggcgaccacgacgctgagcggcgtcaatacgtatacgggcggcacgaccatcaacagcggtacgctcgcgctgaatggggccggcagtctgtcggcgaccggcacggtcaacctgaccggtgcgggtgcaacgttcgacgtgagcgctgcgtcgggcgcgcagacgatcggctcgctggccggcgcggccggcacgaacgtgaacctcggcgtcaattcgctgacgctcggcggcaccggcaatgcgacctatgccggcacgatcggcgggtcgggcagcgtgacgctgtcgggtaccggcgtgcaatcgctgaccggtacgaacgtatacacgggcggcaccaacctgaacggcggcaacctcgtcgtcggcagcaatacggcgctcggcagcggcgcggtgaacgtgaacggctcgtcgacgctcgacgcgacgaccaacgtgaccctggcaaacggcgtcaatctcgcgacgggcaccacgctgacgctcggcggcggcaccgatctcggcctcggcggcgtgatttccggtggcggcggtctcgtgaagaacggcgcggccgcgctgacgctgaacggcgcgaacaattacaccggtggcacgacgctgaacgcaggcagcctcgtgctcggcaacggctccgcgctgggcaccggtgcgctgaccgtcggcggcgcggcgacgctcgatacgaatgcgagcctgtcggtcggcaatgcgatcggtctcggcacgggcgcgacgctgacgctcggcggcagcaacgcactcggattgagtggcgcgatttccggtacgggcgcgcttgtgaagaacggcgcgtcgaccacgacgctgacgggggcgaacacctacaccggcggcacgacgatcaatgccggcacgctcgcgctcggcgcgggcggcagcctgtcgtccacgggtacggtgaacctagtcaatgcgggtgccacgctcgacatcagcgcgggcagcgcgcagtcgatcggcgcgctgtcgggcggcgtcggcacgagcgtgagcctcggcgccaacgcgctgacgctgggcgggaccgcgagcggcacgttcagcggcacgatcggcggcaccggcagcctgacgctggcgggtaccggcacgcagacgttgaacggcgcaaatacctataccggcggcacgaatctcaatagcggcagcctggtactcggcaacaacggggcgctcggctccggcgcgctgaacgtcggcggggcggcgacgctcgatacgaatgcgagcctgtcggtcggcaatgcggtcaatctcggcacgggcgccgcgctcacgctcggcggcagcaacaacctcacgctgggcggcgcgatttccggcgcgggcagcctcgtgaagaacggcgtggccaccaccacgctgaccggcgcgaatacctacacgggcggcacgacgatcaacgcggggacgctggcgctcggcgcgggcggcagtcttgcatcgaccggtgcgatgaacctcgcgggcgtcggcgcgacgctggatctgggcggtgcgacgggcggccaaacgctcggcgcgctgtcgggtgtcgcgggaacgaacatcaacctcgggaacaatgcactgacgctgggcgggaccgccagcggcacgttcggcggtgcgatcggcggtacgggcagcctgacgctcgcaggcaccggcacgcagacgctgaacggcgcgagcacctattcgggcggcacgaacctcaatagcggtggcgtggtgctcggcaacaatacggcgctgggcaccggcacggtgaacgtgggcggcgcggcgacgctcgatacgaacgcgagcctgacggtggccaatgcggtcaatctcggcacgggtgcggcgctcaccttgggcggcagcaatgcgctcgacctgagcggtgcgatttccggtgcgggcagcctcgtgaagaacggcgcggcgacgaccacgctgacgggcgcgaacacgtacacgggcggcaccacgatcaacgccggcacgctggcggtgggcgcgggcggaagcctcgcgtcgaccggagcgatgaatctcgcgagtgccggcgcgacgctcgatctgagcgccgcgacgggcgcacaaacgctcggcgcattgtcgggcgtcgcgggcacgaacctcaacctcggtggcaacgcactgacgctgggcgggaccgccagcggcacgttcagcggtgcgatcggcggcacgggcagcctgacgctcgcgggcaccggcacgcagacgctgtccggcgcgaacacctatacgggcggcacgacgatcggcgggggcagcacgctggcgctcggcgcgggcggcagccttgcgtcgaccggcacggtgaatctggccggggccggggcgacgttcgacctgcgcggtgcatcgggcgcgcagacgatcggcgcactgaccggtgcggccggcacgaacgtgaacctcggcggcaacgggctgacgctgagcggcaacggcagcaacacgttcggcggcgcgatcggcggcgccggcggcctgacgctcgccggcagcggtacgcagacgctgacgggcgcgaacacgtataccggcggcacgacgatcagcggcggcggcacgctggcgctgggtgcgggcggcagcctcgcgtcgaccggcgcggtgaccctcgccggcacgggtgcgacgctcgatctgagtggcgcgacgggcgcgcagacgatcggcacgctggcgggtgcgggcggcacgagcgtgaatctgggcgcgaatgcgctgacgctgaatgccaccaccaacggtacgttcggcggtgcgatcggcgggacgggcggtgtgacggtcgccggcacgggcacgcaaacgctgacgggcgcgaacacgtataccggcggcacgacgatcaacggcggcagcacgctcgcgctcggtgcgggcggcagcctcgcgtcggggggcgccgtgactctcgcgggcgcgggcgcgacgttcgacgtgagcggcgcgacggccgcccagacgctcggcacgctgaccggcgcggccggcacgaacgtgaatctcggcgcgaatgcgctgacgttgaacggcagcggcaacggtacgttcggcggtgcgatcggcgggacgggcggcgtgacgttcgccggcacgggcacgcaaacgctgacgggcgcgaacacatataccggcggcacgacgatcaacggcggcagcacgcttgcgctgggagccggtggcagtctcgcgtccggtagcaccctgaatctcgcgggcacgggtgcgaccttcgacatgagcgctgcgagcggcgcgcaaacgatcggtgcgctgtcaggggtgggcggcacgaacgtgaatctcggcgcgaatacgctgacattgaacggcagcggcaacaacacgttcggtggcacgatcggcgggacggggggcgtgacgctggcgggcaccggcacgcagacgctgacgggggcgaacacgtacacgggcggcacgacgatccatggcggcagcacgcttgcactcggcgcgggagggagcctcgcgtcgacgggcgcggtgaatcttgcgggcaccggtgcgacgttcgatgtgagcgccgcgaccggtacgcaaacgatcggtgcgctgtcgggcgcggccggc

SEQ ID NO: 11747 - DNA, 783 bp, Burkholderia cepacia
atgagcgacattctcgaccgaatcatcgccgtcaagcgcgaagaagtcgcgacggccatgcgcagcacgccgctcgaggcactgaaactcgacgcatcggcgcgcgacctgcgcgacttcgtcggcgcgctgcgggcgaagcatgcggccggcaacgccgccgtgatcgccgaaatcaagaaggcgagcccgtcgaaaggcgtgctgcgcgagcatttcgtgccggccgacatcgcgcgttcgtatgcggcgcacggcgccgcgtgcctgtcggtgctgaccgacgagcagttcttccagggcggcgtgcgctatctcgaggaagcgcgcgcggcctgctcgctgccggtgctgcgcaaggacttcatcgtcgacgcataccagatcgtcgaagcccgcgcgatgggcgccgacgcgatcctgctgatcgccgccgcgctcgacacgccgctgatgcaggatctcgaagcgtatgcgcattcgctcgggctcgcggtgctggtcgaagtacacgaccgccacgagatggaacaggcgctgacgctgaagacgccgctgctcggcatcaacaaccgcaacctgcgcacgttcgagacgtcgatccagaccacgctcgacatgctcgacatgattccggcggaccgcatcgtcgtgaccgaatccggcatcctgtcgcgcaccgacgtcgacacgatgcgcgcggcgaacgtgaacacgttcctcgtcggcgaagcgttcatgcgcgccgaccagccgggcgaggaactcgcacggatgttcttc

SEQ ID NO: 11748 - DNA, 189 bp, Burkholderia cepacia
atgctttcagcggttatctcttccgaacatagctacccggcgatgccactggcgtgacaaccggtacaccagaggttcgtccactccggtcctctcgtactaggagcagcccccttcaaatatccaacgcccacggcagatagggaccaaactgtctcacgacgttttaaacccagctcacgtacctct

SEQ ID NO: 11749 - DNA, 306 bp, Burkholderia cepacia
atgaacaagattcgcaaaggtgacgaagtcatcgtcgtcactggcaaggacaagggcaagcgcggcgtcgtgctggctgtcggtgctgaacatgtgacggttgaaggtatcaacctcgtcaagaagcatgtgaagccgaacccgatgaagggtacgacgggcggcgtggaagcgaagacgatgcccctgcatatttcgaacgtcgcactggtcgacgcgaatggcaaggcgtcgcgtgttggcatcaaggtcgaggaaggcaagaaggttcgcttcctgaagacgaccggtgccgtactgagcgcc

SEQ ID NO: 11750 - DNA, 1251 bp, Burkholderia cepacia
atggtgcagcgcacccaacgcacattttccggccgccacgcatcgccccgcttcacgctggccccgttcctgcataccggtcgaacgcgcaatcgcgcgccgggtacgccggcaacatcgccgcacgcccgacgacaacctgacggagacagcaacgtgagtacaccggcaccgatcactcccctcagcatgaaggccgccgtctggcacggccgccacgacatccgcgtcgaagaggttcccgttccggaacgcccgccggcaggctgggtcacgattcgcgtgcactggtgcggcatctgcggctccgacctgcacgaatacgtcgccgggccggtgttcatcccggtcgacgcgccgcatccgctgaccggcctgaaaggccagtgcatcctgggccacgagttcagcggcgagatcgccgagctcggcgcgggcgtgtcgggcttcgcggtcggcgaccgcgtgacggccgacgcatgccagcattgcggcacctgctggtattgccggcacgggctgtacaacatctgcgagaacctcgcgttcacggggctgatgaacaacggcgcgttcgccgaatacgtgaacgtgccggccgaactgctgtataagctgcccgaccatttcccgaccgaggccggcgcgctgatcgaaccgctcgcggtcgggctgcatgcggtgaagaaggccggcaacatcgtcgggcagaccgtcgtcgtggtcggcgcgggcacgatcggcctgtgcacgatcatgtgcgcgaaggccgcgggcgccggacgcgtgatcgcactggaaatgtcggccgcgcgcaagcagaaggcgctggaggtcggcgcgagcgtggtcgtcgatccgaagacgtccgacgcgatcgcggaagtccgggcgctgacgggcggctacggcgcggatgtctcgttcgagtgcatcgggcacacggccaccgcgaagctcgcgatcgacgtgatccgcaaggccggcaagtcggtgatggtcggcatcttcgaggaaccggcgccgttcaacttcttcgacatcgtgtcgaccgagaaggaagtgatcggctcgctcgcgtacaacggcgaattcgcggacgtgatccgcttcatcgcggacggccgcatcgacgtgcagccgctcatcaccgggcgcatcgcgctcggcgacatcgtcgcgcacggcttcgaggaactggtcaaccacaaggaccgcaacgtgaagatcatcgtccggccggccgtttcc

SEQ ID NO: 11751 - DNA, 780 bp, Burkholderia cepacia
gtgcgcatcgtccaggacagcgacgcgatgcacgcgtaccggccgatcgtcgcgtacctcgcgaacgacggccagcgccgcgaagtcgccggcaataccgcgtcgacggtccccgcctacgacatcggcgagaacgtcgacgtcctgctcgaccccgatcaccccgaacgccccgcgctgatcgacgatttcacgcaacgctggtttccggcggccgtgccggcgctgctcgccgtcgcgtcgttcgcgatcggcggcctgctgattgcccgcgagcgtcgccaccggcaatcggacccggcgccgcgccgcgtcgtgcacacgccggcacggcgtcgctgggatgtcgcgatcgtgctgattccgatcgcgatcggcacgggcttcctcgccggcgccggcgcggccggcctgcgtcagtggcagatcgtccatcactatgcgcgctcgaccggccatgtggtcgagatcgcgaaaaacgggcggtcgtcacggtcgcgcacgtcactgtattcggccgtcgtcgcgttcacgaccgacagcgggcggctgatcacgttcgcgcagggctcggcgtcgtcgcacccgggcctgcacgaaggcgacgcggtcaacgtgctgtacgaccccgtcacgcccgagcgtgcgctcgtcgaccgcttctgggatcgctggggcctgacggccatcctgttcgcgatcggtgcgccgttcctggcggccgggctgttcgtcgccgcgacgctatggcccgaccatcggccccacggcactgctcaa

SEQ ID NO: 11752 - DNA, 714 bp, Burkholderia cepacia
atggatctcgaaagcattctctacacccagggcttcggctcgcgtcgccagtgccgcggcctgatcgaagccggccgcgtcgccgtcgcgggcgccgccgcgaccgacccggacgccgcgttcgacaccgacggcctcgtgttctcggtcgacgatgcggcatggccgttccatgcgcgtgcgtatctcgcgctcaacaagccggccggctacgagtgttcgcgcgatccgcagcaccatgcgagcgtgttcagcctgctgcccgcgccgctcgtcgcgcgcggcgtgcagtgcgtcggccggctcgaccaggacacgaccggcctgctgctgctgtccgacgacggccagttcgtgcacgcgtacacgtcgccgaagcgcaaggtgccgaagacctacgtcgcgaccgtgcgccacccgctcgacgacacgcaactgcacgcgctgcgcaccggcgtgcaactgcacggcgagccgaagccgatcgcggccgtcgcggccgacgcccgcgccccgcacgcgctcgcgctgaccgtcctcgaaggcaagtaccaccaggtcaagcggatggtcgccgcggcgagcaaccgcgtcgaattgctgcatcgcgaaagcatcggcggcttcacgctgccggccgacctcgcgcccggcgcatggcgctggctcgacgaagccgaccttgccgcactgcgcaatcccgtcaaaaccctg

SEQ ID NO: 11753 - DNA, 1374 bp, Burkholderia cepacia
ctgatcggccgcgagccgctggccgcgacgcagcgcgagcggctgcagacggtcgagggcgcgtcgtcggtgctgctcgatctgatcaacgacatcctcgacctgtcgaagatcgaggccggccagatgacgatcgaggcgatcccgttcgatctcgcggaaacgatccggcagaccggcgcgatgttcgagccgctcgcgacggccaagggcctgcaattcgacgtgttcgtcgatgatgcgctgcccgcgcgctatctcggcgacccgacgcggatccggcagatcgccgcgaacctcgtcggcaacgcgatcaagttcacgaaccacggcgaaatcacgctcgaggtctacctgcgcgacgacacggacccggcttcgccgatcgcgatcggcgtcagcgacacgggtatcgggatgacggacgcgcagcgcgcggcgctgtttcgcccgttcacgcaggccgatacatcgatcacgcgccgctatggcggcacggggctcggcctcgcgctgaccaagcagctcacgcagatgatgcacggcacggtcgacgtgaagagcgaacccggcaagggcagcacgttcgtcgtcacgctgccgctgcgtccggccaccgacgcgcaggtggccgaacacgacgccgcgcaggccgacgacacgacgctgccggccgtcaccgcgcgcgtgctcgtcgtcgacgatcatccggtgaaccgcacgctgctgcaggggcagctcgtcacgctcggctatgcggcggactcggccgaggaaggcgcatcggcgctgcggcgctgcgccgatacgcgctacgacctcgtgatgaccgacctgaacatgccgggcatggacggctatacgctcgcgcgcgtgctgcgctcgcagtatccggagatgccggtggtcgccgtcaccgcgcatgcgagtgccgccgagcatgcgcggtgcgcggaagcgggaatcgtcgcggtgctggtgaaaccggtgctgctcgatacgatcgatcgcaccgtgcgacggcatgcgcatgcggccgccgcgcaggcgccggcccggcgcgcgctcgtcgatctggcggaagggccgttgccgccggacgtgcatgcgctactcgaagcaagcctcacgcagtcgctggccgccacgcacgatgccctcgcacacgacgatctccccgcactgcgccatgaactccattcgctgcgcggcgcgttcgcgacgatccacgaacatgcggtagccgacgcgatcggcgagctgcaagccgtcgtgcatggcggcgacctgacatcgttcgacgcccggctcgcggatgcggaagcgctcgcgcgggacgcgcttcaacggcgcgcgacgcaagcgccgtccgcg

SEQ ID NO: 11754 - DNA, 1029 bp, Burkholderia cepacia
atgacgattaccccgcaggaagcgctgcaacgcacgatcgagcaccgcgagatcttccacgacgaaatgctgcacctgatgcggctgatcatgcgcggcgacctgtcgcccgtgatggcggccgcgatcatcaccgggctgcgcgtgaagaaggagacgatcggcgagatcgccgccgccgcgaccgtgatgcgcgaattcgcgaaccacgtcgaggtgcaggacaactcgaacttcgtcgacatcgtcggcaccggcggcgacggctcgcacacgttcaacatctcgaccgcgtcgatgttcgtcacggccgccgcgggcgcgaaggtcgcgaagcacggcaaccgcggcgtatcgagcaagtccggcagcgccgacgtgctcgaggcgctcggcgtgaacatcgacctgcagtcggaccaggtcgccgcgtcgatcgccgaaaccggcatgggcttcatgttcgcgccgaaccatcacccggcgatgaagaacatcgcggccgtgcgccgcgagctcggcgtgcgcacgatcttcaacatcctcggcccgctgaccaatccggccggcgcgccgaaccagctgatgggcgtgttccacgccgacctcgtcggcatccaggtgcgcgtgatgcagcgcctcggcgcgcagcacgtgctcgtcgtgtacggcaaggacgggatggacgaggtatcgctcggcgccgcgacgctcgtcggcgaattgcgcgacggcaaggtgcacgaatacgagatccatccggaggacttcggcctgcagatggtgtcgaaccgcacgctgaaggtggaaaatgccgacgaatcccgcacgatgctgctcggcgcgctggacaaccagccgggcgtcgcgcgcgagatcgtcacgctgaacgcgggcaccgcgctctatgcggcgaacgtcgccgaatcgatcgcggacggcatccagctcgcccgcgaagcgatcgcgagcggcaaggcccgcgcgaaagtcgacgaactcgtgcgcttcacgcagcagttcaagcgc

SEQ ID NO: 11755 - DNA, 1004 bp, Burkholderia cepacia
aacacgacgatcggcaacggcagcacgctcgcggtcggcgcgagcggcgcgctgtcgggcggcagtgtgttcgatctggccggcgcgggcgcgacgctcgacctgagcgcggccacgtcgccgcagacgacgggcgggctggtcggcgcggccggctcggcggtgaatctcggcggcaacaccctgacgctcggcggttccggcaacggcacgttcggcggcacgatcggcggtgccggcgggctgacgatggccggcaccggcacggagacgctgaccggcgcgaacacgtacggcggcggcacgacgatcaacagcggcacgctcgcgatcggcgcgggcggcagcctggccgcgggcggcgcagtgaatctgggcggcgccggcgcaaccttcgacctgagcggcgcagggctgccgcaggcgatcggcgcgctgtcgggcgtagccggttcgacggtgaatctcggcggcaacggcctgacgctgggcggcgccggcagcggcacgttcggcggcacgatcgcgggggcaggcggcagcctgacgctgtcgggcacgggcagcgaaacgctgaccggcatcaacacgtacacgggcggcacgaacctgacgggcggcggcacgctggtcgccggcaacggcgcggcgctcggtaccggcgcgttgaacctcgccggcgcaggcggcacgctggccgcgagcgtcgccggcacgacgctgaacaatgccgtcaatctcggcacgggttcggcgctgacgctcggcggcacgaacgacctgggcctcggcggcatcatcgccggcggcggcagcctcgcgcaaaccggcagcggcacgaccacactcaccggcgcgaacctctacacgggcggcacaacgctcggtgccggcggcttgtcggtcggcaacaacacggcgctcggcacgggcacgctcaacgtcaccggcagcggtggcgcgctcagcgcaagcacggcgaacctgctgctggcgaacgccgt

SEQ ID NO: 11756 - DNA, 1089 bp, Burkholderia cepacia
atgacactgcagaaaccctcgcgcgccgccgccggcgcgttccgcaaactcgcgctggccgcctgcgccgccggtctgctgcaaggcgccgcgatgccggcgcatgcggcaaacgcggtcgtgctgtacacggcggacggcctcgagaacctctatcgcgacgtgctgccggctttcgagaagaaggaaggcgtgaaggtcaacatcgtgacggcgggcagcggcgaggtggtgaaccgcgcgaacatcgagaagaattccccgaaggccgacgtgatcgtcacgctgccgccgttcatccagcaagccggccagatgggcctgctgcagccgtaccagagcgtgaactacaagaacgtgccggccatcgcgaaggccgaggacggcacctgggcgacgttcgtgaacaactacttctcgttcgcgatcaacccggacgtcgtgaagaaccagccgaagacgttcgccgacctgctcgcgccggcctacgccggcaaggtcgcgtactcgaacccggccacggccggcgacgggatggccgtgctgatcctgacgacgtcgctgatgggcgaggacaaggcgttcgactatctcgcgaagctgtcgcagagcgtgaagttccacacgaagggcacgggttacctgaacgtgctgctgtcgcgtaacgagatcagcgtcgcgaacggcgacctgcagatggacctcgacgatgccgaacacggcgcgctgtccatcaagccgatcttcctggccgcgaaggacggcgaccagccgaccacgttccagctcccgtacggcatcggcctgatcaagagcggcccgaaccaggacgccggccggaagctgatcgactacctgatgtcgacggaagtgcagtcgaaggtgccggacatgtacggcatcccgggccgcaccgacgtgccgctggccggcaagaacggcgaagcggtcaagaaggcgatcgcgggtgtgaagctgattccggtcgactggacccaggtgatggcgaagaagccggtgtggatcgagcgctggaagaaggacgtgatcggcagctcgggcaagcagctcgacgtcgtcaagccgaag

SEQ ID NO: 11757 - DNA, 439 bp, Burkholderia cepacia
aaaccgtatccggattcacgagggcagcatcgttctgccgaacggtttcgaggatcgcacgaccaacctgttcgtgccggccgatacagccgcgcagccgaacctcagtgtcgcacgcgactggctgaaggacggagagacccttgcgccgtatatcgatcgtcagatcgcgctgctcaaatcgcgattgcagggacaccgggtgctttcgcgtcaggctgaacggctcgggcctgaaactgatggaatgccgggggagcgcatcgatgctgcctatcggaacggcccgaagaccgtttttcaacggcaaggcgcattcatcgttgccccgggacgcgtgctgatctttaccgcgtcgagcgcgaagagcttcggcgaaacgctcgacgcattgtggcgcaactggctcgacggctaccgtccggcagaacaagagtcg

SEQ ID NO: 11758 - DNA, 921 bp, Burkholderia cepacia
atgaagatcaagatactcggctcgggagccggcggcgggctgccgcaatggaactgcaattgcgcgaactgccgccgtgtacgcagcggaagcggccacgtgctgccgcgcacgcagtcgtcgatcgcggtcagcgacgacggcatcgactgggtcctcgtcaatgcgtcgcccgacattctttcccagttgcgcgcggatccggacctgcaaccggcacgcgcgatccgcgacagcggcatcgccgccgtcgtgctgtgcgacgcgcagatcgatcacgtgacgggcctgctgatgctgcgcgagcgctcgacgccgctgccgctctacgcgagcgcgccggtgctcgacgacctgtcgaccggcttgccgctcgtgccgctgctcggccattactgcggcgtcgccgcgcatacgatcgcgcccggcgagccgttcgcggtgccggcggcgagcgggatccggttcaccgcgatcgcggtcgacagcaagccgccgccttattcgccgcggcgtgcgtcggccgcacccggcgacaacatcgcgctgtcgatcgaggacgtcgcgagcgggcggcgcgcgttctatgcgccggggctcgcgtcggtcaccgacgaggtacgcgcggccatggacggcgccgatctcgtgctggtggacggcacgttctggaccgggaccgagatgatcgatctcggcctgtcgcacaagcacgcggccgacatggaacatctcgcgcagtgcgcggaacacgggcagcccggcatgatcgactggctcgacacgctgcctgcgcgaacgcgcaaggtgctcacgcacatcaacaacacgaacccgattctcgatccgcattccgtcgagcacgcgcacctgcgcgcgcacggcatcgacgtcgcgcacgacggcatgcaattccaggtc

SEQ ID NO: 11759 - DNA, 1659 bp, Burkholderia cepacia
gtgccgtgcgtgcgcggaagacatgaagatggcgaacctgctcggcatcgacacgaaccgcgtgatctcgttcacgttcgtgctcggcgcgatgctggcggccgtcggcggcgtgctgatcgggctgacgatcggcaagctgaatccgtatatcggcttcgtcgcgggcatcaaggcgttcaccgccgcggtgctcggcgggatcggcagcattccgggcgcgatgctcggcggcgtgctgctgggcctcgccgaaaccttcgccgcgggctacatgccggccgagtacaaggacgtggtcgcgttcggcctgctcgtgctgatcctgctcttccgcccgaccggcctgctcggcaagtcggacatcgaaaaggtttgagggagacgcagatgagtcaagtcatttccgttcgccgcccggccgccgacgcgtcgttcggccaggcgctgaagaacgccgtggccgccgcgatcctgacggcgatcctcacgattccggtgctcgggctgcaactgaagctcgacggctatcaggtggtgctgacgccgcactggcgcccggtgtggatcgcggtcgcggccgtgttcctgttccagttgttcaagccgtggctgatgcgcgcgaaagcggtcgtgaagctgccggcggcgccgacgatgggcgcgcggcagcagcgcgtgatcatctgggtgctgctcgcggtcggcctcgtgtggccgttcttcggctcgcgcggcgcggtggacgtcgcgacgctcgcgctgatctacgtgatcctcggcctcgggctgaacatcgtggtcggtttcgcggggctgctggatctcggctacgtcgggttctacgcggtcggcggctatacgtacgcgatgctgaaccagtatttcgggctgtcgttctgggaatgcctgccgatcgcggcgatcgccgcggcgacgttcggcttcctgctcggcttcccggtgctgcggttgcgcggcgactatctggcgatcgtcacgctcggcttcggcgaaatcatccgcctgctcgcgaacaacctgacgagcctcaccggcggcccggacggcatctcgagcattccgaagcccacggtgttcggcttcgagatggcgcgctcggcgagcgtcgaaggcgcgaagaccttccatgaactgatcgggctggaatacagcggcgagcacatggtgatcttcctgtacctgatcgcgctgctgctggtgggcttcacgctgttcgtgacgagccgcctgatccgcatgccgatgggccgtgcgtgggaagcgctgcgcgacgacgagatcgcgtgccgttcgctgggtctcaacccgacgcgcatcaagctgtcggcgttcacgctcggcgcggcgttcgcggggatcggcggcgcgttcttcgcggcgcgtcagggcctcgtgaatcccgaatcgttcaccttcatcgaatcggcgctgatcctcgcgatcgtcgtgctcggcgggatgggctcgcagctcggcgtgattctcgcggcgatcctgctgaccgtgctgccggaagtcgcgcgcgggttcgccgagtaccggatgctgatcttcggtctcgtgatggtattgatgatgatgtggcgtccgcagggcctgttgcccgcgagccgtccccacgtggagctgccgcaa

SEQ ID NO: 11760 - DNA, 420 bp, Burkholderia cepacia
atggtgcgacgttgggcggcgagctatcgcgagcatggtgaacaggggctgcgcaagaagcacagccactacgacgcgcgattcaagttgtcagtccttcagcggatgcggcgcgatgaactgtcgtatgcacaggtggcagcgctgttcggcatccgcaatgaacgaagcatcccgatctgggagcgtctgtatcatgagggcggtatagatgcgttggcgcctcgtcgccgagggcgccctccgaaaatgatcacctcaccaccaccgaaatcccccgacgataccgtgcagaaagagccgagccgcgaggaactgctcaaggaaatcgtgtatttgcgcgcggaggtggcatacctaaaaaagctcgatgcgctgctgcaatccaagaagcaggcagcgcccaggaaaaagcgcaaa

SEQ ID NO: 11761 - DNA, 810 bp, Burkholderia cepacia
atgcggatcgcgctgggcatccagtacgacggcgcggcgttctgcggctggcaggcgcagccgcacggcaagaccgtgcaggaccggctcgaacatgcgctggccgagttcgcgcgggtgccgctgcacacgacggtggcggggcggaccgacaccggcgtgcacgggctcgggcaggtcgtgcatttcgacacggagctcgagcgcgaggtgttctcgtgggtgcgcggcaccaacgcgttcctcccgccgaccgtgtcggtgcagtgggcgaagccgatgccggacacgttccatgcgcgcttttcggcgttcgagcgcacctattactacgcgctgtacgtgcatccggtgcgttcgccgatgctggccgggcgcgcgggctggatccacacgccgctcgacgacgacgcgatgcgcgccgccgccgcgtacctgatcggcgagcacgacttttcgtcgttccggtcgtcggaatgccagtcgaagacgccggtcaaacacctgtatcagatcgacgtgcggcgcgcggggcatttcatccatttccgcttccgcgccaacgcgttcctgcaccacatggtgcgcaacctgatgggctgcctcgtcgcggtggggcgcggccgctatccggccgactggctcgccgacgtgctggccgggcgcgaccgcaatctcgcggcgcccacgttcatggccgacgggctgtacctcgcccacgtcggctacccggcggaattcgccgtcccgcccgcgcagctcggcagcgtgccgtggagcagcgtctgggcggatctggactcacaaaca

SEQ ID NO: 11762 - DNA, 1386 bp, Burkholderia cepacia
atggcagtcagcgtgtttgacctcttcaagatcggcatcggtccgtccagttcgcacacggtcggaccgatgcgcgcggcgctgatgttcgtccagggcctcgagcgcgacgggctgctcgacgcgacggcccacgtgaaggtcgagctgtacggctcgctcggcgccaccggcaagggccacggcaccgaccgcggcgtgatgctcggcctgctcggcgacgcgcccgacaccgtcgatcccgacacgatcgacgcgcgactcgaagacgtccgcaagacgaagcaactcgcgctgctcggcacgcatccggtgccgttcgtgctgaaggacaacatcgcgttctaccgccaggcgctgcccgaacatccgaacgggatgaagctgcgcgcgagcgacgcgaacggcgcggtgctggtcgagcgcacttatctgtcggtcggcggcggcttcgtcgtgacggccggcgcaccgaacaccaaggtgctgagcgcggccgagcagatgacgcacccgttccgcaccggcgcggagctgctcgcgctgaccgcgtcgaccggcaagtcgatcgcgcaactgatgtgggaaaacgagcgcgcgtggcacaccgaggaagaaacgcgcgacgggctgctgaagatctgggccgtgatgcagtcgtgcgtgtcgcgcggctgcgggatcggcaacccggacgccgacggcaacctgcccggcccgttccaggtcaagcgccgcgcgccgcagctgtaccgcacgctgacgggcagccctgagcgcgcgctgcaggacccgctgtcgatgatcgactggatcaacctgtacgcgatcgcggtcaacgaggaaaacgcggccggcggccgcgtcgtcaccgcgccgaccaacggcgcggccggcatcatcccggcggtgctgcactactacacgcgcttcacgcccggcgcgaacgaacagggcgtgatcgatttcctgctgacggccgccgcgatcggcatcctgtacaagctcaacgcgtcgatctccggcgcggaagtcggttgccagggcgaagtgggcgtcgcgtgctcgatggccgccggcgcactcgcggccgtgctcggcggcacgccgcagcaggtcgagaacgcggccgagatcgggatggagcacaacctcggcctgacctgcgacccggtgggcgggatggtgcagatcccgtgcatcgaacgcaacgcgatggcgtcggtgaaagccgtcaacgcggcgcgcatggcgctgcgcggtgacggctcgcactacgtgtcgctcgactccgtgatcaagacgatgcgcgagacgggcgccgacatgaagaccaagtacaaggaaacgtcgcgcggcgggctggcggtgaatatcgtcgagtgc

SEQ ID NO: 11763 - DNA, 1430 bp, Burkholderia cepacia
atgaaccagcaagcagaaccgttcctgagcaccctcgacccgcaagccgacgccgcgcaggtgcacgtgtcgcgcgcccacgaatccgcccatctgcacgtgagcgggcgcgccacctacaccgacgacattccgatcgtcgccggcacgctgcacgcggcgctcgggttgtcggcgaagccgcacgcgaagatcgtgtcgatgaacttcgacgcggtgcgcgcgacgccgggcgtggtcgccgtgttcacggccgacgacattccgggcgtcaacgattgcggtccgatcatccacgacgatccggtgctcgcgaagggcgtcgtgcagttcgtcggccagccgatgttcatcgtcgtcgcgacgtcgcacgacatcgcgcggctcgccgcgcgtcgcgcgcaggtcgactacgaggagctgccggcgatcctgaccgcgcaggaagcgcgcgcggccgaaacttacgtgatcccgccgctgaagctcgcacgcggcgatgcggccgcgcggctcgcggtcgcgccgcaccgcgagtcgggcgagatgctgctcggcgggcaggagcagttctatctggaagggcagatcttgttcgcggtgccgaaggacgacgacggcatgcacgtgtattgctcgacgcagcacccgagcgagatgcagcacctcgtcgcgcacgtgctcggcgtcgcgtcgcacaacgtgctggtcgaatgccgccggatgggcggcgggttcggcggcaaggaatcgcagtcgggcctgttcgcgtgctgcgcggcgctcgccgcgtggaagctgctgtgcccggtgaagctgcgcccggaccgcgacgacgacatgatgatcaccggcaagcggcacgacttccattaccgcttcgacgtcggctacgacgacgacggccgcatcgacggcgtcgcgctcgacatgacgtcgcgctgcggcttctcggccgacctgtccggcccggtgatgacgcgcgcggtgtgccacttcgacaacgcgtactggctcggcgacgtcgacatcgccggctactgcggcaggaccaacacgcagtcgaacaccgcgttccgcggcttcggcggcccgcagggcgcgttcgcgatcgaatacatcctcgacgacatcgcgcgctcgctcggccgcgatccgctcgacgtgcgctacgcgaacctgtacggcaagaccgaacgcaacgtgacgccgtacgggcagacggtcgaggacaacgtgctgcaggagctgctcggcgaactcgagacgacgagcgactaccgtgcgcggcgcgcgggcgtgcgcgccttcaacgcacgcaacacggtgctgaagaagggcatcgcgctcacgccggtgaaattcggcatcgcgttcaacgtcacgcacttcaaccaggccggcgcgctggtgcacatctacaccgacgg

SEQ ID NO: 11764 - DNA, 495 bp, Burkholderia cepacia
gtgccgcttaatagagaagacaagcaagccgtcgtcgctgaggtttccgcgcaagtcgcgaaggcccagaccgttgtgctggctgagtatcgtggaattgcggttggcgatctgaccaagctgcgcgcgcaagcgcgtgagcaaaaggtttacctgcgcgtgttgaagaacacgctggcgcgtcgcgccgtcgaaggtacgccgtttgctccgctggcagagcagatgactggtccgttgatctacggcatctcggaagatgcaattgctgctgctaaggtcgtcaacgacttcagcaagagcaatgacaagttggtcatcaaggctggttcgttcgatggcaaggtgatggacaaggctggcgtgcaagcgctggcaagcatcccgagccgcgaagaactgctctcgaagctgctgttcgttatgcaagcgcctgtttcgggcttcgcgcgtgctctggccgcgctggccgagaagaagcaagcggaagctgca

SEQ ID NO: 11765 - DNA, 798 bp, Burkholderia cepacia
gtgacggtcatcgcacaactttccgatattcatgtccggcctcacggcgtcctgtatcaagacgccgtggattccaatgtcatgttttcggcagccgtcgattcgctgaaccgcattcgacctgagccagatctggtcgtcatctccggcgacctgacggacgagggcaccgaagacgagtatcgaaaacttcgcgaactgctcgtcgagttgaggcgaccgttcgtggttctgccgggtaatcacgacgaccgtggcaatctgcgagccgcgttcccggatcacgcgtggcttccggacgagggcgcactctcgttcgcgctggacgtgggcgaactacgcgtcgtggcgttggacacctccgttccagggctacatcacggtgaactggacgccgaaaccctggcgtggctcgacactgaacttgccgagcatcgcaatcggacggtggttatcgtcatgcaccatccaccgttcatgaccggcattccttatctcgacatctacgggttgcgaaatgcggaggcatttgccgcggttcttgcgcggcatagcaacgtagatcgcattcttgccgggcacgtccaccggtcgatgcagacgcgtcttgggcgcgttccggtactcacctgcccgagcacgaccactcagattgcgctgcgcgttgaagcggacgcgcagcccgcttcctttctcgaaccccctgcatacatgctgcatcgctgggcaggtcgaggtcagccagcggtctcccacttgtgttacgtggggcacttcgagggcccgttccccttcgcg

SEQ ID NO: 11766 - DNA, 462 bp, Burkholderia cepacia
gtgcggcgcatcgcggccgacctgcggccggtgatgctcgacgatctcggcctcgtgcccgcgatcgaatggctcgcgaacgatttcacgaaccgctacgggatcgatgtcgagcgccacatcgaaaccggcggcctcacgttcaccagcgcgggcgcgaccacgctgttccgcatcgtccaggaagcgctgacgaacgtcgcgcgccatgcggatgcgacgcgcgtggcgttgcggctcgacatcgaggaaggcttttgcgtgctgcgcgtcgcggacaacggccgcggcgcggcgcccggcggcccggcccacgaggacaaatcgttcggcctgatcggcattcgcgaacgcgcccacatgctgggcggcaccgtgacgatcgacaccgcgctcgcgcgcggcttctcgattaccgtcgcctttccgctcgccaccgttcaacaggacacgctcatcaca

SEQ ID NO: 11767 - DNA, 834 bp, Burkholderia cepacia
atggataaccgtaccgccgccgacctggcgcttcccgactacagcgaatggctggacggccccgcgctgatcgcgctgcgcggcaatgacgatccggccagcgcgtatcggctcggcacacgcgactatgactggcacgcgcatgcgcgcggtcaggtgctgtgtgtcgaggcggggttgatccacgttcatacgccgcgcggtgcgtggctgctgccgccgcatcgtgcgggctgggtgccgcccggcatgccgcacaaggtgcgggtgagcggcgcgcccggtggctgggtgctgctggccgcgccgccgttctgcgcgggcctgccggacgaaccgtgcgtgatcggcatcagcgcggtgctgcgctcgctcgcgcatcgtgcgatcgaatggaacaagcacgcgccgctggcgccggagcacgcgaggatggctgcggtcattcacgacgaaatccgtcgcacgccgcgcgaggcgttgcacgtgccgatgcccgccgatccgcggctcgcgcgggtggcacgggcgcttctcgacgatcccggcagccggcgcacgctcgatgcatgggcggcgttcggtgcgatgtcgccgcgcacgttgcggcggctcatgtcggccgaaaccgggttgagcttcgcgcaatggcgccagcaggcccggctcgcgcgcggcctcgacctgctcgcccgcggctgtccggtggccgaggtgtcggacctgctgggttacgcatcgcccagcaacttcatcgcgatgttccgaaaggcgctcggcgattcgcccgcgcactatttcgccacccggccggaacggcagccggacgggcgc

SEQ ID NO: 11768 - DNA, 1685 bp, Burkholderia cepacia
cgccgaccgcggcgccgccggcagcaatcgtccccggcacgaacctcccggccacgccggcagccgtcagttcggcgccgccgaccgtgatcccgccaatcggcgcacccgcggcccatgcaaccgaggccaccgacgcaaccgaaccgcccccggccgacacccccgtccgtcagccgcgcccgaacgcgttcgaattccacgcacccgcgtcgttcagcgtcgaactgccgacgctcgacctgctcgaaccggcatccgacgacatcgaaacgatcaccgaggaacacctcgcgcaaaccgcgcaggtgatcgagcagcggctgcaggaattcaaggtgccggtgacggtggtcggtgcatcggccggccccgtgatcacgcgcttcgagatcgaacccgcgctcggcgtgcgcggcagccagatcgtcggcatgatgaaggatctgtctcgcggcctcggcctcacgtcgatccgcgtcgtcgagacgattcccggcaagacctgcatgggcctcgaactgccgaacgcgaagcgtcagatgatccgcctgtcggaaattcttgccgcacgcgaatatcagcattcgccgtcgcaactgacgatcgcgatgggcaaggacatcaccggccatccggtcgtcaccgacctcgcgaaggcgccgcacatgctcgttgccggtacaaccggttcgggcaagtcggtcgcgatcaacgcgatgatcctgtcgctgctgtacaaggcgacgccggaagacgtgcggctcatcatgatcgacccgaagatgctggagttgtcggtctacgaaggcatcccgcacctgctcgcgccggtcgtcaccgacatgaagctcgcggccaacgcgctgaactggtgcgtcggcgaaatggagaagcgctaccggctgatgtcggccgtcggcgtgcgcaacctcgcgggcttcaaccagaagatccgcgacgcggaagcgaaggaaaagaagatcggcaacccgttctcgctgacgcccgacgatccggagccgctgtcgaagctgccgctgatcgtcgtcgtgatcgacgagctggccgacctgatgatggtggccggcaagaagatcgaggagctgatcgcccgcctcgcgcagaaggcgcgcgcggccggcatccacctgatcctcgcgacccagcggccgtccgtcgacgtgatcacgggcctcatcaaggcgaacatcccgacgcgcgtcgcgttccaggtatcgtcgaagatcgactcgcgcacgatcctcgaccagatgggtgcggagtcgctgctcgggatgggcgacatgctgttcctgccgcccggcaccggctatccgcagcgcgtgcacggcgcgttcgtcgccgacgaggaagtgcaccggatcgtcgagtacctgaagcagttcggcgagccgcagtacgaggaaggcatcctcgacggcccggccgccgacggcgcgacgcaggacctgttcggcgacgcgccggacgcggaagccgatccgctgtacgacgaagcggtcgcattcgtcgtgcgcacgcggcgcgcgtcgatctcgtcggtgcaacggcagttgcgcatcggctacaaccgcgcggcgcgcctcgtcgagcagatggaagcggccggcctcgtgtcggcgatgggcatcaacggcagccgcgaggtactcgtgccggcc

SEQ ID NO: 11769 - DNA, 1701 bp, Burkholderia cepacia
gtggcgcccgcccggcccgtcgccacgcgccaaccggcgcgcccgccgaatattttcatccgggtgcccgtcgatgagagaatcgcaccacgattccctttcgatggagcccgcatgaagcacctgctgtcccggctgttcgtcagcgccgcgctcgtcgcgcttgttccggcgctgccggcgcaggctgccacgccgcccggcatcttcgtcgtcgccacgcagctcggcgaattcacgaccctcgacccgagcgggatctacgagctggtgccgtccgaatacgtcgcgaacacctacgagcggctggtgcgcgtcgacctgaaggacccgacgcgcttcgacggacagatcgcgcaatcgtggacggtcggcgccgacggcgtgacctacacgttcaagctgcgcccgggcctcacgttccattccggcaacccggtgaccgccgacgacgtcgcgtggtcgctgcagcgcaccatcctgctcgacaaggggccggccggcgtgctcgccgatctcggcctcacgaaggcgaacgtgacgcaaaaggtgcgcgtggtcgatccgcaaaccgtcgtgctcgaaaccgaccgcaaatacgcgccgagcttcgtgctcaacgtgctgagcgcatgcccggcctcggtcttcgataaaaagctgctgctgtcgcaccagcaaggcagcgatttcggcagcggctggctgcgcaccaacgacgcgggctcgggcccgtaccagctcgtcaagtggacgccgaacgaaaccatcgtgctgcagcgcttcgacaaataccgcacgccatacccgatgaagcgcgtggtgctgcgccacgtgcccgaagcgtccgcgcaacggctgttgctggagaacggcgacgccgacgccgcgcgcaacctgagccccgacagcctcgccgcgctgtcgaaggccggcaagatcaaggtcgcgtcgtggccggtgtcggccctgctgtacctgagcctgaacacgaagaacccgaatctcgcgaagcccgaggtgcagcaggcgatgaagtggctcgtcgattacgacggcatccagcgcaacgtcgtcagtacgacctacaaggtgcatcagaccttcctgcccgaaggtttcctcggcgcgtcgaacgcgcggccgtacaagcaggacgtcgcgaaggcgaaggcgctgctcgcgaaggccggcctgccgaacggtttcgacgtgacgatggacatgccgaacgactatccgtacctcgagatcgcgcaggcgctgcaggcgaacttcgcgcagggcggcatccgcgtgaagctgatcccgggcgacgcgaagcaggcgatcggcaagtaccgcgcccgccagcacgacatcttcatcggcgaatggtcgcccgactacatggacccgaacagcaacgcgcgcggtttcgcgtggaatccggacaactcggaccagtcgccgaccaagatgctcgcgtggcgcaacagctggaacattccgcaactgacgaaggacaccgaagccgcgctcgtcgagccgtcgcccgcgaaacgcgcgcagcgttacgaaacgctgcagaaggccgtgctcgcgaactcgccgttcatcatcatgttcgagaaggtcgtgcaggtcgccacgcgccccggcgcgaccggaccggaaatcgggccgatcaacgacctcgtgtcgtaccggacgctcgcgaag

SEQ ID NO: 11770 - DNA, 1875 bp, Burkholderia cepacia
ttcggcctcgacatgatgctgcccggctggctccagctcgtgctcgcgtcgatcgtgcagttcggcttcggcgcacgcttctatcgcgcggcctggcatgcggtgaaggcgcgcaccggcaacatggacctgctcgtcgcgctcggcacgtcggccgcgtacgggctgagcctgtggatgctgctgcgcgatcccgcgcatccgggccatctgtatttcgaagcgtcggccgtcatcgtcacgctcgtgcgcttcggcaagtggctcgaatcgcgcgcgaagcgccagaccaccgaggcaatccgcgcgctgaacgcgctgcgccccgaccgcgcgcgggtcgtcgagcacggcgtcgaacgcgacgtgccgctgtcgcaggtgcgcgtcggcacgcacgtcagcatccggcccggcgagcgcgtgccggtcgacgggcggatcgtgtcgggccgctcgcacatcgacgaatcgctgatcaccggcgaaagcctgcccgtgccgaaggacgacggcgacgccgtcacggccggctcgatcaacggcgaaggcgcgctcgtcgtcgcaaccaccgcgatcggcgcggagacgacgctcgcgcgcatcatccgcctcgtcgaatccgcgcaggccgagaaggcgccgatccagcggctcgtcgatcgcgtcagcgaggtgttcgtgccggcgatcctcggcatcgccgtgctgacgctggtcggctggctgatcgccggcgccgggatggaaaccgcgatcctcaacgcggtcgcggtgctcgtgatcgcctgcccgtgcgcgctcggtctcgcgacgccggccgcgatcatggccggcaccggcgtcgcggcccggcacggcgtgctgatcaaggacgcgcaggcgctcgaactcgcgcagcgcacgaccgtgatcgcgttcgacaagaccggtacgctgaccgaaggcaaaccgtccgtgacggcgttcgacgccgtcggcgtgccgcgcgacgaagcgctcgcgctcgcggcggccgtgcagcggcagagcgaccatccgctcgcgcgcgcggtggtcgccgcgcatgacgccgacgtggccgcacagggcggcgtagccgcgccggtcgtcgcgaccgatgcacgcgcggtggccgggcgcggtgtggaagcgcacgtcggcgggcaacaacttgcgctcggcagtacgcgctggcgcgacgaactcggcatcgcggtaccgccggcgctcgacgcgcgcgcggcggaactcgaacgcgccggcaatacgatctcgtggttgatgcgcgtcgatgcgccgcgcgcggtgctcgcgctgatcgcattcggcgacaccgtgaagccgggcgcccgcgacgcgatcgcggcgctgtcggcgcgcggcgtcgcgagcgcactcgtgacgggcgacaaccgtggcagcgcggcggccgtcgcggcggcgctcggcatcggcgaagtgcacgcgcaggtgctgcccgacgacaaggcacgcgtcgtcgccgagctgaagcgcacgcacggcggcgtcgtcgcgatggtcggcgacgggatcaacgatgcgcccgcgctcgccgcggcggacgtcggcatcgcgatggcgaccggcaccgacgtcgcgatgcacacggccggcatcacgctgatgcgcggcgacccggcgctcgtcgccgacgcgatcgacatctcgaagcgcacgtaccgcaagatccagcagaacctgttctgggcgttcgtgtacaacctcgtcggcgtgccgctcgcggcgctcggcttgttgaacccggtgatcgcgggcgccgcgatggcgttttccagcgtcagcgtcgtaaccaacgcgctgctgctgcggagatggaaaggccgcgcgcgt

SEQ ID NO: 11771 - DNA, 2118 bp, Burkholderia cepacia
atgagtttcgctccgaacgggggtattcccagtggattgggcggtggtgcgctcggctcgttgagcgcactcgggggcctcgcgggcccggtggcgtcgagcgtggccggcagcctcgggccgctcgccgggctggccgggcacgtcgacaccgtccagcgcgcgatgcagctcgcgcagaccggcttctcgctgatggacaagacgcccggcgcgatcgccgaagcgatcaacggcgccgccaaccccgcgcgcctgacccagctcaaccgttacgtgacactcgacacgccgcttggcccggatgtgctgctggtcagcgcggccgtcgtcgacgagcacgtgaaccggttgccggaaatccacctcgacctgctgtcgcatcgccacgacctgcgcccggaggatctgatcggccagcaggtcaagatccgattcgatcagcaggcgcgcctgtcgacgctcgaacgcgtcgtcgcgtcgggggcagtcgagggcgaccgctacttcgacggctacgtcgcgtcgttcgaccgggccggcaatcccgggaacgtcacgcaataccacctgacggccgtgccgtggttctggttcctcacgcgctcgaccgactgccggatcttccagaacaagaccgcgcaggacatcctcaccgagatcttccaggaacacggtttttccgatttcacgttcgacatccggaccagccagaagccgctcgagtacgtcgtgatgtaccaggagagctactacaacttctgcgcgcggctgatggagcaggaagggctcgtgtggacgcaccgctacgagaaggacaagcactttctcgtgatcggcgacacgaacctgctgttccgcccgatcgacgggctcgccaccgtgccgttcgccgcgaccgaggccagcgaggacagcggcatcgatcagttgcacgaaggccggcgcttcggcgtcggcaaggtcacgttccgcgacttcaatcaccagaatccgtcgtcgccgctgatgctggtcgaggccgggccgcaaaacctcaagcatgcgcggctcgatgcgaccgagcgcttcgagcaccagtcgctgtacgaccatggtgacgacggcaaccgctacgcccgtttcgcgatggaggccgaggaggcgcaagcccatcgctataccggcggcggctacgcgtggcgcatgaccacggccggcgccgtgaccgtcgcgaatcaccccgtcctcgagaacaaccaggagtacgtgatcctgcacgtgcgtcacgaggccgtgaacgactatacgcagcacagtgcgaagctgccgtaccgcaacagcttctcgctgctgccgaagaagattccgtaccgtgcgccgcgcgcgacgccgaagccggtgattcacggcacgcaatcggcgatcgtcgtcgggccgaagggcgaggaaatctatacgaacggcagcgcggtgaaggtgcatttcccgtgggaccggcgcggcaagaaggacggctccgattcgatgtgggtgcgcgtgtcgcagccgtgggcgggagacggctggggcgcggccgcgattccgcggatcaagcaggaagtgctggtggcgttcaatcagggcgatccggataaccccgtgatcgtcggccgcgtgttcaacggcgagcagggcaacccgtatcacggcgcggccggccagacgatggggatcaagagccagacgcacaaggggcaggggtcgaacgagttgctgatgagcgacgtcaatggcgcacagatgctctacatgcatgcgcagaaggacatgcataccgttgtcgaggacgcgcagtggactcaagttctcaaaggcgaccggaccgtcgaggttggcaagggcaaccatacgacggccgtcgcagttggcaacctgtcggacgttgtcgtgcagggcaatacgctgcaccagactccgcagggtgtgcacacactggaagccaaggaactctggatcaagatcggcggcgatggcggcacgcggatccatatgacagccgactcgatcgacatctataagggcgattcggtgatccacctggatgacagcaacatcaatattcaggcggctcggaccgacatcaacccgaagaacggc

SEQ ID NO: 11772 - DNA, 201 bp, Burkholderia cepacia
atgacctcgcgagaaatttccgtattcggcgtctattttcctgcggtgatgcttactttcatcgctggtgcgctcatttccttagtcgcaaaccgcttgctcagccgcacgagattttgcgagcacgtctggcatccgtcactcttccgcgccagtctgatgctctgcatctgctgcgcactgggactcacgatttatagc

SEQ ID NO: 11773 - DNA, 1119 bp, Burkholderia cepacia
atgaacgtaggtctcgtaggttggcgcggcatggtcggcagcgtcctgatgcagcgcatgcaggaagagggcgatttcgacctgatcgaaccggtgttcttcagcaccagcaacacgggcggcaaggcgccgtcgttcgcgaaaaacgagactacgctcaaggacgcgaccaacgtcgacgagctgaagaagtgcgacgtgatcatcacgtgccagggcggcgactacacgaacgacgtgttcccgaagctgcgcgcggccggctggaacggctactggatcgacgcggcgtcgtcgctgcggatgaaggacgacgcggtcatcatcctcgatccggtcaacctggacgtgatcaaggacgcgctcgtcaagggcacgaagaacttcatcggcggcaactgcacggtcagcctgatgctgatggcgctcggcggcctgttccgcgagaacctcgtcgactggatgacggcgatgacctaccaggccgcatccggcgcgggcgcgcagaacatgcgcgagctgctgtcgcagatgggcgcgctgcatggttcggtgcaggagcagctcgccgatccggcttccgcgatcctcgacatcgaccgccgcgtgctcgcgacgatgaacagcgacgcgatgccgacgagccagttcggcgtgccgctcgccggttcgctgatcccgtggatcgacaaggatctcggcaacgggatgtcgaaggaagagtggaagggcggcgcggaaaccaacaagatcctcggcaagccggcgatgggcgagccgggtgcgatcccggtcgacgggctgtgcgttcggatcggtgcgatgcgctgccattcgcaggcgctgacgatcaagctgaagaaggatgtgccgctcgacgaaatcaacggcatcctcgcgtccgcgaacgactgggtgaaggtcgtgccgaacgagcgtgaagcgtcgatgcgcgacctgtcgccggcgaagatcaccggcacgctgacggtgccggtcggccgcctgcgcaagctcgcgatgggcggcgaatacctgtcggcgttcacggtcggcgatcagctgctgtggggcgcggccgagccgctgcgccgcatgctgcgcatcctgctcgacaag

SEQ ID NO: 11774 - DNA, 717 bp, Burkholderia cepacia
gtgcgcgacacgacgcgtgagaccaatatgaacagaaccttccccattcgcatcgtgatcgccgacgatcatccggctgtcgtcatcggcgcccgctacgagctgtcggccacgaacaccgtcgcggtcgtcgcgaccgcgcacaactcgacggagctgatggacgcgctgtcgcatcacccgtgcgatgtgctggtgtccgactatgcgatgccgggcaccgaatacggcgacggcctcgcgatgttcacgatcctgctcaagcggtttccgggcctgaagatcgtcgtgatgacgatgatggagaacgcggtggcgctgcgcgcgctgatggatatcggcatcgcgtgcatcgtcagcaagtcggacatgcccaatcacctgacgatggcgatccacgcggcttatacgaacggccgctacctgtcgccatcgatggaccggatcctgcgcaacacaggcagcgtcggcggcaaggcgcccgcgctgtcggtgcgcgaggtcgaggtgattcgcctctttgcgtcggggctgtcggtcaacgaaatcgccgaaaagctgaaccgcagcaagaagacgatcagcacgcagaaaagctcggcgatgcagaagctcggcatcgagcgcgacgtcgacctggttcgctacgcgatcgcgtgcgggctcgtgaccgactacggctatgcgccgcccgtgcgcagcgacgaagcgaacgca

SEQ ID NO: 11775 - DNA, 1386 bp, Burkholderia cepacia
atgtccgacactcgtcccgatacgcttttcgccctcaccgcgctctcgcccatcgacggccgctacgccagcaagaccgaagcgctgcgcgactggctctccgaagccgctttcatgcgccaccgcgtcaccgtcgaggtgcactggctgatcgcgctgtcgcgcgccggcttcgcggaagtcccgcgcttctccgatgcgtcggaacagttcctgctgcagctcgccgagcgcttcaccgcgcacgacgccgcgcgcatcaaggaaatcgagcgcgtgacgaaccacgacgtgaaggccgtcgaatactggctgaaggaatcggtgaagggccaggccgaactcgagaaggcgagcgaattcatccacttcgcgtgcacgtccgaggacatcaacaacacgtcgcacgggatgatgctcgccggcgcgcgcgaacacgtgatcctgccggcgctgcgcacggtctaccagcgcctcgtcgcgctcgcgcacgcccacgccgaacagccgatgctgtcgcgcacgcacggccagccggccagcccgacgacgctcggcaaggaactcgcgaacgtcgcggcccgcctcgcccgcgcgatcacgcgcatcgagaaggtcgagatcctcggcaagatgaacggcgcggtcggcaacttcaacgcgcacctgtccgcgtatccggaattcgactgggaagcgttctcgcgcgacgtgatcgaaaaccgcctgaagctcacgttcaacccgtacacgatccagatcgagccgcacgactacatggccgaactgttcgacgcggtcgcccgcgcgaacacgatcctgctcgacctcgaccgcgacgtgtggggctacatctcggtcggctacttcaagcagaagacgaaagccggcgaaatcggctcgtcgacgatgccgcacaaggtcaacccgatcgacttcgagaactcggaaggcaacctcggcctcgcgaacgcgacgctgcgccacctcgccgacaagctgccggtgtcgcgctggcagcgcgacctgaccgactcgacggtgctgcgcaacatgggcgtcgcgctcggctactcgctgctcgcgtacgactcgctgatccgcggcctcgacaagctcgaagtgaacccgcagcgcctgaacgaagatctcgacaactgttgggaagtgctcgccgagccggtgcagacggtgatgcgccgctacggcatcgagaacccgtacgagcagctgaaggaactgacgcgcggcaagggcatcacgcgcgaggcgctgcaggaattcgtcggcacgctggcgatcccgcaggatgcgaaggagcgcctgctcgcgatgacgccggcgtcgtacatcggcaaggccgtcgaactcgcgaagcggatcgcg

SEQ ID NO: 11776 - DNA, 1407 bp, Burkholderia cepacia
gccaccgcgacgcacaactggcggcgccgccagatcctgtgcgcgggcgcgtcgacgctggtgctcggcctcgtcgcgccgcggctcgcgcacgcgtcgtcggtgctcggcgtgcgcgtgtggcccgcacgcgattacacgcgcgtcacgatcgaatccgaccagccgctgcagaatagccaacaactgctgcagggtcccgaccgtctcgtcgtcgacctgagcggcctcgacctcgaccaggcgctgcgcgacctcgtctcgaagatcgcgccgaacgatccgcagatccagtcggtgcgcgtcggccagtatcagccgcacgtcgtgcggatggtgttcgacctgaaaggatcggtgaagccgcaggtgttcacgctgccgcccgtcggcacgtacaagtaccggctggtgttcgacctgtatccggccgtcgcgcccgatccgctgtccgacctgatcgcgcagacggaacgcaaggaacaggcgctcaacgacaccgcgcgcgcgcagcagatgcagccgccgtccacgctggcgggccccggcaccccgccgccgggcgcgggcgacaacagcgacgcattcttccagcgtttcgcgcagaacacgccaactacgccgcacacgccgccggcggccggcacgccgtcgacgcccgcgaagccggccgtcaagccgccgcccgtcatcgcgcgccgcgacgacggcgacgacgacggcgacacctacaagttcaccgcgccgaaatccggcaagggcggcaccgtgcgtctgctgacggtcgcgatcgacccgggccacggcggcgaggatccgggcgcgatcggcggcaacggcacgtacgagaagcacatcgcgctcgacatcgcgaagaagctgcgcgcgaagatcgacgccgcgccgaacatgcgcgcgatgatgacgcgcgacgccgacttcttcgtgccgctgaacgtgcgcgtgcagaaggcgcgccgcgtcggcgcggatctcttcgtgtcgatccacgcggatgcgttcacgacgccgtccgcgcgcggctcgtcggtgttcgcgctgtccgaccacggcgcgacgagcgccgcggcgcgctggatggcgaacaaggagaattcgtcggacctgatcggcggcatcaacatcaagacggcggacgcggcggtgaaccgcgcgctgttcgacatgtcgacgaccgcgcagatccgcgactcgctgcgctacggcaactacgtgctgaaggaagtgggcggcatcaacaagctgcacaagggctcggtcgagcaggccgggttcgcggtgctgaaggcgcccgacattccgtcgatcctcgtcgagaccgcattcatcagcaacccggacgaagagcgccggctcaacgacgacagctatcgcgacgagatggcc

SEQ ID NO: 11777 - DNA, 720 bp, Burkholderia cepacia
atgccggtcagaccggccatcgttcacatcatgaaaaatgttccgcataccgtgaccgacgccgccatcgcgacgatccgcgaccggatcgaggcaggcgtgtatccggtcggcagcctgctgccggcccagcgccagctctccgaggagctggagatcagccgcgcgtcgctgcgcgaggcgctgtcgacgctcgaggcgctcgggatgctgcgcatccgcgcgggcaagggcgtgtacgtcgaaagcgcgcaggcgtcggccgcgcatccgtggcaattcgccgagcagtcgtcgccgcccgatacctaccagatgcgctatgcgctcgaagggttcgccgcgcgaatggccgcgcacgtggtcagcgatgccgacatcgcgtggttcgaggacaacctcgccgacctgcacgtcgcgctgaccgaaagcgcgctcgacgaggcgtcgcggctcgatttcgacttccacatgcggatcatccatctggccggcaacgcggcgatcgagtccatcctgcgcagcagcgcggacatcatgaaggaaagccagcgcatgccgttctaccggcgcgagctgctgctgtcgacgtggcacgagcaccgcgcgatcgtcgacgcgctgatcgcgcgcgatgcggcggccgccggcaccgcgatcgaaacgcacatcgcgaacgccgcgcagcgcgcgggcatcttcttcccgacgcccggcgcg

SEQ ID NO: 11778 - DNA, 270 bp, Burkholderia cepacia
atgaacaaatcggacctgatcaatcacgtggcggcagaaacgggcatgacgaaaaccgactccggctttgcgctggaagccgttctcgaaggcatcacgaagtcgctgcgcaagggcgacacggtgacgctgacgggattcggcgtattcagcgtgggcgcgcgggccgcccgtaccggacggaatcccgccaccggcgaagaaatcaagattccagcgtcgaaagccccgaagttcaaggccggcaaggggctgaaggacgccgtcaag

SEQ ID NO: 11779 - DNA, 1746 bp, Burkholderia cepacia
atgagtctcatcgaagtcaaggttccggatatcggcgatttcagcggcgtcgatgtcatcgaagtcaacgtgaaacccggcgacgtgatcgaaaaagagcaaacgctcatcacgctcgaatccgataaagcctccatggaagtgcccagcgacgtcgccggcaccgtcaaggaagtcaaggtcaaagccggcgagaaagtctcgcaaggcaccgtcatcgccatcgtcgaagcatcggcaggcgcagccgcgcccgcacccgcgaaagcacccgaagcgccgaaggccgcagcagctgcaccggccccggccgccgcgccggcacccgcgccgcaagccggcagctacagcggcgcggccgacatcgagtgcgacatgctcgtgctcggcgccggccccggcggttactcggccgcgttccgcgcggccgacctcggcatgaagaccgtgctcgtcgaacgctactcgacgctcggcggcgtgtgcctgaacgtcggttgcatcccgtcgaaggcactgctgcatacgtcgctcgtcgtcgaggaagccgcggcgctcgcgtcgcacggcatcacgttcggcaagccgcaagtcgatctcgacaagctgcgcgacttcaagggcggcgtcgtcaagaagctgacgacgggcctcgccggcatggcgaaggcacgcaaggtcgaagtggtgaccggcgtcggcgcgttcgtcgatccgttccacatggaagtgcagggcgaaaacggcaagaaggtcgtcaagttcaagcaggcgatcatcgccgcgggctcgcaggccgtgaagctgccgttcatgccggaagacccgcgcgtcgtcgattcgacgggcgcgctcgaactgcgccagctgcccaagcgcatgctcgtgatcggcggcggcatcatcggcctcgaaatggccacggtgtactcgacgctcggcgccgagatcgacgtcgtcgaaatgatggacggcctgatgatgggcgccgaccgcgatctcgtgaaggtctgggaaaagtacaacgcgaagcgcttcggcaacgtgatgctgaagaccaagacggtcggcgcggaagcgaaggaagacggcatctacgtgaagttcgagggcgagaaggcgccggcggaagcgcagcgctacgacctcgtgctcgtcgcggtgggccgcagcccgaacggcaagaagatcggtgccgacaaggccggcgtcgcggtcacggatcgcggcttcatcgaggtcgacaagcagatgcgcacgaacgtgccgcacatcttcgcgatcggcgatatcgtcggccagccgatgctcgcgcacaaggccgtgcacgaaggccacgttgccgcggaagccgcgcacggcgagaaggcgtacttcgacgcgctgcagattccgtcggtggcctacaccgatccggaagtggcgtgggccggcaagacggaagaccagtgcaaggccgaaggcatcaagtacggcaaggccgtgttcccgtgggccgcttcgggccgtgcgatcgcgaacggccgcgacgaaggcttcacgaaactgatcttcgacgaggaaacccatcgcgtgatcggcggcgcgatcgtcggcctgaacgcgggcgacctgatcagcgaagtgtgcctcgcggtcgagatgggcgcggacgcggaagacatcggcaagacgatccatccgcacccgacgctcggcgaatctgtcggcatggccgccgagctgtacgaaggcgtctgtacggac

SEQ ID NO: 11780 - DNA, 736 bp, Burkholderia cepacia
atgacggtgtatttcatcggcgcgggccccggcgacccggagctgatcacggtgaagggccagcgcctcgtgcgcacgtgcccagtgatcctgtacgcgggctcgctcgtgccggctgccgtgctcgacggtcatcgcgcggagcaggtcgtcaacacggccgagctcgacctcgacgcgatcgtcgcgctgctcgccgccgcgcacgcgaacgggcaggacgtcgcgcgcgtgcattcgggcgacccgtcgctgtacggcgcgatcggcgagcagatccgccgcctgaaagcgctcgggattccgtacgaaatcgtgccgggcgtgacggccacggccgcgtgcgcggcgacgctcggcgtcgagctgacgctgcccggcgtcgcacagacggtaatcctcacgcgctccgcgggcaagacgacgctgccggaaggcgaggcgctcggcgggctggccgcgcaccgcgcgacgctcgcgatccatctcggcgtgcgccacctcgcgcgcatcgtcgacgaagtgctgccgcattacggcgccgattgcccggtggcggtgatctatcgcgcgagctggcccgacgaggagcgcgtgacgggcacgctggccgacatcgtcggcaaggtgcagggcacgcagatcgagcgcaccgcgctgatcctgatcgggcgcgtgctcgacgccgaagggttcgcggattcgacgctgtacgcgagcgcaggctgaacacgcc

SEQ ID NO: 11781 - DNA, 792 bp, Burkholderia cepacia
atgaaccaggttaccgagagcgcggtgcagttcgacgtcatcacgctctttcccgagatgttccgcgcactgaccgactggggaatcaccagccgggccgtcaagcaggggcgcttcgggctgcgcacctggaacccgcgtgatttcacgacggacaactaccgcacggtcgacgatcgtccgtacggcggcggtccgggcatggtgatgctggcgaggccgctcgaagccgcgatcgatgccgcgaaagcggcacaggcggagcagggcatcgcgagcacgcgcgtcgtgatgatgtcgccgcaaggcgcgccgctcacgcatgatcgcgcggtgcggatggcgcaggaacccggcgtcgtcgtgctgtgcggtcgttacgaagcgatcgatcagcgcctgctcgaccgttgcgtcgacgaggaaatcagcctcggcgatttcgtgctgtcgggcggcgagctgccggcgatggcgatgatggatgcagtcgtgcggttgctgcccggtgtgctgaacgattcgctgtcggccgtgcaggacagcttcgccgatggtctgctcgattgtccgcactacacgcgtcccgaggaatacgacggcgtgcgcgtgccggacgtgttgctcggcgggcatcatgccgagatcgagaagtggcggcgtcaggaagcattgaggaatacgttgcggaagcggccggacctgatcgtccgggcgcgccgcgaaaagttgttgagccgggccgacgaggcgtggcttgcgaacctcgcacgcgaagcgaaggacgcctcc

SEQ ID NO: 11782 - DNA, 747 bp, Burkholderia cepacia
atgccggccactgcgccggccatccgtcttcctaccgaacgaggccatccgatgtccgcctatgtcatcgacgccgccgagcgtccttccgtcgaagtcgaccagtcgtccgcgcgctttccggtgcgccgcgtcttctgcgtcggccgcaactacgccgaccacgcccgcgaaatgggcgccgaccccgaccgcgaaccgccgttcttcttcaccaagcccgccgacgcgatcgttccggccagcggcacggtcgcctatccgccgctgacgaacgatctccatcatgaaatcgagctggtcgtcgcgatcggcaaggacggccggtcgatcgacccggccgacgcgctgtcgcacgtgtggggctacggcgtcggcgtcgatctgacgcgccgcgacctgcaggccgaagcgaagaagctgagccggccgtgggactgggcgaaggggttcgacgcgtcgggccccgtaaccgcgctgcgcgcggcgacggccaccggccatccggccgccggccgcatctggctcgcggtcaacggcgacacgcgccagcaaggcgacctggccgacatgatctggcccgtgcccgacgtgatcgcgtacgtgtcgcgctcggtcgagctgaaggccggcgacctgatcttcaccggcacgccggccggcgtcggcgcgctgcagccgggcgatcgcgtgacgggcggcgtcgacggcatcgcgacgttcgaattcgtggtcggcgcgaagccg

SEQ ID NO: 11783 - DNA, 957 bp, Burkholderia cepacia
tacgcgagcaacgcgaaggtcgacgcgttcatcgacgagatggtgagtcgcaacggcttcgattcggcgagcctgcatgcgctgttctcgcgcgtcagctactcggcgacggccgtcaagctcgtgaggccggccccgtcgccgacggtcaagaactggcgcgtgtatcgctcgcgcttcatcgagccgatccgcatcaacgcgggcgtgaagttctggaaggcgaaccaggcgacgctgcagcgcgcatccgagcagttcggcgtgccgcccgaggtgatcgtcggcatcatcggcgtcgagaccatctacggccgctacatgggcaatttccgcgtgctcgacgcgctgacgacgctcacgttcgactacccggacacgccgaatcgcgacagccgccaggcaaccttccgcaagaacctcgaagacttcctggtctggacccgcgacaaccagctcgacccgaccaccgtgctcggctcgtacaccggcgcgatcgggattccgcagttcctgccgagcagcatccgcgaatatgcggtcgacttcgacggcacgggccatgtcgatctgcgcagcagtcctgtcgatgcgatcggcagtgtcgcgaactacctgaagcagcacggctgggaaaccgaccgcccggtggtctggcagatcacgcccgacacgggcagcctgggcatcgcacaggccgccgccgacggccagcccgaaccgcactgggcgctgtcgcaactgctgcgcgcgggcatgacgctgaacgagccgacggtcaacatcacgaccgaagccggcacgccggtgaccgtggtcgacctgccgacgccggggcgcgcgaccgaatacatgctcggcctgaagaacttctatgtgctgacgcgctacaaccgcagcttcttctacgcgctcaccgtgtaccagctcggcgaggccgtgaaagcgcagatggaa

SEQ ID NO: 11784 - DNA, 774 bp, Burkholderia cepacia
atgaacgcgcttccgaaccgccagccggccggcacgacgagctcgctcgtcgtgcgcaacctgaagaagcgctacggctcacgcacggtcgtcaaggacgtgtcgctcgacgtgaagagcggcgaagtcgtcggcctgctcggcccgaacggcgccggcaagaccacgtcgttctacatgatcgtcggcctcgtgccgacggacgcgggcgaaatcacgctgaacggcagctcgatcagcctgctgccgatccacaagcgcgcgtcgctcggcctgtcgtacctgccgcaggaagcgtcggtgttccgcaagctgaccgtcgaggaaaacatccgcgcggtgctcgagctgcagcacgacgaggacggcaagcggctgtcgaaggacgcgatctcgtcgcgtaccgaagcgctgctcgacgagctgcagatcggccacctgcgcgagaaccccgcgctgtcgctgtcgggcggcgaacggcgccgcgtcgagatcgcgcgcgcgctcgcgaccaacccgagcttcatcctgctcgacgaaccgttcgccggcgtcgatccgatcgcggtgctcgagatccagaagatcgtcaagttcctgaaacagcgcaacatcggcgtgctgatcacggaccacaacgtccgcgaaacgctcggcatctgcgaccacgcgtacatcatcagcgacggttcggtgctggccgccggcgcgccgagcgaaatcatcgaaaacgaaagcgtgcgccgcgtgtacctcggcgaacacttccgcatg

SEQ ID NO: 11785 - DNA, 717 bp, Burkholderia cepacia
atgggaagctatctgatacgcgtggtactggccgacgaccacccggcgatgctcgtcggtgtcgagcacggcctgtcgtcggtgccgacgatccagttgaccggcaaggccgtcaattcgaccgagctgatccgcctcgtcgaggctggcgtgtgcgacgtcgtggtgtccgactatgcgatgccgggcagcgcgcacggcgacggcatcacgctgttctcctatctccagcgcaatcatccggccgtgaagctggtcgtgctgaccatgctcgacaacccggccgtgatcggcgcgctgacgcggctcggcatcgagtgcatcgtcagcaagtccgacacgatcgatcacctgattcccgcgattcacgcggccgcgacgggcggctcgtatttctcgccgtcggtcgagaaggtcgtgcgcacgctcacgtcgcattcgagcgcgcgggccgccgatcagaagcgcgagctcagcgaccgcgaactcgaagtcgtgcggctctatgcgtcgggcctcacggtcaacgagatcgccgaccagctcagccgcagcaagaagacgatcagcacgcagaaagcgcgcgcgatggaaaagctcgggatcgagaaggacatcgacctgctgcgctatgcgatcgagcacggaatcgtcgccgcatcggccagcgaagggcggggcggcgatgccaatgaggaaggcagagtcgatccggcc
